United States Patent Application Publication US 2007/0072175 A1 - sequence listing, part 5

SEQ ID NO: 11828 - DNA, 703 bp, Macaca Fascicularis
  misc_feature (1)...(703): n = A,T,C or G
gcacgccccgccaggaccacggcgtgatcgtgagtggacccagcaaggactccgatctggccagtggacacggtccctannnnnnnnnccttggccccaaccccacggtgcaacgggattggcgcctccagactctcaatggttcccnnnnnnnnnnnnnnnnnnnnnnnnnnnnnnnnnnnnnnnnnnnnnnnnnnnnnnnnnnngtggtcagccacaatgcccagatgtggcagctcctggttagagtgannnnntgtggctgcaatgtggaggggcagtgcatgcgcaaggtgggccgcatgaagggcatgcccacgaagctgtcggcagtgnnnnnnnnnnnnnnnnnnntggtagcaataggaatcttcctcatcctcatcttcacccactggaccctgtcaaggaagaaggacctgaatcaaccagcagnnnnnnnnnnnnnnnnnnnnnnnnnnnnaatggcccaggcagctctagctgggagcttggcctctggctccatccgagtcccccgggagagagcccagcacccaagatccagcagggaacaggacagagtagaagcccctccatctgccctggggtggaggcaccatcaccatcaccaggcacgtctccagagcctggacaccgactttatggactgtccatgggagtgctccaaatggcaggatgtttgcccnnnnataaagcccca

SEQ ID NO: 11829 - DNA, 685 bp, Macaca Fascicularis
  misc_feature (1)...(685): n = A,T,C or G
ctgaatagactcataatatatgctcatatcagatgtcagttttcatttaacttgattcatttttggctcaggtccttgggaatccattactaatacctaacaggaaatagcgaaacacaacataccttatctgttagtcaccttcttaaaactgtttttactgcttttgaagtgtcttatttataagatcagaggtctacagtgacagccttttgcttattcagacagctctctcctatcatccacatcttctctagatttattccatctatcctcatccttttggcctttgttatttctgctcagactcacatattttcaccatatacatattttcagttgtttctttccttttctcctttgtgagcaaagcaaacaagtactgtccaaggacaaccttgtgcatatttcatttgttgcattnnnnnnnnnnnnnnnnnnnnnnnnnnnnnnnnnnacagtttgcttctgctactgtaaaggcagcctttaaagcatagtaatatgcacctttcaactttatatcattgtcctgaacaatgtaactgtggttactcatccatcagactatctgtacatttaagtaccgaatcagtatttattaagtaaatgttgtagcactgtagtgattaggaataattagcaaatgtgttgcttcatgccttggtaatggatgccaacatgt

SEQ ID NO: 11830 - DNA, 1173 bp, Macaca Fascicularis
  misc_feature (1)...(1173): n = A,T,C or G
tagggcactnnnncgggtgggccaggccctcatgggaagtgactgcnnnncagatgcagtgggccccaggcagaggaaggctgggagaaggagagccagatccttctcaccccactgccccttcccctttcctggggagcaccgcaggctcctccccaccacttcctgtgaggctgtggcttatggtatccaacacagttggtcttaggcatagaagccccagaggaacacagccaccgccatcatgagcagggcattgaggttgaccacacgggcccagctcgggtcctcactgatgtcctccagccgcctggttgctgccactgcctcctcctgggtaaggggcggaggactgcccaccccacccctgctcattccacaaaaccagannnnnnnnnnnnnnnnnnnnnnnnnnnnnnnnnnnnngggctctgggcaggaaattgaggccctgcagttagtttgcgggaactcagctcccccagccccacctgccggcatggtgccctactctgggcacccattctgtacagggagtgaggagccttcctgctcatcagcatccaggtcctcccgttcttccttgctgtgccggagactgaagaccaggcggtggaggtgcttgcgggggatgggcgcggtgcacagggagaccaggagggtgaggaggccggagcagaggaacagcacgatggcgaagtaaaggtagtgcacgccgcagaggaaagctgggcacgctgagggctgcacacagctgcccgagcccnnagagactcgnnnnnnnnngcgtgccaggcccatcaggaggcccccgatgagtccccagaagnnnnnnnnnnnnnnnnngcgcggcacgaagagggccagcacgaagacggcggacacaggcggtgccaggtagctggagannnnnnnnnnnnnnnnnnnnnnnnnnnnnnnnnnnnnnnnnnnnnnnnnnnggaagccaggccaccgacactaccacgatgaacaccacccagagccgtcccaccagcagcagctcgcggtcgccggcgctgggccgcaggcgcgtgtagatgtccatggtgaagagtgtgctgctgctgttgaagatggaggccagcgaggacatgagcgcggccagcatgaccgccagcatgagtccgcgcnnnccgttgggcatgagcttca

SEQ ID NO: 11831 - DNA, 735 bp, Macaca Fascicularis
  misc_feature (1)...(735): n = A,T,C or G
gcatnnnannncannnnngagtnnnnngtcataagctccttcacagctttcattgctatcaataaggagctcaacaagccagttcaggggnnnctggctcatagnnnnnnnnnnnnnnnnnnnctgttgggtgcttctaccccattgaagataagatgccgatcaggactaggcaagctaaaagcttgtagttacagctatgacaagacatggatgtctctcgaaaagttgccctgtctgttggaaaggactcattcctccacccacagaaccaacttggaaacttaccatgcaggctnnnnnnnnnnnnnnnnnnnnnnnnnnnnnnnnnnnnnnnnnnnnnnnnnnnnnnnnnatctgaatgaagannnnnnnnnnnncctaggtgtgagtttggaagaaataacggctgcacaccctgctgagcttgtggattcctcaggctgggccaccatcctggctgtgatnnnnnnnnnnnnnnnnggtaaggacttgaagtgtgaatgggagcttctggaaaggaaggccatggcctggatgcgtgtccnnnnnnnnnnnnnnnnnnnnnnggttgtgaaagctgctattactttcctgaagtcatctgtggatcctgctatctttgccttttgaagataccatccagaaaaagaagtgcctttaatttgctactgtcatttcctctattatcacttcttctgtgataatgtgttcttgtgttttataactctttat

SEQ ID NO: 11832 - DNA, 742 bp, Macaca Fascicularis
  misc_feature (1)...(742): n = A,T,C or G
ggaaagtgaactactcaaaatagtcacgaaaatactgaaagtttgatttttctctccatatttgaattaattnnntctgtttgactggaaggggtttttgtataactaaaacctcagtgcataaaggagatttaaaaggagcacatgatttagtgggtgggccacgaaactagagatgggatttgggggtaaatttgtcagtatctggattttaatccagacatctctgctaacaagcctttggtaagtcacttcacatacttttcctcctttttacaaagagagggctggcttagttatttgctaaagccccttccaggcctgaattccacaagtacgatttactgtagtgtcttatcactccttcatgtcacgatagtgtggagcattagagaaaagcctagacttttagttgatagagagccagttgaaatatcattgatagaattttagttttaggaaaaattggtttgatttctagctttattactattaggtatgtgagcttgggcaaatcgcttaatctttgagtctagttttctctcaaaatgagaacatnnnnnnnnnnnnnnnnnnnnnnnnnnnnnnnnnnnnnnnnnnnnnnnnnnnnnnnnnnnnnnnnnnnnnnnnnnnnnnnnnnnngggaatatgactaacccttttgaagctactaattttgtgtcgagctttaaagtccataattgttatcttcagaaaatattattgacctacagtatgtcca

SEQ ID NO: 11833 - DNA, 598 bp, Macaca Fascicularis
ggggcatcagcagcttttaaagatctccagacagttccaacaaacaggcatcatggtgtgggaaatactgtcagagaggcagtgaaaagcatttcaaggcagggtgtgaaataaaacagacatggataggagcacagataggcgtgagtaatagtaggtctcaggtgcttcatttaatttcaccaaagcccttggagacaggtgagaggatattcaccttacacgtgagggaaatgaggcacggaggggtttaggcatgcctggagatctgtgtgcttggcccagagccacgagcaggccgacggtgctgcccattgcgtgggctagggttgcctggcctctgctgccctggggtccaaggacacattttcactgttcagaggaaggagttagatgtgctccagggtatatagggcagaccgcacacaagccagcaagtttattaatatccactgtgattctgcaatcattaagaatgaagactttgaagaattttaatgacacgaagaaatgttcgtgatgggcatgatagagaattaaacaaaacaagcaagatacaaaaccatacacatcatgataccaactatgtgtgtgtgtg

SEQ ID NO: 11834 - DNA, 732 bp, Macaca Fascicularis
  misc_feature (1)...(732): n = A,T,C or G
gcagaaaaagaaatgcacaatctgcaagaaatgcagacagctggattncttgtccaacagttgtactactgaagaaacacattttagttatgtcttttattggccatgatcaagttccagcccctaaattaaaagaagtaaagctcaatagtgaagaaatgaaagaagcctactatcaaactcttcatttgatgcggcagttatatcatgaatgtaggctnnnnnnnnnnnnnnnnnnnnagtannnnnnnnnnnnnnnnnnnnnnnnnnnnnngttgatcgatgtcagtcagtcagtagaacctacccatcctcatggcctggagttcttgttccgggactgcaggaatgtcnnnnnnnnnnnnnnnnnnnnnnnnnnnnnnnaagcccttagtgaacgagaactcttcaatnnnnnnnnnnnnnnnnnnnnnnnnnnnnnnnatgaagctgattttttagctgagatagaagctttggagaaaatgaatgaagannnnnnnnnnnnnnnnnnnnnnnnnnnnnnnnnnnntttgaaagatgatggagacccaccagtgctatattatgaatagcactgatacccactgctnnnnnnnnnnnnnnnnnnnnnnnnnnnnntgccaatagcaaatgaagttgtgggcgactcgaaataccagaacacggggagtgggcaatggtgcttctctgcttccccccttgtaacnnnnnnnnnnnnnnnnnnnatct

SEQ ID NO: 11835 - DNA, 730 bp, Macaca Fascicularis
  misc_feature (1)...(730): n = A,T,C or G
gnnnnnnnnnnnnnnnnnngccgatgccaatcnnnnnnnnncagagctctctgctccnnnnnnnnnnnnnnnnctccgggtatcagtcaccagacatgaaggcctggcagcaaggagcaataggaaacaatgtgttcagtcaagctgtccagaaccagcccacacctgcacagccaggagtatacaacaacatgagcatcaccgtttccatggcaggtggaaatacgaatgttcagaacatgnnnnnnnnnnnnnnnnnnatgcagatgagctctttgcnnnnnnnnnnnnnnnnnnctgtgtgccctgagcagataaacgatcccgcactgagacacacaggcctctactgcaaccagctctcatctactgaccttctcaaaacagaagcagatggaacccaggacaagaagacagaagagttcttctctgtggtgactacagactagaggannnnnnnnnnnnnnnnnnnnnnnnnnnnnnnnnnnnnngtccagtgtacagtgaatctggtaggcggggacccttacctgaaccagcctggtccactgggaactcaaaagcccacgtcaggaccacagaccccccaggcccagcagaagnnnnnnnnnnnnnnnnnnnngactgaataaccacttttaaaggaatgtgaaatttaaataatagacatacagagatatacaaatatattatatatttttctgagatttttgatatctcaatctgcagc

SEQ ID NO: 11836 - DNA, 826 bp, Macaca Fascicularis
  misc_feature (1)...(826): n = A,T,C or G
ccttttttttttttttttttttttttttttgccagaaacaagtttatttacacaaggacacacagtnnnnnnnnnnnnnnnaaactgaaatccatatccagggagacaaagcaaggagtgggtttacatgagaaccagaccagccacagggagagtgtgtgtaaggggctgggagcctggggctcagcacagagaggcctagtacactggacctagccccatccccatcccccgggaggatctaaaacacacaagcacaaaatgaaatgatggtgctggggctcctgcccctcccctggcatccctcaatcctgcttatgcccccaataggataataaatatgtaaacagattggtggggccctggggatagaaggagagaaagtatatgtggtactggggagaaggaaggaaggaagagtcagccccctaggagccacttcccatctttggtttcctacaggctggatggcattccctggaagccttataggcnnnnnnnnnnnnnnnnnnntcctgggaaagagaagggacagcacccagccccctcctggtcttagctcccttgnnnnnnnnnnnnnnnnagggagcccaggaggtatggaagctccagctgagagctgactcctggatccctgggttctggccttacgccttctagaacctccattctcaccatccccaggctccaaagcaaaaaggccccaggnnngaggtgagcccctgccccttctccccgcagcatgctggatggctgnnnnnntctggnnnnnnnnnnnnnnnnnnnnnnnnnnnnnnnnnnnnnnnnnnnnnnnnnnacttctccc

SEQ ID NO: 11837 - DNA, 662 bp, Macaca Fascicularis
gaggagacatttaagcaaactactatagccaactcaaaagctaaaactgaactaatttgatgttatgcaaacatcttgcatttttagtagttgatattaagttgatgacttgtttcccttcaaggaaacattaaattgtatggactcagctagctgttctatgaaattgtgaattagaaacatttttaaaagtttttgaaagaggtaaatgcgtcatgaattacatgtaaatgagaggagatagtgttatcagcataatgattttgaggtcagtacctgaactgtgtaaaaatatattatgcaaactaaaacgtagataaattaaactctcaaagcacagaatgtgcaagaacttttgcattttaatcattgtaaactaacagcttaaactattgattctatacctctaaagaattgctgctactttgtgcaagaattttgaaggtcaaattaggcaaatttcagatagtaaaacaatccctgagccttaagtcttttttaatttttcctaaaaatgcccatagaataaaattctctctagtttacttgcgtgtgcatacatctcatccacgggggaagataaggatggtcacacaaacagtttccataaagatgtacatattcattattataattctgacctttgggctttcttttctacc

SEQ ID NO: 11838 - DNA, 739 bp, Macaca Fascicularis
  misc_feature (1)...(739): n = A,T,C or G
tttacaaagcatgtgaattttggcattagctctcataggagacccatgtgcttcctcgctcagtgcaaaactgatgannnnnnnnnnnnnnnnnnnnnnnnnnnnnnnnnnnngnnnnnnnnnnnnnnnnnnnnnnnnnnnngtgaagcctccaaccctaagcgcctgggactgtagccagagatgccagcagcctttgtcgcccttaatcatataaccaaaatccagaccttatccacaacccggggcttggaagggtaggtattttggaatcataccctcaggttatgttgctccagtagaatctnnnnnnnnnnnnnnnnnnnnnnttcttagcatggtgagctgagttcatggctttttttttgtagccagtcctgtccctggccatccgtgtgatggttttgggtggnnnnnnnnnnnnnnnnngtgggcagtgcatgtggaaagtatcagagtaagcctttcccctccagagccccgagtttcctggctgcatgaaggttttctgtagaatcagaattgtagccagtttctttggccagaaggatgaattggatgttactgaaagggaggggtggagatgggtgtggcagtgtatggtgtgtgattttcattttcttctttggtcatgggggccaaagagaaaggcatgagtctcccctgtcaggctcttacagccacaggcactgtatctactatctggaagacatgtccccgtggttgtggggctgctgct

SEQ ID NO: 11839 - DNA, 741 bp, Macaca Fascicularis
  misc_feature (1)...(741): n = A,T,C or G
gagaaagcagcaatgctaaacctctgcttcatgctaaccagacacgccgtgcactcgttagattcctttcttagaaaactcgttttctgctccctcccctcgtcccttccctccccgacaggtcacataacagctgcatcattgactgcacagcgccatctctccctgagaataaagccgatagccaccctcctccggctccgagcctgcttccgccacacctcgctctcagctctctccacatttccatagagaccatgtggtttttgttcacccgggccccctgtcttcctccccgtccccccatttataggcataaaatccactgtctgccagcctcccttccctcccacctttttgttacattggtgtaaaaaatgtaaaacaaaaaaattttatgaactaatttgtggtgtgtgaaagagagaagaaaaactggaaatcttattccgtgtgtgtttgggagttgcttggggttgggggtcgtggggacaggggacagctctgggagcagaggtggccctcggtgccgtcctgcggagactcgcccgtcccacggaggccgcggggtgggggctggggggggccgccgacagttnnnnnnnnnnnnnnnnnnnnnnnnnnnnnnnatttctatggaatgcaaaaggaggtttttgttttattttgtttttttgtaaagcttaagaaaaaaaatctacatcttatacttgagcctccatacttaaaaaaaaaaaaaca

SEQ ID NO: 11840 - DNA, 708 bp, Macaca Fascicularis
  misc_feature (1)...(708): n = A,T,C or G
tggggatagtggtacggcctacctcatagggttgtaatgagcactaaatgtgaagtgtttggcacagtacctggnnnnnnnnnnnnnnnnnncactgtgagtttctgttttccctttttttttttttaaagcccaaaaaggggccacaacgttgtttattctttgaggatttgttgcaacttcttcaggataacgcctgagtccacaggctgagtagctgtggcccagacagaactgctctggctnnnnnnntgcagcaggtggggcgctggccccggtgaggacacagcagcaagggtcacggttatccctgttcttgtctgtggtcaccaggcacaggtttgacttccggtcatgtgtcccgacattgtgtgggaggtgacgacagagcaaagcagcacaggggtcagggaggtagagacactgctgaaatcacactacccttagctgaagccccacgttccacaaacttggggggtcatagatgtccagtcactggctccctcccagtcagcacagcacagaggaaggggctagctgagtcttttactacttctggcctggctccaggactttgttctagattccttnnnnnnnnnnnnnnnnnnnnnnnnnnnnnnnnnnnnnnnntttgatcccttggtctgggggttgnnnnnnnnnnnnnnnnnnnnnnncgggaaaatgtactatttaagatcagctttg

SEQ ID NO: 11841 - DNA, 790 bp, Macaca Fascicularis
  misc_feature (1)...(790): n = A,T,C or G
atatatgcaaatattnnnnnnnnnnnnnnnnacaggngcnncagtacaaccagctgatgtcncaactgtggggaccaaaagggagagagcctggggtctacaaaaggagacacatcatcaaatgtttgaatgatcacaaattaagacattatcagcccagtaaatttcttgcttaatgtttttccaagttctggcttgaatatttcttattaaagttatcttatgtgggtattttattttgaaaggtattatagtttgtatatttaacagtaaggaggaaactgtaaccaaaattagtatttctctatacatattggtacttgaagattcctttcaaaagaaatccagccttttcctaattttagttcttaatttctctttttaatttaagtgatctttctaattcgaaagctgtgttctttttgaatnnnntgcatgggggtnnngctgatgttaaaacagtttgcaataaaaaaagaatcagcttaagttatttaatcatttcaagtgcattctgcatcctttaaaaataagtttaagaaatttaagagaattgtgttttcattaagttttgcatatcttttgttatgccatgtaaattccctttttcgtatgattaaaggaaggttatgataaaatgattagttcatttacattcacttgtagcaattacatgagaatttgaattttgtcgtgtttgggtttgttcattcctgtgaatgatggtacagttaggtgagattttctgttatggtacccaaactcaccatttggtcctctttaatcttga

SEQ ID NO: 11842 - DNA, 716 bp, Macaca Fascicularis
  misc_feature (1)...(716): n = A,T,C or G
tgcctacataatatagcctccataaacattgacaaatgacaatattctgttgaatggttgtaccatacttaaccacaccctttcaatttgacatttgtgtttctaatattttctatttttattcccctacccccatnnnnnnnnnnnnnnnnnnnnnnnnnnnnnnnnnnnnnnnnnnnnnnnnnacgggcacttgatacacaatgccaaattattcttcataannnnnnnnnnnnnnnnnnnnnnnnnnnnnnnttaattgtattcttgccaccatgtttactggggtggtagttgttattgtggttgttattctttaggggtgggttcccaatatgtggtctttaaataattatctaataatgggtgtttgaaaaaaaatgtttgttctgtttgtcaggtacaaagatatttatgatacatgtatatgacttgtcaaagttaacattttctctagccttaggtaatgcatgaaagcacatgtttcagtgccactcacataagaagtgcccagtaagtgttagctattgttgtctatttgagttactactttctagaagtctgttgaagtctttttctgtaattgtggatttgtctattttgcatttgagtattttctatattttgaagctgttagatgcgtattcatgatttttagtggaatgttttatcaatttttgaaaattgcctttgtctctatataatgctctttcata

SEQ ID NO: 11843 - DNA, 753 bp, Macaca Fascicularis
  misc_feature (1)...(753): n = A,T,C or G
aacagaatgnnaatatggatgttcttgtatattaaaatttttccgctcttaatgaaaaattactgtttaattgacatactcaggataacagagaatggtggtattcagtggtccaggattctgtaatgctttacacaggcagttttgaaatgaaaatcaatttacctttttcttatgatggagttggttttgatactcatttttttctttatcacatggctgctacgggcacaagtgactatgctgaagaacacagttaagtgttgtgcaaactggacatagcaacatatactacttcaaagttcatgatgtagatgtctggtttctgcttacgtcttttaaactttctaattcaattccatttttcaattgataggtgaaattttattcatgctttgatagaaattatgtcaatgaaatgattctttttatttgtagcctacttatttgtgtttttcatatatctgaaatatgctaattatgttttctgtctgatatggaaaagaaaagctgtgtcttggccnnnnnnnnnnnnnnnnnnnnnnnnnnnnnnnnnnnnnnnnnnnnnnnnnnnnnnnnncacgaggtcagnnnnnnnnnnnnnnnnnnnnnnnnnnnnnnnnnnnnnnnnnnnnnnnnnnnnnnnnnnnnnnnnnnnnnnnnnnnnnnnnnnnnnnnnnnnnnnnnnnnnnnnnnnnnnnnnnnnnnnnnnnnnnnnnnnnnnnnnnnnnnnnnnnnnnnnnnnnnnnnntg

SEQ ID NO: 11844 - DNA, 759 bp, Macaca Fascicularis
  misc_feature (1)...(759): n = A,T,C or G
ggggttcatgccgctgtccacccaagtccgcttcactgtcgatcgcccctttcttttcctcatctatgagcaccgcaccagctgtctgctcttcatgggaagagtggccaaccccagcaggtcctagaagtggaggtctgggtgtctgaagtgtcttgggggcaccctcattttgtttccattccaacaatgannnnnnnnnnnnnnnggcatcacttttgtagtttacgctactaatctgaattcgaggcccatatgagaggaacttagaaacgaccaagaagagaggcttgttggaatcaattctgcacaatagcccatgctataagctcacagaagtcactgtaactgtggtgtgtctgctgttacctagagggtctcacatccccccttcagcaaacctgagcagtgcgtcctaagcacctcctgctccagtgaccccatccttgcacacctggctgtgtcactcaagcctttcttcaacaagcccctcatctgaacatcaagcacagaaatgagtggtgtgactaattccttacctctcccaaggagggtatacaactagcaccattcttgatgtccagggaagaagccacctcaagacatacgaggggtgccctgggctaatgttagggcttaattttctcaaagcctgacctttcaannnnnnnnnnnnnnnnnnnnnnnnnnnnnnnnnttgcctnnnntgtgacctggaggnnntgtgtgtgccatgtctcccatactagagataaataa

SEQ ID NO: 11845 - DNA, 702 bp, Macaca Fascicularis
  misc_feature (1)...(702): n = A,T,C or G
ccctaacataccttggagctcgcttacctctggcnactcatctccaaccctggctcccctttgacccttgagcccccatttatctttgaccctcttgagctcttccaaccttgacattcccaggaggagccccgcttcacccttctgactctgggaacnnnnnnnnnnnnnnnngggtcctccttcacccctgacctctgcttcacctttgacccctgccccccatgaatcccattttacctctagacctagaagttctggtttatgtttgacccctccctctgagctgcacttcacctctgaccttgcctcacctttaaccccatcacctgagccccagctcctacctctgacctcaacttctctttgacctctgaatcccctctgaccccaacttctctttcacccccatgagtcccattttacctctacacctgtaagtcctagtttgcactggacccctccctccgagctgcagttcacctttgaacttgcctcaccttccactccccacagccccagctcctacctctgaccccagcttctcctggctcccacaggccccatatgcgtcctccctgcctcactcccctcagcccctgccgaccttagcttatctgggagagaaacaaggcccggttcctgtgaggaggagaggttgcccctgccctcccttcccgcatccctnnnnnnnnnnnnnna

SEQ ID NO: 11846 - DNA, 1211 bp, Macaca Fascicularis
  misc_feature (1)...(1211): n = A,T,C or G
aatgaaataaaagacagaaacaagagggacaccatggtggaggacttggtggtcatggtacgaggaggggcaagnnnnnnnnnnnnnnnnctnnnnnnnnnnnnnnnnnnnnngnnnnnnnnnnnnnnnnnnnnnggagacgctgtgcagtacaacccagccatcatnnnnnnnnnnnnnnnnnntttgtacgaactagtgacagccacagattttgcctnnnnnnnnnnnnnnnnnnnnaatnnnnnnnnnnnnnnngaggagttccagaaggaagttagttcctgccnnnnnnnnnnnnnnnnnnnnnnnnnnnnnnnnnnnntgnnnnnnnnnnnnnnnnnnnnnatctgtcctgttggatcccaaggcctagcctgtgaggtctcctnnnnnnnnnnnnnnnnnnnnnnnnnnnnnnnnaattgctggtcaagttggtcttcatgctctggaggacgtaagacaagacaaaggcagtgtaacaatccacctcctcaaaatgggggcagcccctgctcaggccctgcttcannnnnnnnnnnnnnnnnntagcagataatacagcagtgggctacatacagtgagagctctgagccctcaagtactcaggccagctcacccctacaccagtttccacctggggttcatgtgagggcaaaaggnnnnnnnnnnnnnnnnnnnnnnnataaagatattagcttgtaaaatgccagttgatttaaataaatactgagttaaaggcttaagcatctttgtaatcctcaccttactcactctacaactttatttcactcatattgannnnnnnnnnngaattgtgttggaagttgttcacatttcacttccactttctagctgcgactggcatatagtaggtgcttaataatgaatcgatgaatgaatattgtgtactttccttgatgagtacaaggtcttgttcaataataatagtagttcctgtttattggatgactactatatgtcagccatggattctgtgtattaattccttccgtcctcatgacagtcttataaggtagatgccagaacagnnnnnnnnnnnnnnnnnnnnnnnnnnnnnnnnnnnnnnnnnnnnnnnnacagttagaaagcggcagacctgggttgcaaattcaggctctagaattttaaattcttaactctgatgctctcttacctctcagtaaatgagtatctgataacaaaga

SEQ ID NO: 11847 - DNA, 746 bp, Macaca Fascicularis
  misc_feature (1)...(746): n = A,T,C or G
atgcagttatttgctcttgtcaattttgtgcatgctgnnnnnaaggcnnnnnnnnnnnntagagagaagggaacctttctgatatcagattctgtcttttagattaagannnnnnnnnnnnnnnnngaggaaactgaatgaccaagcaaacaccttggtggacttggcaaagacccagaatatcatgtatgatatgatttctgacttaaacgaaaggagtgaagacttcgagaagaggattgttaccctggaaacaaaattagagactttgattggtagcatccacgccctccctgggctcataagccagaccatcaggcagcagcagagagatttcattgaggctcagatggagagctacgacaagcatgtcacttacaatgctgagcggtcccggtcctcatccaggaggcggcggtcctcttccacagcgccaccaacttcatcagagagtagctagaagagaatnnnnnnnnnnnnnnnnnnnnnnnnnnnnnnnnntatggtcaatattttagcttttattgtaaagcccctatggttctaatcagcgttatccgggttctgatgtcagaatcctgggaacctgaacactaagttttaggccaaaatgagtgaaaactctttttttttctttcagatgcacagggaatgcacctattattgctatatagattgttcctcctgtaatttcactaactttttattcatgcacttcaaacaaactttactactacattatatga

SEQ ID NO: 11848 - DNA, 501 bp, Macaca Fascicularis
  misc_feature (1)...(501): n = A,T,C or G
agatnnnnnnnnnnnnnnnnnnnnnnnnnnnnnnnnnnnnnnnnttgcagctgcagatacctcggattgaggatggtaacaattttcgagtggctgtccaggagaaggtgtttgagctgatgaccagcctccacaccaagctagaaggctttcagccgagcaagcccagaggggcagcgtggcctctccctccccttttcctgccccgtcccatgcctcagcttgctgcttgtgccagttgcctgtttcgcttcagtgtttgattctagcacttacatgtgtcgtccccaccgagccctctatctcctaatcccttaacccctgaccccctccccataacagtgacttctccatggaggaagagggagcaggagctgttggtcttggtttgcacagagcgggtagggctgtggggaaannnncgggtgagctgttgtgctgctgggcctccctttggccctnnnnnttcctgccctatgatgtatgaaatgtatgtacaga

SEQ ID NO: 11849 - DNA, 730 bp, Macaca Fascicularis
  misc_feature (1)...(730): n = A,T,C or G
aatgtgtnnnnnnnnnnnnnnnnnnnnnnnnnnnnnnnnnnnnatgtcattttagtaacagaactgcaggaagatcaagacaatgttataatcccagcaagttgctaactgtgcgtttctcccttnnnnnnnnnnnnnnctccccccaaactggctggcaccagcttcatctgtgatacccatcaagaaatgttctctggttttgttttatgctgaaagtagaacacaagtcacatttcagatggaggctgtaaatatctggcattttcttatattgttttatgtgttcttgtttttctcgtcgtttttatcttattttctttggggtattttgtaatgccttgtacagctcnnnnnnnnnnnnnnncatatctgatcatctttttcatgcagttgccgatattcataactgaaaataatctggtttatcataagtgaaatgggaaacttggctctgtttttttgcaaggagaggtaaagagtgtttatttagtaattacctaccttaaatctttctgagttggtagcagattcgtgttcaaggagcaggaaaaatggaaaaacataagtttaaatcaattcttttaaaatagctatttttattcttttgtataaataaaatttcacaggcttcaaattctcatgctttacttttaaacccaagattgttttttcacttatttattcatatcatgccttatggaaatttctttttctgtattttctgtct

SEQ ID NO: 11850 - DNA, 238 bp, Macaca Fascicularis
ggaaaatgaatccacagctctaccccagccttctactagtcgaaagcggccccatgaaggagaagctgagggtgccgagaccacaaagcgcctggctgtgtgtgctgctgtattgtgaactccgtggtttgaacatgaaagaaatgtaccttctttcattctgtcatctttcttttctttaagtccgttttttataatttgtattgtaattatgggaataattgcttttcacagtcac

SEQ ID NO: 11851 - DNA, 639 bp, Macaca Fascicularis
gattttggagtttcagacgccgatattcaggaactctttgctgaatttggaacgctgaagaaggcggctgtgcactatgatcgctctggccgcagcttaggaacagcagacgtgcactttgagcggaaggcagatgccctgaaggccatgaagcagtacaacggcgtccctctggatggccgccccatgaacattcagcttgtcacatcacagattgatacacagcggagacctgcacagagcgtaaacagaggtggcatgactagaaaccgtggcgctggaggttttggtggcggtggaggcactcggaggggcacccgtggaggcgcccgtggaagaggcagaggtgccggcagaaattcaaagcagcagctttcggcagaggagctggatgcccagctggacgcctataatgcgagaatggacaccagttaaacagaccggcaaatccgcgtgtggaacaggacccaggcgtttcctcttgctccctggtcgggggtgggcggtggctggggctgtgcggccaatgatggatttgtttcttttatgttttaaaataggatttaaaaactcatgtaaaggttttttttttttttcctttttttttttttaaattctgaaacagacctgttttgtacc

SEQ ID NO: 11852 - DNA, 754 bp, Macaca Fascicularis
  misc_feature (1)...(754): n = A,T,C or G
aactgtggccgaagtctacccccctagcacatcaagttctatacatccgcagnnnnctgcctgccgcagggactgctcgtgcccagattctatcttccacccggtctgtggggacaatggaattgagtacctctccccttgccacgctggctgcagaaacatcaacatgagctctgcaacctccaagcaattgatctatttnnnnnnnnnnnnnnnnnnnnnnnnnnncgcttcagcaaagacaggatcgtgccctgtcccctgtgcccacttcctgctcccggccatcttcctcatctccttcgtgtccctgatagcctgcatctcccacaaccccctctacatgatggttctgcgtgtggtgaaccaggaggaaaagtcatttgccatcggggtgcagnnnnnnnnnnnnnnnnnnnnnnnnnnnnnnnnnnnnccagccctctatggcctcaccattgaccactcctgcatccggtggaactcgctgtgcttggggaggcgaggggcctgcgcctactatgacaacgatgctctccgagacaggtacctgggcctgcagatggnnnnnnnnnnnnnnnnnnnnnnnnnnnnnnnnntcatcagctggagggtgaagaagaacaaggagtacaatgtgcagaaggcggcaggcctcatctgacccccgcccgggccactgccctgctccagagagcggaccgtgcctcttccacacctgcctatattcactaatgttaacacgtcattcctt

SEQ ID NO: 11853 - DNA, 771 bp, Macaca Fascicularis
  misc_feature (1)...(771): n = A,T,C or G
cccagctgcnnnngnctnnnnnnngnanctggatgtgcgtgcaaccaccggggcctatggagattgtttcggaagaagaaccacttcctggtggtgggggtcccggcttccccctactcagtgaagaagccaccctcagtcaccccaattttcctggagccacccccaaaagaggagggagccccaggagccgcagaacagacatgagacctcctccaggaccctgcggggctgggtactgtgtacccccaggcgggctagcccttccctccatcctgtaggattttgtagatgctggtaggggcgggggctaccttgtttttaacatgagacttaattactaactccgaggggagggttcccctgctccaacaccctgttcctgagttaaaggtctatttatttacttccttgttggagaagggcaggagagtacctgggaatcattgcgatccctagcagctcatcctgccctttgaataccctcactttccaggcctggctcagaatctaacctatttattgactgtcctgtgggccttgaaaacaggccgaacctggagggcctggatttctttttgggcnnnnnnnnnnnnctgagggtggggctggcnnnnnnnnnnnnnnnnnnnnnnnnnnnnnnnnnnacaggcccaactggggcccacatgctgacacagactcactcagacacccttagacactggaccaggcctcctctcagcatcctctttgtccagcttccaaagctnntaagttgatcatgataaa

SEQ ID NO: 11854 - DNA, 748 bp, Macaca Fascicularis
  misc_feature (1)...(748): n = A,T,C or G
gccggaggcccttgttttgggggtggggggagagttggatgtgattgcccttgaagaacaaggctgacctgagaggttcctggtgccctaaggtggctcagcatctacccagggtaggcnnnnnnnnnnnnnnnnnnnnnnnnnnnnnnnnnnnnntctcttggggccctctcagagtccatctccccaagacaggaagggaaaagcaaatttctaattcaccagcaataaaaattggaggaggcttggccctcagcccttgtatttctctctttttcactctctcttcctcccacccccaggactgagttttggggggcaaggtggagagagctggcaactactgtgagcaagtcccctagcccctgaccagcctcctcccatgactggtgactgtttaatgagctgtgcatcccccacaaaaacatgagtgcccctctgtgtggcctctgaccctttgcacagcccttctgggtggtcctcaccaggtctctgagctgggtgggaggccatcctggcaaccactgcccattccattcacccctcactgcacctgccctagaacctgggcctaggccacaggggcagggagaagagaaggcattagtaagaaaaaactagaaaaaaatatgaacagacttagctttgggacgtccaaccacaaaagaaattatatataaatatatataaatatatatctctaccatatgtgatggaaagactttttttttccttcccaaagaaataa

SEQ ID NO: 11855 - DNA, 483 bp, Macaca Fascicularis
  misc_feature (1)...(483): n = A,T,C or G
aaacggatgagacttcagtgagtacggacaaaagagaagcctggaagactcctcatgctagttatcatacctcagtactgtggctcttgagctttgaagtactttattgtaaccaccttatttgtatgggatgcacttattctttgaaaggatattaggccgggcgtgnnnnnnnnnnnnnnnnnnnnnnnnnnnnnnnnnnnnnnnnnnnnnnnnnnnnnnnnnnnnnnnnnnnnnnnnnnnnnnnnnnnnnnnnnnnnnnnnnnnnnnnnnnnnnnnnnnnnnnnnnnnnnnnnnnnnnnnnnnnnnnnnnnnnnnnnnnnnnnnnnnnnnnnnnnnnnnnnnnnnnnnnnnnnnnnnnnnnnnnnnnnnnnnnnnnnnnnnnnnnnnnnnnnnnnnnnnnnnnnnnnnnnnnnnnnnnnnnnnnnnnnnnttgtctcaaaaaaaaaaaaaagaaaagatattattcccatcatgatttct

SEQ ID NO: 11856 - DNA, 676 bp, Macaca Fascicularis
cattagccacgaggttagaaattatggtttaggagtcacgtggccgggggtcatttacaagattccgaccctccctgcacttgacggatcaggtggcaccacacagatcaatcaactggctcatctgatcttgtggcccctacccaggaactgactcagcacgagaagatggctttgactcccagtgacttcatcgctgaccagtcagcacccctggctcctggcttctccccacccaccaagttgtccttaaaaactctgctcccttggcacatctccaccatggaatactacgcagccataaaaaaggatgagctcatgtcctttgcagggacatggataaagctggaaaccttcattctcagcaaactatcacaaggacagaaaaccaaacaccgtatgttctcactcatagatgggagttgaacaatgagaacacctggacacagggtggggaacatcacacactgggaactgagtgggggtgggggactaggggagggatagcattagagaaatacctaatgtaaatgatgagttgatgcgtgcagcaaaccaacatggcacatgtgtatatatgtaacaaacttgcacattgctcacatgtaccctagaacttaaagtataaaacaaacaaacaaaaaaaccaaacggaaacccaaaaaagctctgctcc

SEQ ID NO: 11857 - DNA, 775 bp, Macaca Fascicularis
  misc_feature (1)...(775): n = A,T,C or G
ccaatgcaagggctactnnnnacannnngaaatggaacataatgaggaaacactatctnnctgactagtannnnnnnnnnnnnnnngtnnnnnnnnnnnnnnnnnnnnnntttgtgagcttgagtttatgcacatatttaaaagtcacaagaagtcttatttacattccaccaaccaacctcagaaacccataatgtcatctaccttcttggcttagagataacttttagctttctttcttctcaatgtctaatatcacctccctgtttccatgtcttccttacacttggtggaatgagaaactttttgtagaggaaatacatcgaagtaacatccttttccctgacagtcaagcagtccatcagaannnnnnnnnnnnnnnnnnnnnnntaccaccaaatacacaaggcattctttttgtttgtttcagttcatactagtcccttcccagtctatcagtgaagaccccatctgccttgtctatgccctgtnnnnnnnnnnnnnnnnnnnnnnnnnnnnnnnnnnnnatgccttataaacattccttcctgtgtccattaagactctnnnnnnnnnnnnncttccataggaatttctcccaggaaagaaatatatccccatctcagtttcatatcagaactaccgtccccgatattcccttcagagagattaaagactagaaaaaagtcagcctcttcatctgcnnnnnnnnnnnnnnnnnttcctattttcttccattgacccatatttatacctttcaggtactgaagattaa

SEQ ID NO: 11858 - DNA, 660 bp, Macaca Fascicularis
  misc_feature (1)...(660): n = A,T,C or G
caacttccttcctatacaacccccccttaaatcacacccaccccgccatggtcaaagcaggaaagggattctcagcctccaaggtagctgccctagctaacagcctgggtgcccctgggaagatacccactctgccccaactgtgtgctccccagagactggtagatattagaaaaggtgaattaccgcaaactcagaataggtgctggcaacagaattaatgctgaagttgcgctggaggggggccgagccagggtacccaccactcaggatgctgccgttgagctccaggttctccttgttggctccatgcctgccagtatggggtgttttcttccctgaacaggtggaagcagcaactggctgcagagaaaggaaagagatccatgtatcctccttctaatgaacgtgcacacacaatacctgcactggtcaacggctgagactatctttatattcatgtctagaatcctatactttttagttaaaaaaaatatatatatggggctgggnnnnnnnnnnnnnnnnnnnnnnnnnnnnnnnnnnnnnnnnnnnnnnnnnnnnnnnnnnnnnnnnnnnnnnnnnnnnagcctgggaaacataacagaaccccatctctagaaaaaaattttttaaaatatgaattcttgatttacagaa

SEQ ID NO: 11859 - DNA, 764 bp, Macaca Fascicularis
  misc_feature (1)...(764): n = A,T,C or G
agagggaaaaccagggatagagggaaagccagagagtcaaggagagccagggagtgaaacaagggctgcaggaaagcgcccagctgagggtgatgtacccaggaaagccaaaagaaaaactaataaggggctggctcattacctcaaggagtataaagaggccatacacgatatgaatttcagcaatgaggacatgataagagaatttgacaatatggctaaggtgcaggatgagaagagaaaaagcaaacagaaattgggggcgtttttgtggatgcaaagaaatttacaggaccccttctaccctagaggcccaagggaattcaggggtggctgcagggccccacgaagggacattgaagacattccttatgtgtagtgtccnnnnnnnnnnnnnnncaggccatgtgctttacccctacggtagtacnnnnnnnnnnnnnnnnnnnnnnnnnnnnnnnnnnnnnnnnnnccaactgcaacgcggtgttcttagtagcaaattttcatccgttacatggaaagaatgttgatggtgcattgtaaaattaaaaaacacaacttgcagaaccaaacatatggcatcagtacatttttgtaaaactacaaagatacctagtaatttatgtatagaaaacaattctgaaagctgtgtcaactaaaagattaacagtggttatctgtgcgtgattttttctgtacttttttgttcatctgtccatttttctcctaaaaacagatttcttaatcataaaaataatatg

SEQ ID NO: 11860 - DNA, 641 bp, Macaca Fascicularis
  misc_feature (1)...(641): n = A,T,C or G
gcaggcccaggccccgnnnnnnnnnccgccgcccccgcagcccctgaaggccgagcaggaggaagaagggctcccgctgccnnncgcaaacattaaggaagagccgcnnnnnccggggaccccaccccagtccccaccggctccccctgtcttcctcagcgcctcctgtttcgacnnnnnnnnnnnnnnnnnnnnnnnnnnngaggaggaagaggtagacagcaaggctcacctgcgcgggctggggggcctggcctcctgaccttcgccgccctaccctccgccgctccgcctgagctccnnnnnnnnnnnnnnngaggagggaagttgaaggagccacctcctctgtctacccacccgtccccttcacgcccttgacactaaggagtggggggccctggactgaccctccctctcccatcgcccacccccagaacccctgatgctggttaggaaccgctcaccccaacatgtgtcttaaggcaggacgacttggaaaaaannnnnnnnnnnnnnnnnnnnnnnnnnnnnnnnctggtggggacgcccccgcctgcctgtccccccgttacacacactggacaccatcacctgttggaactgccagaccctgggggtccccagtgagcaaaggtctgtcc

SEQ ID NO: 11861 - DNA, 732 bp, Macaca Fascicularis
  misc_feature (1)...(732): n = A,T,C or G
tgaggaagcagacagcgatactgatgacatgaccacagagttacagaggnnngccatgaagagccagcattccagaattttatgcaagaatcgatggcacaatactggaagagaaacaataaataggagactttaggacacttcacttgtttctagaagtccagaattttggacctccacgtgaaagaactatccttacctctgactgggggctcccataagggacaattttcctcagagtagcagagtttctcttattagagaaatcttgtgactcagatgaagtcagggataaaagatccttggacctggcaggttaacactgattatcccttggcctttcccttgtatttatgcaaggaaggatatactgagctgatactcttnnnnnnnnnnnnnnnnnnntttannnnnnnnactcaagtacttttgctgctgaggaatggaatcaaaagaacatagtctcctcatgaccacctcagatctctattattaggctagatgtgtagcctttactcccccagcttcttgcccttgaccctgcaccgtgagttgcccttctattagcagctagggaaaagggaaacatgagcttatccannnnnnnnnnnnnnnntccctggcaatcaaccaacgttgctacgaaatatgcctcacactgtataagctcactataggacatcaggtttgttgaagaaaatgggcaagacatgattaatgaatcagaatcct

SEQ ID NO: 11862 - DNA, 1345 bp, Macaca Fascicularis
  misc_feature (1)...(1345): n = A,T,C or G
ctgaccacgggcttcagccgcatgagtgagcggcaggtggcgctgtgggacacaaaacacctggaggagccgctgtccctgcaggagctggacaccagcagcggtgtcctgctgcccttcttcgaccctgacaccaacattgtctacctctgtggcaagggtgacagctcgatccggtactttgagatcacttctgaggccccgttcctgcactatctctccatgttcagttccaaggagtcccagcggggcatgggctacatgcccaaacgtggcctggaggtgaacaagtgtgagattgccaggttctacaagctgcacgagcggaggtgtgagcccattgccatgacagtgcctcgaaagtcggacctgttccaggaggacctgtacccacccaccgcagggcccgaccctgccctcacggctgaggagtggctggggggtcgggatgctgggcccctcctcatctccctcaaggatggctacgtacccccaaagagccgggagctgagggtcaaccggggcctcgacaccgggcgcaggagggcagcaccagaggccagtggcactcccagctcggatgctgtgtcccggctggaggaggagatgcggaagctccaggccacggtgcaggagctccagaagcgcttggacaggctggaggagacagtccaggccaagtagagccccgcagggccttcagcagggtcagccattcacacccatccactcactccccattcccagtcacatggcagataaaaaaaacataataaaatggctttattttctggtacctcccagactcttgatgactggttccctagacgtggggtttgctgaatggannnnnnnnnnnnnnnnnnctctaccgtgctgaggggactgacccatggcaggggatgtgggatgccccctgacttactacatcacgggaacagggccttcgtgggtagaaaccagccatgctgatgcgggccaggaggctgctctccgtttccgagctccttctcagagctgacgcagctgagctatttaaggccctagcttaggacctcaataattcccaaatttaccgaaaatctgcttttcctaatcaaccaaaacatcaggttgcacgtgactctgctggcactgttgcttgtgaggaaaggaaccaaccatcacttacagggtgggcatcttttaaactgcaggtccaaagataaaaacaacaagggaggccgggcatggggannnnnnnnnnnnnnnnnnnnnnnnnnnnnnnnnnnnnnnnnnnnnnnnnnnnnnnnnnnnnnnntgagnnnnnnnnnnnnnnnntggcgagataccgtctctacaaaaa

SEQ ID NO: 11863 - DNA, 746 bp, Macaca Fascicularis
  misc_feature (1)...(746): n = A,T,C or G
agttccatgtggcaggagaagccctacaatcatggtggaaggcaaagggggagcaatgacatcttacaaggatggcagcaggcaagagaaagnnnnnnnnnaggggaactcctctgtataaaaccatcagatctcgtgagacttactcactgtcacaagaacagcacgggaaagacctgnnnnnnnnnnnnnnnnnnctcccactgggtccctcccacaacacgtgggaattcaagatgagatttgggtggggacacagccaaaccatatcagccagtaactgtagctggggatgtaggatgctctgcttgtccaagcctgggagagagaggtcaatccccggaaccacctggcctgtgcgtggagaaagacagttctcccaccacacatccagagacaagggtgtggatgctgggccagcaggaacacagctgggccacgtggggactcagacaccccaggatggtggcagccttctgggttctgcctcctcccagcagccaggcctcacagcgtccgggtgggctggccccgcctccaacacctcagagaccaggcagggacctcgcctcttctctgagcaggttgttctggtccaacatgccttgagaaactctttagagaatccagcctaccactagttttcaggagaaaacagatggtcccagttattccacgtgtttcccaacacttccgcattgcttatgtgggnnnttgcagnnnnnccagctggnaagcagnntgtc

SEQ ID NO: 11864 - DNA, 730 bp, Macaca Fascicularis
  misc_feature (1)...(730): n = A,T,C or G
aagacttctgacagnnnangtcctcaaatgtcccccatnnnngacaacagccccagctctttnnnnntgaannnnnnnnnnnnnnngttnnnnnnnnnnnnnnnnnnnnnnnnnnnnnnnnnnnnnnnnnnnnnnnnnnnnnnnnnnnnnnnnnnnnnnnnnnnnnnnnnnnnnnnnnnnnnnnnnnnnnnnnnnnnnnnnnnnnnnnnnnnnnnnnnnnnnnnnnnnnnnnnnnnnnnnnnnnnnnnnnnnnnnnnnnnnnnnnnnnnnnnnnnnnnnnnnnnnnnnnnnnnnnnnnnnnnnnnnnnnnnnnnnnnnnnnnnnnnnnnnnnnnnnnnnnnnnnnnnnnacctagctttcagatctctatttcattttgtggcttaccattccctagcacactggccttgccatcttgtggccaaatacaaaataacacctcttaagtctagcacactgcagtgaggccaggcacctcagtgctgggcaggggcatcagaaggtgctaagccctctctccacaatgccaagactgaggccacagcctacaccaaatccagcgcttaatttccctgctgccctcataaagagaaagaggtctgctggatctgctaagggagcacggagaggaagaaagagggatggggtgggaggtaccacctcgagtgttcctactgggttcccaagcaacaggtggggtgggaaaggctttatcaggtatcatcaacag

SEQ ID NO: 11865 - DNA, 723 bp, Macaca Fascicularis
  misc_feature (1)...(723): n = A,T,C or G
acagggctgggggnnnngctcggtactagcctcctggcactctgctttttcactgactggctactgaagagcaaagcagagctgggtgacatctcagaactggcatctggacctccctaactgggccctgctggtcccatttgctcattagaatttcctctcacatcagtgaggtacagaattcagtttctcccttcccaggtccttgggatggttgacccctgcctctgcagtagccttttgtgagtctgctaaggtagctctcacacacctcggctctggggttgatacctgagcccgcaatagagccctgaaatcgagagcacagcttgagtgtgtgaatatgatgtgtgcacatgcttaatgaacgtgtttgagtgtgcacgcgtttgtggaaaggaggatagtctggcctgagaagctaaagaagaggcatgtccagtgtgctttgcaggatgtgtttgctcctttccattcccatgcaacccacattggggtggagcaggaaggagctcctttctgttcccaagcctcaggactcttgagctgtggcttacttgctggttcaagctccgtgggccacgctgctgctgtgccaagaaggtgtacagcctcctcaggatggggccttgtacaacccnnnnnnnnnnnnnnnnnnttgtgtcctagctgtctttttattttcctttttgtttgttagcaaaaacctctatttagatttca

SEQ ID NO: 11866 - DNA, 748 bp, Macaca Fascicularis
  misc_feature (1)...(748): n = A,T,C or G
catgggccagaccttgagagagnnngagcagggcagtgaaatcttatttgtccaacctccatagcgggtacggacagtgttaggggcccaggaacaccagttgggttgttccggtgcggatggaatttcttagggacctggcctacatgggcagttcccacgagctttgtcctttcccacgagctttgtcctttccaggtgagcgcagccctttccgctccagtaggttccaggttaatcttttatccccaagctgtttcctggtccttcatgggtctcaggtctcctggaaatccaggnnnnnnnnnnnnnnnnnnnnnnnnnnnnnnnnnnnnnnnnnnnnnnnnnnnnnnnnnnnntcaggctttgtctcccgtccaggaatcagtcagatgaaggccgctgcacaggtctctgtctagatcttgatccaagtgatgatatgcatttggctctccgtggatgcatctggtggcctgggctaggtacatctgtgtaaggtaaatctgctttcnnnnnnnnnnnctcaaaaatgacttggtgccctagttgttggtagaggtaagtgagtgggagtttcagccccaccttccagcctccagacctcccagaagtgtctgccccttactggattcgattccctttcttgtcttctaggtccactctggcctacattctctgtactcaggactgcaggtctgccatttgctggtccccagttcttccagttttctggggtcaccctctt

SEQ ID NO: 11867 - DNA, 745 bp, Macaca Fascicularis
  misc_feature (1)...(745): n = A,T,C or G
cccaagtccaactcactgagccgtgtcantgcagnnnaggctgggtctgggggtgcatgacccnntccccttccttctggcctgggcactgtggcttagagtaacagtagccactgcccagttccagtggccccacaaagcccccagtggccccacaaagcccccagtggctggctgtccaaacagtggctcccnnnnnnnnnnnnnnnnnnnnngagtcttccaggccccctcagaggtcttccctttgcctccccaggacagggtgagtcagagctcaacatttaatctcctctccaaagtagagagcaagtcgcccacagtgggcgtgtctgtaaatattgtgacagtatttttttactgtgctgtttttttgaaagggggtgggtaaaaagtagggtgttcttgtttttttgcttgggggatgggggtgggggagggtcttattttatcttatcttttctgtggatcagaaaaaacggaagccaaactcggggtcatctttgttgttgaagctgaagtgggannnnnnnnnnnnnnntgtatttatgcgttccagcatctggaacctcccatccctgccctccccctgcgtagctgccacctccctgcggggcccagtgtggctcacctgccccgtggggtgtgtttcttgtcgtttttctctttgcaaagacatagctaggaaagcgaatgataagggaaaagttctcagggaatttaagtgttgttgctatggtgacgt

SEQ ID NO: 11868 - DNA, 777 bp, Macaca Fascicularis
  misc_feature (1)...(777): n = A,T,C or G
ctgaacatcaaagaactcnnnnnnnagagnnnnntntgaaatgcaatgaatgtggaaaagcnnntagccggnnnnnnnnnnnnnnnnnnnnnnagagaatccatactggagaaaaaccatatgaatgtagtgaatgtggaaaagnnnnnnnncgaagcactaaccttagnnnnnnnnnnnnnnnncatactcaagaaaggccttacaaatgtaatgaatgtgggaaagccttcggtgaccgttcaaccataattcagcatcaannnnnnnnnnnnnnnnnnnnnccctatgaatgcagtaaatgtggaaaagctttcagttggatctcatcgcttattgaacatcagagaacacacactggggagaacccctatgagtgcgatgactgtgggaaaatgttcagtcgaagctcatctcttacagaacatcagagaatccacactggagaaaagccccacgagtgtagagtgtgtggaaagggcttcagtcgaagctcatcccttattattcatcagagaattcataccggggannnnnnnnnnnnnnnnnatgactgtggaaaagccttcagtcagagttcaacnnnnnnnnnnnnnnnnnnncttcatactaaagagtaatatctgagcttttattaatgttagcacaagaacatatatacctaacctcccaccactgaaatatatatatttcaagtatatatatacttgttctgatttattagatacctatacccgttttaagctttcattcattcttttcatccatctcaaataa

SEQ ID NO: 11869 - DNA, 743 bp, Macaca Fascicularis
  misc_feature (1)...(743): n = A,T,C or G
aaagnnnnaggaaattgaaaaaccaatagctgnnnntgaactcttcacaactttaccgattgtacagggaaaatcaagaccaattaaaattttaactagattgacaattattgtctcggatccatctcactgcaatgttttgagagcaacttcttcaagggcccggctctatgatgttgttgcagtttttccaaagacagaaaagctttttcatattgcttgtacacatttagatgtggatttagtctgcataactgtaacagagaaactaccattttacttcaaaagacctcctannnnnnnnnnnnnnnnccgaggcctggcttttgaacttgtctatagccctgctatcaaagactccacaatgagaaggtatacaatttccaatgctctcaatttgnnnnnnnnnnnnnaaggaaagnnnnnnnnnnnnnnnnnnnnnncagaaaggcctttagaaataagagggccatatgacgtggcaaacctaggcttgctgtttgggctctctgaaagtgatgccaaggctgcggtatccaccaactgccgagcagcacttctccacggagaaactagaaagactgcttttggaattatttctacagtgaagaaaccccgcccatcagaaggggatgaagattgtcttccagcttctaagaaagccaagtgtgagagctgaaaagaatgccccagtctcgtcagcactccctcttcccttttatagttcatcagccacaacagaa

SEQ ID NO: 11870 - DNA, 822 bp, Macaca Fascicularis
  misc_feature (1)...(822): n = A,T,C or G
acaggcccacgcacctgcaaggannngctagaccgagggcacttcctgagcggctggcacaccatctacctgcctgactgccggcccctgactgtgctctgtgacatggacacggacggagggggctggaccgttttccagcggagggtggacggctccgtggacttctaccgggactgggccgcgtacaannnnnnnnnnnnnnnncggctgggggagttctggctggggaacgacaacatccacgccctgaccgcccagggaagcagcgagctccgtgtagacctggtggactttgaggacaaccaccagtttgctaagtacagatcatnnnnnnnnnnnnnngagaaggagaagtacaatctggtcctgggggcctttgttgagggcagtgcgggtaattccctaacatcccacaacaaccacttcttctccaccaaagaccaggacaatgaccttagcaccggaaattgtgctgtgatgtatcagggagcctggtggtactccgactgtcacgcttcaaacctgaatggtctctacctcagaggaccccatgagagctatgcaaatggcatcaactggaaggcggcaaaggggtacaactatagctacaaggtgtcagagatgaagatgcggcccgcctagctgggccaggacccctccacacgcacctgctggtggggaggccacacccacaagggttgggagcttggcccnnnnnnnnnnnnnnnnnnnnnnnnactcccatgacgcccacagctgaccctttgcccccagcccggtcaacctcccacatgcccacaacctcaccagagggagaat

SEQ ID NO: 11871 - DNA, 764 bp, Macaca Fascicularis
  misc_feature (1)...(764): n = A,T,C or G
gcagagacttgggatggagccgcacggagccgcgggccctttgcagctgcgattttcgnnnnncgctttcaacggaggtactgtactggcaattgctggagaagattttgcaattgttgcttctgatactcgactgagtgaagggttttcaattcatacccgggatagccccaaatgttacaaattaacagacaaaacagtcattggatgcagtggttttcatggagactgccttaccctgacaaagattattgaagcaagactaaagatgtataagcattccaataataaggccatgactacgggggcaattgctgcgatgctgtctacgatcctgtattcaaggcgcttctttccatactatgtttacaacatcatcggtggacttgatgaagaaggaaagggggctgtatacagctttgacccagtagggtcttaccagagagactccttcaaggctggaggctcagcaagtgccatgctacagcccctgcttgacaaacaggttggttttagaacatgcagaacgtggagcatgtcccgctgtccttggacagagccatgcggctggtgaaagatgtctttatttctgcggctgagagagacgtgtacactggggacgcgctccggatctgcatagtgaccaaagagggcatcagggaggagactgttcccttaaggaaggactgatctgtgtgctgttgtcaccaatcagttcagaactggttgattttgtactttggaacctgtnnnnntggatggtt

SEQ ID NO: 11872 - DNA, 332 bp, Macaca Fascicularis
taaatatgagagctcgctctgaacgatttggttttgtgattgcctctgaagcgtatgtatgccatggaggcactacaaactgtgaggtttttgaaatcagaagtgaaaaaatcaatgaataaaccagcatcttgccattgcccgctcttgaagccacagcagggtttcaggtttcaatcagaattgttggcaagatgacatttccatgcataaatgtgatccacagatggtgctggtgttatttgtaactttttgcaaggcatttttatatatatttttgtgcacatttttttttatgtttttttagaacatgaaacgtatttgcagaatat

SEQ ID NO: 11873 - DNA, 723 bp, Macaca Fascicularis
  misc_feature (1)...(723): n = A,T,C or G
atctgattgtttaacaaattcgtcttggctgctaagacttgcgtatcttgcagatatttttactaaattaaatgaagttaatttgtcaannnnnnnnnnnnnnnnnactgtttttacagtatttgataaaatgtcgtcattgttaagaaaattggaattttgggcctcatctgtagaagaagaaaactttgattgttttcccacactcagtgattttttgactgaaattaattctacagttgataaagatatttgcagtgccattgtgcagcacctaaggggtttgcgctctactctgttaaaatactttcctgtaacaaatgatannnnnnnnnnnnnnnnaaatccatttacagttactgttaaaccagtttcattagtagcacgggactatgagagcctgattgatttaacatctgattctcaagtgaaacagaatttcagtgaactttcactaaatgatttttggagtagcctaattcaggaatacccaagcattgcaaggcgtgcagtgcgtgtacttcttccttttgctacaatgcacctgtgtgaaacggggttttcgtattacgctgcaacaaaaacaaaatataggaaaagacttgatgctgcacctcatatgcgaatccgacttagcaacattacacctaatattaagcggatatgtgataaaaagacacaaaaacactgttctcattaaaattggaggagtttgcatgtctc

SEQ ID NO: 11874 - DNA, 1074 bp, Macaca Fascicularis
  misc_feature (1)...(1074): n = A,T,C or G
gaaggtatttacatgtatgtggaaaaacaaaacacttaactagaattctctaataaggtttatggtttagcttaaagagcacctttgtatttttattatcagatggggcaacatattgtattaagcatatgtagcacttcacagcatggttatcatgtaagctgcaggtagaagcaaagctgtaaagtagatttatcacacaatgagtgcatacagacttcaaatatgttaatagtttggtcatagaacctagaagccaaaagccacatagaagggcaagaatcccaatttaactcatgttaccatcattagtgatctgtgttgtagaacatgagggtgtaagccttcagcctcgcaagttacatgtagaaaacccacaattgtaaaggttgtgaatcacttgatttacttttaacacactcaggtagaatatttttatttttactgttttatacccagaagttatttctgcattgttctacagcaagaatattcataaaagtatccctttcaaatggctttgagaagaacagaagaaaaaaagtttgtatatatttttaaaaattgtattaaaagtcagtttgcaacatgtctgtaccaagatggtactttgccttaaccgtttatatgcactttcatggagactgcaatacgttgctatgagcactttctttatccttggagtttaatcctttgcttaatctttctacagtatgacataatgatttgctatgttgtaaaatcttgtaaaaaatttctatataaaaatatttttaaaatcttaatttctttttcctgaattctgttccccaattatttaacaaggcttttgttacagnnnnnnnnnnnnngataacttgtnnnnnnnnnnnnnnnncttcagtgtcataatttttagtgttatctccctgttcatatttctagtttatggtggcctggataaaagtgtagtaaacatgaggcccagcactctctttgactttnnnnnnnnnncactaagcacttttaagttcttctgttttcctttctgtaaatgggagatgatagtataaaacaaccctacctaccttcaac

SEQ ID NO: 11875 - DNA, 673 bp, Macaca Fascicularis
  misc_feature (1)...(673): n = A,T,C or G
tcatgaagagtgagcgacatgccgccgaggcgcagctggccacagcagagcagcagctacgggggctacggaccgaagcggaaagggctcgccaggcccagagccgggcccaggaggctctggacaaggccaaggagaagnnnnnnnnnnnnnnnnnnnnnnnnnnnnnnnnnnnnnnnnnnnnnnnnnnnnnnnnggagcagccggccgccctggccacccccgaggtggaggccctccgtgaccaggtgaannnnnnnnnnnnnnnnnnnnnnnnnnntgccagggnnnnnnnnnnnnnnnnnnctttgtacagaagccacctcctctacgccattcagggccagatggnnnnnnnnnnnnnnnnnnnnnnnnnnnnnnnnnnnnnnatgcagagactccaggctcagggccgctgagaaaggccaggcccagtggctacactgaccacacccatgcaggggcctcacgcccctgcaggccccttgcagaccggcttcacttggccccatccggacccatgcacttggagaccagcctgggtccctgcccgaccgtccccannnnnnnnnnnnnnnnnnnnnnnnnnnnncacgcaggcactggtcagtctggacccggggtgtcactgcccctcccccaccaccggagaatctgtgagtccctgtgtcct

SEQ ID NO: 11876 - DNA, 709 bp, Macaca Fascicularis
  misc_feature (1)...(709): n = A,T,C or G
ggtctgannnnnnnnnnnnnnnnttgaggtcagagccactgcccacacctgtgtgaccgctgggcacaagtgagccgcccagcctctgcactgtggcctgggcctcctcccgccgggcctcctgcccctccttatcgctcagtagtggacgttgggctgtcctgggccgactagatctgccccactcgtgtgaccaccctccacttctttcccagcccctagaggcagacacacagacagtgacccccatccctgcaggacggacgcccctgccctgccagagtccagccccccagctctcacggctgctgcttctctggactccccaaggcaggtggccttcacccaagttctcccgtcctggggtgaggcccagccggccccannnnnnnnnnnnnnnntgcaagatgcagcctcagaagagacaaagcccctgagggaggtcacctgggggcagttggtgctgggccccctctgttgggggtttggggtcccggtctcccaccagccactgcttcctcccgggctctcagccttctaccccttgtcttcctttcctcgggggccctgatgcgtggtggcccccgcccagcctcggctccttactccattcacggctgtgcacaccctcgagccaccagggtgtgagattccagctctggagttttcggttgttggaggaggttgggtgttttcannaaagatgttg

SEQ ID NO: 11877 - DNA, 1160 bp, Macaca Fascicularis
  misc_feature (1)...(1160): n = A,T,C or G
gttgcctctagtaaagtnnnnnnnnaaagcaaatttgaagaatannnnatagnnnnnnnnnnnnnnnntcaagcagtcattaaaaggtggtggtcagaactatcatccaaaacagaaattataagtgatggaaatataaaaattttaaaacaacaattaagtggattatgggaacaggaaaaccatcttactttggttccaggatatactggtaatannnnnnnnnnnnnnnnngcttatttattacagttacattgagagatttcatctactaaagagcatttggtttttcaaaacatccctgaactgtataattacaaaaaaaaagtctcgtctgagaactgtgaactgtggaagaaatcaaaactattttttcttttaaaaagccacataatgaaaccactaatgaaatcccaacaatctacttcacattgaagtggaaaaatatccaaaaggagcagcttcaatttcatnnnnnnnnnnnnnnnnnnnnnnnnnnnnnnnnnnttgctgcatttgggagttatatggttatttggtaacattaagaactactggattttaatgcaatcctgcataaaaatataatttatactatgtgaaaaagtaagacaggacttattactaggaaccaccaagaccaatcatcattaacttttttaagattgtgttttattaaaaaaaaaaaaacaaaacacttaaacgtgtgcagctattttcttatgtcgaaaagactgaaagtttaaaacatgaaaaaatcaatattaaacattttttgttcacactgagatactgtgtatgtaaaatgccttaattattaataagccaatatgttatgataccaatatctgttttaaaaagctaaaaccaagcatgcttctggcatgataaaatcatggaattaaatcaggggtttacattcttgtagaatgttcttgaaacactctctgcaccatttttaaaacttgagaatagttttagtatctctgatattttttgccagaatcatcatgtcatgtannnnnnnnnnnnnnnnatctaaggaaaaaggtgaatatgtttttgtatgaatgtttaactggaagtgtccatggacttggctaatttatatttactttttattgtacatagatttctaatatttttcattcctgtatcat

SEQ ID NO: 11878 - DNA, 387 bp, Macaca Fascicularis
  misc_feature (1)...(387): n = A,T,C or G
cgaggactgtcgggctacagnnnnnnnnnnnnnnnnnnnnnnnccctggtgtacgggcactggagcataatgaagtggaaccgtgagcgcaggcgcctacagatcgaggacttcgaggcnnnnnnnnnnnnnnnnnnnnnnnnnnnnnnnnnnnnnnnnnnnnnnnnnnnnnnnnnnnnnnnnnnnnacctggaggagnnnnnnnnnnnnnnnnnnnnnnngcccgactggaaggtgggagagtctgtgttccacacaacccgctgggtgccccccttgatcggggagctgtatgggctgcgcaccacggaggagactatccatnnnnnnnnnnnnnnnnnnnnnnnnnnnnnnnnnntgtgccctccggccacctggatccctgcc

SEQ ID NO: 11879 - DNA, 751 bp, Macaca Fascicularis
  misc_feature (1)...(751): n = A,T,C or G
agcatacgaggaaaattcatcatcnnggtaactacacctaaagcacatatatttggggaaaaaaaaagagattcattaaattatatgattaaatcactgacccaatagaaaatttatataataaagccagaaaaaaagttgtaaaatatagtttacaataattnnnnnnnnnnnnnnnnnnnnnnnnnnnnnnnnnnnnnnnnnnnctcgaacatgaattcaatccaaataattcatatattagaatttaaataacacagactgaactnnnnnnnnnnnnnnnnnnnnnnnnnnccttatataagaataaaaatacaaaagtgtatatcctaatatcattgcattgttttcataagtctcttannnnnnnnnnnnnnnnnnnnnnnnnnnnnnngctacagaccaggtagagattacgcatgttctgannnnnnnnnnnnnnnnnnacgtactcgtcatttctcctgttttatgttgtgannnnnnnnnnnnnnnngctctaaatactgtaacaattaaattttgccaacgtccaannnnnnnnnnnnnnnnnggcttttaccagcacaatgacccctatttgtagtcattctgccagatggttaggctacgtgggttacacggctaaaaaaaggtctgnnnnnnnnnnnnnnnnccctgtacatagtttggtgtttcttcatattgannnnnnnagttatggggaaaattcaggtacacacataggctcgttcagttgtgctcaccacag

SEQ ID NO: 11880 - DNA, 626 bp, Macaca Fascicularis
  misc_feature (1)...(626): n = A,T,C or G
tcaggaggacatttaaacagtcctgtgagaacaacatggcaaggaactgaggcctnnncccaacaaccaaaataaattttgaattgattttgatgaataagccattttacaatcagatttccagcattagtcaagccttcagatgactgcagcccagataacattttgactgcaaccttattggagacctggagccagaaccacctacctaaactgctcccaaattcctgattcacagaaactgtaaggtactggttttctgttgttgttttaagctgttaagtttagaggtaatttgttatgcagcagtagataagtaatgcagactcgaattgttggttgctcatttatttgactaaacaaaacacccaaatattcccaaagatctgtcagattattaaagactacgaagaggaaactcgtaacttcctttaataagaatatcccaatgatagctaagcttatgatacatgtcagccttttaagtttattctagaacctagtaccactttcttcctataattattacaaggtgcctaaaaaaggggatagttcagggatatacataataagaatcagagggtttattatatagttgtatataggtgatgtaattaattttataa

SEQ ID NO: 11881 - DNA, 739 bp, Macaca Fascicularis
  misc_feature (1)...(739): n = A,T,C or G
acatggcggnnnnnnnnnnnnnnnnnnaccacatcagggcaattgcagnnnngctggccccnnnnnnnnnnnnnnnnnnnnnnncttcagaaaaacatggcagctggggaagtggtttggacatgcacaccaaaccctggattagagcaagggctcgaagggagtattgggagaatctgctgccagcttcaggcagacctttcnnnnnnnnnnnnnnnnnnnnnnacgcctaaggagtagtgaaagaaaaccctgaaataacagaacggaaaaaagttgccctcaagcccgacctggaacccttcctcgccttcatcctcaccatgccnnnnnnnnnnnnnnnnnnnnnnnnnnnnnnngctgcagccccttcccttccagtcnnnnnnnnnnnnnnnnttgagctcctgctgtggnnnnnnnnnnnnnnnnnnnnnnnnnnagatgcagagaagcgagagaggcaccttgttctccaagaactnnnnnnnnnnnnnnnnnnnnnnnnnnnnnnnnnnnnnnnnnnnnnnnnnnnnnnnnntgtctttgagggtgaatttgacactttaaaataatcagaagtcactgagacccaaagctagtgaataattcaagtgactaagctaggtacttgaggatgatagagcaacactaaactaaagcaatgagtgtgcttttctttaatgatttatatgataactccaaaggcaatcccaaaagaaaagatgtaaagaatgtt

SEQ ID NO: 11882 - DNA, 528 bp, Macaca Fascicularis
  misc_feature (1)...(528): n = A,T,C or G
ccacaaatcttgnnnntggcactttagaaaaactgcaaaaaaatacgtaataaagaatacatatatatatatctacacacaaattatatatctatctnnnnnnnnnnnnnnnnnnnnnnnnnnnnnnnnnnnnnnnnnnnnnnnnnnnnnnnnnnnnnnnnnnnnnnnnnnnnnnnnnnnnnnnnnnnnnnnnnnnnnnnnnnnnnnnnnnnnnnnnnnnnnnnnnaggatggaccggagaattggaacttcagaataggtcaaaattccaaaaccatggacatttttttgggagaattgagatagtagacatttattttttttaaaatgatgagttaaggaaaatagcttccagaatgtggtggttgctgggcaacaaatgagattgtggcgacgtggagattaaaatatatgtatttgaaatggggaatttgaatattgtgagtttcagatgttggaaatttgggattttgcagttttgtcttttgaaaatgatcgagtcttgttagttggtgccctctttcctca

SEQ ID NO: 11883 - DNA, 817 bp, Macaca Fascicularis
  misc_feature (1)...(817): n = A,T,C or G
acacgannnnnnnnnccacggaggaactgccanntcctgtccacttatcaaagccaggggaacacatggatgtgtatgtgcctgtggcctgtcatccaggctactttgtcatccagccttggcaggagatacataagttggaagttctgatggaagagatgattctatattacagtgtgtctgaagagcgccacatagcagtggagaaagaccaagnnnnnnnnnnnnnnntggaaaataagtggcacagggtgcttttaaaaggaatnnnnnnnnnnnnnnnnnngtctgtgtatgagctggattatggcaaacacgaattagtcaatataagaaaagtacagcccctagtggacatgttccnnnnnnnnnccttccaagcagtcacagctcaacttgcaggagtgaagtgcaaccagtggtctgaggaggcttcgatggtgtttcgaaatcatgtggagaagaannnnnnnnnnnnnnnnnnnnnnnnnnnnnnnnnnaatgctaacccnnnnnnnnnnnnnnnnnnnnnnnnnnnnnnnnnnnnnnnnnnnnnnnnnnnngatatctggattcatgattttatgtcagagtatctgatagagctttcaaaagttaattaatgnnnnnnnnnnnnnnnttgacaactaattcaaattttttagcaataacaaaatgtagtaggcttaaaaaaannnnnnnnnnnnnnnnnnnnnnnnnnnnnnnnnnnnnnnnnnnnaagaatatgcttatgtttgatgaaagatatttaacaagtttcgttttaacagagttgacttttcgaagaaaattgtac

SEQ ID NO: 11884 - DNA, 686 bp, Macaca Fascicularis
  misc_feature (1)...(686): n = A,T,C or G
atccagcagtggtagnnnnngagctaggctatgtgttccaagccatcacccttacccnnnnnnnnnnnnnnnnnnnnnnnnnnnnnnnnnnnnnnnnnnnnnnnnnnnnnnnnnnnnnnncatacatggttgagggtggtggctnnnnnnnnnnnnnnnnnnnnnnnnnnnnnnnnnnnnnnnnnnntcaggctagtcaccagctgcttcgcatccnnnnnnnnnnnntggtnnnnnnnnnnnnnnnnnnnntggcggctggtgcccaggcattgcagctgtttgagtcccnnnnnnnnnnnnttggcccacagnnnnnnnnnnnnnnnncactgccctannnnngtgatgtggccaagcnagtgaaggccaggttgcgggaggcaggcctggcaccagtgcccatgatcatctttgctaaggatgggcattttgccctggaggagctgtcccaggctggctatgaggtggttgggcttgactggacagtggccccaaagaaagcccggaggagattgggcagctnnnnnnnnnnnnnnnnnnnnnnnnnnnnnnnnnnnnnnnnnnnnnnnnnctgggccatgggctttatcctgacatggacccagaacatgtgggtgccnnnnnnnnnnnnnnnnnnnnnnnnnnnnnnnnnnnnnnnnnnnnnnnnnnnnnnnnnnnnnnnc

SEQ ID NO: 11885 - DNA, 756 bp, Macaca Fascicularis
  misc_feature (1)...(756): n = A,T,C or G
agaggcactgagtgaagatnnncagatatgtgtgtattttttaaaaacgatttgaaaaaatatgatgttcctttgtcgtgggnccaagccnnnnnnnnnnnnnnnnnnnnnnnnnnnnnnnnnnnnngacgtttgggaataaagccttttcatccttctgcaaacaattttcccataccattgcttcacatnnnnnnnnnnnnnnnnnngagcacagagtgtggccgagaggggaggattccccnnnnnnnnnnnnnnntgcgannnnnnnnnnnnnnnnnnnnnnnnnnnnnnnnnnnnnnnnnnnnnnnnnnnnnnnnnnnnnnnnnnnnnnnnnnnnnnnnnnnnnnnnnnnnnnnnnnnnnnnnngaagactcaggagcatttacggatttaacttcccttcccctctatcttcctcagactctagtgtctctttctcacgctattgaacctgtgatgaaaagatctgtaannnnnnnnnnnnnnnnnnnnnnnnnnnnnnnnnnnnnnnagctgtcagaggcaacaggaacgtgtctaaccnnnnnnnnnnnnnnnnnnnnnnnnnnnatccggagatcaagggaagaggaagttgcctctgagctccatctctctgcgctgctagatatggtggacatttgagcagctgacctgtggggagggggtctctcccaaagagtttctgtttttactcaaaaataatgttattctcagatgcttgatgcactgttggaaannnnnnnattaatc

SEQ ID NO: 11886 - DNA, 711 bp, Macaca Fascicularis
  misc_feature (1)...(711): n = A,T,C or G
gatgannnactagcnnngattattttgaaagtgtaattccnnnctgatacaatatccctcacatnnnngatggtgatgtaccacccccgagaatacttccgtcnnnnnnnnnnnnnnnnnnnnnnnnnnnnnnnnnnnctcggtcatattattgaccactcgtgaccggagttcagtggccctggcaggcttgtcctgctcttgactgttccactgacnnnnnnnnnnnttttgtttccaagtaaagtgattcctccttttttttgttcaatgttaaatttaaaaataaccatgtgtatgggtcctcccatgtgtaatacggtaacatgtaacttgcagtgnnnnnnnnnnnnnnnnnnnnnnnnnnnnnnnatgtaacacaaacagcagcgaatggggctccaatgttgtgcttcctatcaacagctctactctttcagggaaggatgataacacaccagaaggacaattatgtacgtatttataatgtattaaaactcttgtaagtaacttaaggtattgtgcaatggcctagcctagtagaaatgagggaaaagcattgccgtggaccattgttaaagtgacaggagttgtagggttacccctttgacaagcttccacagtcttcagacatgcacattgatnnnnnnnnnnnnnnnnncttcacttgaactttgtaaaactgcatatggacctgtaatcaacttttga

SEQ ID NO: 11887 - DNA, 721 bp, Macaca Fascicularis
  misc_feature (1)...(721): n = A,T,C or G
aaaggaaagaattcgtaagctttccatgaaagccagcacttgctcatttaatcctggagtttttgttgcaaacctgacagaatggaaacgacagaatataactaaccaactggaaaaatggatgaaactcaatgtagaagagggactgtatagcagaaccctggcnnnnnnnnnnnnnnnnnnnnnnnnnnttatcgtattttatcaacagcactctacnnnnnnnnnnnnnnnnnnnnnnngccaccttggttccagtgctggaaaacgatattcacctcagtttgtaaaggnnnnnnnnnnnnnnnnnnnnnnnnnnnnnnnnnnnnnnnnnnnnnnnnnnnnnnnnnnnnnnnnnnnnnnnnnnnnnnnnnnnnnnnnnnnnccaacaggcaaattcaacctaatccgaagatataccgagatctcaaacataaagtgaaacagaatttaaactataagcatttctcaggaagtcctggaagatggcatgtatgcaaagtaacagttgctaggcttcnnnnnnnnnnnnnnnnnnnnnnngaaaaagatgtgtcagctgggtaaagatgacaaactgccctgtctggaagtcagcttcccagactatagactataaatatgtctccatctgccttaccaagtgttttcttactacaatgctgaatgactggaaagaagaacagatatnnnnnnnnnnnctnnnnnnnnnnnnnnnttc

SEQ ID NO: 11888 - DNA, 769 bp, Macaca Fascicularis
  misc_feature (1)...(769): n = A,T,C or G
gccatgccaaagagagggcccaccagaagcgcagcagcaaacgggccccgcagatggactggagcaagaaaacgaactcttcagcaacctctgagnnnnnnnnnnnnagccacccggtgactggcagggccgagccagccttccaccccacctttttccttctccccagttactcccctgaatcaacgtacaaatcagcacccacatgccctttcttgacaaatgatttttctagagaactatgttcttcccttaccttagggaaggtgaatgtgttcccgtcatcctgcaattagaaaggagactctgcctccctcctcctcactgagtgcctcatcctaccaggtgtccctttgccactctgcctgggatatcgctgggacctgcaccatgccaggatcgtgggaccaggcgagagggcacctttccttcctcccccgtgtgataactgggtccagggctgatcattgactgcagaactgccactctcagtggacagggcatccgttatcctgagagctgtggcagacacatcttgctttcatttgatttttgttgttaagagtgcagtattgcagagtctagaggaatttttgtttccttgattaacatgattttcctggttgttgcatccagggcatggcagtggcctcagccttaaacttttgttcctactcccaccctcagagaactgggcagcacggggagggtttggctacccctgcccatccctgagccaggtaccaccatgtaaggaaacactcagaat

SEQ ID NO: 11889 - DNA, 689 bp, Macaca Fascicularis
  misc_feature (1)...(689): n = A,T,C or G
actacccagnnnnntcctcttnnnaatctgtaattctctcaacacatcattctgtcttcctcttctttaatctatnaataactcttatctccactaactaccctacatttgattnnnnnnnnnngcaaggtggagcaatgggaccangatgcgcctnttatcaaccaccaggagtttgatgcaccaagccctctcccagagactacagagaacgtggtgtgtgccctgggcctgattgtgggtctggtgggnnnnnnnnnnnnnnnnnnnnnnnnnnnnnnnggnnnnnnnnnnnnnnnnnnnncagaacgcagggggcctctgtgagacatatgcaggtgatggtgtttcttagagagaagatcactgaagaaacttctgctttaatgactttacaaagctcgcaatattccagtccttgacctcagtgaaggcagtgatcttcagcattttccagccctatagccaccccaagtgtggttatgcctcctcgattgctccatactctaacatctagctggcttccctctctattgccttttcctgtatctattttcctctatttcccacattttattatcaccatgcaacgcctctggaataaaacatactggagactgtctcggctatgnnnnnnnnnnnnnnncccacggggacatctcttgtgtactttttgtttaaggtttcct

SEQ ID NO: 11890 - DNA, 652 bp, Macaca Fascicularis
  misc_feature (1)...(652): n = A,T,C or G
tnnnnnnnnnnnnnnnnnnnngcgttgtgatggggagagggtgatgtatttcataaaggacatgtcagatccttcttcattgacttttttagttactgtttcttctctcaaacttgttttcaaatctcttgggagtgagggagaaacggggagctgaatcctcccccgagctgttccaggccaggggactccgcagtaccttctcctatatctagtaacaaagaatggtgataaccatgcactggnnnnnnnnnnnnnagttctccatgaaacttgggttaattnnnnnnnnnnnnnnnnnnnnnagccactaggctgctggtgaaatgggatggagaagaacagcaggctctctggagcnnnnnnnnnnnnnnagggcactctgtggctggcctggcacgggctcagcccgggaagaggaggaacgatcccttgcctgccnnnnnnnnnnnnnnnnnnnnnnnnnnnnnnnnnnnnnnnnnnnnnnnnnnnnnnnnnnnnnnnnnnnggttctcctcagggcttaggtcttgaacctgtggcggcaggaggcagggnnnnnnnnnnnnnnngggatgcaggtcggggagagggaaggcaggggtggaccgccctgagcatggaaagaccccaagcaagttgactcttgcaa

SEQ ID NO: 11891 - DNA, 646 bp, Macaca Fascicularis
  misc_feature (1)...(646): n = A,T,C or G
tgttccagagtggctagagggcatctaagggctccaacatggcatatccatgcccacggtgctgtgtccatgatctgagtgacagctgcactgctgcctgggattgtagctgaggtgggagtggagaatggttcccaggaagacagttccacctctgaggtctgaaaatgttccctttaccctggagtgggagtgaggggtcatacaccaaagtattttccctcaccagtctaggcatgactggcttctgaaaaatttcagcacacctcctcgaacctcagtgtcagcagagagggcccatctgttgtctgtaacatgcctttcacatgtccaccttcttgtcnnnnnnnnnnnnnnnnnnnnnnnntggaaggccctctcccttagccaagtcctcctccggcttggagaacttcctcggcatcacctacttcattgagccttctctgatcactccatccctctcctacccctacctcacccaaccctcagatgtataaatagattcttgatgcatagtattcacaatttttgatcgatcattatttgtgtgtgtgtgtgtccaatctcacaagtacattgtaaacccttcggtgggtgggggccatatcctagacctctctgtttcccccagagtatctgtaac

SEQ ID NO: 11892 - DNA, 696 bp, Macaca Fascicularis
caggatgaccatggggaagagttcaactttggagacatctttgtccaccaagccatccacaccatcgagtactgcctgggctgcatttcaaacacagcctcctacctgcggctctgggccctcagcctggctcatgcacaactgtctgaagtgctctggactatggtgaagaacaaacggccttcagatgcgaggactggggaggaatcgttggggtttttattatttttgccgtatttgctgtcctgacagtagccatccttctgatcatggagggcctctctgctttcctgcatgccctgcgactgcactgggttgagttccagaacaagttctatgtcggcgatggttacaaattttctccattctcctttaaacacatcctggatggcacagccgaggagtaggctgagggctgcacctcccgcagcggtctccctgccaatgaaagaagttcagtctgtctttggtatcagcccctgaaaggcgttcaatgggaaggttgttcttggctcacctgaagcatgaagctgtgtattatttggatatcagcctgtggatttgacacgacttaaccatgtcagagaagaaggactttggcaagtgatttttgtcttcgtgtggggtattaattctcaaataataaaataattgagaaatgaggggagaatgctaaacagatgtcttcttgcaata

SEQ ID NO: 11893 - DNA, 700 bp, Macaca Fascicularis
  misc_feature (1)...(700): n = A,T,C or G
cagggaacaatgagcacttgaagannntnttnntcaaaagaccacagtgaggccaccttgagtccggccgactaaggcccctcaaccctgtcaccaannnnnnnnngacactggcaggacctccgtctccagcatcccacccctgggtgtgggactttggggcagccgtgtgtgcaggtgccggcgcaggctagctcctcctggcttggtgtggtgtttgccattacagaacatgctgccacgaagagccctgggcatgattttgcttgtacttccggaagtggggttnnnnnnnnnnnnnnnnnatgtaatttgttttacttgaaatgttccacttcttgttctgggaggtggttccaagggtgtctgcttttggccaggcgtggcnnnnnnnnnnnnnnnnnnnnnnnnnnnnnnnnnnnnnnnnnnnnnnnnnnnnnnnnnnnnnnnnnnnnnnnnnnnnnnnnnnnnnnnnnnnnnnnnnnnnnnnnnnnnnnnnnnnnnnnnnnnnnnnnnnnnnnnnnnnnnnnnnnnnnnnnnnnnnnnnnnnnnnnnnnnnnnnnnnnnnnnnnnannncgggaangaggatgcagtgaaccgagattgcaccactgcactacagcctgggtgacagagcgagactccatctgaaaaaaaaaaaaaaggggaggggtgtctgcttttgtaactttaaaaact

SEQ ID NO: 11894 - DNA, 813 bp, Macaca Fascicularis
  misc_feature (1)...(813): n = A,T,C or G
gcgggaccatgtccactgcttgggnnnnnnnnnnnnnnnnnnnnnnnnnnnatgcaattggactggaggctataagtggtctactgctctgccatctaagcatcaccctcggtgggtttggagcagaccgtttctacctgggccagtggcgagaaggcctcggcaagctcttcagcttcggtggtctgggaatatggacgctgatagacgtcctgctaattggagttggctacgttggaccagcagatggctctttgtacatttaattgtggtatgtgcttcagaaaggagcagtgcttagaaaaagcccttttgtccataggaattgatgtggtgtgagtgatattctatgtttttaatgtacagcatctgtactttgtttgccttcataaaggtaaaataaagaagtgaaacactgaaccgtgctaatctggaatttgtttttatttgcctgaaatatatttttttctgtgaaaaaattaaaacgtacttaagccaagagaatgacttctacagtgattgaaaatccatttaattcctatgactttgttttgtattgctcaagtcaaactacatcacttgtatctnnnnnnnnnnnnnaatctgccttgcaaagcctttaagctatgattgcaggaagtggaaagtgtttttattgttagctaattgaagttgnnnnnnnnnnnnnnnnncttgtgtaagatttgcagtgtaagtatgcagtctggtctgtatatatgaaaatttgaattaaactgcagaatgtttagttatggtttaaattttcttagtagtatgtaaaaggtaagagta

SEQ ID NO: 11895 - DNA, 782 bp, Macaca Fascicularis
  misc_feature (1)...(782): n = A,T,C or G
gagatgtgatgagtnnncagaacaacntcattcatcaacagttagatatcnnnntatttttttcttttccctcaatccttttttatttttaaaaatagttcttttgtaatgtggtgttcaaaacggaattgaaaactggcacccatctctttgaaacatctggtaatttgaattctagtgctcattattcattattgtttgttttcattgtgctgatttttggtgatcaagcctcagtccccttcatattaccctctcctttttaaaaattacgtnnnnnnnnnnnnnnnnnnnnnnnnnnnnnattgcatttnnnnnnnnnnnnnnntaaataagatcgaccaannnnnnnnnnnnnnnnnnnnnnnnnnnnnnnnnnnnnnnnnnnnnnnnnnnnnnnnnnnntcctggactgtgactttcagtgggagatggaagnnnnnnnnnnnnnnnaactgtnnnnnnnnnnnnnnnnnntaacttgaagctacttttaaaatttgagggtctggaccaaaagaagaggaatatcaggttgaagtcaagatgacagataaggtgagagtaatgactaactccaaagatggcttcactgaagaaaaggcattttaagattttttaaaaatcttgtcagaagatcccagaaaagttctaattttcattagcaattaataaagctatacatgcagaaatgaatacaacagaacactgctctttttgattttatttgtactttttggcctgggatatgggttttaaatggacattgtctgaccagctca

SEQ ID NO: 11896 - DNA, 630 bp, Macaca Fascicularis
caaatagaatctcactgatagcccgcaagaatcagatgccgcccctgcttccatatcagttcaaggagccctcgtgtttgccacctttcctttgaacttccccctgcctccctgcctgtgtctgcttttgcagctcaatgcagccatgacaaggaaagaaaagacaaaggcaggccagagagctgggcagttctctgcagatgcagatgcaggcagtggaggtggcccgagcaggcagaaggacaccaagcgccctatgctgcttgtcattcatgacgtggtcttggagcttctgactagttcagactgccacgccaaccccagaaaataccccacatgccagaaaagtgaagtcctatgagctgaaggggtgtttccatgtacgtttcaatctctccatctaccaggcctcacgatagaaaaaaaccaaaacgctgccaggttttaggagcagttctggtctcaaaaccatcaggatcctgccatcagggttcttttgaaatagtaccgcacgtaaaagggaatttggctttcatttcatctaatcattgaattgtcaggctttgattgataattgtagaaataagtagccttctgttgtgggaataagttataatcagtattcatctc

SEQ ID NO: 11897 - DNA, 642 bp, Macaca Fascicularis
  misc_feature (1)...(642): n = A,T,C or G
agagagagtgaggaaaggaaaacattnnnnnnnnnnnnnnnnnnnnnnnnnnnnnnnnnnnnnnnnntgttcttatcctactgaatacataacccagaagatatcctgtaaggtaggtattcttgtctaatttttatagataaggaaagcttcttaatggtaagattaaggtcctgcagctggtaannnnnnnnnnnnnngaatccaggcctgactccaaagcataagctttttccattatgaaacattgcctctaacaagcatgatcttttcttttgcttctcctgttgcagacaagggactctcaggaaaacgcaccaaaactgagaactcaggtgaggcattagctgaagtggaggactccaaccctcagaagacttcagtcactaaaaactgtgtgaagaatctaagcagccannnnnnnnnnnnnnnagagccagagagccgactagagaaaggtgtagatgtgaaggtgagatccttgacctgtctccagtcccttcatggtggtttttaaatggggttccatccccagcttctctttgaagggtaggaaaaaggtaaaaatgaatnnnatnnnnnnnnnnnnnnnncatcnnnnnnnnnnnnnnnnnnnnnnnnnnnnnggttggctaacttttg

SEQ ID NO: 11898 - DNA, 752 bp, Macaca Fascicularis
  misc_feature (1)...(752): n = A,T,C or G
accgagaggagaccacnnntntccgccaggagatccaagagctcaaggccagtnntaagatttccaaaagaccaagtgcagcatctgtaacagtgccttggagttgccctcagtccacttcctgtgtggccactccttccaccaacattgctttgagagttannnnnnnnnnnnnnnnnnnnnnnnnnnnnnnctccctgaaaaccggaaggtcatggatatgatccgggcccaggaacagaaacgagatctccatgatcaattccagcatcnnnnnnnnnnnnnnnnnnncagcttttctgtgattgctgactactttggcagaggtgttttcaannnnnnnnnnnnnnnnnnnnaccctcnnnnnnnnnnnnnnnnnnccagcctggaggctgggctgcagcgcgacctgctcatgcactccaggaggggcacttaagcagcctggaggaagatgtgggcaacagtggaggaccgagaggacagacacaatgggacctgagcgggtgttacacagaaggctggctgacatgcccagggctccactctcatctaatgtcgcagccctcagaactaaagcagactttctttccctgccttcttatttagccagcctgccatccctcctcttcactagcagtgtagatcattccagatcagtgggggagggcacctcagcaacctctgagtgtggacaatagctgctttattctctatccaagagcaccaggctgtgcttgggtccttgctcg

SEQ ID NO: 11899 - DNA, 1077 bp, Macaca Fascicularis
  misc_feature (1)...(1077): n = A,T,C or G
cagagcaaagactccagagagctgcnnnnnnnnnnnnnnncagtgcatagnnnnnnnnnnnnnnnnccttctaaaaagtatgannnnnnnnnnnnnnnnnnnnnnnnnnnnnnnnnnnntcctttnnnnnnnnnnnnnnnnnnnnggcgccccatcagcagaacttacacacggaagaagctcatgggaacctgnnnnnnnnnnnnnnnnnnnnnnnnnnnnnnnngccaaaagatgaaggagtcagccaggaccctatgggtataaagaagttggaggcctggtcccaagcctcttttgccatggtcagtgnncagattgccattagaatgccttagggttttctaattcccctcatggatccaatccatctcctggccctgccccttgttggggaagttgcaggaggagaggtggatggcaatgtagttggtgctnnnactcaggcagnnngggagtcaggaagccagacaaggaatctcattccagccccaccccaaccatggccttggcaagtcagggggccactctgcctcatttatgcaaatggagaaaggagccctccctggggtcccttgagctgctataaggccgagctgctgcaacacaggcagcgctttgtaaactgtgaagccatatatgtgaaactgaagagtgtattgggcagcagaagctgttttttgccttccctgtgtaacaataaaatcatctctagtgacnnnnnnnnnnnnnnntttacgtttaatgttgggcctgaggttaactgtgacctnnnnnnnnnnnnnnnnnnnnnnnnnnnnnnnnnnnttcaaggactgtccaagannnnnnnnnnnnnnnnnnnnnnnnnnnnnnnnnnnnnnnnnnnnnnnnnnnnnncacctggctcgccatttccaccgagagtgccccacagacccgctggaccagcctgctgccgggtcctggccaggggtctggctgactctgaactctgtctccagaaagcattcaagcctattgtgttcccaaatctgattcctcctattgtcttgtaaatcaaactctaagtgaaaacttcccatttctccctcagag

SEQ ID NO: 11900 - DNA, 738 bp, Macaca Fascicularis
  misc_feature (1)...(738): n = A,T,C or G
gccgaaatannccagcnnnnngnnnngagccagctggtgaacctgtacctcgggaggtcacactttctctggaaagagcctgccaccatgagctggctggaggagaacgtccgtgcggttctgcaaactgtggacgccggggaccctnnnnnnnnnnnnnnnnnnnnnnngcggaaggtgctctacnnnnnnnnnnnnnnnnnnnnnnnnnnnnnnnnnnncctctctgagatcaaggaagctgtggctgccctgcccccggatgtgaccacgcagtctgtgatggggtttgaccctctgcctccttcggacacaatctactcctacgtcaggccggagaggnnnnnnnnnnnnnnncacggaaacacgatcgcactcttctttaggtcactgttnnnnnnnnnnnnnnnnnnnnnnnnnnnnnnnnnnnnnnnnnnnnnnnnnnnnnnnnnnnnnnnnnnnnnnnnnnnnnnnnnnnnnnnnnnnnnnnnnnnnnnnnnnnccaacttccacctcaacgacctagaggcaccgcacgaggacgacgcggacggggagggggagtgggactgagcgtccgcagaggtgcctgaaagccgtaatgatgttgctgatttctgtgctggtcagaatcggtnnnnnnnnnnnnnnnnnnnnnnnnnnnnnntcgctgacctggtcgctgtttctcctataaatgtaaatgggcgagatgccgactgtatcgctgacnnnnnc

SEQ ID NO: 11901 - DNA, 729 bp, Macaca Fascicularis
atgggaagagcagatagactgctgttgcccaggaacaacgccgccaaactgattgacggggagtacaaggattacctggcctcccatccgtttgacacagggatgacgcttggccggggaacgtccagggagctctgaagctggcagccttaatgatgcaagtgcatgaaggaccgtgatgtggggaggccatggggcagctcttttcatggcttgtacatgcctcagctcctggtaattagctggactccgtgacccacccctggtgcagcgtagatccgacttctgtctgggcaaagggtaggggcgggaagcctgagtgcaaatgtcatttccctctactccctcttcctgcctctccccaccctgcccacatccacggaggggagaaaggtcatagctaaatgcaaccaagtctgtatcttgtcccaacctgcttatctgttctgttagcctgtcataaagtaagcctttctggtgaaggaaggttgctatgaaacttgttttcttggtggaaatggccaagtttggggactgtgctttttgccttacactaatgcttagaaagctgtcttttcagtggtggtgcagcccccagatgtgtggccaacctctgctacaaaggaatctctcactgagtccaggccaccaatcatgcagatagcccatacatttgatcgctgtaaactatgaagtcttgtcttacaagaggtttttcttctgctgtgg

SEQ ID NO: 11902 - DNA, 734 bp, Macaca Fascicularis
  misc_feature (1)...(734): n = A,T,C or G
agggccgcatctgnnncagttnnnnngacagtgatggggccctcaccatnnnnttgaatcttggcccccannngcgccctgagctccaagataagaatgnnnnnnnnnnnnnnnnngaacatttgttcattgctgtcacctcctgaatcactggggtccctcagcagaacctccctgacacctgggctgtggagaggttggtgcgtgtcagtgaccatcctaatgcctctctctcactcctaaccccctgtttgaggggagggtgttggtgccttgacggggctgggtagggtgtccaaacttgtggcttcccaggcacctgcagtgtgaacactgcttgactggctcagggttagggctgcagagggggctgtgccacaaaccagttacttaagcagccctgagtgtccccatgccttggtgcgggtcctggaggcctcttgggggtgggacctttgggcagggtttgcccactgatgcgccccccaccatggggccctggctacatggggctccttggaccctatagaccctgcagaccccacctgtgtcaggccggttgcnnnnnnnnnnnnnnnnnnnnnncccggggatggctttgctggcacactcaggagccgggccgcgggggctgcagggagtgcacctggacccgtggcgttgcttcattgagataaagaacacttatcacatagcacaaaggacgggccatggtgctttccccaaaagttttg

SEQ ID NO: 11903 - DNA, 734 bp, Macaca Fascicularis
  misc_feature (1)...(734): n = A,T,C or G
aagggtgggcagccactaccttggtttgagcataggaaaaatgtaccacagtttgcagaacctacagaaacattgtttggtcccgattctggaaaaggtgccaagagcttagttgaactccttgatgagtctgaatgtacttcagatgaggaaatctttatctcacaagatgaaatacagtcatttatgnnnnnnnnnnnnnnnnnctacagcaatagagaacaataccgacagcatctgaaggagaaatttaatannnnnnnnnnnnnnnatgatcacaagaggcccatttgtagtggctggttgannnnnnnnnnnnnnnnnnnnnnaaataaaatagctctgtctttcaatgaaacactcacgatgactactgcgccttctctttcaaaaaactcttaatttagtgacttatggcaaaattttatcttaaatcaatgtgattctttcttgttttgggagacggtggaggtatcctcattagtttgttctttcttcaggcttgtgtctttagttgcgtgnnnnnnnnggcctgccatatnnnnnnnnnnnnnnnnnttcattaaatgtttctcttcctgtgagacttactaaagcaacttagtggcaaaaagtaatgttgtacttataattctgtacagaaatgacaatgagctgaatatatggttttacaaagtagacatccacttgcaaaatgtttggatgtaatgttaaagcgcaatgtgcaaaattaa

SEQ ID NO: 11904 - DNA, 693 bp, Macaca Fascicularis
  misc_feature (1)...(693): n = A,T,C or G
acccctcctgacgctggggctgcggttcatncgtcgtcccattcatgccaagttggtgggacccacccagctggctctgtcctgcgtgacctgagggcccactggggtttggaagaggataaggaccttactgctctgctgcgattctgtcctcggctcacggtggccatgctctgtggtggggcccctgggagcaggcgccacctccttcctcccgggggcaggcactcgcccgcccacttctgagtccaggtgtcgggatcgaggtgttaactgtgattctatccagcgagtgcccacccgatgtcagagcagcctgggggccagcacgagcccctgaccccacttccttccgggctctgggctcctcccacgagccacgttgatcttcacaacgaccctgggctgctggggtcactcaagcagccctgagacccagccaggctgggcacagctccacggcatgggtgtctcnnnnnnnnnnnnnnnnntggaggactgctgtgagtcaccggcctggagcccagggtgtcctgggcctcacagccaccctctggccggagcacgtcctgggcctgattccctgcggttctggccccgagggaaggggcattagggtggcggagggacttgcgaagggcttttcatcctagacatcaactcgagtggaaacctgggccaggcggcccagag

SEQ ID NO: 11905 - DNA, 772 bp, Macaca Fascicularis
  misc_feature (1)...(772): n = A,T,C or G
tgatgatcaagataatgcgtgcccatgtgcacatgtggtannnnnnnnnnnnnnnnnnnnnnnnnnnnnnnnnnnnnnnnnnnnnnnnnnnnnnnnnnnnnnnagatgcggggctccccgtgtgcacccctgagaacgacttcgctgagcacctcctcatcccacgcactgggggcctcctcagcggctgggcacgcaatggcactgacctgggcaactcgctaaccacgctgcctgtcacacttgtggagggggaggagtgcgggcaggtcctgaatgtgaccgtcaccaccaggacctattgtgagagaagcagtgtggcggccgtgcactggatggagggaagtgtggtcaccagagagcacagaggctcctggttcctcacaggggtcctgggctcgcagccagcaggagggcaggctcgcatggtccttgtcaccaaggtctccaggtactcactctggtttaaatggatcatgaaataaatgaaaaccagccagaaagaacacaacctgaagtgggattccaagcttgcattgccaccacggagagcactgaaacttcaccacacgcttagaggccatcacagtcccaggccaccgctcagccccaggccacccgctcagccccaggccacccgctcagcccacggagcagcagagccgcccttgctgggccatttaccgagcactgtgacctttctttccctggatctctttctctcaatagagaccttcagaaaaaacatgagatgcattaaataataaaataa

SEQ ID NO: 11906 - DNA, 753 bp, Macaca Fascicularis
  misc_feature (1)...(753): n = A,T,C or G
acaaatttaaaaagctagannnnnnnnnnnnnnnnnnnnnnnnnnnnnnnnnnnnnnnnnnnnnnnnnnnnnnnnnnnnnnnnnnnnnnnnnnnnnnnnnnnnnnnnnnnnnnnnnnnnnnnnnnnnnnnnnnnnnnnnnnnnnnnnnnnnnnnnnnnnnnnnnnnnnnnnnnnnnnnnnnnnnnnnnnnnnnnnnnnnnnnnnnnnnnnnnnnnnnnnnnnnnnnnnnnnnnnnnnnnnnnnnnnnnnnnnnnnnnnnnnnnnnnnnnnnnnnnagagcaagactntataaaaaaatttaannnnnnnnnnnnnnnnnnnnnnnnnnnnnnnnnnnnnnnnnnnnnnnnnnnnnnnnnnnnnnnnnnnnnnnnnnnnnnnnnnnnagtttgaggctgcagtgagccatgatcgcaccaatgcattccagcctgggtgacagagtgactatctcaaaaaaaaaagcacaccagtgtcttccatttctcttctaatcataatcatggctttaaaaaatacccttggaaaaaaaaaatacccttgagcatatggagcaaatttaagataattgttccttttctgctaattcattgtcactgtcatatctaggtctgtttctgtcgactgtggaccacttatgtgcaatctgtcggccaaagatgagcttactgggatgtagctccatcgtaagtcaaggagcatctgcgatttgtcctctgcttgtgggatatgtttttctgctactgagtctgt

SEQ ID NO: 11907 - DNA, 725 bp, Macaca Fascicularis
  misc_feature (1)...(725): n = A,T,C or G
gagcagnnnntgaagcnnnnnaannnnnnnnnncccctgctggccgtgttcagctcccaaggccagtcagagctgatcctcctccagaaggttcaggaatactgctacgacaacatccatttcatgaaagcctttcagaagattgtggttctcttttataaagctnnnnnnnnnnnnnnnnnagcaatactgaaatggtataaggaagcacatgttgctaaaggcaaaagtgtttttcttgaccagatgaagaaatttgttgagtggttacaaaatgcagaagaagaatctgaatcggagggtgaggaaaattaaatggctcaacaagcacaatacctaggttaccacacaccactttttgattgggaannnnnnnnnntttgagaagagaaacttggcttctgttttcgcaaaggaaaaaatataggataggcttctcttgcgcagagggagaaatggttttgtttttgttttgtttttaaatggagccctgaggcatcacctattatacttgggactctacctctcactcactatatgctaacttaaagccattcaacaaggagtcaagtaggaatctgaaattaaatactcaacagactcctctttttttagctgtatttttcaggtactgtgtggtgcccgccccactggtgtctattacaggccactttggtagttgtgtatctgctcatgtatgtgatttgacaaacccagtttttaaa

SEQ ID NO: 11908 - DNA, 782 bp, Macaca Fascicularis
  misc_feature (1)...(782): n = A,T,C or G
gcagtgatgctgtgcttgnngggcgggcaaggccgttctgtgcgagaagcccatgggcgtgaacgcggcggaagttcgtgagatggtcacggaggcccgatcccgaggcctcttccttatggaggccatctggacccgcttctttcctgcctccgaggctctgaggtctgttttggcccagggaactctaggagacctccgggtggctcgggcagaatttgggaagaacctcacccatgttccccgggctgtagactgggcccaggccgggggtgccctgctggacttgggcatctactgtgtccagttcatctccatggtctttggagggcagaagccagagaagatttccgtcatgggaaggcgtcatgagacaggtgtggacgacactgtcacggtgctcctacagtacccaggagaggtccatggcagcttcacttgcagcatcaccgcgcagctctccaacacagcctccgtgagcggcaccaagggcatggcacagctcctcaacccctgctggtgcccaaccgagctggtggtgaagggggagcataaggagttcttgttgcccccggtcccaaagaactgcaattttgacaatggggcaggcatgagttatgaggccaagcacgtccgggagtgcctgcgcaagggtctgaaagaaagtcctgtgattcccctggtagaaagtgagctcctggctgacatccttgaggaggtgaggagggnnnnnnnnnncaccttcccccaagacaaacactgatgtatctctgaataaataa

SEQ ID NO: 11909 - DNA, 716 bp, Macaca Fascicularis
  misc_feature (1)...(716): n = A,T,C or G
gaggaaggaaatgatacggtacccagacaccgggctaggctgcaactttatctcatttaatattcccagctatcgtgtgagaaaaaagcaggctaggcatgcgaaatcactttcatggattattaatggatttaagatggcataaatcagctcaactcaagatttcataatttttagtatttnnnnnnnnnnnnnnnnnnnnnnnacctcacaatacctcctccactggtttcnnnnnnnnnnnnnnnnnnnnnnnnntgaccactgtgctcttggctcttggtcctgagtaccgtggtgagggagtaaacactagaagtctttagtacagaactgctctagggacacccggtgattcctacacaagtgatgtttatatttctcataaggagtcttccttaccccaaggtcttcatgatgccnnnnnnnnnnnatgataaattatgttcagtgataacttactnnnnnnnnnnnnnnnnnnnnnnnnnncccgccatgattgacatttgatgggtttttaaaaatcaaagtgattttagaaaatctataatggatcagaaaataaaaacttccaagttnnnnnnnnnatatttagatttttctctagactctagtggaagacctttggaaaggccatgccaactgtgcttgtactgctagaagcactttacgtttcctttttgggtgaaatggatttatgtgagtgctttaaacaa

SEQ ID NO: 11910 - DNA, 775 bp, Macaca Fascicularis
  misc_feature (1)...(775): n = A,T,C or G
accgtgctcactgcctntggcggcatctttaagaagaaggggcatcacgaggcggagattaagcccctggcgcagtcgcatgccaccaagcacaagatccctgtgaagtacctggagttgatctcggaatccatcatccaagttctgcagagcaagcatcccggggacttcggtgccgacgcccagggggccatgaacaaggccctggagctgttccggnnngacatggccgccaagtacaaagagctgggcttccagggttaggcccctgctgcccccaccccacccacctgggccccgggtccaagagagggcggggatctgatctcgtgtagccgtgtagagtttgcttctgagtgtctgctttgtttagtagaggtgggcaggagcagctgaggggctggggctggggtgttgaagttggcttcgcatgcccagccatgggcctccctgtggaatgtcatcactgtgggaaccaggagtggcccttggctcactgtgttcttcatggtttgggtcggagttcatcgtcctttcttctaaatcccaacctaacttcttccaacctccaaactggctgtaactaccccaaatccaagccattaagtacccctgacagtagcagttttctgattcatcactggtcccttgaagacagcagaatgtccctttgcaatgaggaggagatctgggctgggcggagcagctggggaagcgtttgagtatctggaacatgtgtgtgccttctcaggtatggcagtgactcacctggttt

SEQ ID NO: 11911 - DNA, 776 bp, Macaca Fascicularis
  misc_feature (1)...(776): n = A,T,C or G
ggcagcctgctcccggnncctnnnccagtacaannctnnnnnnnnnnnnnnnnnnnnnnatacagagctgaggggtgaagatnnnnnnnnnnnnnnngttcccatgcttgggccgcagctgacctcccccataggtacacggcagcctgctcccggctcctggtccagtacaaagctctggccacctggggcttactgtcctgaatcagcactattgcacccatgtcagccccccacagcctggattgtccactggccatggagcggatcaaggaggaccgacccatcaccatcaaggacgacaagggcaacctcaaccgnnnnnnnnnnnnnnnnnnnnnnnnnnnnnnnnnnnnnnnnnnnnnnnnnnnnnnnnnnnnnnnnnnnnnnnnnnnnnnnnnnnnnnnnnnnnnnnnnnnnnnnnngaccatgcaccgaatgagccacctcccgcccgactnnnnnnnnnnnnnnnnnnnnnnnnnnnnnnnnnnnnnnnnnnnnnncatgtcggcatcagacgagctggacgactcacaggtnnnnnnnnnnnnnnnnnnnnnnnnnnnnnnnnnnnnnnnnnnnnaccgcttcctgcatgcctgagcccgtggcgccagcccctgcacggaagggcagagtctgaggcgatgactcctggtcccctatccgccacacaggccctggtcatccacacaactcactgtctgcagctgcccatcttgtgtctgtctttggtgtcaggactttggggcccgggcccctccccacaaaaa

SEQ ID NO: 11912 - DNA, 726 bp, Macaca Fascicularis
  misc_feature (1)...(726): n = A,T,C or G
atggggggcagtttgagtatttatttccttctacatgtctttcctgcccctaccattagcttagagctgtgtacctccagaatttgatggtgagcannnnnnnnnnnnnnnnnnnnnnnnnnnnnnnnnnnnnnntggtgcatgtaaagactgccagcatgaaaaccaggaaaactacttttaactttcaagttagtgaatatccaaggaggatatacttgccctannnnnnnnnnnnnnnnnnnnnnnnnnnnnnnnnnncaaggttgtgtgacttctggttctgattccaacccaatagggccatctcacagccccatctctgcatattagtgtctccagttggacccttagggtgcaacgttgctatcttcctcctgtannnnnnnnnnnnnnnnnnnttggctaaagaaagtaatgaaaggttcagtttggaaataacaggccaggcacannnnnnnnnnnnnnnnnnnnnnnnnnnnnnnnnnnnnnnnnnnnnnnnnnnnnnnnnnnnnnnnnnnnnnnnnnnnnnnnnnnnnnnnnnnnnnnnnnnnnnnnnnnnnnnnnnnnnnnnnnnnnnnnggagctgggtatggtggtgggcgtctgtaatcccagctacttgggaggctgaggcaggagaattgcttgaacccacaaggcggagattgcagtgagccaagatcgcgccattgcactccagcnnnnnnaagaagagcaaaactc

SEQ ID NO: 11913 - DNA, 666 bp, Macaca Fascicularis
aaggattcagtgtaatttgcaactacaactcctcttaggtatttaacttcgaaacatgaccattatatatttttaaataattggtgttttccattcattttaatctaaaaataagtgatccaggatttcaaaaagtagaattgtgtttgagaatcaaatctagagagaaattatgtacttacaaaaaccaccgagcagaaaaagatttgtattcaatgatcataaagtagaatatgaatgaattcttgctgaatggatgaatgaatggatgaatggatgaatgaatgaatgaatgaatgaatatgcaaactgtggtttcctagacttgagctctagtcagaactatcaggtgtgtctgttaaaggatttacctggatgtcaggtctgcggaacttcttagattttgacctcagtccataagccacactatcacctcggccatcatatatgtctactgtggggacaactggagtgaaaacttcagttgctggcaggtctgtgggaaaatcagtaaccagttcatcggattcatcagaatggtgagactcatcagactggtgagaatcatcagtgtcatctacttcatcagagtcattcgagtcgatggagtcctggctgtccacatggtcatcatcatcttcatcatccacatcatccatgtggtca

SEQ ID NO: 11914 - DNA, 647 bp, Macaca Fascicularis
  misc_feature (1)...(647): n = A,T,C or G
cagtcagaaaaccatcgnnngcgaatgaagatcacagagctggataaagatttnnnngagntcancnnnnnnnnnnnnnnnnnnnnnganaagaccacctacattaaacagaaccactaccaagagctcaatgacatcctcaacctgggaaacttcactgagagcacagatggaggaaaggccattttaaaaaatcacctcgatcaaaatccccagctacagtggaacacaacagagccctctcgaacatgcnnnnnnnnnnnnnnnnnnataaactctccagaacacatccagcgtcggctgtccctccagctccccatcctccaccacgcctacctcccatccatcggaggcgtggacgccagctgtgtcagcccctgtgtcagccccaccgccagcccccgccacagacatgtgccaccctccttccgagtcatggtctcgggcctgtaagggtgggaggcctgggcccggggcctcccccgtgacagaaccacactgggnnnnnnnnnnnnnnnnnnnnnnnnnnnnnnnnnnnnnnnnnnnnnngctgggcaccatggctggcctctcaggaccannnnnnnnncactcaggtggacaggacggggcagggggagacttggcacctgacctcgagccttatt

SEQ ID NO: 11915 - DNA, 721 bp, Macaca Fascicularis
  misc_feature (1)...(721): n = A,T,C or G
gggacaaaaacccaacagaacacnnnnnttccnctcattccaatcttgctgcttccaggaggcacggaaggcccagctagaaaaccacgaaccagaggaggaagaggaagaggagatggagacagaagagaaagaagctgggggctcaggtaaatctggacaggccagactctgggagccctgtgaaggtggaaaagtgggtctcacctctctccactcccttccagatgaggagcaggagaaaggcagcagcagtgagaaggagggcagtgaagatgagcgttcgggcagcgagagtgaacgggaggaagttgacagggacgagnnnnnnnnnnnnnnnggcagtggtgaggacgagagcagcgaggatgaggcccgggctgcccgtgacaaagaggagatctttggcagtgatgctgattcagaggatgatgctgactctgatgatgaggacagaggaccagcccaaggtggcagtgacaatgattcggacagcggcagcaatgggggtggccagcggagccacagccgaagccgcagcgccagtcccttccccagtggcagcgagcactcgnnnnnnnnnnnnnnnnnnnaagctgcagcttctgattccagtgaagctgatagtgacagtgactgagtcccagggcattcagggctggttcagacaccattattatgagcaggatggcacttttctagtggtttgtgagcctttcac

SEQ ID NO: 11916 - DNA, 750 bp, Macaca Fascicularis
  misc_feature (1)...(750): n = A,T,C or G
ccctgtccaggtatggagcagccactttcaccagaactgagaaaactgcacgagtcaccattcaggattcacggaccttttccacaaatttccaagtagacaacagcaacntcnnnnnnnnnnnnnnnnnnnnnnnnnnnnnnnnnnnnnnnnnnnnnnnnnnnnnnnnnnntggagaaagatgtgtgtatcttcagacatccatgaaatacaatattcttccagagaaagaggactccccatttgctttaaaagtgcagactgtgccccaaacttgtgatggacacaaagccnnnnnnnnnnnnnnnnnnnnnnnnnnnnnnnnnnnnncnnnnnnnnnnnnnnnnnnnnnnnnnnnnnnnnnnnnnnnnnnnnnnnnnnnnnnnnnnnnnnnnnnnnnnnnnnnnnnnnaaatgcttgaaagatctagctccgtgagccggacagaagtgagcaacaaccatgtcctcatttatgtggaacaggtgacnnnnnnnnnnnnnnnnnnntccttcatggttctgcaagacatcccagtaagagacttnnnnnnnnnnnnnnntaaagtctacgattactatgagacagatgagtcagtggttgctgagtatatcgccccctgcagcacagatacagagcttggaaatgtttgaggaccatacaggctgtatattttgctggattctctgtcctatacatttacttagaaggaatggcgctatttgtctctataaaatagacactaaaaag

SEQ ID NO: 11917 - DNA, 769 bp, Macaca Fascicularis
  misc_feature (1)...(769): n = A,T,C or G
accagtaccagtagcagnnnnngnnnnnnnnncnnngaagtagnnnnatataatgctcacagtnnnnnnnnnnnnnnnnnnnnnnnnnnnnnnnnnnnnnnnnnnnnngaaatcgttcttttccttttcttatgttgtnnnnnnnnnnnnnnnnnnnagaaataatcgtatcccaaagagagagcgattggcttgtttcgcttttgttgttgttcttccctgttatctgcttaatagagagaagtttgtgtggtgggacagattttttaaacacacacacacacacacacccagtatatatggggtgatgcacaggtaggagctggcagtgcagggaagaggagacaccggtctgcaacaacagcttctactaccagcccttagggcactcacccctgtgctcaagcaatcattgtcaatgacaaagtgactattgaagttataattgtattaaattaatgctaataatttggatattttattttatttttggctgctcgggtaactttagcccttaaccaagcatacgtggtttttttggttgtttttttttgttttgttttgttttttttctttttcctttttgggtacagctgtaaaatatttggatataggaaatgttgtgttatcttgcagccttgatattcagggtggattgtaaaatataaatttttgtgagatttcaaagattaagattattttgataacattatttacagatttaaaagatgtggttatcannnntctcgagggggaaactactgcataa

SEQ ID NO: 11918 - DNA, 724 bp, Macaca Fascicularis
  misc_feature (1)...(724): n = A,T,C or G
annnnnnnnnnnnnnnttacgggtgaccttccatcccttgaaccaaggcnnnttagcacttgnntccagcatgttgtcaccattcccaccagaaattggcacaaatgntactgtgtcggggttgtagccaattttcttaatgtaagtgctgacttccttaacaatttcctcgtatctcttctggctgtagggtggttcagtggaatccattttgttaacaccaacaattagttgtttcacacccagtgtgtaagccagaagagcatgctctcgggtctgcccattattagagataccagtttcaaattcaccaacaccagcagcaacaatcaggacagcacagtcagcctgagatgtccctgtaatcatgtttttgatgaagtctctgtgtcctggggcatcaatgatagtcacataatacttgctggtctcaaatttccacaaggagatatcaatggtgataccatcgttcccnnnnnnnnnnnnnnnnnnnnnnnnnnnnnnnnnnnnnnnnnnnnnnnnntttcccatctcagcagcctccttctcaaatttttcaatggttcttttgtcnnnnnnnnnnnnnnngtagatcagatggccagtagtggtggacttgcccgaatcnnnnnnnnnnnnnnnnnnnnnnnnnnnnngagtcttttcctttcccattttggcttttaggggtagttttcacgacaccttgtgtnnntggcnnnca

SEQ ID NO: 11919 - DNA, 741 bp, Macaca Fascicularis
  misc_feature (1)...(741): n = A,T,C or G
tccagaagggccaccccgacctccaagggcagcctgcggaggaaatatttgagagtgtaggagatcgagagctaagacaagtctttgaaggacaaaatcgtattcatcttgaaatcaagcagctgaaccggcagttagatatgattcttgatgaacagagaagatatgtttcttccttaacagaggaaatctctaaaagaggagcaggaatgcccggnnnnnnnnnnnnnnnnnctcaacaagaactggatactgttgtgaaaactcagcatgagattctgagacaagtaaatgaaatgaaaaattccatgagcgaaannnnnnnnnnnnnnnnnnnnatgcagcaccctggctctgccggaggcgtctacgagacagcannnnnnnnnnnnnnnnnnnnagagcacctgcacacagtaaagagggacatagacaacttagtgcagcgaaacatgctgtcaaatgaaaagtcgaaatgcccagaactaccaccatttcnnnnnnnnnnnnnnnnngtccacttcattatatttgttgtggtgcaaactgnnnnnnnnnnnnnnnnnnnnnnnnnnnnnnnnnnnnnnnnnnnnnnnnnnnnnnnnnnnnnnnnnnnnnnnnnnnnnnnnnnnnnnnnnnnnnnnnnnnnnnnnnnnttgttgttttgagggaatttaagtatttaaattgcttcatagtctaaattattaaaatttttaaataaaataactgtttaaacat

SEQ ID NO: 11920 - DNA, 703 bp, Macaca Fascicularis
  misc_feature (1)...(703): n = A,T,C or G
cgcaggagcggctcacagtcnnnntgnnnnnggaggactgcatcatcactgcctgccaggagggcnncannngcacctgggcccggccgggcaaggcgttcacagacgaggagaccgaggcccagacaggggaaggannnnnnnnnnnntctcccagcaagnnnnnnnnnnnnnnnnnntcctcccaaccaggcaaatccccgagcggcacagtggtgtgaagccatggatataggggcccctaccccatgcccccagcctcttagccataaccctccctgctgacctcatggatcaacgtattaacaagactaaatatgacagatggactgcgccggtcccccaacctgcacaaaatttgggggccccccccagactggcccagacactgggggaatgtagtggcccttgtggcctcagccttgtcccccacccactgccaagtacaatgacctcttcctctgaaacatcagtgttaccctcatccctgtccccagcatgtgnnnnnnnnnnnnnnnnnnnngactccccgcccccgccacaagagccccaggtctgcagtgtgccccttagttgagtgggcagggctgggggtggtccagccctcacccggcccccaccccagatgcccttgctattgtctgtgcttttgaagagtgttaaattatggaagcccctcaggttcctccctgtcccccaggac

SEQ ID NO: 11921 - DNA, 757 bp, Macaca Fascicularis
  misc_feature (1)...(757): n = A,T,C or G
taacatagtgatcaactctactgctgtcnnnnctgacgcgatgagcctcctgggtttagnnnnngccccagtaacaggaggagtaagnnnactgctctctgccactggtcaaggtttggcagcagcagctggggtcaccagcgtgggatggaagcacctgaaggaaggagcaagggcagagtttgcggaagagttgagatccaaggcctcggagctggagaggaaacnnnnnnnnnnnnnnnnnnnnnnnnnnnnnnngcaacagaaagatggtacagggaagtctacagcctgagacccatcactagtaatcctggctgggatcctgggtctgcacaaaaaagggtgtcactggaacctgctcaaccacattccagcgggaaggagagagcccctctgnnnnnnnnnnnnnnnnnnnnnnnnnnnnnnnnnnnnnnnnnnnnnnnnnnnnnnnngttctcctagctgcccagctcacctatcttaacaatttttttaattttctatgctttagctgctattttgaaagtagtgcatagacaagtttttttgttttgttttgttttgtttttttaattcaggaaactaaaacataggaagaaataatgcacaattaagagtgacaactgttggtattttggcatagaatttccttcctgtgtttttcttgcttggggggttgaaatacttgctttatgtcattnnnnnnnnnnnnnnnnnnnnnnnnnnngggaccntttctcaaggctgtatacaa

SEQ ID NO: 11922 - DNA, 658 bp, Macaca Fascicularis
  misc_feature (1)...(658): n = A,T,C or G
ggcggattcatgtcaggccagnnnnnnnnnnnngctccaggcctcggggctgccattctgagtgtgcagaaggcaggactcaaaacaagatcccattcgaatcccgctgtatgtactgcatcctctcccagctctgaggctctggaatcccaactgtctgtgttagtcagtcaccagcttccagggaannnnnnnnnnnnnnnnnnnnnnnnnnnnnnnnnnnnaagagacagaacttttcaaagaaaagnnnnnnnnnnnnnnnnnnnnnnnnnnnnnnnnnnnnnnnnnnnnnnnntcttggaggaagcctgtttaaaaaatagtttccatcatgagtcaatcaatgagctcccacctctccagccagcctagaaagcaaacgagctgcccacagttctctgccgtgtttgggaggttgaggccacagtgtttggactggtaagccagacaggccccctcccccaagctnnnnnnnnnnnttcacatgtaccttggttcctgggcagctagttataaagcaagagggacaggagcccaaaagagacactaaggacaagagatcacaccagagtacatgtttctgcctttgttttcagtgtggctttggacaggaataaatgagtgaatcatttgccatacagttttccaatgcgca

SEQ ID NO: 11923 - DNA, 1121 bp, Macaca Fascicularis
  misc_feature (1)...(1121): n = A,T,C or G
catccaagaccnnntnctaaatagcnnngaggagnnnnnnnnnnnnnnnnnnngcatcctcaatggatgtgaaaatggtcgctgtgtgagnnnnnnnnnnnnnnnnnnnngtgattgctttgatgggtatcacttggatacagccaagatgacctgtgtcgatgtaaatgaatgcgatgagttgaacaatcggatgtctctctgcaagaatgccaagtgcattaacaccgaaggttcctacaagtgtttgtgtctgccaggctatgtaccttctgacaagccgaactactgcactccgttgaataccgccttgaatttagagaaagacagtgacctggagtgannnnnnnnnnnnnnnnnntaagcccatatactctgcactgtgtaaaggaaaagggagaaatgtattatacttgagacattgcacctaacccggaaggctggaaatacagaaacagcatggagttgcaagtcctctgaagacaatgagaggacttaggatgagcccaacaggtgnnnnnnnnnnnnnnnacatttctctgaaaaaccagtatatatagtctgttcatatgtaaaattcagtggaagagaggtggaacagtgctgttattttaaacagaaggttgtattattatgttgttttgtttttttactattgcttgattaaatttggcatttaaatagtggtggaaatattttatataattttcattttttggttgtgcagttccttggctactgtttttcttttccttcagtttttttaaactctcaaannnnnnnnnnnnnnnnnaaatattgttaagctctattataaatattgttacacagggttatgcaattcctggcctggagcatttttgaaattcaaattgtttgtcctgtggagcaggcagtgattttgtttcaaaacttttatacacatttggagaaaagtactttatattttcagtgttttgttcgatgttaatgtccattcttagccaagctgctagcaggtgtcaattggatccctttccttcactgaaatggaagagtttataagcttacgttagtattgtaatatgtaaagtaagcccaacaaaaattttttaaaatttgatgatccnnnnntatatcta

SEQ ID NO: 11924 - DNA, 700 bp, Macaca Fascicularis
  misc_feature (1)...(700): n = A,T,C or G
tactcattttatttgattntgatagaatgtgagcaagttgacctcaggtcacactttgttccaaaaacttttggaattattccaggacttgtggtggaagtatggtactctagggcagtctttctcaaactatatatggtaaaggaccaggttttttgttttccagtccttcatttatcaatatgcattcctattgcctatgacaagtatggagttcacactgtgtgctgcccaccaggcaagtttgacagcacccaaactggccagactgttctgtacgttaagtccattgatcatgtacttggatatcacagcaacattaaaacgctaaaaagtttttaaacactttcaatttctaattcaccatgtcacagactggtaaaaaaatacacacacacacacacacacgtacacagaccagcacaagtctgcgaatcacctttgagtggcactgttctggggccttccgtctctctgaagatcctagcagagctgatacctatctgtacctcttgttctctcctatttgagtttcacttccagagaacttgttattcagcaagaatgtgtcactagtaaggacatctctagcatttccctagccttccttttctgctgctcaaaaataatcattacaaagcataggtttaagctgtatatgaaatatttatgcgactcccaaacttaaaggagttgctcc

SEQ ID NO: 11925 - DNA, 732 bp, Macaca Fascicularis
  misc_feature (1)...(732): n = A,T,C or G
gtccgagtgtgcaagatggatggagaagtaannnnngtgnnnnnnnnnnnnnnnnnnnnnnnnnnnnnnnnnnnnnnnnnnntccagagatannnnnnnnnnnnnnnnnngcgtgaagggggcnnnnnnnnnnnnnnnnnnnnnnnnntgtggaggacgtaccatctgacctctgccggagagaaactcacagaagataaaaagaagctccgagattatggcatccggnnnnnnnnnnnnnnnnnnnnnnnnnaannnnnnnnnnnnnnnnnnnnnnnnnnnnnnnnnnnnnnnnnnnnnnnnnnnnnnnnnnnnnnnnnnnnnnnnggatcagatcnnnnnnnnnnnnnnnnnnnnnnnnnnnnnnnnnnnnnnnnnnnnnnnnnnnnatgaacctgggggccctcaggactaggacagggtgnnnnnnnnnnnnnttctttcatgtacttggcctgagactgacctctccttgggtccaaagaccctggtcacatggcagagccacagcctggccctgtgtatnnnnnnnnnnnnnnnncttctaaaagtcaaaannnnnnnnnnnnnnnnnnnnnnnnnntgaggttgccccatcacagaggtgagttaaggggagagaattggtacacgtaagtcctatagtccaagatgtcacaccaccaaagccttgtggccacaccactccccaaaccacacaactgtgttaccatcatctccacagcaaggaga

SEQ ID NO: 11926 - DNA, 683 bp, Macaca Fascicularis
acaactgaagttcacctcgggacggtggagtccgcatcacaactgcacccaggtggccacagcgaacgacaccaccctccgtggctgggacacccggaccatgagccagatctattgcatagagaatgcccacggacagctggtgcgggatcttgacttcaatcccaacaagcagtactacttggccagctgcggagacgactgtaaggtgaagttctgggacacccgaaatgtcaccgaacccgtgaagaccctggaggagcactcccactgggtgtggaacgtccgttacaaccactctcacgaccagctggtcctcactggcagcagtgacagcagagtcatcctttccaacatggtgtccatctcgtcggagcccttcggccacttggtagacgacgatgacatcagtgaccaggaggaccaccgttccgaggagaagtaagggcatgcactgcaaagcggctcacaccgtaccagagcctcccttccccacagccatctcccgagccaggctgcgtagatagaaagtttacaggtgtgcgtctgggggacactgtccttcccccctgcagctgtggggacccacagttccaggggtgccgtcattagcagcccagatgggaggcactgcaggtgggttggggttaggtgcggttttaaaatagatctctttgtgtttg

SEQ ID NO: 11927 - DNA, 789 bp, Macaca Fascicularis
  misc_feature (1)...(789): n = A,T,C or G
tgccatgtgcgagactatggagcagcagctctcctcagaccctgactcggaccctgactgaggannncnnnnnnnnnnctctcccatcagaactggtgctgcttccagagannnnnnnnnnnnnnnnnnnggggaagccacatcccactggctccacgctcctctctccatcttagaaaccccttctctttactcccaaggttctgtnnnnnnnnnnnnnnnnntccagtttcttatctctggactgcagtggtcttcttgtgctagaactcagggctcagccttgaatcccacagacaaagtactttcttttgtctgtgccaagaggaatgcgnnnnnnnnnnnnnnnnnnnnnnnnnnnnnnnnnnggacacaaagaagagcatatgggagggcagggggttgggtgtgggtgtgcacaaagcaagcacatctgggatgggcacactggcagagccagtgttggggcatgtgctgcacttcccagggannnnnnnnnnnnnnnnnnnnnnnnnnnnnnnnnnnnnnnnnnnnnnnnnnnnnnnnnnnnnnnnnnngttgtttctgtcctgtcttcaccgagcgcagggctagaggcctcttagacattctccttggtcctcnnnnnnnnnnnnnnnnnnnnacccannnnnnnnnnnnnnnnnntggttttggcaattaaacctccttcctactgctttagactgcnnnnnnnnnnnnnnnnnnnnnnnnnnnnnnnnnnnngattgagatttataccacataccacacatagccacagaaacgtca

SEQ ID NO: 11928 - DNA, 658 bp, Macaca Fascicularis
aattcacttttgttgattacatcaagggagggacacagctgaacttcacagtagctattgacttcacggcttccaatgggaatcctctgcagcctacctccctgcactacatgagtccctaccagctcagcgcatatgccatggccctcaaggcagtgggagagatcatccaggactatgacagtgacaagctcttcccagcttatggctttggggccaagctgcccccagagggacggatctcccaccagttccccctgaacaacaatgatgaggaccccaactgtgcgggcatcgagggtgtgctggagagctatttccagagcctgcgcacagtgcagctctatgggcccacctactttgctcctgtcatcaaccaagtggccagggctgcagctaagatctctgatggttcccagtactacgttctgctcatcatcactgatggggtcatctctgacatgacacagaccaaggaggccatcgtcagcgcctcctcattgcccatgtctatcattatcgtcggtgtaggaccagccatgtttgaggcaatggaagagttggatggtgatgatgtgcgcgtgtcctctagaggacgctacgcagagcgggacatcgttcaggaaggttgctgcagccttggtgcatccatggtgta

SEQ ID NO: 11929 - DNA, 783 bp, Macaca Fascicularis
  misc_feature (1)...(783): n = A,T,C or G
agctaggaccacaggtgcgtgtcaccatgctttgctatttttttgcagaaacgaggcctcactatattgnnnnnnnnnnnnnnnnnnnnnnnnnnnnnnncattacactgcgggacagccaacatagagtacttgctctcaccctgtacattttcttacatcagggagtcaatatgtagtggaaagaagcatgtagcaaaaaagacaaccttggtctttaataaaaaagaaattggtttatttccgaaataaatctcctgacaaaaattctggtgatgttaagcaatgactgtcttagagtccagccagagaagaccttacacaaaaaaagagaacccactggaacagagaaggaagcgtgtagcatactcagtagtgaaatttaattttactgactgttacatatccatgccaatttgttttcatacttcagttggtttcggaatctgccttatacctagtatttaattatttattcatactcacaagcatcaaannnnnnnnnnnnnnnnnnggaaatttgtgtttaaactcaatggaatctaatatttctttatatcattagtccctgtaaaatgttaggtcacccagggaaaggggagaaannnnnnnnnnnnnnnataaggtgttgcttgccctccatgtcttcctaaagagcagaacttggagtttctcccttatgtagagaagaagtaactnnnnnnnnnnnnnnnnnnnnnnnnnnnnnnnnnntgaaagcttgtgcttacatgaaatatgtttattatcaagaagtccttttcc

SEQ ID NO: 11930 - DNA, 750 bp, Macaca Fascicularis
  misc_feature (1)...(750): n = A,T,C or G
gcagacccgggctggcannnnnnnntnnagnnnnnnnnnnnnnnnnnnnnnnnnnnnccgggcatccagggagatnnnnnnnnnnnnnnnnnncnnnnnnnnnnnnnnncgggaccgaggcctgcagatcgggtatcgcagcatcgacgatgacccaaggatgaagcatttcctcaacgttggcaggctccagagtgacaatgagtacaagaaggactttgccaagagtcggtcccagtttcacagccgcacagaccagcccggcctcnnnnnnnnnnnnnnnnnnnnnnnnnnnnnnnnnnnnnnnnnnnnnaggcagcccctgccccagcccacctgcgacccggagcagctgggcctcaggcatgctcagannnnnnnnnnnnnnnnnnnnnntgtcaagtataaannnnnnnnnnnnnnnnnnnnnnnnnnnnnnnngacccctcctggctcctacaaagtggaaatggctcggcnnnnnnnnnnnnnngccaacgcaaggggcctgggtctccagggagcttaccatcggagggcagaagcagtggaggctggagatcatcagagtggggaggtgaacccagatgccactgagattctgcacgtcaagaggaagaaggccctgcttttgtgagctgtgtccaccccgattcttgannnnnnnnnnnnnnnnnnnnnnnnnnnnnnnnnnnnnnnngatggctnnnnnnnnnnnnnnnnnnaaaaatggcccaccagcccatccca

SEQ ID NO: 11931 - DNA, 757 bp, Macaca Fascicularis
  misc_feature (1)...(757): n = A,T,C or G
cagattacagatgtgaccaacacnnnnntcaagaaaaggtggtaggacacaaagttcttcagtcctgagccctccatgtagggttggaagagaactataatggagaaacctctgagtttcaccttaggtatagaaaaaagaaagatggtccccttttatctgattctgaaacaggtaaactctgttactacgtttaattagaagatggaggagtcatttcatgattaagaacattcaacatgtattgttcattaagctagcttcctagttctaattagactaaggagactaagcctagagagtcaatgttagaacagtgataagaatgctgtgtgtgtgtatgtgtgtgtctgtgtgtgtgtgcacaataaataggaaatgtagaaactaagcaagaaggccttgtagctcagtctttaacaagggctagaaaagaatgtaatctgatatggaaggatagcagcttctaattttcaatcatccattgatatactgtgaaacttattttattaaattaatatttattaaatggaaatatgtttttctggtttataaccgctaaaaatatcatacggaggataaacgtaaataaatgaaagttaatgtcaatagaaaaattcaagnnnnnnnnnnnnnnnnnnnnnaagggactctttatgtgtaaatgtggataatacctgtctcacaaggttgttctgaggactggtatgtactgagtatgtatttgtacactatctggcacatatnnctcaataaa

SEQ ID NO: 11932 - DNA, 687 bp, Macaca Fascicularis
  misc_feature (1)...(687): n = A,T,C or G
cccgcagtgccaacagcacnnnnncccaggccctccactggactcgcactcagctgtctcctctggaggcccccgccctgctctgggggctcctcgtggccataggggctgtcagagttgtgcaggccctgctagcaccctggtctctccggtcctcccccctggcaccagccagcggggagaagcgcaggccagccccccataaagactctggagctgcctccgaacaggccaccccagcccccaacccctgtaccagtagttctcggaccgcccggcgaaagaagtagctgtgttctcccggctgcgcatcctgagagggttgggtccctgggactgctctggcctccggcaggacaggacccagccactgtgccttagctgaccctgcagggccgggcacaggttggggggctgcccctggggtttgcagggtgctgcattgagggctccaggccccacccccacgccagccacgcccctccccaggactcccactgttgcctctgtgattggcccaggagggaaacacgacccagctcaagacccttcccctgccctgggctgtgggggtctgagtctggaacccccaccccaggccccatgccggaggggaagaggctgactctcagggaaagaggggaagcactgtcatcttccacgtcatcttcacaccagcccatcctg

SEQ ID NO: 11933 - DNA, 766 bp, Macaca Fascicularis
  misc_feature (1)...(766): n = A,T,C or G
gcatgtgcaaagctatcccatgagggccctggcagtgagttaccagctggagcgctgtatcgtaannnnagccagctgcnnnagacgtnnnntcagttgagcacacatacacacgtagtagacatcactcgcactagccctgctaccaagagtccatcagcccaacttatggagcaagtggctcagcttaagtccatgagtgacaccattgagaagctcaaggatgaggtcctcaaggagacagtatctcagcgccctggagccacagtacccactgactttgccaccttcccttcatcagccttcctcagggccaaggaggagcagcaggatgacacagtctacatgnnnnnnnnnnnnnnnnnctgtgcggctggtcttggacagcgacaccggctgnnnnnnnnnnnnnnncagctgcaccagcttcacagtcgcctcatctcctaagcactcctttcccctgctgtccccttcgaccctcagccctctggtgccgctctgcccgatgcacagccacctcagccagcccccaggtannnnnnnnnnnnnnnnnnnnnnnnnnnnnnnnnnnnnnnnactcccaccctttcagcatcctgccccttcaccttgacctgggttcccccactcccattccctggcctctgccataatttgctgttcaattgctccctccttcctgaggggcctcagggcatgtggggggtaggctgagaccccaccaccaaaggtgagtgaggtcctcttgattgaggactcaccc

SEQ ID NO: 11934 - DNA, 781 bp, Macaca Fascicularis
  misc_feature (1)...(781): n = A,T,C or G
acagatgcacnnnnnnnnnnnnctgttcccaaannnnnnnnnnnnnnnnnnnnnnnnnnngaaactctcacacttccagannnngagaaaaaagccaccctgaatttacctggcatgcacccttcagataagccatgtcggcccaaatctgagtaactttgtataaatatcttatggggttttatattttcatttgatttttttgtttttgtttttgttttttttaagaatcttctgatagagaaaaagactgctttatcactcaaacatgttcctttgacctttcagtgtgcatgtgactcagtaacttcacatagaatatgattccctaagtatgccacacagcatcatattagatgtaagatgtaagacctgcaaaagacagaaggaatcttctgtaaccacatagctgtaagcccgagaggaagccttgttattgggcatttgatgaggtttggcacggacttcaaggataaatgaatcaaaactttgcaccacttttgttacaaggtatggtagaaaatagtaaagtcagtttcctctcatcaaatctaaaattctccaaaatactctcaggcataacatacttagttgttaaattttgaactgctgattactaatacttgaataccaatagttactgagattcctattttggttagtctgactcaggatttggagcctaattaactctttaaacttttgaaaattttaatcatcaagctatagtggctnnnnagtgcaattaataataactcatnnnacctccacagaattaata

SEQ ID NO: 11935 - DNA, 739 bp, Macaca Fascicularis
  misc_feature (1)...(739): n = A,T,C or G
gtaagggaacaaaacgaatacggtagaaatgactttagttggacaaatggaaaggttaaaagtggactttgtgatgagtttagtcttgagagtaatgatggatggacttctcaaagctctggagaattaaaagcagctgcnnnnnnnnnnnnnnnnnnnnnnngttcttctactatttcaaaagcactggaaaacttgaattcttgcaagaaattaggaagagatccaaccaatgatcttactttttatatttcacaaaagcgcaataatgtatactttagtcagtcagcagctaatttagagaatgcttggaagaggatagcagtcattaaaagtgtattttcgagtcgatctcttctctatgtgggtaatagacaagctagtataattgagtacctgccaacccttcgaaacatctgtaagactgagaagctaaaagaacaaggaaaaagtaaaagaagattcctgcactattttgaaggaattcatcttgacattccaaaagagactgtgaatactttggcagctaccttcccttaatgtttcatactaaccatgctttgtatagattatcatgtggtccttaagatacatttttatattatgtggatcttcgtggaaaagtatatttctcaatgtacattttaaacaaacaatttgtatatttttttattggtgggcaaatatttaaaatatttgagttactaaattgtatatatgattgtaattttttttctga

SEQ ID NO: 11936 - DNA, 749 bp, Macaca Fascicularis
  misc_feature (1)...(749): n = A,T,C or G
gcagcatgacaccccagcctggctttcccaaaactgtccgagggctcctctgaccaggatgggtagaggcctgtgctaaagagcccagatgcagtgtcttctgtgggactgtccccaaggctgaggctgctgccaactcctagggtcctctgtacctgccctgctnnnnnnnnnnnnnnnccccggagccccaggctgtgttaggattctctgggcctcttctctgtacctgcagccctgcacacagggccctgtgagctccccctgcagccctgtgaggcccctgaagccctgtgaaccccctgcatccctgtgagcccccctgcagtcctgtgagggccccgaagctctgtgaaccccctattgccctgtgagcctccctgctgctctgtcagcccccctgcagtcctgtgaggccccccaaagccctatgagcctacctgcagccctgtgaacccctcctgcagccctgtgagagccctgtgagccccctgcagccctgtgaggccccccaaagccctgtgaacctgctgcagccctatgagcctccctgctgctctctcagcccccctgcacccctgtgaggccccccaaagccctctgaccccctgcagccctgtgagcctccctgctgccctgtgagcacccccggagccctgtgaacccccccggagccctgtgaacccgctgcagccctgtgaggcccccgaagccctgtgaggtgtgggagccctgatgctgccatgtga

SEQ ID NO: 11937 - DNA, 646 bp, Macaca Fascicularis
  misc_feature (1)...(646): n = A,T,C or G
acatacatactcaaatataggctgtcnnnagtaaatcttaaaatcnngaagctaaaattcatccttttatgaggtgtggaagtcagtgacttggtgacgttcttcctagcagtgttaatacatgcaagaagtaagagcatttgtggcttgaacttgccagatgcaaatactacagactccaagaaaacctgagttggggtttgttttgttttgattttttttnnnnnnnnnnnnnnnnngagaagacactgaaaattgaattcttatcttccagaggctacgattattataatggacaatacttttacctttgtctctaaagatcagattagttttatttgttcacttacgtgctttgattatcccctctgaattatagaccaagtcttgttgtttagcctaagagaagatttatgtagtaatttcttctcaggtatnnnnnnnnnnnnnnnnnnnnnnnnnnnnncagaatagaaccactggttaaacatattttattcaccattaagtgatctttatcaatattctggattagacaacaaattacctttctgggtgtttcttgtaaactatactcctgtttgaatgttaaactttgttgctaaagtttaattttaagatgtttgaatgttcagttttatgtatt

SEQ ID NO: 11938 - DNA, 758 bp, Macaca Fascicularis
  misc_feature (1)...(758): n = A,T,C or G
gacattacgnnnnnctttagaacatgagaatagcagttttgctcacgatttaccattccagctgcaggggaaagcaaagcagaaaacagtgccccaaacggaaaaaagatacttacacagaacaaaacagttcttggtctttttcttggtcttnnnnnnnnnnnnnnnatgctctttctaaagtcaaaatacgaatgctaagaaggcnnnnnnnnnnnnnnnnnnnnnnnnnnnnnnnnnnnnnnnnnnnnnnnnnnnnncaatggggaatgcttgtnnnnnnnnnnnnagagttttgtacatctctggtaccgttgttataacaaatcagattttcttactatagttttttgttttctagctacacacccaccagaagagcacaaaggaaggccatcgcaacaagcattttaaaattaatatcaaacatgcacatgcgtggacacacacacacacacacacacacacacacgagggcatttgtaaaggtgtccctggaatgtaannnnnnnnnnnnnnnnnnnnnnnnnnnnnnnnnnnnnnannnnnnnnnnnncataggactagtgtatattcacnnnnnnnnnnnnnnnnnatttgttattgtttgaaccatatgctgatttgcttctggtttctctttagtgtgttctctctgacaaggggctggaannnnnnnnnnnnnnnnnnnnnnnnnnnnnnnnnnnnnnnnnnnnnnnnnnnnnnnnnncttcactctacactatacagtaccttgt

SEQ ID NO: 11939 - DNA, 740 bp, Macaca Fascicularis
ccaacatgcttcattttccttttggcattgctcataatactgattcaaacttcacacttccctctttttgtttgtagattttaaatggagggactccagacattccttccagtggcctactatcaggccaggctcaggagaacccaggttatccatattctgatagttcttctattcttggtgagaacccccacataggtatagacatgattgacaacgaccaaggatcaagtagtcccagtaatgatgaggcagcaatggctgtcatcatgagcctcttggaagcagatgctggactgggtggccctgttgactttagtgacttgccatggccactgtaaaccctacatgttgctttggcaacagctatagtatcaaagtgcattactggtggagttttacagtctgtgaagcttactggataaggagagaatagcttttatgtactgacttcataaaagccatctcagagccattgatacaagtcaatcttactatgtgtaacttcagacaaagtggaactaagcctgctccagtgtttcctcatcattgattattgggctagctgtggatagcttgcattaattgtatattttggattctgtttgtgttgaattttttaatcattgtgcacagaagcatcattggtagcttttatatgcaaatggtcatttcagatgtatggtgtttttacactacaaagaagtcccccatgtggatattttcttatactaattgta

SEQ ID NO: 11940 - DNA, 148 bp, Macaca Fascicularis
tctagtcagctcagctacaagtctcagaaagcacttgtaccagaggcaaacacaggttaagacccaccaatctcagcattctatgtacctattatgcattttgaatataggatataatcaatgtgggcaaaaactttaggcagtaaag

SEQ ID NO: 11941 - DNA, 731 bp, Macaca Fascicularis
  misc_feature (1)...(731): n = A,T,C or G
tccaggcaggagatgtctgcagcatctccagtcgtaagaaggcagtagaggcaaaatgcagcctggcctgcgagtacctgagtgaggaggattacatggacttactgtggaccannnnnnnnnnnnnnnnnnntgtccttgtgactctgtggattattgaccgcctggggcgcaagaagaccatggcnnnnnnnnnnnnnnncttctccttctgtagcctcttgctgtttatctgtgttggaagaaatgtgctcactctgttactcttcattgcaagagcgtttatttctggaggctttcaagcggcatatgtttacacacgtgaggtctaccccacggcaacgcgggccctcggcctgggcacctgcagtggcatggcaagagtgggtgctctcatcactccgttcattgcccaggnnnnnnnnnnnnnnnnnnnnnnnnnnnnnnnnnnnnnnnnnnnnnnnnnnnncctcctggctgccctggcctcctgctttttgcccatcgagaccaaaggccgaggattgcaggagtccagccaccgggaatggggccaggagatggtcggccgaggaatgcacggtgcagnnnnnnnnnnnnnnnactctggctctcaggaatagtgaccgatgggggactgtgctggtctttgaggctgcagagctcggggggctggcgggccctaaccgggnnnnnnnnnntcactgccgacatcaagaactcacccaaga

SEQ ID NO: 11942 - DNA, 776 bp, Macaca Fascicularis
  misc_feature (1)...(776): n = A,T,C or G
gctgattgaaattagattttttaaattatgtactggggacaggtttttgtcgctttacatttgcttcctagtttacagcatgatgcaaatgattttctaacttagtgttaggagaaattattttccatctttaacctcttagttgtctaagagttaaatattactgnnnnnnnnnnnnnnnnattgatcatcacaaatcctttaaaacaattacctaaaagaaaccaaaaatcctgccttctttgtgggggaggggggagagaggggaaggaaatggaacaagttgtgtttgtgttagcatgtgggtgatgtaaacttcaaattgggagatgttccgacccccactcccatatnnnnnnnnnnnnnnngtaacttgcaaaatgcataaacatccgacagtttgaatttatagtgttgatggaagaaatcatttttaatgtgtactgtaaaacttgaaatactcaggagctgagtgaatatgtttgttgctacttacaatcccaacctgttagtcccagtagttttgttttaacatggtctttttcaactttgtttcctgtttaactacagatgacttctgttgtagactcacaagtttaactgttgtattataacagtattacatgtcaacggtgtggttatgacctttatttatataaaaaccaaatatttagtcaatttaccgtgtcttaatttaatctttgtacacnnnnnnnnnnnnnnnnnnnnnntgagtactatattgcaataaaatgtagtgatataataaccagcca

SEQ ID NO: 11943 - DNA, 383 bp, Macaca Fascicularis
  misc_feature (1)...(383): n = A,T,C or G
nnnnnnnnnnnnnnnnnnnnnnnnnnnnnnnnnnnnnnnnnnnnnnnnnnnnnnnnnnnnnnnnnnnnnnnnnnnnnnnnnnnnnnnnnnnnnnnnnnnnnnnnnnnnnnnnnnnnnnnnnnnnnnnnnnnnnnnnnnnnncaaaaaaaaataaaaaataaaaaaaaataaacactgatgataatatttcatactagtaatttaatggcataaggacttgcattattgcagtagggagtgggtcatgctgggggtcaggaaacctgtgtagagtaccaaattatatgctgaaagagatgcataaccattctgtcaatatttgcagaaatatcattcttttcatattacagttgttttgcaagcaatttccatatttataggtg

SEQ ID NO: 11944 - DNA, 738 bp, Macaca Fascicularis
  misc_feature (1)...(738): n = A,T,C or G
caggannnnnnnnnnnnngctcagagtgctgccaagccccagaacacagctgaggttcagaaggtccagctcactggnnnnnnnnnnnnnnnnnnnnnnnnnnnnnnnncagggggtcgcccgccggcccacatcacctggcactcagacctgggcgggatgcccaataccagccaggcgccagggttcctgtctggcacagtcactgtcaccagcctctggattttggtgccctcaagccaggtggacggcaannnnnnnnnnnnnnnnnnngagcacgagagctttgagaagcctcagctgctgactgtgaacctcaccgtctactaccccccagaggtatccatctctggctatgataacaactggtacctcagccagaatgaggccaccctgacctgcgacgctcgcagcaacccagagcccacaggctacaactggagcacagacggggtttcaccacattacccaggctggtctccaacccctgggctcgagcaatcaacccacctcggcctcccagggtgctgggattgcaggtgtgagccacctcgcccagccttacgtctttttccttattaccaaagtaacttgtgtccactgtagaaatatcaactaaattagttatgagaaaaaagaataaagaagcacctatagtcaagtgtagccagccacctccagaaatacccagtgaccacttattatacatccttctgtcttttttctctgtttctaaac

SEQ ID NO: 11945 - DNA, 742 bp, Macaca Fascicularis
  misc_feature (1)...(742): n = A,T,C or G
tgtacttcagctnnnnngtctctcnnnnnnnnnngtgctttcctccggccctnntgtcagctcagannnnnnnnnnnnnnnnnnnnnnnnnnnnnnnnnnnnnnnnnnnnnnnnnnnnnnnnnnnnnnnnnnnnnnnnnnnnnnnnnnnnnnnnnnngagggcctggaggctccaggggctgctggggcctcagcnnnnnnnnnnnnnnnnncacagtttgactctgcgggcggggtggccnnnnnnnnnnnnnnnnnnnnnntgccnnnnnnnnnnnnnnnnnnnaacagcacggacagcgagcgctggaaggccatcaatgcctgagagcagctgccagggcctgcagaggacaggccagaatggaggccagcaggtccagagtccccgggggaggaggaacaggtcaagggaccttctgtgggcggtagccttgtgtggccctgttcccaccatgagtctggaggccccacctccctggggctcccaatccccttcgccatctgtgctctcagtggggactctcctcccttcccatctggtctcatactgctcagagacatggcccaggctttccttccagggccatgcttggcaaggttggcagagggcaccctccttctctgcatccttggcacgagggcagggctggctctcccaatgcctccatcccatccccatggtgctttnnnnnnntcnnnnnnnnnnnnnnnagatggactgaagtgtgtatatttcctt

SEQ ID NO: 11946 - DNA, 1006 bp, Macaca Fascicularis
  misc_feature (1)...(1006): n = A,T,C or G
tctatttatttgtgagactgtaagttacatgaaggcagcagaatattgtgccccatgcttctttacccctcacaatccttgccacaatgtggggcagtggatgggtgctcagtaagtacttaataaactgtggtggtttttttggtctgtctttggattgttaaaaaacagagagggatgatggcatgtaaaactgaactttagagtgnnnnnnnnnnnnnntcttctgatatctgcagggacagagcattggggtgggggtaaggtgcatcggtttgaaaagcaaatgataaaannnnnnnnnnnnnnnccagcacaaagcagattctcactaaacatttcatttcccacccacactcaccaacccaccccatcatccctttcccttggtgccctcctttttttttttgtcctagtcattcttccctaatgtgccacttgagtgtcaannnnnnnnnnnnnnnnnnnnnnnnnnnnnnnnnnnnnccatcnnnnnnnnnnnnnnnnnnnntgctaataaaagacaacacaactcaagtctggcagcctttcttctctatttctggatgaatgcccagtgagactgtgcagtatagccagaagaggccttcttcccagcagnnnnnnnnnnnnnnnagcctcnnnnnnnnnnnnnnnnttgtggtcgacatcaatctaaagatataatgtctgactatgaccttgttccaaaaacttacacaaatagtatatgtaggaggtgggatatctcttcttccatgacataagtgctacccaggaatttcttactgctttccttccccacattgtctggaactgcctaagaaatgggcaannnnnnnnnnnnnnnnnnnnnntaatagttttggatgactaaaatagataaaagttaaggtaagtgcacannnnnnnnnnnnnnnnnnnnnnnnnnnnataaagagatgacaaatactttttttttaangnnnnnnnnnnnnnnnnnnnnnnnnnnnnnnnnnnnnngatg

SEQ ID NO: 11947 - DNA, 689 bp, Macaca Fascicularis
  misc_feature (1)...(689): n = A,T,C or G
agacactgctgggactagggttttnnnnncaggagcaaatggaatccaggccttcccagaagtagaccatactgccttgaacttgttcgtatgtacaaactgatcaccagctttctccagacatttttaatgcagacctgtaattgagttcagaagcctccaagaaaacagaaaggatcccctttctccagtttgtgctggaagaggagctgatcagagacatcaaataagagaaagatgggttgctgtaggatggtagaaccggaagcaaggcagctacctttttcctaaaggaaatggtattaggccccttttccagaagataagacagactcgtagatatcaaatgaccagctatggtccttcctctgttaaatggagccgaagtcgcctgtgttgtcctgaagtcttgtaaggtttaacttctgagaacttagattagtggtgtgatgatagggtctgtataacgcactgaaaagggtatcaggcttagttatttatccagtaaatatttattgtatccagggtatttctattttaactcctgtgacaacacaaaacacagtgatttccatagttctaatagttctaactgttcagggtctgctcctcatggtacactcttcttggttcactgtatgtactcctgttctctcttttttttaatttccaaannnncttttctgttt

SEQ ID NO: 11948 - DNA, 607 bp, Macaca Fascicularis
  misc_feature (1)...(607): n = A,T,C or G
caaagagggaatgctccctcaggcccccaaccccggagattagggtctcagaaggatactgtgtgggggacttgagattctggagagggtggcacctctgctaatagaatcctagtcttttgggttttttttaacagaggcttaatttttagcacttggggtcaggctttcctcttggaggcaagtaaggtgatgaaaaagaatccttaggcgtggttgtggccgtcttggtcacatgtgtgccacttgccaatgcaaggacttgtcatagttacactgactgttgcgtctttcttgccgcggttcctctccctttcttgccttgctctccttggtaacatagttcccgtaaccctgtgttttccagattggcccccgccgcatccacacagtccgtgtgcggggaggtaacacgaaataccgtgccccgaggctggacgtagggaatttctcctggggctcagagtgtgagtgaggccctttgggagtgggtgggaaaatgcacnnaaacctttttaagatttaccaagtgggcctggcgcggtggctcttgcctgtaagcccagcactttgaaggccgagacgggcggannnacctgaggtcagg

SEQ ID NO: 11949 - DNA, 737 bp, Macaca Fascicularis
  misc_feature (1)...(737): n = A,T,C or G
gaggattgagatctaaagctttgactcatgagaatgattctcttcacctggtgctcatatgaaggtgggagtgatttctagattgggcccctactgggtaagatctcacttggtctgagaaaagtgactgctccagaaaggaagaagtacaggtgtcatagggtgaccactccattccactcagctaattatgatccaggacttggtgctggacattggcagttctgctctgaatgaagtcagaacagaaccaaaatggcctcaggaaggaatgccagtgtttcccaagacctgctggagatgcactcacaccagactgcacagacccctccacattatgccacacattgcctagacgttgtgtttcctcagccatttctcnnnnnnnnnnnnnnnnactctgtccaaaaccctaaggttcttctctcacttgaacacagatgaccttgcttgggtgatgagacatcccctttatctcttcctctactgctagccnnnnnnnnnnnnnnnntaagaagctcagatgcagcagtgctggagagctctctctttatgcaaaaatctcatttcaccaggagctttcaaaagtttcacctgggctaaactcagcagcatttctgttaggatatttagatggaggttttattttcacacttggattcttcctttgtaccaatatttgcctccttttctgtgactgaactgggtttttctgacatgcgtagactcctaaaaaa

SEQ ID NO: 11950 - DNA, 721 bp, Macaca Fascicularis
  misc_feature (1)...(721): n = A,T,C or G
actgaggctgttcatacttctgcccccgaagccaggctatnnnaagctctggtgctcctcactggaaacttgctgttacctctgagaggaacatgttcacttatggcacagacattagtggtgggggttggcggggctgggggtggggtggtcaccctgtgctcagcctttgagaaaacaggtggctgaggtactgtgcccttagggagcctgcaattaggaggcagggtgcccctcagtccacaaactgatggagatgatagagtatatggcacagatgccgaagctactttattgtgtatctgtcctagttgggtcatgctgatgtgcagccaccatcccacacctgagtgtcccactgccctgctgggggttggggaaagatcattactgggatgagcaggtttgcaaaatgcctggtggactgcggcaggctgtcctgagtacccacagtgggagtacctggcaggggtcttgcaagatgtggtgttagtcaaggagctgatgatatctttttctgtctcctgaaggatacttatccgctttttccccctggagtcctggcagattggcaagatagggacggtcgtgacatttttatgattggcacggaggcatccggggcatctgtgagctggctgctgcttccagagagatctcctggcagagtgagggcctagtgataaccagctttggattatgccacatgcaacattcctgt

SEQ ID NO: 11951 - DNA, 528 bp, Macaca Fascicularis
agttttcagaattagaatattcagaaatgggatcatcgttcaatgtctctccaaaagcagaatgtgccataatagttgcaaatcctagggaagaaataatcgtgaaaaataaagaagaagagaatttagttagtaataacatccttcataatcaacaagagttgcctatagctcttactaaattggttaaagaagaggatgaagttatgtctttagaaaaagcaaaagacagttttaatgaaaagagaattgcagtggaagctcctatgagggaggaatacgcagacttcaaaccatttgagggagtatgggaagtgaaagatagtaaggaagatagtgatgtgttggctgctggaggtaaagtcgagagcaagttggaaagtaaagtggataaaaaaggttttgcagatagccttgagcaaactaatcatgaaaaagatagtgagagtagtaatgatgatacttctttccccagtacccctgaagctataaaggatcgttcagaagcatatatcacatgtgctcctt

SEQ ID NO: 11952 - DNA, 528 bp, Macaca Fascicularis
ggagcccagaaatggctcagaagctctgggtcttggagtagtccaaggaacaccaccccttacttgccgacttccgaaggtcaccgggagcgggttctcagcctctcccaagccctggctactgaggcgtcgcagtggcacagaatgatgacaggtggaaatttggactcccggggagaccctcttccccgtgtgccgctgcctccttcggaccccacgcgccaggagacccctccccccagatcttccccggtggctaattcgggttccacagggttctctcgccgagggagtgggcgtggaggaagtcccgccccctgggggcccacgtgggatgccgggatcgcccctccggtcctgccccaagacgagggggcgtggcctctgcgagtcactctgctacagtccagcttctaacccgcccaaacgtggcagccaatcggagcgtgagcacgtggtctggaggtaccgccggagatctgggaccactcagggcatcaggggcgtggtctggtccccatcgcccgc

SEQ ID NO: 11953 - DNA, 780 bp, Macaca Fascicularis
  misc_feature (1)...(780): n = A,T,C or G
gcaggttgtttttgcataaaaaaaaccttattccatgctgagatgtttctgcnngccacaagaatggtacacccagtcgtgacttggaaaacaaagcaaaaactgaaagcccagagctccaaatgccacatggaactcatgaacagttatgttccatcacttctgaaaaaatactcaggcctattctgagaattcccatgaccaattttatggattttgtgtgaggcgtttttttccctggaagtcaaggcctcattcaatgaggtctgtcataaactccagtacactgggcgtgttgtgtgagctcctctgaccacaatacgagaccgtgagannnnnnnnnnnnnnnttcttccacggggagtggccgcgctctccccacctcgccccccagccggcccagtctgccagggtctgatggtgtctatgggagcccaaggccattctgccatctaannnnnnnnnnnnnnnnnnnggggttgaggaggctatgcctttatatcttttttctcttgacccacaattgactttccacccttgtccaataatccctaagacagggtcttcttcctgnnnnnnnnnnnnnnnnnnnnnnnnnnnnnngtccgccgtgcccatgggcttccacttggacaccagcaactttacacacgtccgaagnnnnnnnnnnnnnnnnnnnnnnnnnnnnnnnnnnnttaaagtacttttttatcctgcactataaaagctccatatatgattacttatctttttctcnnnncannnnnccatagtaagcat

SEQ ID NO: 11954 - DNA, 724 bp, Macaca Fascicularis
  misc_feature (1)...(724): n = A,T,C or G
tannnnnnnnnnnnnnnnnnnnnnnnnnnnnnnnnnnnnnnnnnnnnnnnnnnnnnnnnnnnnnnnnnnnnnnnnnnnnnnnaagttcccagaaccagattagaaaacgcatcgtacttgaaaagttgagtaaagtattgcctgggcttctctgtcctcttcagattacattgggagatatttacacacaacttaaaaatcttgttcgaactttcaggttaacaaatagaaatattatacacaaacnnnnnnnnnnnnnnnnnnntgctatggtgttgctgtcattactgaccccaattcttggcannnnnnnnnnnnnnnnggaaggtatggtgtttacacggtttctagacaccctgcttgaagaattacatctaaagaatgaagaccttgaaagtttaaccatcatannnnnnnnnnnnnnnnnnnnnnnnngatatattccatgaagacaaaatagaagatgaacttctattcaccgtttctggaattctagccaccatgatggtctgnnnnnnnnnnnnnnntagagctttattccaagacagacctttacctctttaagtttcaacctcccatctcccagtccctcagtctccaactgcagaggatgacctccccagatagaggagagtcattactccaacaaggataaccaagtctttcatccctagctacaaggcatagtatttttatttgaaaatgaatgtttaagtattaaatt

SEQ ID NO: 11955 - DNA, 702 bp, Macaca Fascicularis
  misc_feature (1)...(702): n = A,T,C or G
actggttctataaatagcgaccacgtannnactaaatagcaggcctggtggtgactaccctgttattcttgtaatgcttgagtagctgacttagggcatcctcagcaccgatgggcggtttcccctggctctggcctccttgcagtacccctttttaccaccaggtggggcttctgtacgaagagggtgttcgcaaggcccagagcagcgactccagcaagaggaccttctccgtgtacagcagctctcggcagcaggaccgctacgcccccagctatacccccagtgccccgatggacaccaacctcttgagcaatatccagaagctattctctgaacgtactgatgtgttcagccctgtggagttcaacaaggtgtcggnnnnnnnnnnnnnnnnnnnnntcagcctgaagacgctgctggagtgtgtgcggctgcgcacctttgggcgcttcgggctgcagcaggtgcaannnnnnnnnnnnnnnnnnnnnnnnnnnnnnnnnnnttttgtggccgacgaagaactggtgcacttgctgctagacgaagtggtggcctcggctgccctgcgctgcccagaccctgtgcccatggagcccagtgtggtcgaggtcatctgcgagcgcggctagnnnnnnnnnnnnnnnnnnnnnggcctgtcccgnnnnnnnnnnnnnnnnnnnnnnnnnnctccacccg

SEQ ID NO: 11956 - DNA, 751 bp, Macaca Fascicularis
  misc_feature (1)...(751): n = A,T,C or G
agtgnnnnnnnnnnncagatcatgggggccagcggnnnnncgnnnnnnnnnnnnnnnnnnnnnnnnnnnnnnnnnnnaggggcggcgtggaagctcctgtcaggcgtgcgggagggccaaacgcaggtggacaccccccagataggggacatggcctactggtcccaccccatcgannnnnnnnnnnnnnnnnnnnnnnnnnnnnnnnnnnnnnnnnnnnnnnnnnnnnnnnnnnnnnnngacagctttggccgctgccagcttgcaggctatggattttgccatgtgcccagcagcccgggcacacaccagctggcctgccccacctggcggcccctgggcagttggcgagagcagctggcacgggctttcgtgggtggtgggccacagctgctgcatggggacaccatctacagtggggcagannnnnnnnnnnnnnnnnnnnnnnnnnnnnnnnnnntgcacctggagatcagcctgctgctccgcaacttcgannnnnnnnnnnnnnnnngctgagggaccctgtctccaacaccaccacnnnnnnnnnnnnnnnnnnnnnnnnnnnnacagtggtcaggagcacggactctggagaccatcagagctggaccccagctaaggactcctgtccttgctaggacctctgggtccctctgggcccagtttccctatctgtaaattggggagagtaaatgtatggggtcgcaggatgttgaatggcaagaggctgcttagccacatggga

SEQ ID NO: 11957 - DNA, 599 bp, Macaca Fascicularis
tgcggaggcccttgtgggaggctgggggccaagagcaggactcgctacgtccgggtccagcccgccaacaacgggagcccctgccccgagctcgaagaagaggctgagtgcgtccctgataactgcgtctgagaccagagccccgcagcccctggggcccccggagccgtggggtgtcgggggttcccgtgcaggctcgtgctgtaggcggccgagggcacgggggggctcgcgctgctcctgaccgcggtgaggccgcgccgaccccctctgcactgaagggccctctggtggccggcaggggcaatgggaaacagcctcctcctttcctatccttgcttctgggtccccatgttccgtctgctctcagcctcctccttctgcataaagtcatccccaaggctccgtctactctaaattatgtctccttataagttattgctgctccaggagatcgtccttcattgtccaggggcctggctcccacgtggttgcagatacctcagacctggtgctctaggctgtgctgagcccactctgccgagggtgcatccaagcgggggccacttgagaagtgaataaatggggcagtttcggga

SEQ ID NO: 11958 - DNA, 765 bp, Macaca Fascicularis
ggccgcagccagacagatgatgaggagacgacgggcgaatagacctactgcccggtgccttgaggggtctcagggcagcggcatacaaggtggcagcgggtaaccctgccttgttctgtcacccagggctcctttgctgccccgttctgtcactcagggctcctaggggaacagggctgtctcccgaggggtgtgaaattcctggggggtctttaattctggctccttccttcctcagaacgcctctcttctgcaagacccctctgccatgccagggcacgcccattccggctggagtcgcagggctgggcacgggaatttttccagagctgagcctgacgtctgctctgaagaatgcttgaaaggttcccagagaccagagccagatgtcccccacccccggtcaggacctccttgaggtgcacaagcacggtctcctctgagttcaccccagcccacccctgcacccactaattctgcttttcctgccccttgctccgtaaaagtatcaaatactgtctccttggtatctcaaagaggtttctgagataggtagaagtcttgagatggaggctggccatccattcagccctgagcatgctgaggcctgtgtttctctgaatagaggtgtggaacctgaggggccagcaggcctctctgagggcctccatggagcaaacggagccaccttgggaaagagtttaatggaatatttttgtacccaatgtttacagatggctgttgggaagttatcaataaaaagac

SEQ ID NO: 11959 - DNA, 767 bp, Macaca Fascicularis
  misc_feature (1)...(767): n = A,T,C or G
agagatgattctaggatagtgcctctgaaagttgatgcagcatttttgnntttccaaaaagtatttatcgtcactgctttttgcagtacttgtattttcacagatggattatctggggtaattttcttcaaagggagtttgttatacacagtgaaaatttattatagagtagaatagtaaagctctagaggtttcagaaagctttgatgaacagatgacaaacatccaaaaccccctgtacactgttacccagtgtgaatataataacttgttatagctcagnnnnnnnnnnnnnnnnnnnnnnnnnttaaaagacaataaaatcttattagtaaagttaatgtaacttctaagttctagaaaatgctgattctgtctaccccattcaattgggggctactaannnnnnnnnnnnnnnnnnnnnnnnnnnntttctctatttgtaggaggggttttttctttttactgtctgttgatggaaaattactttatgggtgtgatgcacagatggtagccaaggaatctgttgggaaagtttggaaagaaaccttttctttctgttattcagtttaaagtaaactttatcctggatgtttataatcaatattaagagttatattacagcgttcagagattaagctgacttggattcaatattttcttttgaaaatgaattttctttttcatttgtgattttttaaaaatgttgcaccagttatgcttcatgcattgttacatcttcannnnggttaactgtaatctagttc

SEQ ID NO: 11960 - DNA, 883 bp, Macaca Fascicularis
  misc_feature (1)...(883): n = A,T,C or G
tcacagacctnnnnnnnnnnnnnnnnnnnnnnnnnnnnnnnnnnnnnnagaatggcgaagctctgaaaacccacaccaacatctccgagagccacccnnnnnnnnnnnnnnnnnnnnnngggtgaggccagcatctgcgaggacgactggaactccggggagaggttcaggtgcaccgtgacccacacggacctgccctcgccnnnnnnnnnnnnnnnntccaggcccaagggggtggccatgcacaggcccgatgtctacttgctgccaccagcccgggaacagctgaacctgcgggagtcggccaccatcacctnnnnnnnnnnnnncttctctcccgcggacatcttcgtgcagtggatgcagagggggcagcctttgtccccggagaagtatgtgaccagtgccccaatgcctgagccccaggccccaggccggtattcgcccacagcatcctgaccgtgtatgaagaggactggaacacgggggagacctacanntncgtcgtggcccatgaggccctgcccaacagggtcacagagaggaccgtggacaagtccaccggtaaacccacctcctacaaccaaactcctcacccaaacacacatacacacacacacacacacacacacaacaaaataactagtccttaactaatcggacccatgctgagctcctcttcctggcttctcactgaaaggttaccctgtaacatgcaattttgcatttgaatacaacctgcttttgaagtgttaattagtttgcctagtttcttattttgaaaattaccgtatgttttgttttctcccnnnatgagattnnnnnnnnnnnnnnnnnnnnnnnnnnnnnnnnnccctggagtgtctagtgcattacttgacac

SEQ ID NO: 11961 - DNA, 707 bp, Macaca Fascicularis
  misc_feature (1)...(707): n = A,T,C or G
aattatgnnnnnnnnnnnnnnnnnncagcggcaccctcccctagtgtccatgggttagggccgtgctggggaaaacgggccggtatttacacatgcgcaaaacacccagagacggcacaaggaggttgaactaatgtttcagttcgcgaacattgactccttatgaaagtcacttctaactagatgcacccccttccggtcattatttcatttgcatgatgtattgcttcttcactttttgtttttattgagcacggagtagaattccagggctgccttgacttcttccctgcacgctccctctcagtgactttccttccctttcacnnnnnnnnnnnnnnnnnntgttcctttttcctttgtcctcttggnnnnnnnnnnnnnnnnnnnnnnnnnnnnnnnnnnnnnnnnnnnnnnnnnnnnnnnnnnngccgtgttgaagccgggaagttnnnnnnnnnnnnnnngtagcagtgacccaggcttggaagccagaaacaagtgtgatctgtgatgttatttaacacaactgtnnnnnnnnnnntggctttgtttatttggttttggtggggagtggagtggtatttgatgctnnnnnnnnnnnnnnnnnnnnnnnnnnnnnnnnnnnnnnnnnnnnnnnnnnagtggtatttgatgctttctgtggacaatgcaaccctaaacacatcatgtattttaagtgccac

SEQ ID NO: 11962 - DNA, 586 bp, Macaca Fascicularis
  misc_feature (1)...(586): n = A,T,C or G
gcacgggggaacaaggtcgtgagaacaaggtcttggtgnnnnnnnnnnnnnnnnnncatcctcggtctgcgcctttcgcagagcttccagcagcgctatgttgggccacagcatccggaggttcacaacctctgtggtccgtaggagccactatgaggagggccctgggaagaatttgccattttcagtggaaaacaagtggacgttactagttaagatgtgtttgttctttggatctgcattttctgtacccttccttatagtaagacaccaactgcttaaacaataaggatgtttcagttcgtccatttnnnnnnnnnnnagagcattttaagagatacagcctctggaaatggatcaaactctaactcatggcatgctagatatnnnnnnnnnnnnnnnnnnnnnnnnnnnnnttaatgcctcttttttgaaatagggaatgtaatacttggccatttgcctactttattaatttgggtnnnnnnnnnnnnnnnnnnnnagatttagcttatttaatggtgttaaactgaggttnnnnnnnnnnnnnnnnnnnnnnnnnnnnnannnnttttgttggtaattt

SEQ ID NO: 11963 - DNA, 528 bp, Macaca Fascicularis
  misc_feature (1)...(528): n = A,T,C or G
ggtaccccccagaccagcttcccccaaggtcaccacgagcccccaggagacagcatgcccagcgtgaggcnnngggctgtgtgtatcaagagcccagcacaagccgggccnnnngatgccgcccnnnnaggnntgnnggctcccgttcctcccctccagccccactaccccagctatcccccctcagccccgccccaggagccttgcctcagagactaactgagtggctggtttcttcctaagcagcccccagcatcccctccctccacacctggccctcccaggacagctctcaccccccacaaaggggcgtgggcctccagcctttgcccacaagtgcctcagtgcccactgggtcggcccccatggccaggagggctcaggacagtcccccacttcctgaccttttcctcatccaccctgggcttggggagcccctgctggactctccactctccggcaggtcctcggggagccaccggaaggaaggagaagcttccctgctcctaggggaccgattcttctctt

SEQ ID NO: 11964 - DNA, 406 bp, Macaca Fascicularis
  misc_feature (1)...(406): n = A,T,C or G
ancngngnnnagtggttgaaattgggtctaactcagagtggttttggaaatgctggtctgtnnnnnnnnnnnnnnngataagtctctttccttgattgggcctcagtttcctggtccctgcagtgggggatccatatattaaacaaatagacaatgttaagagattgcataacttggggacttaatttagnnnnnnnnnnnnnnnnnnnnnnnnntgaagaggtgacatttaaactgaaagttgaaggatgaataggacctgtccaggggagagcaaggttggtagggagccaaggaaaggannnnnnnnnnnnnagatgagcatgttctacgttcttgnnnnnnnnnnnnnnnnnnaagctgcatcgagtgcccattccaggannnnntctctcacccctgtgct

SEQ ID NO: 11965 - DNA, 727 bp, Macaca Fascicularis
  misc_feature (1)...(727): n = A,T,C or G
tgcacataccatttatcttccaaaggatctcactggactgttcaacttccagccaaattcacggagctgnagggaacatttgatataacaagcgtgttgtcatggttggcaacatacaagataaccaagaagccagagcctgttctgtgttgatttgactaccacgagaaacacaggggaaacctgatgaggagaaggataagactgtgtgacgagaaatcctcataggagctgtaaagcgggctgctgatctcagcagttgatatggtggttgtgcctctgctggctactgggtgtgctgtccccagtgttcccgctgtgatttggcagaaacacaataggtttctctctgtgtgatctcagcttcaagcaggagaaactgctgtgcagggggagttgccccttcccagtaaaagagttgcagcctgttaaacaatatgttctaatttagtgtctctcccttggcaaatgtaagttttctaagttggccaacttgtcccttacagccggtagctgtgatctacaaaattgtttcatatgaaatacgggtagagtggtagagtttcaaaacttccgtcatagataactgggacctttctcaggatctgtgttcacatacccagtagatttggaatcgggcctaagagtacacatggagagtaaatattaaagtgtatattatgtacatctagaatccatgtgactcgcagcaggcctgtaatttcta

SEQ ID NO: 11966 - DNA, 973 bp, Macaca Fascicularis
  misc_feature (1)...(973): n = A,T,C or G
cccccctcccaccccccaagatgcccccccccacgnnnnnnnnnnnnnnnnnnnnnnnnnnnnnnnnnnnnnnnnnnngcggggacgatgcccnnnnnnnnnnnnnnnnnnnnnnnnnnnnnnnnnnnnnnnnnnnnnnnnnnnnnnncatgcccaccacagccctgcccggcgccctccccnnnnnnnnnnncacgagcccagcttcctcggaggtnnnnnnnnnnnnnnnnnnnnnnngctccggccactgacacaaccagaaaaggcgtaaacatgcacgggtgttccccaggagggtggcaagggccctgccttcaaactctggccccctccaggggacagttatttaaacgagtggccgggagcatctgccccctgctggggaggcagagaccctgcgatggccacccctttaaaaaagggcagctgtacagggctaggtttttgcaatgaagtttctgtattaaaggagtggctctgggtgtgttttttgtccttttctctttttctgaggcattctcctcctctgaacctcccctaatccgacctcctccctgtggggggagagggacggggcagcgtggagaggcaggagcgaggagcgtgggggcctggggccgggctctgagcactgcccgggtgtgcagaggaggggggctttgcatatttgcagggactagcgagtcaggcaggaggtttgcatatatgaatatagaactccacagcccctcaggagcagacagacccaggtcacagagattcacaaaaataaggtagtgcagggtgggggcagcccaccccgtgtaaacgtgcaacacactcgtgcgaaggttgggtactgcacccggcctgataggcctgtaccaggacactgctgtccactcaggctgaggacagagccccagccgcggggggcagctcgctggtcagggcgtgccagcgctcnnngctgcgtctggctgctgcaggc

SEQ ID NO: 11967 - DNA, 744 bp, Macaca Fascicularis
  misc_feature (1)...(744): n = A,T,C or G
gaagacacatgataatgannnanntccctccatannnnnaacatgagttggaatccnnnctccagccaagacgatcntnnttaaggaaggctagccttggaagcaaacttgtaaatcatattctcatggctctgttaagcttatttcacgtgatggtcattcatatcattatggatattcaagcctttggatggctgtggagaggacttgaaatgtgcacagttgtcaccatcatttctagtgtattaggaaactgggatnnnnnnnnnnnnnnnnnnntaaacttccctctggttggtaagtctcacatattcattagcaggagtgagggtgggggaaaactagaaagatgaaaggtcttacatttttctgatgggttcatgtctctgnnnnnnnnnnnnnnnnnnnnnnnnnnnnnnnnnnnnnnnnnnnnccttctctgtagctgctagtgagccttcccatttggattaaagattgctttatccagcagtcaattaactctccagttatcagtannnnnnnnnnnnnnnnnnnnnnnnnnnnnnnnagttcatactgatgccctgaggcactgaaaaaaaattccaaagtgccttctgagctgtctaaaagttatattgtgcttggtagttttagtgttaagtgtgcagtataattttctaatttattttctcaatcttttagcacatgtgtaagacactgtacaaattttttgaaaatagagcnnatagtttttgtgaa

SEQ ID NO: 11968 - DNA, 760 bp, Macaca Fascicularis
  misc_feature (1)...(760): n = A,T,C or G
gccccctaccccagcanntgcagcttggagcactggcgccagccggagctggagcggcgcttctcccgggtccaagaggttgtgcaggtgctaagggctctccgagccacgtaccagctcaccaaagcccggccccgagtgctgctgcagagctcagagcctggggaccagggcctctttgaggccttcttggagcccctgggcaccctgagccactgtggggctgtgggcctgttacccccaggcgcagcagctccctccggctgggcccaggctccacnnnnnnnnnnnnntcaggtctacatggagctgcagggcctggtggacccccagatccagctacctctgttagctgcccgaaggtccaagtnnnnnnnnnnnnnnnnnngcctcatggccaggaccccatcagaaggggaggcagggactcagaggcaacaaatgctttcttccctccagctggaattgtcaaaactggacaaggcggcctctcacctccggcagctgatggatgagcctccagccccagggagcccggagctctaactcatcatccccnnnnnnnnnnnnnnnnnnnnnnnnnnnnnnnnnnnnnnnnnnnnnnnnnnngctgtcagggtgcagtgggacatcagagactatgtggtccatcgccttcattgtgtaaatgaggaaacagactgacctggtcgcagtgactgtggcatccttgnnnnnnnnnnnnnnctgcccggcctgcctcccaccaggaagtctggaa

SEQ ID NO: 11969 - DNA, 728 bp, Macaca Fascicularis
  misc_feature (1)...(728): n = A,T,C or G
gcattttaaaacttgacgtgctgtattgtattaaattaagtgtaatctattaaggcaaggtatacacaatttgctttgaaacttaatatgtttattctattataaagtgnnnnnnnnnnnnnnncagagactgctttcnnnnnnnnnnntgaagaaaannnnnnnnnnnnnnntttattatagaatcttcagctaaaatcctaactttctccttatttctnnnnnnnnnnnnnnnnnnnnnnnnnnctcttagggcaggcatgagctattcttttctgtaaaatatttcgaatctataggctgtgggtttcatttttgaaaaagtattttgtctggatgtctttctaactagcttcagatattatttaatactatgtaactgggtcccctatggctcaatcagtattgcttatttttcttctgtagtggatgtgaaatttcctttagttggataagatacactgtaataattttaatgctaattaatggatatttcatnnnnnnnnnnnnnnagataatttaacactgtattttgaaatgtttttttcttcctgtcaccgcagtgtgtggtattgcataatgtgaatacctgtaaaaatataaattannnnnnnnnnnnnnnnnnnnnnnnnnnnnnnnnnnnnnnnnnnnnnnnnnnnnnnnnnnnnnnnnnnnnnnnnnnnnnnatatctttctaaaaagaagtaatcagtgcttctttctcacaa

SEQ ID NO: 11970 - DNA, 594 bp, Macaca Fascicularis
caagcgatccacccgcttcagcctccctaaagtgcttggatttgcaggcgtgagccactgtcccggcctctctttgctttgcctgtccccttctcttaactcttgggccctccacgtgtgcatggtaactccgtctgggtctaccgttttctcgctctccctctttccttgggcctgcctcagttccctttggcctccccctttacccagctcttgggaggtctctgtttttctccatccccacttcctgcctccccgtggccccctgtgagctcatgtgtacatctcagcctcatcccaaggaggtgacaccttgtctccctgtccctgtctggccgtctctctgtgcttccctggccaggggcgtgcctgctggtcttgttgggggaaggcgattccgcatctcagccaccttcctcaggctcactccacccacatccccagtctcccacaccccatccctttgggcctcagccctgtccctttgatgtcttcctttccttcagcccctctgccctgtccctgtacacctccactgcctcctaccagatgtggggagacaaaacaagcaacaccttaaaagagttttatttc

SEQ ID NO: 11971 - DNA, 767 bp, Macaca Fascicularis
  misc_feature (1)...(767): n = A,T,C or G
cgcagctgacgtccatgctcatgatgaacctggagtccaggcctgtgannttcgaggatgtggggaggcaggtgctggccactnnnnnnnnnnnnnnnnnnnnnnagctgtgcacgctcatccgcaacgtgaagccggaagacgtgaagagagttgcttctaagatgctccgagggaagccggcagtggccgccctgggtgacctgactgacctgcccacgtacgnnnnnnnnnnnnnnnncctgtcgagcaaggacggacgcctgcccaggacgtaccggctcttccggtagagccgctccccggcctgacagacccaggggctgcagctggagcctgttcctgtgcgtgttagtttggacacgaatttagtttaaaaagctgtatggttgtatgaacagtgcagacaatgtcaccacagcacccacgcagtttgcgttgcttcagaactcaatgtgccgatcagtggagtcagtattgtgcctgaccgccgcaagccagcaagcaggtgcagtgcccagcgctggagtgcagcgtgccgtgaggaggccggtcagtgctccccctcctcgggggctctgggcacacggggctccacaggttccttggaggagccctgagccgggaagcagcggaggccagcctatcagagcctccctggaggccaccgtgctcctgtgttggtaccaggactcacctctgacaaacaggacaaggtgagggcccagtctgctctgaggagcgcggtccatgcgtgtgcacgcggc

SEQ ID NO: 11972 - DNA, 1058 bp, Macaca Fascicularis
  misc_feature (1)...(1058): n = A,T,C or G
gggagcatgtgattgggtnnggccaggctgtgggggaagcgccctggtgtccccgactcctcaattcttgggtcttttttnnnnnnnnnnnnnnnnnnnnnnnnnnnnnnnnnnnnnnnnnnnnnnnnnnnnnnnnnnnnnnnnnngttaaactgctgnnnnnnnnnnnnnnnnnnnnnnnnnnnnnnnnnnnnnnnattgtacannnnnnnnnnnnnnnnnnntgaccgtagacacatcgttgaagtaaagcgatcacatattgagtatgtcagcttttctcgccctcttctgtgccgaggggacagtctcactgtaacctttaggttgttccagaaaagattcaggccatttggcatnnnnnnnnnnnnnnnnnnnggcagcactaatgaataggaacagacagtaaaccccannnnnnnnnnnnnnnnnnnnnnccctctccatcgccatcctgcaagctccacagcctcgggctgccagcctctggcgctgtcctcagtgtgtcctggagctgtgctgggcagcaggcctgggccttgcataaggagctgctggagcccactgagtccctcctggggtttccagccacactgtgtgctccttcaggccagtgaggtttcatcctattttatttgcaagcttatcaaaagtttgtggaagatacattgttggattctgaaggctggagtcatgctgcccacatcttgtttgggaagcgaaagctcccagtgagctggtgtccccgtgtgtctttcatgggactgtcccctctccatccccacctgttactgccatagcttcggggtcctgtcatcacatcccacaggaggggaggcagaaggaggccaagggccccaggatgtctgcctggtcccttctcactgtgaggacgccctcggcacacctttctcaagtcacacaaactattgtagttacatacagaattgctnnnnnnnnnnnnnnnnnnnnnnnnnnnnnnnnnnnnnnntgacaaaagtctttcctgggacaacaatcaaatcatgtatttgtatttttttaagtttaccaatgaa

SEQ ID NO: 11973 - DNA, 737 bp, Macaca Fascicularis
  misc_feature (1)...(737): n = A,T,C or G
ctctccttttctgatacagtgactgggaaaaaaggagccattgtgaccaggggctgcgggaggccttccctgggaccttccttgggactggnnnnnnnnnnnngggcttgtcacctgccctggctgagtcctgagccctttgcctccttcnnnnnnnnnnnnnnnnnnnngctcccatccgactaatgtctgtaatgtgctnnnnnnnnnnnnnnnnnnnnnnnnnnnnnnnnnnnnnnnnnnnnnnnnggttagggtcaagggtgcctggggagggtgaggtataatccagtaatccnnnnnnnnnnnnnnnnnnnnnnnnnnccctcctttccacttcccagaactggcccagctgcaggcactaagaagctcctccnnngtgacaagtgaggggtggtgggtgaaaggcagatggaggaggggctcagggctgctgccttcctgtnnnnnnnnnnnnnnncagccaggcgcggtgccccttcctctcctcaggctcctccttgcccccaccttgccccgggaaaggccaaagtccaggtgactgccctccttctttcctgtaaataccaaccatgcatttgtacagtgggccctgttcatgcaaaatccatatccatggtctcctagacctgctaccctgatacttccaccctaccccaccccgagtagggcagagatgcatgtgactcacccctgcccttggtctcccagacccctgctatagccagagaaca

SEQ ID NO: 11974 - DNA, 641 bp, Macaca Fascicularis
  misc_feature (1)...(641): n = A,T,C or G
tttagtgaaatgtggaagtcaaccaggccaatggtggaattaaatgtaaattccaagaggactttcacagtccatggggttcaaatgacttgggtaacagaagttactctttttttgtgtgtgtgagcaacannnnnnnnnnnnnnnnnnnnnnnnnnnnnnnnnnnnnnnnnnnnnnnnnncagcaaagagtagtgggattatcattggttcttataggttttgggataggcggtggagttaggagcaatgttttgtgggcagggggtggatctcataaaatacattctcaagcgtggggagaattacaaagaaccttcttaaggggggagattataaagaaccttcttaagggtgggggagattacaaagtacattgatcagttagggtggggcagaaacaaatcacaatgggggtaacannnnnnnnnnnnnnnnnatctgttatgtgacagtgatttacctgtccataccatttccaacccaaaagnnnnnnnnnnnnnnnnnnnnnnnnnaaaccagtttacatttgttgttaaactcctgatcgctactcttaagaatatatatgtatgtattcataggaacattttttctcaatatttgtatgattcgcttactgttattgtgctaagtgagct

SEQ ID NO: 11975 - DNA, 740 bp, Macaca Fascicularis
  misc_feature (1)...(740): n = A,T,C or G
cgggttgcannnnnnnnnnnnnnntcaaaggcattgccttgggttcaagtgcacccccaaggctgttgctcagtcacgnnnnnnnnnnnnnnnnnnccaccacactgccaggagctgccagagcccccatgtagcccctgaccccagttccctcccaagccccagggcctgagcctgatatctggggcaaggggcttggacaatagacaagtgaaatggtgtgcagaggcccagtggagagtcacatctcggtctcagccaacagactgtcccctagtcctgacgtcattagcaccatctgagagctgggatcactgggacacatccaggagctgctgcccctctggtgggcagcaggctcccgccctctctcccattcctgggtgtcgccagcccctcctgccacttcctcctcctcctctccctcagagaggaggtcacagatctgttgctgcagctctgggctaatgctgttctcagccaacaccaggctccgcaaagctgtggggtaattttctaccatgtccagcagggtctgagctgactggttggtgagccctgtgccctccaagtctaggacctctagcgtacgactggaggccacagctacagccagcattcctgccacatggtcacccagggggttgtaatccagattgaggacgcggacctgggagctgtgggccacagcaatggcgaggcggctccagcccttnnnggtgatgccannnntggcactc

SEQ ID NO: 11976 - DNA, 740 bp, Macaca Fascicularis
  misc_feature (1)...(740): n = A,T,C or G
cgtgatgacgacctttngnngnnntctgaagaggagtgcaaggatagggaacgccccatgtacggccgggacagtgcctaccagagcatcgcgcactaccgccctgtntcagcctccaggagctccctggacctgtcctattatcctacttcctcctccacctcttctatgtcctcatcatcttcctcttcatggctcacccgccgtgccatccggcctgaaaatcatgctcctggggctgggctgggcnnnnnnnnnnnnnnnccactctggggccagctgctgcttttcctggtctttgtgatcgtcctctttttcatttactacttcatgcaggctgaggaaggcaaccctttccagagggagccatgagggtctgggcttcagagccaggtcttctggggaagtcctggctgactgccttagcagtgggggtgggggtgggtgtgggggcaggggcaggggcaggggcttttatgtgttcttgcttggggggcgctgggcctagcccagagtagtgcttgctccccctgccttgtcccaccagggaggcagcagattcaggccctccatgggggcctgagtgtgctttcctcggcagcctcctggccctgcttgcctgtaacccttagggtccaggagggcaaggcctcgctcagtcagaggagaacatggttcttgttgtcatgcatgcctcctttttgtcatcttgttgggggggattaaccaaaggccaccct

SEQ ID NO: 11977 - DNA, 733 bp, Macaca Fascicularis
  misc_feature (1)...(733): n = A,T,C or G
cagtagaagcagagagggcagggcaggaaagtgacatggctaggtggctcttaccttgnnntccgcctctccacagtgtgacaagctggctgctgactgtgcccacgagctgcgacgccatggggtcagctatgtgtctctgtggccaggaattgtgcagacagaactgctgaaggagcatatggcaaaagaggaggtcctgaaggatcctgtgtttaagcagttcaaatcaatcttctcatctgcagaaaccacagaattgagtggcaaatgtgtggtggctttggcaacagatcccaatatcctgagcctgagtggtaaggtgctaccatcctgtgaccttgctcgacgctatggccttcgggatgtggacggccgccctgtccaagactatttgtctttgagctctgttctctcacacgtgtccggcgtgggctggctggcctcctacttgccctccttcctccgtgtgcccaagtggattattgccctctacactagcaagttctaaccctcctggtctgacaccacgtctccgcttgtcttctcatttgggcttggtggttggtcctatctcaatgaaacagcagcctttcttgcctacccatacccttgatatgaagagaaggactctgctgtgtgtccgtggtgagttctggggtctgcctaggtcctttctttgtgccttggttttccttgtccttctttttactttttgccttagtattgaaaa

SEQ ID NO: 11978 - DNA, 741 bp, Macaca Fascicularis
  misc_feature (1)...(741): n = A,T,C or G
aagtttttttnnnnnnnnnacttcatgcagaatttcacagacatctatgcattaatttaaattattggtgcaaatgtgtgctttgtagttcaaccttattaaaaattcttcagccagttaggatttcaaaatacattagtgagagtaacagctagcagaataattacaatggctaaaacgtttttatagaggatcttgtttttcaaaaaagaataaaaagtttgaatagctattattaaagaaaagccatgtcttcaacatctgagtcaccaagaagtaacactttttaaacttgttannnnnnnnnnnaggcattttaaattcatcttctaacctacctaagcactttaaaatacaggctccttctgttcctctgttccccttcatgcctccttttnnnnnnnnnnnnnnnnnnnnnnnnnnnnnnnnnnnnnnnnnntgtcattttatttctctatatcaatgtatccttagttnnnnnnnnnnnnnnnnnnnnnnnnnnnnacttggggatcattgtgttgccacccaagagaaaatgctacagttctatagattgcacannnnnnnnnnnnnnnnacatttacctcaggaaacttactctagtatgttctcatatactgaattctcaactgagtaactatttctttatacctataaactagtacctaattcactgttnnnnnnnngagccatagataaggcagctaaatttctgaaagatagccagagtaagtaagc

SEQ ID NO: 11979 - DNA, 629 bp, Macaca Fascicularis
tgaacaattccactatcaatacttttgtcccctcaggcgatggtttgcctgcaaaatccgctcagtggtgagcctgctcattgacacctgagaaggcatgactcctcccaaaaactagccaggtggaccaaggagcccggctacccattcccagcaatgggacccatcgcggaaccatcggcacatataccaagtcctcctctcatgactcaaagtccactgcagcctaggagggtgtttcccagaagaagaaagggataggctcacgccctgtctaaacaaactgggaaaactcattttcttcagaagttatttcaagaaaggctcagcgactctgtttctcatctttccaatttgcaggataatttttggtttatgaattttgatttttcatagatgtgtattattttgaagtatcaaataaaaataatttattttactattactgattattgcagtagtgtcacctagcagaggggacactagttgaagactagagagctgctgtcctctgtattctgcaggagctttcctgctggtgccactgggttccagtagattagtcactgcagcctcagcagggcaggccagggatctggacaatgaggactgtttagttttttttgcca

SEQ ID NO: 11980 - DNA, 705 bp, Macaca Fascicularis
  misc_feature (1)...(705): n = A,T,C or G
aaaatagtagcagaatattttatacttggtccttgcaatggtgtgagttttaatgattgcattagcgtgattggtggttatcagtttcagaaatctatacttggcatccaactcatgagtggattttatataggatggaatacgaagggatgtcctgtcagtatcttaaccctttcaacaagatatttacatatttgtctttccttacattctcaaaatattgacttgtaaattaagcaacaatttaaaaagtatatgttgatggaacaagaagaatagtatttatttaataaaacatatatattcaactatgtgttgattcatttgtatctttaaaaaaattatcactgttaaagccattgactcctttagtacactgagaaaatcttacagtaaaactagccttttacattaaggttttggtgtgtattttgttaaataactactatactgctctattttctgggtggtagaaagtatttggctccaggaaacaataccccaaggtaatgggaaaggttttgattaagtgtttttaattcagtcagtaaattcagaataggtatattcatgtataacataggacagttctgctgctgttatttatatgcagttcttctggtaaatagcaatagaaaaaaactttcaatgtttatctataggttttgtattattattccattaaggttgncttaagaatttata

SEQ ID NO: 11981 - DNA, 835 bp, Macaca Fascicularis
  misc_feature (1)...(835): n = A,T,C or G
tacgttcgtcnnnnnnnnnnnnnnnnnatttatatnnngagttgtaatgtttggaaatggggcttacactatgatgtttgagtcaggaagtaaaattcgggcttttatgatgtgcctacatgcatattttaacatctacttacaagccaaaaatgnnnnnnnnnnnnnnnnnnnnnnntaggatgctgtgaagaaanntaattcacttcnnganntaaaagnnnnnnnnnnnnnnnnnnnnnnnnnnnnnnnnnnnnnnnnnnnncatgagtttacaacatctgctcgtattacaccatnnnnnnnnnnnnnnnatgcactttgccttcggaaatggttgtacattcaagatacttgtccaatgtgccatcagaaagtatacatcgaagatgatatcaaggataattcaaatgtatctaacaacaatggatttattccacccaatgaaaatccagaggaagctgtaagagnnnnnnnnnnnnnnnnnnnnnnnnnnnnnaacgaagatgacagtacagattnnnnnnnnnnnnnnnnnngagaaagaaatggagtgattcagcacnnnnnnnnnnnnnnnnnagnnnnnnnnnnnnnnnnnnnnnnnnnaaaatagcatttattaannnnnnnnnnnnnnnnnnnnnnnnnnnttcatccaaaatggagtgatatccttcaccttcagtgtgtaaccaagcacaaaaacagtatcaatgttgaatctgtgaatggtttnnnnnnnnnnnnnnnntgctactgtaaatatacctctttaattacttctggtctctttggtgacctgtttaaatttgtgtacattnnntgtacatag

SEQ ID NO: 11982 - DNA, 714 bp, Macaca Fascicularis
  misc_feature (1)...(714): n = A,T,C or G
atgacnntcccaaaagggtccacagaacaagacgctgcatcccctgagaaagagaagatgtccccgctggaacagtatgagcaaaaggtgaatgcgtctgttccaaggggtttccctttccactcatcggagattcagagggatgagctggcaccagctgggacaggggtgtcccgtgaggctgtgtcgggtctgctgatcatgggagcgggcggaggctccctcatcgtcctctccatgctgctcctgcgcaggaagaagccctacggggctatcagccatggcgtagtggaggtggaccccatgctgaccctggaggagcagcagctccgcgaactgcagcggcacggctatgagaaccccacctaccgcttcctggaggaacgaccctgacccatcccccttcacccctccagccgaacccagacctcccctcttcctggagccccagaaccccaactcccagcctagggcagccgggagtcttgaagtgatcatttcacacccttctgtgagagggctggaaattcttatttcccctttccaattccaaattccatccctaagaattcccagatagtcccagcagcctccccatgtggcacctcctcaccttaatttattttttaagttaatttatggatccttaaggtgaccgacaccttggtcctagtgtctatttccctggaattcaccctctcatgtttccttact

SEQ ID NO: 11983 - DNA, 692 bp, Macaca Fascicularis
  misc_feature (1)...(692): n = A,T,C or G
gcaaacctgaactgtgannncntttagccacttccctannttctctgttggagccatcattaatacttgaaaagtacctttgagtcagggagttctactctgtgtttgtgagaaacgcggccctgcccctccgccacagtttcctcatatgtaaaatggggccactcatgtccactccccaacccctgtgccttgtggtgagacttgctccggggatgatggtcccgcccctcctttcaggaacaggcctttgagagcagccagaagtacaaagaggggaagtacatcattgaactcaaccacattatcaaagacaacggctgggactgacccccgctccccgacgcatgtggctccagcccggcctggccgccagggagcgccaccggcttccctccgcccaaagggagctatggaccctcagggcccctgcagaggacggatccagctcctgtacatatattttattgcatgcactgtgaccttggggggagaacagaagggggacgacgcccccgcacctccagcgatctggctggattggatatcatttttaaccccctccttccccgcttaccctatagatatggcctgtgttctgctctcctggccccagtgcaccgtctgctctgtgaactcctcccaccaagcccctctgaccccacgcgtgtctgtccccctnnnctgtagcg

SEQ ID NO: 11984 - DNA, 747 bp, Macaca Fascicularis
  misc_feature (1)...(747): n = A,T,C or G
tgggtttaaaatccgacagtgttgatcaaaactaatttaggtatcttagagttgccaaaacactagcagatgcatatttacancnttactctcagaaaaatgtaattttccatatagaaacaatgcacaaacataagaagggacaattttaatctgtctgcccatgtttctggtacctttggcctccaatacttaaaggctgcaatgtcctcacatatgtgaccttagcagttacttcttttcctgtgccattgtgcatgtgccaatttgtcatttgtgcagagagtaagaagctttggaaaatggaatgactttatgcagacaactaactgtacccataaaaattacaagagttactaagaaggtcctttgaactaaatttcaagtaactcttgcaatttttgaaaaggtggcctataattatgtttatgaaacaatgccgaattgtgatattttaataaagcccacatcataattccacaaataaaaagttaatcaacttaaaattctcttaaaagcctcaaagcatttcactcttcaaaagtagcaactcctaccaattaagtctatgacctcaacccatgtcctacatgatgaggagagagactcatgttctcaatcacttatatatcgttcagtcttctacattttctaaatttctggtctccactgttaaccatttactggtagagccatgtaaataactgaattgaattcnnnccatatacttatatgatactttctact

SEQ ID NO: 11985 - DNA, 1060 bp, Macaca Fascicularis
  misc_feature (1)...(1060): n = A,T,C or G
agcaaatcgagnnnnnnnngctactgctccagctccagtgggggctgggactgctgcaccagctccatcacaaacacctggctcagctcctcctccacaggcccagggaccaccctatcccacctatccaggatatcctgggtattgccaaatgcccatgcccatgggctataatccttatgcatatggccagtataatatgccatatccaccagtgtatcaccagagccctggacnnnnnnnnnnnccaggaccccagcagccttcataccccttccctcagcccccacagcagtcttactatccacagcagtaatatgtctgctcagcagctcagctgattcagatcagagggaaagaaataccaaccctgcaataagtgtactaaactctacgctctggttaatgtaatgtactctcctggacnnnnnnnagtgtataatttctgtctacagctagaagctgtgccccacttccacatttgattacacatgtgagatttgnnnnnnnnnnnnnnnaaacactaggtataataggatttgaaattgtattacagttcataaaaattgaaaatgagaaattaaacctgcaagtgaaacatttgaaactattatactttctacataagacacggttgggacatcagatacttacaaagatggtttaagtatggatactcgagaaaattaagttttctttccctttggtttattgatttggtttaatttccattatgctattttgcataatcaaggcattgtaaatcttataattttaaaataaattacttaagaacagttgtcattgttatgttttgttattgattctcattactgtctaattttttttttctggtattagtctcattttgtatgtatatgagttaaacatatactgttttttaagtgcatgaatagtacaagttattatcaaggacgttttatagggaaaccaaaagaatagtatcatagtttatctttcatatgctgattagtaaacgacttttgacatttattataaaaagtcctataatgtgaagaaacaagcaattgctaccaaa

SEQ ID NO: 11986 - DNA, 700 bp, Macaca Fascicularis
  misc_feature (1)...(700): n = A,T,C or G
ggcgctctttnnnagggcaaagtcccagccctggagaaaacacctcacccctgcccgcagcgctccgtttgtcaggtgccttagagctggagnnnnnnnnnnnnnnnnnnngcgtgtccgtgtgaagagaccaccaaacaggctttgtgaatgaattcagatatttccagagaatgaccacaacctcttcagtagaaggtaaacagaatctggtgattatgggtaagaagacttggttctccattcctgagaagaatcgacctttaaagggtagaattaatttagttcnnnnnnnagaactcannnnnnnnnnnnnnnnnnnnnnnnnnnnnnnnnnnnnnnnnnnnnnnnccttaaaacttactgaacaaccagaattagcaaataaagtagacatgatttggatagttggtggcagttctgtttataaggaagccatgannnnnnnnnnnnnnnnnnnnnnnnnnnngacaaggatcatgnnnnnnnnnnnnnnnnnnnnnnnnnnnnnnnnnnnnnnnnnnnnnnnnnnnnnnnnnnnnnnnnnnnnnnnnnnnnnnctctctgatgtccaagaggagaaaggcattaagtacaaatttgaagtatatgagaagaatgattaatatgaaggtgttttctggtttaagttgttccccctccctctaaaaaaagtatggatttttacattagaaaaaaa

SEQ ID NO: 11987 - DNA, 741 bp, Macaca Fascicularis
  misc_feature (1)...(741): n = A,T,C or G
acatgnnnnnnnnnnnnnnnntgnnnnnngcaatggaaactgcccttgcacacttggagnnncttgcagtggatgtggaggtggccaatccaccagcaagcaaggagagcatnnncgctcttcnnnnnnnnnnnnnnnctgaagatcatggcgcagttggtcaggagatgtgctgccccatctgctgtagcgaatatgtgaagggggaggtggcaactgagctgccatgccaccactatttccacaagccgtgtgtgtccatctggcttcagaagtcaggcacctgccctgtgtgccgctgcatgttccctcccccactctaaagacnnnnnnnnnttactcctggtctgattattttccccatctgaaatccacaatactgcaggannnnnnnnnnnnntaacaatggaaacaaaaccagtcagtcagttagcctaaacctattgattcctcgtgattatttccaatgtgaaaacagttgtgtatgattgcattaaaaatcatatcatcttttagaggttagaaaagggaaaactaaactttataaatgctacttgagattgcagtaagaacatacgttttctnnnnnnnnnnnnnaatcgcatttgttttcttcagtagaatgtgttgctgttacttgtannnnnnnnnnnnnnnnnnnnnnnnnnnnnnaaggcaaaatcatttttgttgcatgttatgggtcgatgttccnnnnnnnnnnnnnnngtaaaagcttat

SEQ ID NO: 11988 - DNA, 680 bp, Macaca Fascicularis
cccagcatggcactcccagcttggaagctcagagccagctcattcctggagccgcttctctgggccctgccacctcctcccagagccccaagatgcggagactgaccagggacgtgtggtgaaggggaggcaggctcgggtcaccggggctgtgcccaccacgccagacagctgggctgagggacccaaggcgttcggcgcactcagggcctggggagagcccctgggcctgagactgatgtgcggctgagcgagagggctactgctgtgtggacccggaccaggcagggcggccgtgggcggcgcagactcaaggcggggtgtggaccgagggggagcgggaagggctggggtcctggggcccagcagggcgactccggagtgcaaggcggggggcctcgctagaggaccccagagagccccagagcccccaccctatctgctgccgagcgacccctcgcgcacagggcccagcagccacggacgcgccctcccgccccggcggactcgcaggcagcgtcctagcgtccaggtttattgaccgggccgggcctcactcctccttttcctccccgtgggtgatcacgtagctcagcgccttgtagtccaggttgcccgcggcatcgatggaggcgaactggaacatctggtccacctgcgggcgggggcgaaagggcccc

SEQ ID NO: 11989 - DNA, 760 bp, Macaca Fascicularis
  misc_feature (1)...(760): n = A,T,C or G
gcacttcagagattatctttggagcacataatcctcagctggtggggcaggcgtggaacagcactgttnnnnnnnnnnnnnnntcccatgagctcatggggaagggtttcaaacannnnnnnnnntcttgttattagcctctgttttgaaaaatgcatctaagatgaatgtgatggtggcaaaatgtcatagaaattgaacagtctgggggtcannnnnnnnnnnnnnnnnnnnnnnnnnnnnnnnnnnnnnnnnntcaattgtggggnnnnnnnnatgtcattttccctctcccaactttcatctctatctgcaaaattaagaatcccttagaagtgaaaaannnnnnnnnnnnnnnnnnnnnnnnnnnnnnnnnnnnnnttcttaccctcctagtttacgggagattctagcaggctgaacttcctccttgaagtggggtcctcagtcgttcttcccacacccccnnnnnnnnnnnnnnnnnnnctcccacaggtggctggagaacaggcggccactcttgcaggcaaggagttcctcggggacgttcccagcatctttccnnnnnnnnnnnnnnnnnnnnnnngccctggcccacccccagtctctgaggcagctcagagtgtcccctccctgtgctgtgtggtggtgagagcctcacnnnnnnnnnnnnnnnnnnnnnacaacgccctcacagaaccagcttgttataggtgagcaagttgctnnnncagtcacaactcctnnntgtgcatcccgc

SEQ ID NO: 11990 - DNA, 727 bp, Macaca Fascicularis
  misc_feature (1)...(727): n = A,T,C or G
cctcccctnnnnnnnnnnntcnnnnnnnnnnnnnnnnnnnnnnntgataccgtatgagcttttccctttgcactgaatgatgttctctccgtnnnnnnnnnnnnnnnnnnnnagctgtcccagtgtcaatgtttactcaagggtgttcttaggaggcgtgcgctctctactatgccttgatgttgcctaccttattgtggtatcgtggagtttaaaagatcaagttaggactgacttaggattattaatnnnnnnnnnnnnnnnnnnnnnnnnnnnnnnaaaactnnnnnnnnnnnnnnnnnnnnnnnnnnnnnnnnnnnnnnnnnnnnnnnnnnnnnnnnnnnnnnnnnnnnnnnnnnnnnnnnnnnnntgaataggctttccattttgttttggaggttcccacgttgaaccttcttgtttacagatttttttgtttgttttttgagaaaaaaatgtttactcttccatcatttaaaaaaaatgtaaaagacaaaaaaaaatggaggatgatttaaaagatgctttctatctctgggaaaaannnnnnnnnnnnnnnnnnnntcttttgtttttctattcctgtcccaaatcaaagagcatggnnnnnnnnnnnnnnngttccccagttaaaaaaaaaaacaaaaaaaaacaaaaaaaaaactccttgtagtttcttataggaaaaaaacaaaaaccccaactttagcactgatactacatatgc

SEQ ID NO: 11991 - DNA, 779 bp, Macaca Fascicularis
  misc_feature (1)...(779): n = A,T,C or G
gcagcaccatcaagcnntacaatgctgaagacaatgagaacttcaagacaatagtggagtttgagtgcaggggccttgaaccagttgatttccagcnnnaggctgggtttgctgctgaaggtgtggagtcagggacagtcttcagtgacattgatttacaggagaaggactggactgactatgatgaaaaggcccaggagtctgtgggaatctacgannnnnnnnnnnnnnnnnnnnnnnnnnnntccctcttcctgcacagttgcccttacaannnnnnnnnnnnnaatgtactccaagcagcagagcccacagaggctggttcctttgccccttgtctcctggcggctataccaaaccttcacagtctgcatgctggactttattacagttccccaagccccatcaataaagcccctgttcatgctgcactggtgcatgaaggtgaagtaaggaagcagctactccctccgcaaataagaattcgtgcagcagcagttcactccttaggaatatgaagagtgtttttaaggagatggtatctccccagtcaagggcaagtttacagagaggaaactgcgatcccaccatcactcaatgagccagaagccaatggtgacgtactattacctgaacttactgaacttgctgttggaaagatctttgtgacgattaggaattaggttaaaaaaaaattaagaactatcttcaagcaaaaattaaactttatttctggcttaaacaataaatacacctgagttagtttccanaaccttcct

SEQ ID NO: 11992 - DNA, 810 bp, Macaca Fascicularis
  misc_feature (1)...(810): n = A,T,C or G
caattgccccaacannnnnnnnnnnnnnnnnnnnnnnnnntgatgtccagnnaagannnnnnnnttaaaagggccgccaggagggctggtgccgggactccaccacggannnnnnnnnnnnnnnnnnnnnnnnntcagtggagaagtccacagtnnnnnnnnnnnnnnnnnnnnnnnnnnnnnnnnnnnnnnnnnnnnagcctgagaataannnnnnnnnnnnnnnnnnnnnnnnnnnnnnncgggcactggaccccttgctgtatgannnnnnnnnnnnnnnntacttccagaccctcaaggccgtggacccnnnnnnnnnnnnnnnnnnnnnnnnnnnnnnnnnnnnnnnnnnnnnnnnnnnnnnnnnnnncaagatggagtatgctgaggtgcgtgtgctgcacctggctcacaaggatcnnnnnnnnnnnnnnnnnnnnnnnnnnnnnnnnnnnnncacccatcttgacctgtcacacaatcgtctccgaaccctgccacctgcactggctgccctgcgnnnnnnnnnnnnnnnnnnnnnnnnnnnnnnnnnnntagagtccctggatggcgtcaccaacctaccccggctgnnnnnnnnnnnnctgtgcaacaaccgcctccagcaacctgcagcgctccagcctcttgcctcctgccccaggctggtcctcctcaannnnnnnnnnnnnnnnnnnnnnnnnnnnnnnnnnnnnnnnnnnnnnnnnnnnnnnnnnnnnnnnnnnnnnnnnnnnnnnntcacctaagaggccctgccccctacccttgccctttaacttattggga

SEQ ID NO: 11993 - DNA, 750 bp, Macaca Fascicularis
  misc_feature (1)...(750): n = A,T,C or G
tagcagctgtcacgctgaagttttgtnnnctgctgtctctggtcctgagatcagctgtgagcctaggtggccaaggcttcctgcattgcttccctgtgagtccaaggccgtccccaccactgggcaggagctggacaacacggacttctagagacagccgcgttgccagttcctcctctcccacttgctcatccttatctgccatgctattctagtttccattgtcctccaccagcatttccctcactctgaaattccggcattcacatcattcatgttttcttttgtctttcagctaaagaaaaaacattggcgatttgtctgcttctggttttgagttactctttgttcagtaatgcactttattttattgtccaaagagagtcagagctaagcatacaggcttgggggtgagccctgctataagagttcaggccctgggaggctcagccacctcccgttgtgggagggaggtctcagccccacctcgcatcttcacctgcccttggtgtggacacaccctctcatgctaccagcaccataacccagtgggggtgactgggtgcacacctgcccaggtgaacacagcggctgccagtctcctggcccagagaggaggtggggcctggccctggtctcttctaaccaggctgctcgtggggcacaggtgctcctgcttcggctctgtttcggctcacaggtgtgcatcactgggcttggatttgcattacattgaccccagccctgcag

SEQ ID NO: 11994 - DNA, 614 bp, Macaca Fascicularis
  misc_feature (1)...(614): n = A,T,C or G
aaaggnnncgcagagnnnnnnnnnnaagatgtgtgacttcaccgaagacnnnnnnnnnnnnnnnaaggaggccttccagctgtttgaccggacaggtnnnnnnnnnnnnnnntacagccagtgtggggacgtgatgagggccctgggccagaaccctaccaacgccnnnnnnnnnnnnnnnnnnnnnnnnnnnnnnnnnnnnnnnnnnnnnnnnnnnnnnnnnnnnnnnnnnnnnnnnnnnnnnnnnnnnnnnnnnnnnnnnnnnnagaacaaggaccaggnnnnnnnnnnnnnnnnnnnnnaaggacttcgggtgtttgacaaggaannnnnnnnnnnngtcatnnnnnnnnnaatccggnnnnnnnnnnnnnnnnnnnnnnnnnaagatgacagaggaagaagtagagatgctggtggcagggcacgaggnnnnnnnnnnnnnnnnnnnnnnnnnnnnnnncnnnnnnnnnnnnnnnnnnnnnnnaggaccctcccagtctcccgactccgtgcctttccctgtgtgaattttgtatctagcctgaagtttccctaggctctcttgtctcagcacctttcccatcttgtctcnnnnnnnnnnnnnnnngcat

SEQ ID NO: 11995 - DNA, 741 bp, Macaca Fascicularis
  misc_feature (1)...(741): n = A,T,C or G
ccacagtggccatggcggccatggcagcancntcagcatctcaggacagtngtctgcnnnnnnnnntcannnnnnnnnnnnnnnnnnnnnnnnnnnnnnatgatggagccagagccctnnntnnnacaccggcgtcagtgtcnccagagatnnnnnnnnnngtgagtgcatgtggacgctgagtatacgtgagtgcgtgtatgcccccaggggtatacatgagtacgtatacgtgagtgcgtgtatgcccccatgggtcagctcttctgtggattgcagaagagtggtgcaatgtgatgaacagcccatgnnnnnnnnnnnnnnnnnnnnnnnnnnnngttaatgcgtgcctccttggaactgggtgtttgtgtccatggaacttnnnnnnnnnnnnnnnnnnnnnnnnnnnnnnaaacacatcatgatgaagactcttgagccccatttccaaaacccctcaaatccaannnnnnnnnnnnnnnnccatcaaagatttccataggggtgactggtgtccacccaagactgcaccagtgcctgctcattgaggagagtaactgctgccaggcagaaagaatatgggctctgcaatgannnnnnnnnnnnnnngnnnnnnnnnnnnnnnannnnnnnnnnnnnnnnnnnnnnnnnngtggctatcatggttgtgttcatcgattgtggggatgaaatgtcattgtgcatggaaggcgcggctcatggctgatgtgcaataaa

SEQ ID NO: 11996 - DNA, 722 bp, Macaca Fascicularis
  misc_feature (1)...(722): n = A,T,C or G
gcaacagagannntgcagcttgcagtggacatagataaaatgttacagagatactatttttttggttggaattactatattaaatttagaagtagaaactggtaaaatgttaaatacatgtacaattacttttagttagcaattgattatagcatgggttcctccaaggtttcaagcaatgggcagagtttaaagttgtatcagatttgttnnnnnnnnnnnnnnnnnnnnngtgaatttgaataaatcttatgggccattatcacttaaataatactgtatctaggtctttcaaattaaaattatacctgaatgaaattgtttgtatacataaaggatatttgtgtacaatgaccttttttcccccacacttgttttcttttctttgttttttatggcaactggaaattatttactatatttcatttatgtttgtctttctatcataaagaattgatcagtatgtaaatatgtgatttgannnnnnnnnnnnnnnnnnnnnttaactacagctttttagaaaacatagccctaagatacgttaagcagggcccgggggagccagtgggcttgcgctttctgtagagctggaagaaggccttccatcccgcctcttgggtggagagtgtactttcctaataaggaagggaagcacaatggaaacacccctgaaccattttattgcagtaatttttttcatatctgaaactattatttaatat

SEQ ID NO: 11997 - DNA, 732 bp, Macaca Fascicularis
  misc_feature (1)...(732): n = A,T,C or G
acattgagccccagannnngaaattgttcggacagcagaactttcacctttcattgtattcattgcacctactgaccagggcactcagacagaagcnnngcagcngctgcagaaggactctgaggccatccgcagccagtatgctcactactttgacctctcactggtcaataatagtgttgatgaaacccttaagaaattacaagaagccttcgaccaagcgtgcagttctccacagtgggtgcctgtctcctgggtttactaagctcatagaatgggggaacccactgtatgcccctctccagcatttggaactccaccccccttgctttaagacaaacagggctgctccaactagttttgtgtcagcttccagctctctgcagctatcctaattaagccagtagggttcagtcttcttgctcaggctcctgaagggttgggatttgattttcctgatagatggggccccagtaatctggannnnnnnnnnnnnnnnngaaattgggggtaagcagtactaccaaaacgtaactgctagatcaaggatgatgcacagcaaaagcaacgaccccatccctctaaagcctgccctcctttgccttcaactgtatctcgtttgtctttttattttggagaaagcgtttttaactgcaactttctataatgccaaaatgacacatctgtgcaatagaatgacgtctgctctagggaaacctcaaaagcaataaa

SEQ ID NO: 11998 - DNA, 724 bp, Macaca Fascicularis
  misc_feature (1)...(724): n = A,T,C or G
ttactattccacatcaaagagtagtctctgtcaatttgtaaagatatgtctgtctttttgggtcctcagagaaaatgcccattttcaagaggaattctctgcactcctctgcttcccatccagcttgcctgttctcatctttggtaggattctgccagttgcttttacatcttctgttcctgggtaatggtgggtcttaatggaggctgggtggaccactgcccattcacnnnnnnnnnnnnnnnnnnnnnnnnngccacggtgacacacattagagaaaggacagaggtctgctccttcctgccacctttctcctggccccttagcattcccccagtccctccctcttcaccctgctcgtctgtgtcttcccagttcagcctttttcctactcttaaatactgtgctacttcactgtaagaatgaaagaacagttaggataccaatgagtaaaagggttcctggtcactctgactctgtgcaaattgtattacagtagacccctgacattcccaagtgacagatccagggcctttcaaacatccccaaagtcatggccatgcnnnnnnnnnnnnnnnnnnnaacatctgtttcagggtatcgagctgtagatgttcttaccccccatacttgtgagttcttggagttgctcccaaatacaaggggttatgttgtatttttaacaaatatatcctgttgtcatatttattctcttttgtaactg

SEQ ID NO: 11999 - DNA, 710 bp, Macaca Fascicularis
  misc_feature (1)...(710): n = A,T,C or G
gactcnnnnnnntaagaactagacggtgcctggttcctcagaaaagacccccagggaagaaggcaaaaacattacatccatgcattcttccgccacagccacattggaagaaaagcctgccgcatcatctcagcgaggagtgaaggactcgtgtcccagggagcgtgctcctccacctgcactcacccccctcgcattctcttaagcacccggtggccctctgaggcctggcagaatggtggtgcccacgaggttgggccagggctcaccaggacctagatgggcaaagttgtgcacactgaaatatcaaatcaaggtgcttggttttnnnnnnnnnnnnnnnnnaaagaaagctgtactcttctgctgacccagacgagtggggcacagccctttaactgcacatgcctcctgtcattgggaatgaaataaattattacgagaaagggacttgtcctaactggtttgagaccttacagttttgtatcaacctgtttcccctcctggggtttgcaggggcagggacagaactacaggagtcatggcaaagaaaattctagcttcactactgcttgctgctcactttctgatcactttgatactttttttttttttgcaacctgataccttgaaaagcctctatgtgtctctctttttgttacctggcagctgtctaggatgatcactgtttaatatttactaagtagcca

SEQ ID NO: 12000 - DNA, 695 bp, Macaca Fascicularis
  misc_feature (1)...(695): n = A,T,C or G
tgggggccgcaaaggttccatcagagactgatgctggggagcaagtgacncaggccaggtgcccaggaaaggacggctgagtgtgtggagtgcagcgagagggaggcaggtggacgcaggagaccccaggttcagtgcagcccctcagctgctcctcccctgtagagtttggacagacccacccccagccttgcctggctttaaaaggacaaaagggagcatcccccacccactctcagggttttgaggaaacaaagatttgtggtaactgaaggtgttgggtcagtggccaggtgcagacactgagcggtgacccagaggggacattgaggaagtgggcggcagcggtcgtgtcagctggttaccaggcactggttgtgtggttgacagtcggtggttgggtgtgggaggtcatcagtcatcaggtgtgcccggggacgttctcccctcagctgcacatgtgccagtgtccagcggagccgaggactggttcctcctgcctggatcaggtgtgcccaggggatgcactcccctcagccacgtgtgtgccactgttcagcggagccgaggacgtagaggggcaagctcccagctgtttctaacagatgcctggtgagcaggggacgtaggaccccgaggtcagcaggtgtctggcacggtcctcgtgtgtggaatgtcctccatgggcaggaatg

SEQ ID NO: 12001 - DNA, 1087 bp, Macaca Fascicularis
  misc_feature (1)...(1087): n = A,T,C or G
agcagtagnnntnnnnnncagaaatannnnnatccatatctgatgtaaaattcagtcatagtgggcggtacatgatgaccagagactacctgtcggtgaaggtgtgggacctcaacatggagagccggccggtggagacccaccaagtccacgagtacctgcgcagcaagctctgctctctgtatgagaacgactgcatnnnnnnnnnnnnnnnnnnttgctggaacggttcggatagcgccatcatgaccgggtcctacaacaacttcttcagaatgtttgatagagacacacggagggatgtgaccctggaggcctcgagagagagcagcaaaccacgcgccagcctcaaacccaggaaggtgtgtacagggggtaagcggaagaaagatgagatcagtgtggacagtctggacttcaacaagaagatcctgcacacggcctggcaccccgcggacaatgtcattgccgtagctgccaccaataacttgtacatattccaggacaaaatcaactagggacgcgaacgtgaggaccgtcttgtcttgcatagttaagccgatcatttttctnnnnnnnnnnnnnnnnnnnntccactccattaagaacagtgacgcacctgctacttcccttcacagacatgggagaaagctgcctccgctggaggcccggtgtgtttctgcctttggcgaggcgcgaggcaggcgctcctgctcacatggagacgctctcgaagcagagctgacagacactgctcccnnnnnnnnnnnnnnnnnnnnaaatgtatttatttcagtccgagccttcctttccaatttatagaccaaaaaattaacatccaagagaaaagttgttgtcagttaccgctcttcctctgactttccctctttctctgccatcgcacctgggccttcactgnnnnnnnnnnnnnnnnncgtccgtgtcctctcggcctttctctgagtccgggtgggctccgtggatgtgtggatgtggcccgagcaggctcaggcggccccactcacccacagcatccgccgccaccccttcgggtgtgagcactcaataaaaacaacacgctaaaaaa

SEQ ID NO: 12002 - DNA, 692 bp, Macaca Fascicularis
  misc_feature (1)...(692): n = A,T,C or G
gcgcaagagcgtggagactcgggactgnnncagcactctggagccgcgtaatgtgcgggccgtcatgaagcgggtggtggaggataccaccgccatcgacgtgcaggtggggcttctgtacnnnnnnnnnnnnnnnnnnnnnnnnnnnnnnnnnnnnnnnnnnnnnnnnnnnnnnnnnnnnnnnnnntctcggcagcagggccgctacgcccccagctatacccccagtgccccgatggacaccaacctcttgagcaatatccagaagctattctctgaacgtattgatgtgttcagccctgtggagtacaacaaggtccgacttccagcgtgaatcagacttccagggagcccggggagggttggctggagcagccccacacctgcccaaggagctccaggactctgtgaccaactgggggtgaccctgaccctccagtctctgtctctagggctgttcttaggtagtacagagtgccctgcccccaaatcccacagccattgtcccaaccttggtgtgtgcccagcctgagtctcnnnnnnnnnnnnnnnnnnnnctctgcccttgtccttatccccacagtagtcttggggccttcccagggttttctgttcacccatggttcctgccccacctcacccnnnnnnnnnnnnnnnnnnnnnnnnnngggccctacctgtcccctgccctc

SEQ ID NO: 12003 - DNA, 580 bp, Macaca Fascicularis
  misc_feature (1)...(580): n = A,T,C or G
tcggggaggcaggtcccaggagcagaccctgcccccagcccccacagacacaccccaatctgaaagccatgcgtgtccgtgtatataggaaccatgtacagagcccggagaagccccctacgtccccccgggaaaaaaaaagaaaactagacagaaactcatctatatattctgtatctggagttccgttttgaatattaactgtgttatttttatacactttttaagccttaactcgccattgatttaccagtttaacgtttcctggggtttcttttnnncatggggttctctgcccccacatccccancnngtttccatgggcctgncacccagcccatcattgcaccctttggtccggaggatctcccgcccatatcagttgtgcctcatgaagttgccgcacccctgtgttcagtgatgcccggggcacagctcgaggtgcgagccaagcactcaggggagaagggctcacnnnnnnctgcttcttgcccctcccacttgggggtcccctgagcagtccagaaacccacgcctgagccttccctcaagacgtgaggccatggcaagagaaggtccc

SEQ ID NO: 12004 - DNA, 767 bp, Macaca Fascicularis
  misc_feature (1)...(767): n = A,T,C or G
gctgactttagctataatatacagtaggttaagactcatgtntatgatttttactctaagaccagcaaaaggacagcagtctaatatgtttagttaagattcatttcagtagaagataatcttatctaatttttgagaccagaataagccttttaaggtaaaccttaaaattctcattttatggtnnnnnnnnnnnnnnnnnnnnnnnaggtttgacatgggagatagtgactacactggtgtctgactttttttcctagagatttctccctgaaaaatacaggggctgttggtgagnnnnnnnnnnnnnnnntgatagttggcctgtggtctacaaagatttcgtaactccttggaaagcttcttcttatcattcttaacttgttggtagctagaaatttagagtagttgaaatctgtaggaatgaacttctgaggtccaaaaaatgtgnnnnnnnnnnnnnnnattcttaaactgattagctgtaatatagttttgtgaatttattgcactgatgttgtaccttgtggtatatctgtccctattaaataagtgttttttcctctttaatattgctgtaaacagtggtgcccattgtagcatatgttttttttttttttaatatttcataagaaaactaccttaattttaccttactttcattgtaaataagcctgtcttcctatctggattttttttgtgtatacatgttctactgattaactacttttgcagttttaatcctgtattattctactaagtaaaat

SEQ ID NO: 12005 - DNA, 738 bp, Macaca Fascicularis
  misc_feature (1)...(738): n = A,T,C or G
caagaggattcagagtccttgaaattactttnnnnnnnnnnnnnnnnnngcaacactggtccttgggcctgtgacccacagatgactcagtatagagttcgttgctaattataaattactagtgaatctttttgatattttaagctctagtgggaaaaatctggccactttcgtgttttttatgaaggccatggaataaaaggatccaaagatttaaatatttttatctaatattttgattgttttattaactttctccttaaaacattcagtagtgataaagatacagaaactgcactgtaggagaattggaatatttaaggctggttgatattttttattttaattttatatcttttgtatagctctacaaggcagtgttttgtaatttggtnnnnnnnnnnnnnnnnnnnnnnnnnnnnnnnnnnnttagataatattgtttagtgctgtttgtttgcatgttaacaacaaaaccttttagaggacccacaaatcatgatattgaacacatttctgagnnnnnnnnnnnnnnnnnnnnnnnnnnnnnnnnnnnnnnnngtagactgtttgagatgtcccaggccaatttcaagaaagaaaactgtaaatactagttctacttgctccgaaagtatgagttcnnnnnnnnnnnnnnnnntctgannnnnnnnnnnnngcgttttgtgccccaacaaaaannnnnagcatggcatannnncagcacaccttacaata

SEQ ID NO: 12006 - DNA, 1333 bp, Macaca Fascicularis
  misc_feature (1)...(1333): n = A,T,C or G
aggcctcaaaagccactnnnnngccatactccagcccctcagtttcctctactctggcagccaaagatgacccagatggcaagcaggaggcaaagccccaacaggcagcaggcatgttgtcccctaaaacaggtggaaaagaggctgtttcaggcaccacacctcagaagtcccggaagcccaagaaaggggctgggaacccccaagccnnnnnnnnnnnnnnncaaagcaacatcacccagtgcctcctgggccaaccctggcccctgaacgaggcccaggtgcaggcctnnnnnnnnnnnnnnnnnnccgaaagaaggtgctgaacaggannnnnnnnnnnnnnnnnnnnnnnngaaagaaggtggtggacgccaccaaggagagcagcaggaagggctgggagagcnnnnnnnnnnnnnnnnnnngagaccagccggcttccaggacccccaggagcaagaagaagaagaaactaggggccggggaaggtggggaggcctttgtttccccagaaaagacctccacgacttccaaggggaaagcaaagagagacaaagcaagtgatgatgtcaaggagaaaaaagggaaggggtctcttggctcccaaggggccaaggacgagccagaaaaggagcttcagaaggggatagggaaggttgaaggtggagatcaaagcaacccaaagagcaagaaggagaagaagaaatccgacaagagaaaaaaagacaaggaaaaaaaagaaaagaagaaagcaaaaaagtcctcaaccaaagattctgagtcaccgtcccagaagaaaaagaagaaaaagaagaagacagcagagcagactgtgtgacgggcaccagcaccagcaccagcaccaggcacagggatttcctagccannnnnnnnnnnnccccatgcctctgacctccgctgacctctnnnnnnnnnnnnnnnnnnnnnnnnnnnnnnnnnnnnnnnnnnnnnngaagaagacagccagctgcaggggtccctgnnnnnnnnnnnnnnnnnnnnnnnnnnggaggctggtccgaggagaaagtggaccagctcccatgacctcaccccactcccccnnnnnnnnnnnnnnnntatagatgtgtacagtatatgtatttttgtaagtgacctcctctccttccgcagaccccacaggcccaaaggcttcgggacttcccaccaccttgctccacagatccagctaggnnnnnnnnnnnnnnnnnnnnnnnnnnnnnnnnnnnnnnnnnnnnnnnnnnnnnnnnnnnnnnctcatcagttcttttggttgtgttttctgttttgttttgttttgtttttcaaa

SEQ ID NO: 12007 - DNA, 621 bp, Macaca Fascicularis
  misc_feature (1)...(621): n = A,T,C or G
cggcggcatgagcanntgggatgttaaggtgaggcttgcccttcctggcttcccgctgtgnnncccagatcaactctttccccccatccttcactcctgcagagatggcactgcaagaggatgagggctgggggcggccccttgtcatctgggccttggtgctnnnnggggcacccgtcttcagggctgggattcaaacccagttctgacagactccgaaactgcaggttctctgccctctgatgttctggggctgagatgggtgatcaggtccctgggagtggggtgcctgccggacagctgagaaccagcctgtccgttctgcctccctgcagagcttggagtcagccttgaaggacctcaagatcaaatgacctgtgaggaatatgttaccttcatcctagctgctggggaagcagggagaggagtaggggaggctaatggttgctttgctgaatatttctggggtaccaatgtgagtccccataggggctgctccctcaaagaggggacagatggggagcttttcttacctattcaagaaatnnntgcctttttcttaaaaaaatgctttcatttatgaaaaannnnnnaaaatgccccnnnaagcactatgctggt

SEQ ID NO: 12008 - DNA, 720 bp, Macaca Fascicularis
tgtggacgaacatctggggtggaagttttgtagccacacacaggatactgcccaagatccagcgggtgttttcttctcagttgttagatgtacaattggattaatgtccgtcattttggaagacgagagaaaattgagaagaacacgaagcacagaccctgatgtgataaaacatttgtggtttctctgagtcacagataaacttctgccatcaaatggctacagttcatttaagtttaaaaaaaagaaaagagaaacaggaaacatgtctcagatggctggctttacctcgatagcataagagagacctaagacatgtaaaatacatatattgtaatatctttcctcacactccaaattcagctagggaagttgattccaatatttttgtcattgatatttattttgtactttgtttgccacatgatttatgtctacaaaaataatttctctgaagtgaatttacttcatttattttcaaataagcataatttgctcaattaagtatgagtttgaatttagtttgaaatctggaattggccagactgtggtcatttttcttgcacaaaatgataaatgaggtgcatcagaatgttaacaataactgtattttgctgctacgctggtattgtttatgcacttattttctaatcagtagcttattaactgctgggttttgtttttgtatttttaactagagttcttcactggacatactaa

SEQ ID NO: 12009 - DNA, 719 bp, Macaca Fascicularis
acaagccaggcctggagcgctttgtggccatgaaccggggcatcaacgagggcggggacctgcctgaggagctgctcaggaacctctacgacagcatccgaaatgagcccttcaagattcctgaggatgacgggaacgacctgacccacaccttcttcaacccagaccgggagggctggctcctgaagctgggagggggccgggtgaagacgtggaagcggcgctggtttatcctcacagacaactgcctctactacttcgagtacaccacggacaaggagccccgaggaatcatccccctggagaatctgagcatccgagaggtggacgacccccggaaaccaaactgctttgaactttacatccccaacaataaggggcagctcatcaaagcctgcaaaaccgaggcggacggccgagtggtagagggaaaccacatggtgtaccggatctcggccccgacgcaggaggagaaggatgagtggatcaagtctatccaggcggctgtgagtgtggaccccttctatgagatgctggcagcgagaaagaagcggatttcagtcaagaagaagcaggagcagccctgaccccctgcccccaactccattatttattacggagctgccccgcctcggtggccggacccctgggccttggggctgtggatcctggttccctgtttggaaaatgcaccacctctagctcctctctgttctttg

SEQ ID NO: 12010 - DNA, 747 bp, Macaca Fascicularis
  misc_feature (1)...(747): n = A,T,C or G
cacggcagagttgcccatcagcaggaacacnntcgcagaagtcaccgggctgtcccctggggtcacctattacttcaaagtctttgccgtgaaccacgggagggagagcaagcctctgactgccgaacagacaaccaaactggatgctcccactaacctccagtttgtcaatgaaacggattctactgtcctggtgagatggactccacctcgggcccggataacaggataccgactgnnnnnnnnnnnnnnnnnnnnnnnnnnnnnnnnnnnnnnnnnnnnnnnnnnnnnnnnnnnnnnnnnnncactgaggaatctgcagcctggatctgagtacaccgtatcccttgtggccataaagggcaaccaagagagccccaaagccactggagtctttaccacactgcagcctgggagctccattccaccttacaacaccgaggtgaccgagaccaccattgtgatcacatggacacctgctccaagaattggttttaagctgggtgtacgaccaagccagggaggagaggcaccacgagaagtgacttcagactcaggaagcatcgttgtgtctggcttgactccaggagtggaatatgtctacaccatccaagtcctgagagacggacaggaaagagatgcgccaattgtaaacaaagtggtgacaccattgtctccaccaacaaacttgcatctggagacaaaccctgacactggagtgctcacagtctcctgggagaggagtac

SEQ ID NO: 12011 - DNA, 721 bp, Macaca Fascicularis
  misc_feature (1)...(721): n = A,T,C or G
ataatactcaaaacgtttcactgaatgtctcaactgagaaaaaaaattgaatgcatgttttatcaatgcttctctttagtattaatatttacttatgcttaaaacttttggctaaactatcttcttttttagatctaatgctatgattttgcatgtaagaaaagtaaaacaaacattaacccaaagaacttctaaaactggtatacttggttctctgataaaannnnnnnnnngcaactttactgttcagtgactggtttcaaacatttgtcagaattacnnnnnnnnnnnnnnnnnnnnnnnnnnnnnnnnnnnnnnnnnnnnnnnnnnnnnnnnnnnnnnnnnnnncaatgaaaatttatcagaacaatttttacacataaaaaaatttatttttatgtgtaaaataaaaaataagtaaaaatcggagctctttggttgaagcaggggtagagcccagagttctgttttttacagtcctgtctatcttcagtataacttttcttggcccagtccccattaaggacccaggtgaaccccaaaggaattagaacactagccactaaattggagtgtgggctgcagtggcggcccctgcagcagcggcgatcccagcctagcccggccgcccgcgcctgtccggtcnnnnnnnnnnnnnnnnnnnnnnnnnnnnagtggcgggactccgaacctaccccgcctagtgagccgcgccgcgcca

SEQ ID NO: 12012 - DNA, 733 bp, Macaca Fascicularis
  misc_feature (1)...(733): n = A,T,C or G
agcaggcagagagcgagnnnnnagacancgaatccaggatnncagccctgagggccgcggggctcannnnnnnnnnnnnnnnnnagcctcgaaggaagtcaaacctcccgatatttctccctcgagtggctgggaaacttggcaagagaccagaggacccaaatgcagacccttcaagnnnnnnnnnnnnnnnngctgcgccctatcttctgagaagaaagttcagtaattccctgaaaaatcaaggcaaagatgatgattcttttgatcggaaatcagtgtaccgaggctcgctgacacagagaaaccccaacgggaggaaaggaatggccagccacaccttcgcgaaacctgtggtggcccatcagccctaacaggggacaggacagagcaacagagcagccctgcactcttttccctccaccacggccatcctgtccctcactggctctgcgcttaccactgtacacagtcaccatcccagtgagaaacaaggagcaccctctacgtggactccccctgcaagaggacagcgacattcagtcctgcactgctcatttgggtttactgatgactcctggccaccccaccagcccctctgnnnnnnnnnnnnnnnctaagccgctgtgacttccctttaggacaatgttgtgttaacctttgaaggacacacagaagacctttatactgtgatcttttacccctttcactcttggctttcttatgttgcttt

SEQ ID NO: 12013 - DNA, 761 bp, Macaca Fascicularis
  misc_feature (1)...(761): n = A,T,C or G
aattagccgagnnnntgcagaggatactcatnnntcagggagaaccaatggcctcatgaatggaagcaggaaggaaataaaggggggtcannntaaagaaattaattcttgctaaaatatagcaactagcatatccctaatactcaatgttccctctcctctttccttgcagcattttaaagcccnnnnnnnnnnnnnnnnnnnnntcactccttcatccaactccacctcccaagctggagacatggagacattaaccttcagtgagacagctcccaaagctgctgtttcaaggccgagctggcccctctgccccagctgagatggannnnnnnnnnnnnnntacttgatgtccttgcctatgccacagcttggggtcagggccagtgcatgccctgctgcccctctctgccagaggngcacagaacatnnnnnttagtgaacctgcctgcctcagattgctgtccctggcgagttaatgcatctgtaccactgtggggatttgagttagaagaattggaatttctgagatcccatggagtttggattgggaggaaagcttaaaagatttcctttttgtgggagggatggaattgttttctttccttcgtaaagttagtgggtaaaaattttataaatcaaatgctctattatattgtcagattcttctgctatttaatgtgacagagaaaaggctggcggcagagacacaggaactttgcttagtaacgggcattaaatgaagagtagttaaagcaaac

SEQ ID NO: 12014 - DNA, 752 bp, Macaca Fascicularis
  misc_feature (1)...(752): n = A,T,C or G
taccatcaagtacacactgttggcaaaaggctaacacctgacttaagaacatactgatctgagaacaaaaggagagctctcttttcactgcttaaagnnnnnnnnnnnnnnnnnnnnnnnngtcatgtctgtgtctgatgagtgtggaatctctggatgtgcactgtcagtcgtgtccaccaggcctcgaatatcatatgggaaatgtcatagttaaaagtgtacagccaggcccgtgttnnnnnnnnnnnnnnnnnnnnnnnngttaaaaaaaaaaaacaaaaaaaacaggaaccaaatgtgaccttgtgtatatgttggtagctgacagtcttcaaggctactgatgggtggccccttaaattaatcttgtctttgattgctgtgtgcagggaaaggtgtccccgttcgttcatgctgttttgggcggatggggggtatttgcaagaatactcattttgatgtaataggtcctcttgtcagagatgctctaccacagacattgatagctgagcagcagccacatggattgattgtatccacttaccattgacgatggcattgagcgtagctagcttatttccatcactacgtgtttttgagcttgctctnnnnnnnnnnnnnnngcnnnnnnnnnnnnnnnnnnnnnnnnnnnnnnnnnnnnnnnaaaaacacttttcacaaaactagtcctttgtcattgcattatttactcatgtgtttgtacatttttgtatgttaatttatgaatg

SEQ ID NO: 12015 - DNA, 1034 bp, Macaca Fascicularis
  misc_feature (1)...(1034): n = A,T,C or G
ggatatactgagtgccactttgccctatcctatttgaaatccctaacaactgagttttctattaaggatccaaaaagaaaaacaaaatgctaatgaagccattggttaagggtcacatgccaataaaaaataaattttccagaagaaatgaaatccaactagacaaagtagagcttatgaaatggttcagtaaggatgatttttatttattttttttttttttannnnnnnnnnnnnnnnnnnnnnnnnnnnnnnnnnnnnnnnntgtgatcacccatcttnnnnnnnnnnnnnnnnnnnnnnnnnnnnnnnnnnnnnnnnnnnnnnnnnnnnnnnncatgnnnnnnnnnnnnnnnnnnnnnnnnnnnnnnnnnnnnnnnnnnnnnnnnnnnnnnnnnnnnnnnnnnnnnnnnnnnnnnnnnnnnnnnnnnnnnnnnnnnnnnnnnnnnnnnnnnnnnnnnnnnnnnnnnnnnnnnncgtgcatagccaaggatgagatttttaaagtatgtttcagttctgtgtcatggttggaagagacagtagaagggatatggaaaaggtcatggggaagcagaggtgattcatggctctgtgaatttgaggtgaatggttccttgttgtctaggtcacttgtgaagaatatgagtcagttattaccagccttggaatttacttctatagcttacaacagaccttttgaactggaaaacaccttgtctgcattcactttaaaatgtcaaaactgannnntgtaataaatgtttatttttcacattgagtttgtttaaatcctgaagttcttccttaagagaattgggactcctagagtgattggacattcgaaatattcctgatagtcttgttaatgaagagattaggatatctttccattaccttgataattacattttaatttagcttttttcattggcctgtgtttgaatgcaaataaccccaaaatggacatttcctatgttaaagtgacatttaggggatagaaaatgcagagcagttccatggattttggtgtt

SEQ ID NO: 12016 - DNA, 734 bp, Macaca Fascicularis
  misc_feature (1)...(734): n = A,T,C or G
gaacgcttgcnnntnctccctccacaccaggacgctgtnnnncagtccttcacctacctcgccactctgccactgtcctcattggtcctttctcctaaactagtctttgtgctctctttttttcttgtttatttccctcttgtctctcatcttttcttcctcttcccctcccatttcagtcctttgcttttctctttcccatctccactcaatattccaatggcaaaccctgatgtaacacctttgatgagnnnnnnngctttccggaacttnnnnnnnnnnnnnnnnttttcnnnnnnnnnnnnnnnnntcttctttcccaggcgaactcccctgttcctctgtggtgtctgtcagtctgtctgtcttctccttcctctgcccttcccacggggcagtatctgctgatggattcagtcctggtgtgtgattgttgtgatttgttcttctgtgcgcaaaaggaagggggctttttgnnnnnnnnnnnnnnnnnnnnnnaaatgtagaatttnnnnnnnnnnnnnnnnnnntttttttcttttttttggggggggttnnnnnnnnnnnnnnnnnnnnnnnnnnnnnnnnnnnnnnnnnnnntaaatttttttttaatatataaaaannnttgtttctacagtttgcnnnnnnnnnnnnnnntatggcaattttagggtttttttcttaaacataggaactaaaactgtacaaatttttttttnnnaaaataaaga

SEQ ID NO: 12017 - DNA, 770 bp, Macaca Fascicularis
  misc_feature (1)...(770): n = A,T,C or G
gcataacacaannggttgctgcctaccaaggctgtcacttcataggcatgcccgaatgtgaggtgcttctggcccagtgtgtggtctactttgccagagctccaaagtccattgaggtgtacagcgcctacaagaangtcaaagnntgcctgaggaaccaccaggggcccctgccccccgtgcccctgcacctgaggaacgcgcccacgaggctgatgaaggatttgggctatggcaaaggctataagtacaaccccatgtacagcgagcctgtggatcaggagtacctgcctgtagagttgaggggagtcgatttcttcaagcagaggaggtgctgactcctcaggcagtgacagcagaaggannctgctttttttaagagagggccagaaagaaagaaactggattgcaaagttggttgcctggtggaagttagaacagaccaacatttcgtgccagaaatttaagagtctcataggtggaggcacagttatttcaactaaatgtgtaactttgaaattgtgttcgtttgcacttggtgcagcggttatgcttatgaaaatatctggcagctttgtgcaatgaattaatgttataaggaattatctattttgtcatagtatttaagtcataatgtcatttcagaattcagttctgtaggatttttttttctttaaaaaatgtatattctcggtagttttaattggtaaaagaaaatgtaattgtgatttaatactgcatagtgttttgggtattttttcttatatgca

SEQ ID NO: 12018 - DNA, 767 bp, Macaca Fascicularis
  misc_feature (1)...(767): n = A,T,C or G
ccatccagtacattcccactgagctggatcaagttagaaaatggatttctgactggaatctcacaactgaaaaaaagcacacccttttaagactactttatgaggcccttgtggattgtaagaagagtgatgctgcttcaaaagtcatggtggaattgcttggaaagttnnnnnnnnnnnnnnnnnnnnnnnnnncgcgttgatgcccacaggtgtattgtacgagcattgaannnnnnnnnnnnnnnnnnnnnnnnnccaccttcttactttaaaaccagtgaagtttttggaaggcnnnnnnnnnnnnnntcttttaaccatttttgtgagtgctaaattggcatcatatnnnnnnnnnnnnnnnnnnaataaagacttcattgattcactnnnnnnnnnnnnnnnnnnnnnnnnngcaaaaatgagactacttacttttatgggaatggcagtggaaaataaagaaatttcttttgatannnnnnnnnnagaacttcagattggagctgatgatgttgaagcatttgttattgacgcggtaagaactaaaatggtctactgcaaaattgatcagacccagagaaaagtagttgtcagtcatagcacacatcggacatttggaaaacagcagtggcaacaactgtatgacacacttaatgcctggaaacaaaatctgaacaaagtgaaaaacagccttttgagtctttctgatacctgagtttttatgcttataatttttgctctatgaaaaaaaatcccaaaat

SEQ ID NO: 12019 - DNA, 740 bp, Macaca Fascicularis
  misc_feature (1)...(740): n = A,T,C or G
acgccgcagcccagagccggagtggttgtttaaatgtagtgaaagtgacctggaactaaaaacagctcctccaggcagtagcacatgcaggggctcagcatccacaggtgagcagcggcggcccnnnnnnnnnnnnnnnnnnnnnnnnnnnnnnnnnnngagaaaatcctattgtgcagcgtcccgcccaaccttccccctgtcagcagggtcctgagagggaggagagggtggtggggggctggtggccctggcgagggcggctctccccgggtgcggttgggggttcgggagatgcttcctggggagggggtgagtccggttaggctggggtgcgggttgaggcggctgcaccctaaccccgcgctccgctcaggtgacagggctgagcgtgaccagcggaggagaccannnnnnnnnnnnnnnnnnnnnnnnnnnnnnnnnnnnnnnnnnnnnnnnnnaccgctcccggccgccgctggacaaccgcattggggagctggtgggtgtgctggccgcacactgccagggggagggccgcgccctggaggttcgcgtctccgactgcatcccgctgagccagcgcggggcccggcgcctcgtctcggtggagcccaggccggagcagccagagcccgatttccgctgcgcccgcggcaccttcaccctactctgnnnnnnnnnnnnnnnnnncgcacccgccgcgccccgaggccgcggatgtccgccccgcccgcgcg

SEQ ID NO: 12020 - DNA, 755 bp, Macaca Fascicularis
gaccactgaccagcagttccattgtgataaggggcagaccggcaggtcccagcatctcgagaccctctgcagcagtatcatcagagtagagctgacttctagtacccgagcagccagctctgtctccagggaggcctgcctggaggaggagtccactaacaggaaacacttctcaccccctcacacaggcgcaggggagcccctagagggaaattccttggcaggggagcaggaaatgtcgcctctgccccactgccagcctgagtaggcgaggaagcagggggctcccccagaaggaaccgcagcttgcgaggcgcctctcctcgtccccacccacccccacatgtgcacaccttccgcagggtcaggatggagtaactgccttgcaaggtggtgagactcctgtctctggaggtctgcaagcaccgggtagtgatgttgcaccaaacaaggtctgggttgggcgtctgcaggaggagaccttgtgggacatttgaggacatccacagattcttgtcagcctgggaactaagccctgccgctgtcacctcattggtccatgaaggagcagccaggggtggtggaaggagcactgggctaggggtcaggggtcagagattctgtcctgcccctgggatacactggctactccgttagtcgactcccttcccctctctggtcctcagctttctccatcatggaggggatggcatcatggattttctgggcgtaaatggctgttctgagagaatagc

SEQ ID NO: 12021 - DNA, 730 bp, Macaca Fascicularis
  misc_feature (1)...(730): n = A,T,C or G
gtcccagcagaccnnnnnnnnnnnnnnnnctatagtgtttgtaaagacaagaaaagtgcagctctcgctgagcttgannnnnnnnnnnnngtcgcagactttggaccccgggatgaaagagatgactttnnnnnnnnnnnnnnnnnnnnnnnnnnnnccccgcaatcnngtggcaccacagagccggccacgagctccagcgtgtnnnnnnnnnnnnnnnnnnnnnnnnnnnnnnnnnnnnnnnnnnnnnnnnggaggaaagataaagggctcgggggcctggtgtggcaggggcatgcggctgagnnnnnnnnnnnnnnnnaaaagggaaagaagagggccaggccccgcctggagcaggacagctccctcaagagttacctgtcgggcgaggacgtggaagatgacccggacctcgttggtgccccggagtacgaatgctacgccctggacgcagaggagttggaggcagagaaaggaggtggcacaacggaggatggccgcggnnnnnnnnnnnnnnnggagtagatggagaggcgtcagctctgcctgtcccacgttcgcagggaaaagcattgnnnnnnnnnnnnnnnnnnnnnnnnnnnnnnnnnnnnnnnggagttaaaaccatctgctcttctgttacgtcgacgttttctagcttttccgtgtatctaaacacagtttgctacagaagtcactgttgtttttcccatacactgtgtgtaat

SEQ ID NO: 12022 - DNA, 752 bp, Macaca Fascicularis
  misc_feature (1)...(752): n = A,T,C or G
agattgactctnntnngtacccagaattcctggacgcaagatgggatgaactcactgacataccagttgctggctcgagagctggggcctctttataccaacatcacagcagacattgggactgaccctcggggtcctcgggctccttctgggccccgttacccacctggttcctcccaagccttccgtcnnnnnnnnnnnnnnngccggcccccatccaggcctgggcctccacctactgccaaccacacagccctccgaggttcacactgactcctccttcctgcctaccttaatcataaaaccgaattcacggggttgtattctccccaccctcagctcctcactgttctcagagggatgcgggggaactgaactctggtgccgtgctagggggaaggggcctctcctcactgctggactggagctgggctcccgtagacctgaggggtccctctctctagggtctcctgtgggggttatgactgtgaatccttgatgtcatgattttatgtgacgattcctgggagtccctgccgctagggtaggagcagggctggaccccaagccccttcctcttccataaagagaagagtgatctggcttctcctgggacctctgtgaatatttattctatttatggttcccgggaagttgtttggtgaaggaagcccctccccgggcnnnnnnnnnnnnnnnnnnnnnngctcccccttctggtcctggctcagagggctgggattttgatatat

SEQ ID NO: 12023 - DNA, 1060 bp, Macaca Fascicularis
  misc_feature (1)...(1060): n = A,T,C or G
ctcagaacaccaaatatcaccagactgcctcggaaacttnnnnnnnnnnnnnnnnnnnctctcggggaggggttcaccgtctccctgtcctgcacccactatgaggccacatcctcgtttctgctcacatcccattgcccggttacacggcctgcccacagcccttaaacttgctgggcaggtttggggcccatgggacccgtgggtctgtgtccggcagcagcagaggaggctgacaggccctgctccctctgctctggggtgtctgggggcccagctcatgccctcccaatgcttatatgctgaagctcacagaacgggcttcccgcctgacagcaagtcaaagaatgagtttaatacgaaagtgtaagcttactttccatccgcaagccaacctgccccagccccatttcccgtgagcacacttctggggaaggaaaacaggctcctggccttcactgtcagtagagccttggagatgccccaggcatgccttgagctcctcctgtgtaccgcactttagaggcggcacctgctcccacttctgagccacccgctgcctctcagcactgctggtaaacccagttcctgcctcggccaggtctccttccctggtttccagtcacagagagccaggcagctttctctttcagtcccataaaggcagcctgtgtccctggccacacctccacccgccaggtcttcctccccgtcttccatccttcctgctgagcttccacagagctcgtttgcaaacagtgggattaaagcatcactgcgcgnnnnnnnnnnnnnnngcagtctcttcctttccaacaccagagtgcgtgaggtgcctgctgaggggtgtgggctgagctgtcctgggctccatgccctgatcattctacagctgcagcagcccaagggctctgctgtgctcacttgggtcccatttgggggatgagtgtcctggatttctagtcccaaagttacacaacagaaggaatcattaannnnnnnnnnnnnnngccccacgtgttcgtaaaggtggcccnnnccaggggagggagtcaatccc

SEQ ID NO: 12024 - DNA, 719 bp, Macaca Fascicularis
  misc_feature (1)...(719): n = A,T,C or G
gacccttttgttcccttgccatgagcaggttttaggccgctctcttgggaccatggtgttnnnnnnnnnnnnnnnnnnnntcagaaacaggccatggagggacaggatccggaggcgtcagctcaaccttcttatagatggtgtgcctggagtttgttccttcagacattcagatgtgtctcgagctttttcgttctggtgggttcatggtctcgccagtcaagagtgnnnnnnnnnnnnnnnnnnnnnnnncaagatatgggaaatactaaagcaagactactctannnnnnnnatcttccagagaactttcggagaccacagacagatcaagcagtggaatttttcatcagagataaatatgaaaagaagaaatactacgataaaaatgccatagctattacaaatatttcctcttctgatgctcctcttcagcctttggtatcctctccttctctnnnnnnnnnnnnnnnnnnnaataaattggagaaagaaaaggaaaaaaaaaaggaagagaaaaggagagaaaaggagccagaaaagccggcaaaaccacttacaactgaaaagctgcagaagaaagaagaacagcaactggagcctaaaaaaagtaccagccctaaaaaagctgcggagcccactgtggatcttttaggacttgatggccctgctgtggcaccagtcaccaannnnnncacaacggtgccacccctgaatga

SEQ ID NO: 12025 - DNA, 737 bp, Macaca Fascicularis
  misc_feature (1)...(737): n = A,T,C or G
agagactaagnnnnnanccaagtacccctgggggagagaaatctatactttagaaggtgttgtggatggagctccatattccatgatttctgacttcccttggctgaggtcattacgagcagcagagcccaacagcttcgctcgatacgactttgaagatgatgaagaaagcactatctatgctcctagaaggaaaggacagctgtctgcagacatctgtatggaaacaatagtagaggaaatttcagagatgcgtcagatgaagaagggtgtatttcagcgagtagtggcaatttttatccactattgtgatgtcaatggagagccagttgaagatgactacatttaattggtccctcctcctttccagctattttgtcagaaagcaagtaggaccatccagctgccagagtgctccacagagacttgaggcatgcagttgggaggtcctggctcagtttgctatatagggaatgtataaggaacatcgaaattgtatacaaagatttgtacataaaaaatatacaaagacgcttcctaaagtaccaactttatatcatatgtttatacaatttaatttaaaaattcattttaatgaagacagataatttgaaagacttttgtttttcttgacttaattcataaagtatcattttttgactgagtctccatttacttcattcttaatgattattgtcatccctttaaatctgtgcctttttcttcttgagcgaagc

SEQ ID NO: 12026 - DNA, 732 bp, Macaca Fascicularis
  misc_feature (1)...(732): n = A,T,C or G
aggctgcgggggccgnnnnnnnnnnnnnnacacgcagtctgcacgccacccttgggctccactggcagagagccccttccttctggacgccaactgcacctnnnnnnnnnnnnnngatntccattttccaggagggaggcggcctcgggtccagggagtggaggggctgcccctgccacgcaggtcctggccgatggtccctcaccctgnnnnnnnnnnnnnnnnnnnnnnnnnnnnnnnnnnnnnnnnnnnnnnnnnnnnnnnnnnnnnnnnnnnnnnnnnnnnnnntgcccccttgtgctggctccacagttctgctacggtgggagctgccagtcttacccttgtcaccccacgctctgcccccaccccgttttcagtttagcacaaggtcacacggtgtcagcagccctgcactgaccgcagccggcccccagtcctcagagttctggatgcttctgtgcggctccaacaggcatcgtcttcccttccgcgggcggaggggccgcttcccgcaggcgtctgagctctccgccggggcnnnnnnnnnnnnnnnnnnnnnnnnnnnnnnnnnnnnnnnnnnnnngtttnnnnnnnnnnnnnncttgaatgtctgagtgagggtcctgtttagctctttggcctgtgagatgctttgaaaatttttatttttttaagatgaagcaagatgtctgtagcggtaattgcctcacattaaaatgtcaccgattg

SEQ ID NO: 12027 - DNA, 696 bp, Macaca Fascicularis
  misc_feature (1)...(696): n = A,T,C or G
cagtgggatagatggattctgaaatggaatctcccagaacctctgccctgacagcctggaagaccatgcctgcccagccctcatcgccacagggactccttgggtcctggcagtgcaggtgccagcaggcaggacaaactctgtgtacccgtgcccaggtggatgggcgctgggccctcttgccccgtcttccagggtgcccggggacttctnnnnnnnnnnnnnngcttagcattctcggaaggtttcctcaactgcttgcttttcccatgcttgcctttagtgtcatgtaaggcatttttaaattatatttattttgttgggttttaaaattgcacagaacactaagaccgaaaggctggacttgtttctccttnnnnnnnnnnnnnnnnnnttgaacttcctttcccacttggtagaaagagcccagaannnnnnnnnnnnnnnnnagatggactctttcctccttcagttgtatttagctttgagtttctctgcatctgtccaccccttttgtatataaccnnnnnnnnnnnnnnnnnnnnnnnnnnnnnnnnnnnnnctttgttctggaggagaggacccccacacacacacctgccgagaggctctttctgttctgcacccctctccccatgggaccttggagaaaactgaactgttacaaaccccctgcacagtgcctgtcaaacagat

SEQ ID NO: 12028 - DNA, 445 bp, Macaca Fascicularis
  misc_feature (1)...(445): n = A,T,C or G
ttgaacatttttaggcttgttccgggggtctctgtgctgcctgtactgtattgacctgttttataggtgcctttttattaaaaagaaaattcaaaatccagcctcttgcctctttgcctctgcttcagactcctctgtcaattagattacccagcttgctaggagatagtcagagaaaaaaggcccgtcccaggtcttccttgttgttcccccgtgaagacactctcccctcagctacagctgttatttccccagtggggcctcccaaggagcttggctgcttggcttggtgggacaagtgcaggggtccctgactccctacccgatcaaagggtggggaggtgggagggagtgcccagaactgtgggagggaggtgggaggtcacactttacaagccgtgagagatacatcanncccctggnnnnnntcactgcttgcaacctg

SEQ ID NO: 12029 - DNA, 349 bp, Macaca Fascicularis
ttttttttttttgtatctttaatagagaaggggtttcgccatgttggccaggctggtcccgaactcccgacctcgtgatccgcccgcctcggcctcccaaagtgctaggattacaggcatgagccaccatgcccagcccccgtctctatttttaaaacacaatttaaaagccaaaagaaaaaatctgtgctgtttagactcggacttttaattagctagtatttcttaattcaatcaataaatgattgagaccttttcaccactcccttttcaaagtcgtcttttgagtgatgtaagtactgcttatccccccgctcatcatcacctctacccttctactaccaatctc

SEQ ID NO: 12030 - DNA, 667 bp, Macaca Fascicularis
  misc_feature (1)...(667): n = A,T,C or G
gactcccccattgggaaggtggtcgnnnnngctgtgtacgaggggggagctgcggagcggcacggtggcattgtgaaaggggacgagatcatggcagtcaacggcaagactgtgacagactacaccctggcggaggctgaggctgccctgcagannnnnnngaatcagggtggggactggatcgaccttgtggttgccgtctgccccccaaaggagtatgatgatgagctgaccttcttctgaagtccaaaagnnnnnnnnnnnnnnnnnnnnnnnnnnnnnnnagctccggccccacctcnnnnnnnnnnnnnnnnnnnnnnnnnnnnnnnnnnnnncacactgcacacaccagacggcatccctgggacctgaacctagcacccaggaatctcaaactctctttggccctgaaccagagccagataaggaacagcttgggccactctaatgaaggccaacatggaggagagggagcagccagccgtttgggagaagatctcagggatccagactctcattcctttcctctggcccagtgaattcagtctctcccagccctggaggactccttccttgaaccctaannnnnnnnnnnnnnnnnnnctctctctccatccctctcctctggcctctgctctaattgctgataggattgtcactgcat

SEQ ID NO: 12031 - DNA, 762 bp, Macaca Fascicularis
  misc_feature (1)...(762): n = A,T,C or G
acagggcgttcctgnnncgccgagctgcagcagtggctcaagcccggcctcaaggtactgagcattgcccaagcacactcgcctgccttttcctnnnnncaggttcgcgctttcccggccctcaccagcctagacctgtctgacaatcctggactgggcgaacgcggactgatcgcggctctctgtccccacaagttcccggccctccagaatctagcgctgcgcaacacaggaatggagacgcccacaggcgtgtgcgctgcactggcggcggcaggtgtgcagccccacagcctagacctcagccacaactcgctgcgcgccaccgcaaaccctagcgctccgagatgtatgtggtccagcgccctaaactccctcaatctgtcgttcgctgggctggaacaggtgcctaaaggactgccggccaagctcagagtgctcgatctcagctgcaacagactgaacaggaggccgcggcctgacgagctgccccaggtggataacctggcactggacggaaatcccttcatggtccctggaactgccctcccngnaagagggctcaatgaactccggcgtggtcccagcctgtgcacgttcgaccctgtcggtgggggtgtcgggaaccctggtgctgctccaaggggcccggggctttgcctaagatccaggagagaataatgaatgggctcaaactgccttggcttcaggggcgtcccgtcaggacgttgaggacttttcgaccagctcaacccttgcccc

SEQ ID NO: 12032 - DNA, 720 bp, Macaca Fascicularis
  misc_feature (1)...(720): n = A,T,C or G
aactggcagagnnagaacatgcagctcacagnnnnnnntaaattgagagaaatggagtcaaattgggtatccctggtcagtaagaattatgagattgaacggactattnnnnnnnnnnnnnnngaaatctatcaaattaagcagcaacatggagaggcaaacaaagaaaacatccggcaagacnnnnnnnnnnnnnnnntagcaggtagaagaaaaggtgggctttcacaaaaggcatctgaacttttaatgaactgtgaaggacgacagcatcttcgcaaaaccattgatgtttaaatgtttagaaatcatagaatgtgtgggctgctgtagtaattctatttgtatatctcaacagaattaaaatgtctagcttggtggtatttttgtaaccataaaagaaaacctttannnnnnnnnnnncagttatgactttagaataatactgtgtcatagaattaattttcagccatgcggaccatagtttgtatccaaggatccttatttaaagccttcaacatgtacaggaagttggaaatttttggtttatgactttgtctaataaagagatagttcgaaacacannnnnnnnnnnnnnnnnnnacttcagaaatacagtgactgtacannnnnnnnnnnnncaccannnnnnnnnnnnnnnacagttatatcaagcttaatatgtgnnnnnnnnnnnnntgaacaccttagatcggtgaa

SEQ ID NO: 12033 - DNA, 764 bp, Macaca Fascicularis
  misc_feature (1)...(764): n = A,T,C or G
gattatagtatttgaaattatttacccaacattatggcagtgtccacntaaagcaaatatatttagtgtttatgtttttaactgttcaggctgttgaaaatcctacagctacagagattcaagatgtatgttcagcagttggacttnnnnnnnnnnnnnnnnnnnnnnnnnnnnnntctagagaatggaatcgtgatgtccaatacagaggcagagtccgggtccagctcaaacaggaagatggcagcctctgccttgtgcagttcccnnnnnnnnnnnnnnnnnnnnnnnnnnnnnnnnnnntgatacctaaactaaaaacaaggacacaaaaagcaggaggnnnnnnnnaaagtcttcaacaaggagagggaagtaaaaaagggaaaggaaagaaaaagaagtaacctnnnnnnnnnnnnaagtatgtggtactactgtaagagacatgaatggagacttcnnnnnnnnnnnnnngggaaacagaagctttttgtttgcatcgtttaactgaactgtgaacgcttgtgcctctcatctttatcatcggagttgacagtgnnnnnnnnnnnnnnnnnnnnnnnnnnnnnnnnnnnngccctataaaagaatttttttgtctttcaatgcagtttttttggaagaaagaatatttttnnnnnnnnnnnnnnntgtacaataagttacttgaaatgagttacttgtttcagataaatttcaattcgatttaaaataaacanntatccacagtccttgtccataaa

SEQ ID NO: 12034 - DNA, 299 bp, Macaca Fascicularis
acattccagcatcggtgacagtgagcctgtcttccaaaaaaaataaaaagtgaagttggcatttttggatttaaatggtaaaaaaagaaaatctcattttcccatgattaaagctaattttcagatggagagccttcctggctacctagggagcaccagagaatctgatccaccgcaagccagtcaagcctacaaatgtggtgaggtagtctcccttcctgtatcttaataaatgtaaccaaagcccatctggaggtgggggaatgagcggtgaaggaccagacatagaggttataagg

SEQ ID NO: 12035 - DNA, 234 bp, Macaca Fascicularis
catcttaggcctgcaagtcgaaggcagagtcggggaaatgagcttggcttccgggatttagtgtcaagttgaattttctgtcatttaatttcagatcctagctcatcagagaaatccagcctacatatcttgtaactattaacctttctaaactaagacccttgtactatcgccttggtaaagttctggaaatggacgatgctagaggtcgcacaaaattgtgactgtaattaa

SEQ ID NO: 12036 - DNA, 578 bp, Macaca Fascicularis
  misc_feature (1)...(578): n = A,T,C or G
gccagcagcagcagcaggggctcctccagccaagagcaaagctgagccaactgtcccccaggccccnnnnnnnnnnnnnnnnnnnnnnnncgatctctccaaagtggtgatcgagnnnnnnnnnnnnnnnnnnnnnnnnnnnnnggaggccttcgagctgtttgaccgagtgggnnnnnnnnnnnnnnnntacagccagtgtggggacgtgatgagggccctgggccagaaccccaccaacgccgnnnnnnnnnnnnnnnnnnnnnnnnnnnnnnnnnnnnnnnnnnnnnnnnnnnntgtggactttgaaactttcctgcccatgctccaggcagtggccaagaaccgggaccaaggcacatatgaggactacttggaggggcttcgtgtgtttgacaaggagggggacggcaaagtcatgggagcagagctcagacatgttctcaccaccctcggagagaagatgactgaggaggaggtggagactgtnnnnnnnnnnnnnnaggacagcaacggctgcatcaactacgaggccttnnngaaacacatcttaagcgtgtgagtgctacagatccagt

SEQ ID NO: 12037 - DNA, 762 bp, Macaca Fascicularis
  misc_feature (1)...(762): n = A,T,C or G
aagtatagagattatagtgtnnnngctgcccttgaataaaggaatcaaaaccttcttcacaagcccctgcactgaagaacctcgaatacggctacaaaaaggggaattcattttagccacaagaggtttnnnnnnnnnnnnnnnnnnnnnnnnnnnnnntgatgattcctttatagaaggtgtttcaagaataaggggatggttccctagaaaatgtgtggaaaagtgtccctgtgatgctgaaacagatccagccccagagggcgagaagaaaaatagatagctgctgttaaaatgaaattatcctttaagtctgcttaattacttgaaaattgtacatattactaaagaattatgcaaagagcctactctggttaagatgttcttttcctcaaaggtgccctagtgccatgatttaaatatttttattaccgttttgaaatggagaagccattctgcatatgcctttgatttcctgcccctctttaccacctcttcctccccggtaaaggaaaaacatttcacccaagtaagnnnnnnnnnnnnnnnnnaggattttcttaggcactgcacactctggacctcacctnnnnnnnnnnnnnnnnnnnnnncaggagcatctgcatgtggtacttctcttttccctnnnnnnnnnnnnnttatatgatattctagatactatagaactcaatttgtcagattcagtataagctcagattttgttacctgtcttttaataatgcaaattgtcaaatcaaaaaa

SEQ ID NO: 12038 - DNA, 772 bp, Macaca Fascicularis
  misc_feature (1)...(772): n = A,T,C or G
cgacttgcagagtagnnnnnntgggtgagtctcatttgtaaccaagatggaattcacagtatgtcgttacattcacacttaaaaaatgtatctctatgtnnnggaatgtnncaaatagatgtaaacatacattactttccaagtacatttctccccttctccttggaggaaaaaaaaaagccatccaacgaggcaaccccttcaaaatcattttaatacaaaggatgcaaacatctataaatcaaaaatgtggttcttctgacccttctgggtgtcatgggagagaacgtcattgaatgaaaatgacannnnnnnnnnnnnnnnnnnnnnnnnnctatttaaaattgagtttccaggaaaagtaggcactgatttctannnnnnnnnnnnnnnnnnnnnnnnnnnnnttattgagccaatatggnnnnnnnnnnnnnnnnnnnnnnnaaagtaacccagtgnnnnnnnnnnnnnnnnnngctgaaccaagtgtacacagtcagactgcaagggcgctnnnnnnnnnnnnnnnnnnnnnnnnngtccctgtcctctagatgtgaggaccaccctgattttatcccaggggcnnnnnnnnnnnnnnnnnnnnnnnnnnnnnnnnnnnnnnnnnnaggtaccctgctgcttacccacttcaactactctgcaagtcgattagaaaaacttgttaaaaaaaacaaagggggaaannnnnnnnnnnnnnnnncagctgcngctgcccgccccagccccccaactggaggcatgccag

SEQ ID NO: 12039 - DNA, 733 bp, Macaca Fascicularis
catggaggttcctgggggacagtgtgtgatgactcctgggacttgaacgatgctcaggtggtgtgtcaacaacttggctgtggtccagctttgaaagcattcaaagaagcagagtttggtcaggggactggacccatatggctcaatgaagtgaagtgcaaagggaatgagtcttccttgtgggattgtcctgccagacgctggggccacaatgagtgtggacacaaggaagacgctgcagtgaattgcacagatatttcagcgcacaaaaccccacaaaaagccccaacaggtcacacatcccgtcagtcatcccttattgcagtcggaatccttggagttgttctcttggccattttcgtcacattattcttgactcaaaagcgaagacagagacagcagcttacagttttctcaagaggagagaacttagtccaccaaattcaataccgggagatgaattcttgcctgaatgcagatgatctggacctaatgaattcctcaggaggccattctgaggcacactgaaaaggaaaacgggaatttataacccagtgagccttgaagataccttgatgaagacctggactattgaatggagcagaaattcacctccctcactgactattacagttgcatttttatggagttcttcttctcctagtattcctaagactgctgctgactttataaaaattaagtttgtgaatgtgactacttaatagtgtatatg

SEQ ID NO: 12040 - DNA, 710 bp, Macaca Fascicularis
  misc_feature (1)...(710): n = A,T,C or G
gataatgtgaaactcaaaccataggctccagtnntcttagaccatttcccatccattttgtattttctnnnnnnnnnnnnnnnnnnnnnnnnnntaagtaataatatgctggaccagtggaaacggatgtgggagtatttgtggtgtgctaaaatattgtaattatctttgaggctgcctgacacccttttgcaatcttgttttcatcattcattctgcaannnnnnnnnnnnnnnnnnnnnnnnnnncagaggcaaaactgaaagcttcagggatttgctgtagctgaggagccctgggagcacagccnnnnnnnnnnnnnnngtgatggtgtcctaaatggagtgacagttctcctggaaaaagagatcacgtggattccggtcaaatcggctaaggcttgtggttctcttgagcaagtctgttccgtctggaaaccaaaagtgcccttcatctttggagacattttactcttccatccactttnnnnnnnnnnnnnnnctctactatttaggggttgaaaatnnnnnnnnnnnnnnctttacgttaacattgggtcatctgtgtttgtatgagatggatatgggatttgagggtaacattgtcattcctctaaaataactatcatgagaaaaatagcaacagtatgtaaagggaccaagagtggcagcctttagggaaaatggannnnnnnnnnnnnnngaacaaag

SEQ ID NO: 12041 - DNA, 744 bp, Macaca Fascicularis
  misc_feature (1)...(744): n = A,T,C or G
gccgcttgcatcgggtggcccagtatgcccgggcccagcacgtgcggctcctggtggatgcggagtacacctcactgaaccctgcgcnnnnnnnnnnnnnnnnnnnnnnnnnnnnnnnnnnnaacagcccaggggaaggcgggccctgggtgtggaacacctaccaggcctgtctaaaggacacattcgagcggctggggagggacgcagaggctgcacacagggccggcctggccttcggagtgaagctggtacgaggtgcctatctggacaaggagagagcggtggcccagcttcatgggatgaaggaccccactcagcctgactatgaggccaccagtcagagttacagcnnnnnnnnnnnnnnnnnnnngacgcgtgtggcccgccatggccccatgtgccacctcatggtggcttcccacaatgaggaatctgttcgccaggcaaccaagcgcatgtgggagctgggcattcctctggacgggactgtctgttttggacaacttctgggcatgtgtgaccacgtctctctggcactggggcaggccggctatgtagtgtataagtccatcccctatggctccttggaggaggtaatcccctacctgatccggagggcccaggaaaaccggagcgtgcttcagggtgtccgcagggaacaggagctgctcagccaagaactgtggnnnnnnnnnnnnnnnggacgccgaaggataccccactagcacccctgagggggtc

SEQ ID NO: 12042 - DNA, 702 bp, Macaca Fascicularis
  misc_feature (1)...(702): n = A,T,C or G
tgaattagaagaactgaacctgccagactcctgtttccnnnnnnnnnnnnnnttgactcacagtctttcctcatacctaaaagaaatctgtcctaagtgggtaaaacttaggnnnnnnnnnnnnnnnnnnnnnnnnnnnnnnnnnnnnnnnnnnnnnngctcagccatccgagccctggagctcattagnnnnnnnnnnnnnnnnnnnnnnnnnnnnnnnnnnnnaaaattatttgcaaagcacataaaggtcnnnnnnnnnnnnnnnnnnnnnnnnnnnnnnnnnnnnnnnnnnnnnnnnnnnnnnnnnnnnnnnnntaaagaacttgttaaacaaggtggctttaatttgatccccttaaaatttctggttttcgactggaactggagagatcagaaattgaggagaatgatggacattcccgagataagaaaggaggtattcgaacttctggaaatgggagtgctcagtctgtgcaagtcagaatctttgaaactgggccttttctaagtctgtgtcttaatgaagattccagtcttcacagtagaagttgcatcttatttaatgactctgatatattgccagcactcagtaaatatcagcaaatagtttatgttaactgtgtcagcagatagatcgctggaatgtggggattctgaaacaggaatgaatctgtccttttgacaactctcttattaata

SEQ ID NO: 12043 - DNA, 785 bp, Macaca Fascicularis
  misc_feature (1)...(785): n = A,T,C or G
attttgagaccngggagaggaagnnnnnnnnnnnnnnnnnnnnnnnnnnnnnnnnnnnnnnnnnnnnnnnntgggaagactcagttaacattggaaggaagagggaatggtttaaaatagaagatgccataaaagtgctgcagtatcacaaacccgtgcaggcatcatattttgaaacattgaggcaaggctactcagccaacaatggcaccccagtcgtggccaccacatactcggtttctgctcagagctcgatgtcaggcatcagatnnnnnnnnnnnnnnnntaagagaaannnnnnnnnnnnnnnnnnnnnnnnnnnnnnnnnnnnnnnnnnnnnnnnntctttccacttctcctcacaggcctcttctttcaaataaggcatggtgggcagcaaagaaagggtgtannnnnnnnnnnnnnnnntggtgttaagtgatggggctttttcttctctttttattgtggggtgggggttgggtgtgtaatttgtaagtacttttgtgcatgatctgtccctccctcttcctacccctgcagtcctctgaagagaggccaacagccttcccctgccttggattctgaagtgttcctgtttgtcttatcctagccctggccagacgttttctttgatttttaatttttttttattaaaagataccagtataagatgaaatctttcaagaatttgtcctataatatgctgtacagttcagtagannnnnnnnnnnnnnnnnnnnnnnnnnnnnnnnnnnnntataggacnnnntctgaaagattca

SEQ ID NO: 12044 - DNA, 707 bp, Macaca Fascicularis
  misc_feature (1)...(707): n = A,T,C or G
gaggtcaacttatnnntggtacccttcatggacagtgaagcagagagtgaaaacccaccaagagcagggcctagttccagcccactcttctccctgctgcctgggtatcgcggccaccccagtttccagtccttggtaagcaagctccggagccaagtgatgtccatggcccggccacagctgtcacacacgatcctcaccgagaagaactggttccactacgctgcccggatctgggatggggtgaaaaagtcctctgctttggcagagtacagccgtctgctggcctgaggccaaggagaggaatgtcatgcaggggacctcctgggtccccagtggacggcgagggagcacaaacgtccgtcccccaccagggtggagagcggcaacaggcctgatggatgagggatcgtggcttcccggcccagagacatgaggtgtccagggacaggtcccccaccctcagttgggggctgttcagggggtgactgtgagcgattcccccgaccccagcctgagatggggcggtccatcctacgtcctccacagggacaagcagtgggaggagtctgaatgggcaccaggaagccctggctccatcttgacttcctttttcagggacaggagcaacaggtccctcttccctgactctaagcccttccctgtaaggtgaggcagggtctggagagctctttattggagcagat

SEQ ID NO: 12045 - DNA, 733 bp, Macaca Fascicularis
  misc_feature (1)...(733): n = A,T,C or G
gggaaaccgtgtgnnaaaacctgttcattttggtgactgtgacctgttctttgtagccaccaattgtagtgaccaattgcctaatggtcactttctgactccagccttgccagcctgactcagatcctcatctctgggcctttcctcctcccnnnnnnnnnnnnnnnnnnnnnnnnnnnnnnnnnnnnnnnnnnnnnnnnnnnnnnnngcaggaggttgtcaggaccacatgtacaaccaccaaggatgtgttggcctttggagttcccctttaggttccttgtgatgcggtgggttatgagtgaaaaattagtgaagagggaactcctctcccccattttgtgtagnnnnnnnnnnnnnnnnagcccctactcagcagggctctnnnnnnnnnnnnnnnnnnnnnnnnnnnnnnnnnnnnnnnnnnnnnnnnnnnnnnnnnnnnnnnnnnnnnntcctcacctacatcnnnnnnnnnnnnnnnnnnnnnnnnnnnnnnnntggcttttgacccagaggggctgtgaggctggagctgccctgtcttttattgagcctcagcatttccctcttcggcttcctctcaagctcaaggaactcacccccagatgcctcttgtctctctcatttcagaaacggactttcttatcatgctttcctatggtgggtgtgaggggccagctgataccaaccaactagcctgtacctggatttgacttgaattttaaaatgt

SEQ ID NO: 12046 - DNA, 773 bp, Macaca Fascicularis
  misc_feature (1)...(773): n = A,T,C or G
cccagcagcnnnanaatancagacngncgggccgacgtgaaaaggtcagagccaacttccaagagcagcaggtcttctactgcttctccgcacctccagggaacgaaaccagcgtgctgttccggcgcctctacgggccccagaccctcctcttctccctcttctggcccaccttcctgctnnnnnnnnnnnnnnnnnnnnnnnnnnnnnnnnnnnnnnnccagtacctgtccatcctggcggcccagaagtagagccatccatgccataccacttgtcagggcacaggggactggctgagcccccagggctgctccccacttgcagacctatgccttctgcacctgccctcccactcttccactccaatccaccctgtcttctattgcaggattaacctttgagannnnnnnnnnnnnnntcatttcctgcttaagaatgtacaatggctccccagtgccgtggaggccataaggccagccagttatagctctctattacctgtccctactcaacaaactcatacctgtttccggttgcgtcactatgtgccccacagagaacaatgatcgtcacctctgtgcctgtgttctccctgttgtctcaaaggggtacccatcttcccctggaagctgtcgccagcgagcctcagttctttatttgaattctctaataagaacaacnnnnnnnnnnnnnnntagaacacatttacagtattactattttctaggatacaaagtgccatatatattttttaattccaatattaataa

SEQ ID NO: 12047 - DNA, 800 bp, Macaca Fascicularis
  misc_feature (1)...(800): n = A,T,C or G
gccattgaagtagtaaagctggcaagtgccttcagcttacctagttgtgagggcctcacccagagagtaatgactgattttgcaatcaacctgcaacaaaaggaagccctaggtaacctaactgcactgaccagtgacagtgatactgannnnnnnnnnnnnnnnnnnnntgacaccagtgaaggcaaatgaaagtggagattcaggagcagcaatggccnnnnnnnnnnnnnnngaatcacacctgagaactaagatatgctaatatttaacactgttacaaagaagacaagataaagatttggtgaatttgttactgtgaggcacagtcagtacacannnnnnnnnnnnnnnnnnnagctcctaatttgctacttaataaccatctattaatgcactgttaaaggtttagcatttnnnnnnnnnnnnnnnnnnnttcagacacatggtgaggtccatggctcttgtcatcaggataagtctgcacacctacagtgtcggtgagctgacctcatgctgccgtcctcgtgcgattggcgtctccctgctgctggacttctgcctttgttggcctgatgtgctgctgtgatgctggtccttcatcttagaaaggtgttcatgcagttctatcacagttggggttgggtcagtagtttcccaatttcaggatatttcgatgtcagaaataagcctcttaggaatgactaaaacaagataatggcagtttaggcnnnnnnactggtaaaatgactgtaaataaatgttgtaattaatgtacacgtttgcatttttgttaatat

SEQ ID NO: 12048 - DNA, 710 bp, Macaca Fascicularis
  misc_feature (1)...(710): n = A,T,C or G
catgnnnnattatggtctgtaaccacagtaatatccacttatataaatgccaaataatcagagagcttataaagtacaattgtttttgtcatcattttctgaatttctttctcttcttttggttttatcctctcattgaagttccagtggtttgaatttatttttggacacattgtcttaatgtactgaaaattgctctgctgtggttttgcagagttcttcatttcatgtatagtggtccatattagacacatttggtaagagaaatccaggaacacatttagggccatggaatgatattttgtaaaatccatttgggaagttgcaatacccacaatctgacgtgtcctaaaatgtaatggattatctctaaggggttgatgggagaaatatttagatgtacctggttaacagccagtcattttgatttacttatggaaatcaagtgaagagaaggcaacataattcaggaaatcttattctaatatctaataaaaacagtttgagtggttggagacatctgcatgaaattgcacctaggtgcattacttggtataactctcccctaaaactgttgtattgcattttttcccttttcttggcacccctttagaaatgtgctgaagtctcatttttcacccatttcagccatgggacatttttcataatattattgtaaagatgtttgtgttactgtttataaattacaa

SEQ ID NO: 12049 - DNA, 584 bp, Macaca Fascicularis
  misc_feature (1)...(584): n = A,T,C or G
gccgctcacgctctccatccccccgccggagaagtgacaggaggcggcggtacagctcttaccgttcacatgaccattacnnnnnnnnnnnnnnnnnnnnnnnnnnnnnnnnnnnnnnnnnnnnnnnnnnnnnnnnnnnnnnnnnnnnnnnnnnccgcatgactcgatcagagatgaaacagaggttttccgtttttggagagattgaggagtgcaccatccacttccgtgtccaaggggacaaatacggctttgtcacttatnnnnnnnnnnnnnnnnnnnnnnnnnnnatcgagagtggccacaagatgcggcaggcagatgagcagccctttgatatctgctttgggggccgaaggcagttttgcaagaggagttattctgatattgactccaaccgggaggactttgaccctgcacctgtaaagagcaaatttgattctcttgactttgacacattgttgaaacaggcccagaagaacctcaggaggtaaccttgggcccttccctgctaccctttttctcctttggaggtgcccaacctcctccaccccttcccctactctaggggagagagctgctag

SEQ ID NO: 12050 - DNA, 854 bp, Macaca Fascicularis
  misc_feature (1)...(854): n = A,T,C or G
gagatagcagcagtttnncacatcaaagtaaaagatttgcatatcattnnnnnnnnnnnnnnnnnnnnnnnnnnnnnntgannnnnnnnnnnnnnnnnnnnnnnnngtaaatagtacacactttttacttttacacactttcctgttcatagcaatattaaatcaggaaaaaaatgcagggaggtnnnnnnnnnntgagcaaaaannnnnnnnnnnnnnnnnnnnnnntgaggccttgcagggaatatttaaagcaacttcaagtttaaaatgcagctgttgattctaccaaataagtccaagatnnnnnnnnnnnnnnnnnnnactgggaaacatagtatatcatgaagtaatcttgtcaaggcatctagagagtccaggtgagaagactcacctctgtcgcttgggttaaataaaagacaggttttatataatattgattggtaatagtaaatcgttctccttaaacccaagttcttgaccctattcggccttatacatcaggtcttacaaagaccaaagggattccacgcttgatcaacnnnnnnnnnnnnnnnnnnnnnnnnnnnnntttgcaaaccaattatgataaaggacannnnnnnnnnnnnnnnnnnnnnnnnnnnnnnnnnnnnnaccaccactagtgtctgcccatggagttagaggggacatcgcttagaagttcttatagaaaggacacaagtttgtttcctggctttaccttgggaaaatgctagcaacattatagaaatattgcctttttgccttatcttcttccaaatgtactgttaaataaaaataaagggttaccccatgcaatcacaaaaaaaaaaaaaaaaaaaaaaaaaagg

SEQ ID NO: 12051 - DNA, 687 bp, Macaca Fascicularis
  misc_feature (1)...(687): n = A,T,C or G
cagcgggatgcaggcacannnnnnnnnnnnnnnnnnnnnnnnnnnnnnagctgagggccagttccaggacactgtccnnnnnnnnnnngtacagggctcctgtcccagctctgagcccgtcctactaccccaggttccccatctacactcttcagacttcatcccctgcaaggtggggctggggtgtggnnnnnnnnnnnnnnnnnnnnnnnnnnnnnnnnnnnnnnnnnnnnnnnnnnnnnnnnnnnnnnnnttctccctggggaggcgtcagcccttagccaacaagatcctcctcctgctttccccaccctcccctctgccacctctcctctacctcccttcctggaggtgcagcccttcctggggccctgacccacccagcagcctgccccacagggcagggaagctcctcggctcctgccatcccttcctcaagcccctccagggttctgcggtatgactggtctctggccctctgtgggctgctcctctgccccatccccacagctgctctgtcccacacagctgccaccagcccctgagtcctcggaaggcggctgccctgaaccgagatgtgctgcacatgtcacatacacacgggataaaggagactttgtagaaacataatacnnnnnnnnnnnnnnnnnnnnnnannnnnnnnnnnnnnncgattgaagtaatatt

SEQ ID NO: 12052 - DNA, 782 bp, Macaca Fascicularis
  misc_feature (1)...(782): n = A,T,C or G
acgannnacnnnnnnnnnnnnnnnnncatgtgagccagtnnnnnnnnnncagagcaaaagagcattnannncagtcccctctgtctgggtcagaaccagagagcatgctgaatgccccctgcttgctcagtaagggtgccccgcctgagtcagtgctctcagctggnnnnnnnnnnnnnnnnnnnnnnnnnnnnnnnnnnnnnnnnnnnnaagaagcaagggcaagaacccaagtgcctcacctcgaaaggaggtcctgttccctgaagtcggggtgaactgcaaagttttggctgagacctgggatttgagataccacaaaccctgctgaacagagtgtctgttcagcaaacnnnnnnnnnnnccctacagcctaggnnnnnnnnnnnnnnnnnngtctggaaaaacaaacaaaaannnnnnnnnnnnnnnnnnnnnnnnnnnnnnnnnnnnnnnnnnnnnnnnnnnnnnnnnnnnnnnnnnncctggctttgctctattaagattggaaatgtgcactaccaaacactcagtccactgttgagccccagtgctggaagggatgagggcctttcttcctgtgttaattacatagaggctacaggggttagcctggactaaaggcatccgtgtcttttgagnnnnnnnnnnnnnnnnnnnnnnnnnnnagggaagatcactgtagtttagttctgctgacctgtgcgcctaccccttggaaatatctgctggtacttctaattccacaggtcatcannnnnctgnnngataatatatgaaca

SEQ ID NO: 12053 - DNA, 747 bp, Macaca Fascicularis
  misc_feature (1)...(747): n = A,T,C or G
agtacatcgtgaaggccaagggcgcggagagccannngcgggccatcctgaagannnnnnnnnnnnnnnnnnnnnnnnnnnnnnnnnnnnnntccnnnnnnnacgtgacctgcgtggagacctacctggaggacgaggggcagctggacctggtggtgaagtacttgcagggcgtctaccaggaggtgggcnnnnnnnnnnnnnnnnnnnccaacggtgaccggatccggttcattctggacgtgcttctgcccgaggctatcatctgtgcgatctctgcagtggacgaggtggactacaagacggccgaggagaagtacatcaaggggccttcgctgagctaccgggaaaaagaaatannnnnnnnnnnnnnncttgaagagcggaaacggcgccgttggtgatggagcggccagctgtgctgtcagcggggcctggcggtgggagcgcctccagtatgcatgagcgtgtctgaagatggggggctcaggggcacatttgcgtttgggcctgtctgtgcattctgcatggctgtcctgatttccatacttctgnnnnnnnnnnnnnnttaacattgaaagccagttctctttccctggcaattttttttcattttatttttggcatttttttcaagacaccgttccggaaaggcttttgaaaggacagaagcgtgttcactgtgcatcagtactcgtgactgtgctatggtttctcccgacgtacnncattgatcttgtctgtggc

SEQ ID NO: 12054 - DNA, 775 bp, Macaca Fascicularis
  misc_feature (1)...(775): n = A,T,C or G
taaatannnnnnnnnnnnnnnnnnacagactgggaattggcaaggtgatgggaagaaacactcagctatctactaggaagaaagaaaaggccaattcatctgagttttgatgttgatggactggacccatctttcacaccagctactggcacaccagtcgtgggaggtctgtcatacagagaaggtctctacatcacggaagaaatctacaaaacagggctactctcgggattagatataatggaagtgaacccatccctggggaagacaccagaagaagtaactcgaacagtgaacacagcagtagcaatcatcttggcttgctttggagttgctcgggagggtaatcacaagcctattgactaccttaacccacctaagtaaatgtgggaaacatccgatacaaatctcatagctaatggcataattagaaatctaatcatttacttaaacatagagttgtcttcctgaagatttgttctttcagaaaaatgtttttccaattagtataaaactctacaaattccctcttggtataaaattcaagatgtggaaattctaactttctcaaaatttaaaagcttgtattttctaacttggcaaaagactatcctcagaaagagaagcatacattaatttccaattaaaaannnnnnnnnnnnnnnnnnnnnnacatttacataagaccccatacatagagtgagactcctggaaccgggagacaaagctaccccatctagaaaggtactatgtgttcatgtcgtcaaaagatgtg

SEQ ID NO: 12055 - DNA, 742 bp, Macaca Fascicularis
  misc_feature (1)...(742): n = A,T,C or G
gacatggtcacttagagcnnancttccctatgaatctccagatctgtgagttgagcagatttcatgttgcagattcacctgtaatgcaaagactgtattatcctcacatgactttttttcttgtcttactgtaccttaaaaggtgatagagtaattctatattttcattaacctacaaaaacgggaagattcaaaggagctgaatgtgttatgcttccaaacaactgaatgtaaaacactcctagccagctgttgtattccctatctttatttacttccaatattttactgtaaaagtagggagaaatattatgttgatagctgtttcacattctctcaggaactctaacgttcccgactcgggtatttccagctgtgttgctggcagtnnnnnnnnnnnnnnnnccctaaaacgactgagcgctgggttcatctaatgtgattttctgtaggacgggatagaaggcacagaagatcacagctagagaattgagaattaactagactgctagccattttagggcaccaaaacttgggattaaacacttcccactcccaaaccctgannnnnnnnnnnnnnnnnnnnnnnnnnnnntttatttttgtgcgtttaatagtctgagcagtctcaccttgtttacagatgtattgacaccatttgctnnnnnnnnnnnnnnnctgtttctccctttttactatttataagattcctttttttcacaaaacttttaataaaaaaaat

SEQ ID NO: 12056 - DNA, 732 bp, Macaca Fascicularis
  misc_feature (1)...(732): n = A,T,C or G
gttggccagcagcagcacagacagctcaggcaccagctcagagggagaggannnnnnnnnnnnnnnnnnncttgcacccaaatcccgcagccccagtcctggcaagtccaagcgacaccgcagccgcagcccgggactgaccaggttccctggtcttgccctacggccctcatcccgtgaacgccgtggtgccagccgtagcccctcaccccagagccgccgcctgtcccgggtggctcctgacaggagcagtcatggcagcagccggggcagtagtgaagaggggccctctgggttgcctggtccctgggccttcccaccagctgtgcctcgaagcctgggcctgctgcccgctttgcgcctagagactgtagaccctggtggtggtggctcctggggacctgatcgggaggtcctggcccccaacagcctgtctcccagtcctcagggtcatctggggctggaggaagggggcctggggccctgagggtggggcaggcagatgggccaaggtgaccaccgttctgcctcaatcttttgcaagcccacctgcctctctcctgctgctcctctagctgtatctgcacctgcctctctatcctggccaggggtggacaactggggtcccccaaagctcagtcctggcacctcaactgtgacaatcagcaaagccccgcccaggcccccatctgggataatgggggagctctggcatattttcccaatcctgga

SEQ ID NO: 12057 - DNA, 702 bp, Macaca Fascicularis
  misc_feature (1)...(702): n = A,T,C or G
tanncctttacaccaccaatcaaaactctaggtacaccaacacaacctggaagtactcctaggatttctaccatgagacctcttgctacagcatacaaagcctctactagtgattatcaggttatttctgacagacaaacgccaaaaaaagatgaaagtcttgtatccaaagcaatggagtacatgtttggctggtagtagaagaccaaggaggaggttgctacactaaaaccgagttagcagagtgctgctggttccttcggttagttatataaccgttcctgcaatattggatagctgtctcatacttcttttagaaagaagcctttttcattaaggatacagcctttttgtagctcgcactttaaaagatgcttgagatacattttaaagaaaactaaaaatccctgtgaataggattttgtgctttctgtaacagtgcatgcttcagcaccgaaaactcagcattgattattgtaaattaaataactgaaattgtggtgagacttcttagtcttcatgagaacgtgggggtgaatttcatgaaggggaactgtagttatttctactgacacaaagattataattagcaatttgaattatggtcttttaatttagatagtatttaatattttaattatccttgtttgtatatgtcctgtcacagaatgtcctcttgatgtattctaaaacgagcattct

SEQ ID NO: 12058 - DNA, 842 bp, Macaca Fascicularis
  misc_feature (1)...(842): n = A,T,C or G
tattgttttgaaacttgtattnnnnnnnnnnnnnnnntgtttatcattaannnnnntttacctggcctatagatgaaaatatattcttaaaannnnnnnnnnnnnnnnnnnnnnaggaacnnnnnnnnnnnnnnnnccaccctgaagttgtgatttgnnnnnnnnnnnnttttgtgaaatgaaaataagnnnnnnnnnnnnnnnnttaattcttatttaaataaatagaactgtgggtttaattaacagtataacatggctatatatacatatatatatttaaaggggactctttcttacataatatatttgttttgatagagacagagttgggcgggtgtttttgtcactctgaagtttagacctccttaagtattttaggtctgcagttggannnnnnnnnnncttagtgtccttttttatatacaatataacaaagtgagagaaatttatgttattggcaatttcatatttggcaatatatttactgtatcacgtaccacttttcttaaaacttaaattgcttattttgttgtgtaatgtcattgcttttgatttgctttgtgaaaggagataaacgtttcagtaactctcagagcactttgttgcctcaggctgtgttacctcaatttcagagtaaatagtggttgattagtaatgtagtatacactggcagacatctagaatacattagtaatgtagtatacactggcagacatctagaatgatgctttatatttaaatgagattattcttttaaggacttttatttgtatgttttctgtaagaaataataaaataattgtaattaaggaatatgccatactatattaaacatatct

SEQ ID NO: 12059 - DNA, 751 bp, Macaca Fascicularis
  misc_feature (1)...(751): n = A,T,C or G
gctgcnnnnnnnnannngcnnnacaaggaggacttccggaataaagtggacgannnnnnnnnnngttatgccagatgataaaaggggacnnnnnnnnnnccatggactgtgttacagtttgtctctaacgtgaaacagcaagaggtagccccctctcccgtcctcatgctccctctcagtcccctggattgccccagtcctgtgaccatgttgccctgaagaagaccatcttcatgactgctcattgtagatggagaattcaacataaatacagcaagaaaatgtgtttgggcttctgaagagttgtctgcttaccttaacatgtttacttttttgaacttgtactgtataggctgttggtgaaatttttaagaagttgtaatgaactcaaaattgaggccagagcttgctttcccttttcccaaacaaaattggttttatgcacaagcgatgataatgatgtgttcagtgtaacttgcagattggcaataagatacccgatacaaactgnnnnnnnnnnnnnnnnnnnnnnnnnnnnnnnnnaatgttggccctgcctagatgttgtgaagcttcccagaatgcatagtcattcactgtagatctcttattgaaatgcgtattttatttaatgtaagtatattttggaacagatttgtaatttgtacaatttaatgctttaattattttttctattctcatttagtttgtattttcattgtatagagcagacagaaagatgttgggtcaa

SEQ ID NO: 12060 - DNA, 736 bp, Macaca Fascicularis
  misc_feature (1)...(736): n = A,T,C or G
caggatggaagtcagaannngaggttgctcagtgtcccagtcattcatttacacattttaactgcntttaaagagctcttcatttttgtgnnnnnnnnnnnnnnnnnnnnnctcaaaataaactgttttttttttttaaagaaaaaaaacacacatacacaaaagctgcatgtttaaaattacatggagttagtgtctattcttcttccccttttgcagcaacttacacagcatttttaatacattttttttctagtttttttgttcggttttgttttccatcaggaatttgagttctctctaacccagcttactgtgggacatatgggacataggaaaactcggtagatatacctttggtgatcttgttgagtttaagtctgatcttgatcttaaactcagtaagccactatctgcaattttgtacattatatagtattttgaagatatggaaccttatgaaaaaaaatagcaaattagctctttttcccccagagnnnnnnnnnnnnnnnnnnnnnnnnnnnnnntcttattttactgttgaacagcaattgctatttatttttttattgcctagaacttcaacannnnnnnnnnnnnnnnnnnnnnnnnnnnnnnnnnntgccgaattttcatctggatgttatcatcaaacatcagtacacttgtcatttcacatgtgtttaatgtgacagtttttcagtactgtatgtgttaatttctactttttctaata

SEQ ID NO: 12061 - DNA, 707 bp, Macaca Fascicularis
  misc_feature (1)...(707): n = A,T,C or G
acccattacataacagannaatttgtactcagtaaagcaaaaatttatgatcaaaatttctaacttggttcatcacattataagataaataaattaaattaatgaaaatgtgacttaaattaggggtaaccctcaaaaatagatttatcatttactcacgggaattttcttcaagtgttaaaggtacattttcactaggaaaagaaatcaaatatgcttatgcaatatatatttgtctgtttttccttaatgttatatggtatatatgagccttcttgtttagtttcttttatctgctaagttgtaccttaattagaggacaatatatgtttcataaggaagagtctttataattttgtttgtcagatagtattttggaatttgtataatgaggatgtttagaagccatataagtggctttttttaacagatagaatttgtatttttattgtactttaaaaagatttatgtaataggtatatatttagtggccatttattatcaatggtaacacaatagagtactgagatggtatttgcacatttaagatctgttactttaccaatttttaatggtaatcaactctgctactggcatgatgaaatagtacataattggtcattaattatgaacatttatttctccagtgcgtttttatgaagatatggttgaaaattgtatttctatgtaaactcaatgatatgttt

SEQ ID NO: 12062 - DNA, 725 bp, Macaca Fascicularis
  misc_feature (1)...(725): n = A,T,C or G
ctcacatgttnatacagaagaggactggcnnngaaaaaaattattcctcagtgcatcgcaagagagttcacagacctgattgttattaatgaagatcgcaaaaccccaaatggacttattttgagtcacttgccaaatggcccaactgctcannnnnnnnnnnnnnnngttcnnnnnnnnnnnnnaattaagagaagaggcaaggaccccacagaacacatacctgaaataattctgaataattttacaacacggctgggtcattcaattggacgtatgtttgcatctctcttccctcataatcctcaatttattggaaggcaggttgccacattccacaatcaacgggattatatattcttcagatttcacagatacatattcaggagtgaaaagaaagtggnnnnnnnnnnnnnnngaccacgttttaccttaaaattaaggtctcttcagaaaggaacctttgattctaaatatggagagtatgaatgggtccataagccccgggaaatggatacaagtagaagaaaattccatttataaaagtactgagagaataatatcggattttgctgaacaggcctatcttgaagttgggtaatttatttttgacagaatactctcttcaaaatggcatttgttgatttcataagcctctcannnnnnnncaaattaccaaatgccatgaattnnnnnnnnnnnnnnnnnntagaatatacaaataa

SEQ ID NO: 12063 - DNA, 705 bp, Macaca Fascicularis
  misc_feature (1)...(705): n = A,T,C or G
tagcctgtgtgggaaaaccttcactaccagatnntaccgcaatcggcaccagcagttccacactgaagagaggtcttatgaatgtacagagtgtgggaaagccttcaaacatagttccaccctccttcagcacaagaaagtccatacttcagaaaggccccagggggacagctcacatgggaaagtcattagctgctagcaccgtgttcatcaggaagggtctttttccagaaaggagattgaggagagtggccatgagagtgccatgtgaaagaagctaaaccttgtacatcccaacatccaccccggggagagttcccatgtgtgcctggcgtgtgggaagctttcaggagccacactgcactctgaattgcctgtggctgttgggagtgtcacatcactgtcagtttatccaccgccatcctcctctgtccaccccgtaaggtccctacagcaagtgggacaggagaccttgtgctccttgctctaaacagtagagaatcattaatggtagagcccaaaacagacctcattccctacccctgactggtttagctgtggacatgacccacctctggccagaggagctgagctggtatctgctgggggcttcctgggaaggtttaccactttcatggacatggttgacatcatacgtggtatttgtcatgctctagcatggactgtctcatactgctctggact

SEQ ID NO: 12064 - DNA, 641 bp, Macaca Fascicularis
tcccccgcagagttctgcccaaggagctggggcagaggatgtgtaccggggaccagaacatgaccggctgggcctacaaaaagatcgagctggaggatctcaggtttcctctggtctgtggggagggcaaaaaggctcgggtgatggccaccattggggtgacccgaggcttgggagaccacaatcttaaggtctgcagttccaccctgcccatcaagccttttctctcctgcttccctgaggtacgagtatatgacctgacgcaatatgagcattgcccagatgatgtactagtcctgggaacagatggcctgtgggatgtcactactgactatgaggtggctgccactgtggacagggtgctgtcggcctatgagcccaatgaccatagcaggtatacagctctggcccaagctctggtcctgggggcccggggtaccccccgggaccgtggctggcgtctccccaacaacaagctgggttccggggatgacatctctgtcttcgtcatccccctgggagggccaggcagttactcctgaggggctgaacatcatccctcccaccaccatcccagcctctccatacttactcttctcacagcccaaattctgaagttgtctccctgacccttctttagt

SEQ ID NO: 12065 - DNA, 715 bp, Macaca Fascicularis
tgtgaaggagaaaaagaacttagctatttcttgacagttctatagttttacacataaattttcaaaataaaaaataccatactacacaatgatctctgatcttgctgagggaaggaatgatatatatcagttttcttcaaatttcagatggcagttttcactttttgaagccttgcatctttttaataaatctatcctgaaagctacataatgtatataatttctatcagtgaatttacaataactatcaaattggctattagaattcagtgtaatggaattttgcctctaataacataaagggggaagaaacataaagtggttctcttaataaaacaggcagaaaatgttgctttatggcatgtttttgtatcaaagagaaattagaggttaaactttgcttttataatgaaaaaggcctgatttgaaagtagagataggcttagatgagaaaaattgataacacaatattaatactattgatatatcatttcatgaggcatattttgttagaaattgtgtttttggtgctaacctacaagcacagtagtgaatatgaatgaagagtaggtgctgcaagttaatcctacattgtgccaatgtataatagtaccatgtatatggatatgaataaatgaacatgaggattaacatattgttgaaaatagactgaggtactagttttctttcttttttagaggggacatgatattaa

SEQ ID NO: 12066 - DNA, 761 bp, Macaca Fascicularis
  misc_feature (1)...(761): n = A,T,C or G
agacaaggtagtgcagtgnnnccgccgtgtggacnnnctgaagctgtggctcatgnnnaaggcacagggcgatcaagggctggaacggcgcatcgaccaggcctttgcccttgcccggtacctggtagaggaaataaagaagcgggaagggttggagctagtcatggagnnnnnnnnnnnnnntgtgtgtttctggttcgtaccccccagcctgcgagggaagcaggacagtccagattaccacgagaggctgtccaaggtnnnnnnnnnnnnnnnnnnnnnnnnnntgaaggagggctccatgatgattggctaccagccccacggaacccggggtaacttcttccgtgtggttgtggccaaccnnnnnnnnnnnnnnnntgatatggacttcctcctcaacgagctggagcgactaggccaggacctgtgagccttctccttnnnnnnnnnnnnnnnnnnnnccctcacccacannnnnnnnnnnnnnnnnnnnnnnnntctcaagaacagcctttgaggccgggcacgnnnnnnnnnnnnnnnnnnnnnnnnnnnnnnnnnnnnnnnnnnnnnnnnnnnnnnnnnnnnnnnnnnnnnnnnnnnnnnnnnnnnnnnnnnnnnnnnnnnnnnnnnnnnnnnnnnnnnnnnnnnnnnnngagcatgatgnnnnnnnnnnnnnnnnncagctactcgnnnnnnnnnnnnnnnnnnnnnnnnnnnnnnnnnnnnnnnnnnnnnnnnnnnnnnnnncgcacccc

SEQ ID NO: 12067 - DNA, 741 bp, Macaca Fascicularis
  misc_feature (1)...(741): n = A,T,C or G
acatnnnnntcccccccatcccaggctcgggatctgaggaggctgtgacgccctcggaccacagnnnnnnagacagtcatgacagtccctaggnnnnnnnnnnnnnnnccatcacttcctcttccttctgcttctgtgacggtttagagtcaaggggactgaaactgtgagcatagactgtattaggtttgttcagaagccagttcagctcacagnnnnnnnnnttcttaattagtcatgtgtccatccctgagtcgccccctccttgtgggtttacactacattttggcgtcattatctaacgctgacaagcacaccctnnnnnnnnnnnnnnnnnnnnnnnnnnnnnnnnnnnnnnnnnnnnnnnnnnnnnnnnnnnnnnacagagccaggcctcacctgtttgtttaggccaagatgccatggccnnnnnnnnnnnnnnntcccactggctgcgacagccaggcccagaaaatgcctggcgtgagagccagcagacggccaggccagggtaggcagtgcctgcttttgctctgtcaggtgcagggtatttggctgaaggtgtgcatatttcctgggcacaaacttcctgagcctccgaaatgggaggctcatcaatttcagaccaacctcttttcaacccatcatagcacattcaaggtgtgccttttacttctacttgtacatcccccatcccttcaattctttcattccctgaccagtgagcgagntcctggggaa

SEQ ID NO: 12068 - DNA, 727 bp, Macaca Fascicularis
  misc_feature (1)...(727): n = A,T,C or G
aggcatggagaccacaggggcccagcagcccaccctttcctctccccactgcctcctttcccctcccacactcccagctcgagccgtccagctgcggtggggtctgagtatatctaggacgggtgggtgggtagccgcactgggcttgtgtcttgagcctggagggagtctgctcctgccgccctctgcccttccagagacagacccgtgcgctgcctgcccagtgtgcccctttgtccccannnnnnnnngaggccgaaggcccactgtgccagaggctgggcaccagccttaaccttctgctagcacctcctccccttccccgaggcagcacatctggctcactctcccctgggtctctggagcccaccagggaaggccctcatcccctgccgctacttctctggggaatatgggttccatccggggttgggggcctctctgctcatccactctgcacccaggatcctagtcccctgnnnnnnnnnnnnnnnnnnnnnnnnnnnnnnnnnnnnnnnnnnnnnnnnnnnnnagccatgtccctcgtgctgtctcttgcctgtcccacctgtgccctgccctccagcttgtatttaagtccctgggctgccccttggggtgcccccccgctcccaggttcccctctggtgtcatgtcaggcattttgcaaggaaaagccacttggggaaagatggaaaaggacaaaaaaattaataaattccattcg

SEQ ID NO: 12069 - DNA, 1102 bp, Macaca Fascicularis
  misc_feature (1)...(1102): n = A,T,C or G
atgagaaccagagtgtaaaccacnnnnnnnnncaggaagatgnncagcgnnncnatcaagctggtgaggggagactagggaccgatgaatcttgctttaacatgatccttgccacaagaagctttcctcagctgagagctaccatggaggcttattccagaatggctaatcgagatttattaagcagtgtgagccgtgagttttccggatatgtggaaagtggtnnnnnnnnnnnnnnnnnnnnnnnnnnnnnnnnnnnngccttctttgctgagaggctctactatgctatgaaaggtgctggcacagatgactccaccctggtcaggattgtggtcactcgaagtgagattgacnnngtacaaataaaacagatgtttgntcagatgtatcagaagactnnnnnnnnnnnnnnnnnaggtgacacgagtggagattaccgaagacttcttctggctattgtgggccagtaggagggatttttttttttttaatgaaaaaaaattctattcnnnnnnnnnnnnnnnnnnnnnnnnnnnnnnngcagcaatatcaaacatcagctaaccaaaagagctttctatcaaggaccgtatcagggtaatgtgcttggtttgcacatgttgttattgccttaattctaatgttactttgttctctacatataatcaatgtaaagccatatcacaatgatacagtaatattgcaatgtttgtaaaccttcattcttactactttcattctcatcaagatgtcaaattgaataaaaatcacagcaatctctgattccgtgtaataacattgcataattttttagaaggttgctgaaagctctgccttccagaatccctctaggtctgcttgatagagtggatagtatgtcaaaactgtgtactttaaaaaaaatttcatctctttacatctagaataatttgcatcttattttgcataaattggttctgtattcataaacactttccacatagaaaatagatgagtattacctgtagcaccttttaagaaagggtcaaatgtttatatgcttaagatacatagcctactttttttccagttgttttcttttttaaattgagttatacaa

SEQ ID NO: 12070 - DNA, 762 bp, Macaca Fascicularis
  misc_feature (1)...(762): n = A,T,C or G
gcacatggcctccctgatgtcaggatgcctnnnnnaggatctgtatttgcccttaattttgttgaaancttttttccttcttcctcttgaaaagttccaaaatatagtttattgtatctttcatcactaaaaatttgttnnnnnnnnnnnnnnnnnnnnnnnnnnnnnnnnnnnnctattgaacagttggttttagtgtgttgtataactttgctgtatatcaaactaattttgacaagttttcatcctaagcctcaaatcatgtaattaataatttgcctgtttatttatgacctaattgtgattcttttattaataaaagctaatgggaaaaggannnnnnnnnnnnnnnnnnnnnnnnnnnnnnnnnnnttttcctgcagtatatgaagtattgtaccagagtattgaaagatatgtaatattttattgataaatctatcctttaaaaggaatacgttttaggatgtcatcattttgatgtgaatcatgtaaatgttgataatatgctgtttattatacatttagtgtttcaagagattcacttaattgcctttttgcccacgtatattatgtagtctatttgcaactgttttttaaagaatgacattaaaagaatagtttatgtagagaaacattagtggatgttaattgtctccccacctatatttatgggtgttagcgcaactgctttgctagttgcaaagctgtattatcagagtaaaagtgtatttgtaaactgtatgnaactaaaaattagga

SEQ ID NO: 12071 - DNA, 716 bp, Macaca Fascicularis
  misc_feature (1)...(716): n = A,T,C or G
gttaagcagcatacactaaangggtttaaacattaagtaggagcttggggtgaaagagggacggctggctgggccatctgagcagaaggtagtaatgaaacacctcagttgggctcttgagagcccttaggaagcaggagaggcaacacctctggctactctggtgtggccaagttcagaggaggtggtggtggggcaggcgtgatgtcagcaggagccctgcaggctgggtgggcaggacgtgtggttggggccactgaaactaggtctaggagggagaacagaagttcccaaggtgccgactggaagatgggggaaaaggtttgctttggtgagtgagaaaaggctgggtgtgtgatccatccccggccatcttagtggctgcttttggtgagtgggctcctgctgaccaaggtttagnnnnnnnnnnnnnnnnnnnnnnnnnnnntttggaactccggatcctaaacttcctgtcctgtcctctgtctcttctagcttgggggccgtcccgcnnnnnnnnnnnnnnnnnnnnngccgcaaagaagacggaaatctgaaatagagtactatgcaatgttggctaaaactggtgtccatcactacagtggaaataatattgaactgggcacagcatgcggaaaatactacagagtgtgcacactggctatcattgatccaggtgactctgacatcattagaagcatgccagaaca

SEQ ID NO: 12072 - DNA, 681 bp, Macaca Fascicularis
gtcctcccaaccaccagctccctccattctacctgggtctgcaaaggtcccaggtcagagcatggggagggcccctgatgatagcagacatcagtctgtgtggtctcaggagagaccctgctgcctggcccgcccactcgctccctccacgtaatcagcttccacctgtgcatggggcctgggtgtcttgggtgatgcagggaacccctcggccttgagttctgcctgcaccacacccctctgaggtcttgtcaccaagcaggactcaggtccctgctgctcataggaactgggtggctttcttgggttctggagatccacccttctcacccccttgaaggtttcctctccctccctccacccccaaagggaaccttccttcagaggcctcaggcctttacaaaggtggagaggagccagtgaccacccaaccttctgtgggccacgctgtgcctgccccaaagtcccagactgagggaaggtgaagcttaactgccagcttgaaatgagagtaaagaagatacagagcaaacagtgtttcagaaactatcctgccctcggtgtgattctttggcttcaatttgaaggaaggaggaattatgggatttcatattttatttcacaaccagttcctccttgtttcatctcttcgctaagctggctgcttctaccatctaataa

SEQ ID NO: 12073 - DNA, 756 bp, Macaca Fascicularis
  misc_feature (1)...(756): n = A,T,C or G
agtttatttttactnnnnnnnnnnnnnnnnnnatcnctgtnnnacaggcagctaagaaagagcatgcagctatcattctttggaacactacnnnnnnnnnnnnnnnnnnnnatttagttttccacagtttnnnnnnnnnnnnnnnnnnnnnnnnnnnnnnnnnnnnnnnnnnnnnnnnnnnnnnnnnnnnnnnnnnnnnnnnnnnnnnnnnnnnnnaggatacaatctcacctgagttcgagccagtttttagtctttttgccttcaccaacaaaattacttctgtgcacagtagaattatttggtcttgtgattggagnnnnnnnnnnnnnnnnnnnnnnnctgggagtcgagacaaaaaggtggttgtctggggtgagtgcgactccactnnnnnnnnnnnnnnnnataacattggcccctgctcctcagtcctggatgtgggtggggctgtgacagctgtcagcgtctgcccagcgctccacccagcgctccacccttctcaacgatatgtggttgcagtgggattggagtgtggaaagatttgcttatacacctggaaaaagactgatcaagttccagaaataaatgactggacccactgtgtagaaacaagtcaaagnnnnnnnnnnnnnnnnnnnnnnnnnnnnnnnnnnnnnnagaactgcagtggaaaaactgaacacaaggaagcagaagatgatgagtggttgcattttgcaagctgtggtgaagnnnnnnnnnnnnnngatacac

SEQ ID NO: 12074 - DNA, 745 bp, Macaca Fascicularis
  misc_feature (1)...(745): n = A,T,C or G
atcatacatttattanggttggtacaacaataattaggttgctgcaaaagtaaaaacctggactaacacatagcaaaagattgggaataatacataacttttgcaccaacctaatagaaaagtgcacagatcataaatgtacagttttcacaaatgagcttgtattagcagcctggagattacaaaatgaagcattactatatcctagaagcccctctcatgcccctgtttttctccaacttcccccaaannnnnnnnnnnnnnnncaattnnnnnnnnnnnnnnnnntgttggannnnnnnnnnnnnnatcctcccactggaggccaggacagtggttaaccctgtgttacagatgagaagattagaggctcagaaaagggaactgttcacttgaggtttctcacagcaggattcaaacccctacttcggggtccctnnnnnnnnnnnnnnnnnttgaccttagacacaccctcatactctttcacctcattgagactcagttttcnnnnnnnnnnnnnnnnnnatagtttctctcatgtaacagtctgggtacgtgttccaggttatctaaggtaggggaaggggcatatcatcaaacaggaatcccagctgatggtggccnnnnnnnnnnnnnnnnnnnnnnnnnnnnnnnnnnntcactccagtcccacagaataagagcaaggaggagtgtgtgaagnaanctttttgggccatgcctagctgtggctcttatttcttct

SEQ ID NO: 12075 - DNA, 709 bp, Macaca Fascicularis
  misc_feature (1)...(709): n = A,T,C or G
aactgacagccagatcgttcagnangaggcagagcgggccgaacgggccaaggagcgggagaagcggcgaaaggagcaagaagaagaagagcaaaaggagcgggagaaggaagccgagcgtgaacggaaccgacagctggagcgagagaaacgtcgggagcacagtcgggagagggacagggagagagagagagaaagagagcgggacaggggggaccgagatcgggatagggaaagggaccgagaacgaggcagggaaagggatcgcagggacaccaagcggcacagcagaagccggagtcggagcacacctgtgcgggaccggggtgggcgccgctagcggggaaaacactagagctgcaggtaccagccactcggccccagggggttacggccacagagggataggcacagtctccaccaccctggagccaagggtctttcacatcacctgcccctacatacataccaaatggaacggtggctatcctttccccccaaacacacccccttaacctatctcttgggaacagccggggccaggactgggtcacctatgagctgaatcagcatctcctcctgagtcccagggcccctgcagttcccagtctcttctgtcctgcagcccttgtctctttcccacaggttccactttatatccaccttttccttttnnncaatttttatttttattttttttattattaaa

SEQ ID NO: 12076 - DNA, 761 bp, Macaca Fascicularis
  misc_feature (1)...(761): n = A,T,C or G
ggacaaaccagaggagtgaaccaacagagtacctaggaatgggagttgacccctggaatggggctccatggagaggtgcataggactcagtagaaatggcctctccccaaagcctctttttgagaggagagggaagcctattttgttaactggtttgggatagggaatggggtttctttttctttaagctcccttgtttgttgggcagggggggtgggtagaacaactggctattcagtaccaaggggccagagtggagggcaggagtgccactctctctttggtttaggtttttgaccttttcttcctttgttttttaaaagtatatgacagttgattattccccccctcagcaaccccatcccagaatcctattttcctgggaagtccttaaagcccctaaccatcccacactcttcactttcctatccaccttattcattctttgtacttatcacagtgttttgcacttgattacatatccttcactctcttctcttcatcccatcaccccctaatacgtcaggtgagggaggttggggagaggtggaagaggggcagacgtgaaggaagaataggaaggatgttacctcttctgttatttttttaaaaaacattgtttggtggcagcaatctccctgtccctatcactgttagaggcctaattttatatctataaatatattaaaaagcaagtcaaacttggatgtatcaaggtaaaattattgtcaaagtttaaatanngggttgctgagggggga

SEQ ID NO: 12077 - DNA, 695 bp, Macaca Fascicularis
  misc_feature (1)...(695): n = A,T,C or G
cgcagattggcatccgggnnnnnnnnnnnnnnnnnnnnnnnnnnnnnnnnnnnnnnnnnnnnnnnnnnnnnnnnnnnnnnnnnnnnnncnnnnnnnnnnnnnnnctggttcctcnnnnnnnnnnnnnnnnnnnnnnnntgggaggcaaacccatttatatcagctttgatattgacgctctggatcctgcctatgccccagggacagggacacctgaaattgctggtctnnnnnnnnnnnnnnnnnnnnnnnnnnnnnggggttgtcaannnnnnnnnnnnnngggctgtgatctcgtcgaagtttcaccaccgtatgatcttnnnnnnnnnnnnnnnnnnnnnnnnnnnnnnnnnnnnnnnnngatgctgtgtgctctccccaaagtgacaaccgtctgagtcttgtgctcttcaagacaaaacagattgcatcgctgacaagttctcaagaagaacttatgagtaagcagtctgagaactaaagagttgatgccaagaaaactttctnnnnnnnnnnnnnnngctggctgtgannnnnnnnnnnnnagtagaactctcacccaaacagcagtatttctaaggaacttggattaattggaaaaaagcaaaagagtacttgtactgtttttttttccctttgatgaaagatggaggataaaggggaagtgtggagaatttcttttaagattatct

SEQ ID NO: 12078 - DNA, 742 bp, Macaca Fascicularis
  misc_feature (1)...(742): n = A,T,C or G
actcnnnacgccagctgggcacatctaccagtatcctgaccgacccgggccgcatcnctgagcaagccacgcgggcagtcacagagggcacccttggcaaacctttatagtcctgcnnnnnnnnnnnnnnnnnnnnnnctgccctgggggccactttccctgggcacgggctccagggatcatctctgggcactcttcatgccccaggccctggctctgcccttccctgagggaggaggggtcgagctgggtccaggtttcacacttcccacctcctggaggccaagaggagcggagtccccgtccctgctctgccacnnnnnnnnnnnnnnnnnnnnnnnnnnnnntcgtcccccatctttggacctctatgtttcaatgtgcaaaatggggatggggaaggttcaatcagcagannnnnnnnnnnnnnnnnnnnnnngacattgggggcccaggctggcaactctgggggctcagtagtgggaaaacgaggatgctatttctctgtcacctgcacctgctcccccacaggtggggcacagacctctgttcctgagcagagaagcagaaaaggaggttccctctctgggctccttcactgctaacccagaggggcnnnnnnnnnnnnnnncctgggagaggccaggagggcctgatcccaggagacaccagggccagagtgaccgcagcagggcaggcatcgtgtgtgtgtggacgtgtgtgtgtgggtttgtaaagaatc

SEQ ID NO: 12079 - DNA, 761 bp, Macaca Fascicularis
  misc_feature (1)...(761): n = A,T,C or G
atgggccannnnnnnnntttagnnnnnnnnnnnnnnnnnnnnnnnnncnnnnnnnnnnnnnctgtgagctggacctggctgaggggcaccagccccagaaggtggcccggcgcgnnnnnnnnnacagccgggagcgctggcggcagcagaacgttaacggcgccttcgccgagctgaggaanntgnnnccgacgcacccgcccgaccggaagctgagcaagaacgaggtgctccgcctagccatgaagtacattggcttcctggtgcggctgctgcgcgaccaagcggcagctctggccgcaggccccaccccgcccgggccccgcaaacggccggtgcaccgggtcccagacgacgacgcccgccggggatccggacgcagggccgaagtggcagcgcgctcgcagcccgcgccccnnnnnnnnnnnnnnnnnnnnnnnnnnnnnnnnnnnnnnnnnnnnnnnnnnnnnnnnnnnnnnnnnnnnnnnnnnnnnnnnnnnnnnnnnnnnnnnnnnnnnnnnagccggagggcaccagggactcggcccagggccgtcgaggaaagggcagtggacgtgctgcgcgtgttcgggtgcgaactcccccgaagaaggaccagtgatgacgtcaggggcaaggtctcgggggtccggaagggnnnnnnnnnncccccaagggacccgcagactcttaaaaaaaatcacccaccgccctgtggaagtggccttgcctggttcccctcgcaggggcgcggtggcaaa

SEQ ID NO: 12080 - DNA, 823 bp, Macaca Fascicularis
  misc_feature (1)...(823): n = A,T,C or G
tagcnnnnnnnnnnnnnnnnnnnnacaannnnnnnnnnnnnnnnnnnnnnnnataaaatccaagacttggtgacttaaaagacatgtatgctannnnnnncctggatgaggaaaataaaggattgggtaccttnnnnnnnnctgatgatggccagttgctagcactctctacccaaaggggctcacttcatgnnnnnnnnnnnnnnnnnnnnnnacttgggnnnnnnnnnnnnnnaaggattgcctatctcacctccctccttgaagtcaccgtagccaaccctattgaaggagagctaccaatcacagtttctgttgatgtggaacccaactttgtggcagtaggtctttnnnnnnnnnntgtaggaatgaataatcgagcttggttttatgtccttggagagaatgctgtgaaaaaattgaaagatatggagtatctgggaacagnnnnnnnnnnnnnnnnnnnnnnnnnnnnnnnnnnnnnannnnnnnnnnnnnnnnnnnnnntacatttgatagaaagtgaaatattggatgctcaagaagaacgtgagactcagcttttcccagcagtggatgataagtgccgtatcttatgccatgccttaactagtgatttcctcatctatggtacagatgtatgtgtcaccttctttattagagaacattgggaatttctaatttttactttgtgatctcagtcatttccttctcctaccagccttttttctgtattgaatccaatacaattactgaagttatctgtgattaattatatacattcatgtgtctcttaaaannnnaaaaaaaaaaaaaaaaaagg

SEQ ID NO: 12081 - DNA, 760 bp, Macaca Fascicularis
actgattcagaaaactagtttatgataggtcgactagagtttcacatcaaaccgtaccattgtgatttttaatgtcatctagacctatctaaaattcagagcatatcatctggccttcctcagggtgaccacccatgcattgggcttagtcaagattgacagatacattctcagctggcctgacatacaaaacatcttgtcattgagcttaagttctgcttgttctgaggtttcacctccatgtgtttcattggtacaaaaatggatctcttagttggtcacttaattctttctttttcagaaagatagtctgttcactggtagatttggtcactcttagagtcttccttcacattgttttttatgggacccatgagtggttagcctttcttttctattgtagcaggaaataggagtaaaaagaccattgtagtaaatacgttcaaggggagcttgggaccagaaaccactgttacgtacaaaaaattgcaaactcaataaactcaaatttaaaataatttttaaattaatagttatgatacatttaattttatattttatacaaatagattgcttagaatggttctcaagaattataagggaaatgaactcagtacaaaaattttataattgctctacttatgttttgtttgggggctgggaaatgtatttttacattgtttatagccaatcatttttatatttgtcaatttaaatcttatgggtcttttttatctctcttgatgtcaaattttatagt

SEQ ID NO: 12082 - DNA, 771 bp, Macaca Fascicularis
  misc_feature (1)...(771): n = A,T,C or G
aaaaaaagtcatggtagatgaggtggtaaaaaaaattgtgaccaatgaactttggagagttctgcatttggaactggcacttactttttnngaccatgctgctgtgctctgtgagtcctagattttgtagccaagcagagttgtagagggggataaaaagaaaagaaattggatgtatttacaactctccttgaacaagtatcaatgtgtttgtgaaagaaagatctaaaccagacagcagttggtctacatagtagtaatcctttgttggaatggaacccttgnnnnnnnnnnnnnnnnnngaaaggnnnnnnnnnnnnnnnnggccatttcaggcannnnnnnnnnnntcctgtcctnnnnnnnnnnnncctttagattgggatagattccaaataaagaatctagaaatatgggaagatttaattatgaggccttgaacacagatatccccaaacccttgtcatttcccccagtgagctctgatttctagactgctttgaaaatgctgtattcattttgctaacttagtgtttggggaccctgctctttggctgttctttttttggagcccttctcagtcaagtctgcaggatgtctttgtttacctacccctcagttttccttaaaacacgcacacaaccctagagagtcttaagaataatgttacttggttaatgtgttatttattgagtatagtttgtgctaagcattgtgttcgatttaaaaaattagtggattgactcnnnctttgttgtgttgttttcattg

SEQ ID NO: 12083 - DNA, 779 bp, Macaca Fascicularis
  misc_feature (1)...(779): n = A,T,C or G
ggcaaacaaactagagctgcaagagaagcnnnnnnncccgccgtgcaacgcggagtggagctcagccaggggcagtcggctctggtgctcccagaagagtggaggcgtgagcagagactggatcggtgtccccannnnnnnnnnnnnnnnnnnnnnnnnnnnnnnnnnnnnnnnnnnnnnnnnnnnnnnnnnnccccctagtgaccagatgccggacaacccaccacacagaaatcgtggggacctggatcacccaaacttggcggagtacacaggctgcccacctctggccatcacatgctccttcccactctagctgtagccttttctgttgataacacannnnnnnnnnnnnnnngaacctgagtaggcccttgacacttgtgtgccctgggatgccccctggcacaaaacaggagggtctggaaggactctggctatattctgcaaatgtggctcatgcccctcactatggctcagcgttgtggtgcctgagggacagccggccacctgcccagtactggtcagcgtttcaccactattccccttgacctactggccatcttcctcagagccctcagataccagtgggcgcaaatatgaccaactccatttccacttgaatttacaaccaaaagcctgctgggttggttacagctgggccagcacagtaagaggcaataacaaattagcatgggttgattctggacttggaaaagcttttgcttgtatggatacggcaaatccagatgtctctgaacaaagcaacaattaaagca

SEQ ID NO: 12084 - DNA, 790 bp, Macaca Fascicularis
  misc_feature (1)...(790): n = A,T,C or G
cagagcagagggaggngnnannnnaggcgcttgggaagcccaagccnnnggagaggcagcgagtgaaggacgccgacnnngtnnnctgccggtacaagaagatcctgggcaccttccagaagctcaagagcatgtcgcgggccttcgagcaccaccgcgtggacaggaacaccgtggcgctgaccacgcccatcgccgagctgctcattgtggcccccgagaagctggccgaggtgggcgagttcgacccctccaaggagcgcctgctcgagtactcccgtcgctgctttctggccctggacgacgagacgctcaagaaggtgcaggcgctcaagaagagcaagctgctgctgcccatcacctaccgcttcaagcggtgatcgcaccacgcctccgcgcctccgcccgggccttcctcccccgccgaccccggccctccccaggcccccggtggatgacctgcgcctctccctgtcgcgcccctgcccctcctcctcactccctgggttgggggctcccttagcccggcccccaagcgcgacggcccagggccggccgcagccccttcccgaacgccggcatccccttccgcttgggctgcccagccctgtcctcgccggaccccttcctcctggaaatcaaccaggcaggagggtgccgcccccctctcgggtgggggactgtatagaccccgtctccgccccagccccgcggaggagctgcccacctgattcccggacagacctccccaactccgcgcgagacagagaatattcagagaattaaataa

SEQ ID NO: 12085 - DNA, 767 bp, Macaca Fascicularis
  misc_feature (1)...(767): n = A,T,C or G
tcatttcactccgtgtgnngntacccagtttatgggggttgtaatgtttatcacactccttggatgattttgaagagacagnnncntnnnnnnnnnnnnnnnngcnnngaactcctgggatcaagtgatcctcctgnnncagccttcaaaggagttgggactacaggcccacgccaccgtgcctggctggacatgtaaattggaagtgaatggttaaacatccagctggctgaaagtatggcggaccctcacagaaaagctacagtgtgtttttgcaannnnnnnnnnnnnnnnttcctgggaaaaattgtgactttgtataactgttgttgaaatcagaataaattatatttcacttgcatattcttaaattattaaaattttcagaagtcagtgatataggaatactattttgcaatgcgaatccatttgaatatttggagaaggtggtttcattataggtgcataatgcactcttaatattttaaacaaatagttcactcttccatttaagggatagcagttccttatataaaatgactggatgtgtataaaggaattatgttgccatgtgcgtttaaccagctttagtaattactataatctcatatttatgatagttttgttaggtacaggaccaaatgaaagtattttacgttttcccatcactttagattttatcattgtgtaaattactgggtttttagcatttcctaatgtgaagttttagtcatttttaagtatacatatttttttctgtaccatta

SEQ ID NO: 12086 - DNA, 943 bp, Macaca Fascicularis
  misc_feature (1)...(943): n = A,T,C or G
cgtggaatctttagagccctcccatgttgttcnnnnnnnnnnnnnnnnnnngatgaaccagggcaacgtgtacggccaggtcaccgtacgcatgcacacccggcagactnnnnnnnnnnntgaccggtttggccggttgatgtatggacaggaagatgtacccaaggatgtcctggagtatgttgtannnnaaagcannnnnnnnnacccatatggaagctggagaatgcatagcaagatcgttccgccatgggcaccccctaagcagcccatccttaagacggtgatgatccctggccctcagctgaaaccagaagaagaatatgaagaggcacaaggagaggcccagaagcctcagctagcatgatgacaaaaatgacttatggggtgaagcctgggtgatgaggctgctggaagctttgaagtctcccattcccatcatgctatagaaagaactacctttgttctctcccatcctgctcaggtcttttcagtaatctcatcctcagcaaccatggctgatggctgggccctagcaggtggcaggtataacatggccatgtacacttttcttttttaaattttttgtctagcttctgagtctagatgaaagacagtatgtttcagagaacattggataccagttttttccacagcagggactgagagagagaaccagcagcatcctctttgtaatcacagggcannnntcagagtttgaaataaaannnnnnnnnnnnnttggtaaaattttggtgagttctgtacatttcccctggttcagnnnnnnnnnnnnnnnnnnnnnnnnnggcagaagtggaagataagcctgcttgtgagtgatgtgactttaaggaaatctagactgggaaagaataattagtgtttataagatatttaagaggccctttttcatttactgactcactnnnnnnnnnncatt

SEQ ID NO: 12087 - DNA, 766 bp, Macaca Fascicularis
  misc_feature (1)...(766): n = A,T,C or G
gagctgatcatgaagtccatcatcccagtggtcatggctggcatcatcgccannnacggcctggtggtggcagtcctcatcgccaactccctgaatgacgacatcagcctctacaggagcttcctccagctgggcgccggcctgagcgtgggcctgagcggcctggcagccggctttgccatcggcatcgtgggggacgctggcgtgcggggcactgcccagcagccccgactattcgtgggcatgatcctgattctcatctttgccgaggtgcttggcctctacggtctcatcgtcgccctcatcctctccacaaagtagaccctctccgagcccaccagccacagaatattatgtaaagaccacccctcctcattccagaacgaacagcctgacacatacgcaccgggccgccgcccctagtagttggtcttgtacatgcgcagtgtcctagtgcccatcgtctgttttcctggccttgcccccgcctgccccatgccgtggacatctgggcccactcatcgcccctccaggcccccggcgccccaccccctagagtgctctgtgtatgcggatgatttagagttgtcatttctctttactggatgtttatttataaagatctggcctgttcccgcgtctgcggaagggccctcgtctcccagctatctataaccttagctagagtgtcgccttgtgggttcctgttgctgagacttcctggatggagccgccctcaccgccgggctgtggccctgcgcggagc

SEQ ID NO: 12088 - DNA, 737 bp, Macaca Fascicularis
  misc_feature (1)...(737): n = A,T,C or G
gaaacaagtgcattagaagacgctacagagtatgcgacnnntcgnntccnnnaggccacacctcgctatgacagcaagaacgggaccctggtgtgagccttggggaggaaggcccagtccatcgttaaccactactcctgtgggggagaatctacagctttggggaattgggtggcaacccagggatgttggccacgttttaagcttaaagaactccaaagccccaggaattgtgagcgtcccagtttctcccctggcctcttacttgccactgttaggttggagttatagttggtttagctatgagtggatagctaaacttaggtagccacatgaggttaggtggagtgtgcagggaggtaggtcttcgacctcaccattgttgctcctgctcttgaaaagtgcagaaagagcaggttaaaagttagcctataagcacgtgggctgatcttgtcggactttaattaatggtatcctttttcacacaccttaaactccaaagctgaaggggaggtgctctggaaaagcattctgagcttttacattcagacaccagggctggcttgggctgagtcaggctccagaccttaacagacaaatgggggagggggctgaggcgtggaggaagcgctctccaaccatgggcctacagaacctcaagacactgataaccgacagcacagcgaggcccggaaacttccctcggagggactgttggctctcgcaggtgcgggccg

SEQ ID NO: 12089 - DNA, 647 bp, Macaca Fascicularis
  misc_feature (1)...(647): n = A,T,C or G
gcagnnnnggccgcaccgtgaggcttcccacttgctcccagacccgctgtccagccctgggtggtcccaggggagagcacggaggcctcgggttcagctacgtttccccccggccccctgtgtcaccccacggggttgcctcccacagagtccagctcctggcgcacagtgcggggtgtgcggagatggtacggacgtgctgcggtgtgctcactggcgctgccacttcccagcgggcacctcccggcctgggacgggcctgcgctgcagatcctgctcaggagacatgaccccggcccctgtggagggggtgctggcccccagccccgcccacctggcgcccgggcctgccaaggatgacactgccagtcacgagcccactctgcacagggaggacctggagtcccttctgagcgagcacacctttgacggcatcctgcagtgggccatccagagcatggcccgcccgctggccgaggcggccccctccccctnnnnnnnnnnnnnnnnngggacacgcagctctgatgggagggcgccgagaaagacacctcccccctcagccctggaagccggccggctgggacccagaaggggacagtgccacgtcttgtcagtcctcggctgtaaacacagccctgtgttgg

SEQ ID NO: 12090 - DNA, 312 bp, Macaca Fascicularis
  misc_feature (1)...(312): n = A,T,C or G
gggcaagagcgtgacaccctgtttcaaaaaaaaaaaaaaaaaaagaaaaagaactgtttcgaacagacaaattaggtagtagatggagatgtataccctctatcacacacacataaaactgtaacaaaattcattgtggtgtattataattagttttgtgaatataaaaataaagcacttatatttaaacttgttagactttttaaaggactaatgctgaatcagattatcagaactttttcctctctcgctgttcaattttgtagtttttactctcaaaaaataaaacccccacactnnnnccagagagag

SEQ ID NO: 12091 - DNA, 730 bp, Macaca Fascicularis
  misc_feature (1)...(730): n = A,T,C or G
ccaagactacctggacagggagccagcacgaggccaggccatgctccaggactggaggctccaagctcaggaccccaggatgggagatgaggagaagcggaacagggccatcacggcccgcaggcagcacctgaagagcgnnnnnnnnnnnnnnnnnnnnnnnnnnnnnnnnnnngaggagagccgccgcgaggccgagaagcagaactacctgtcagagcattgcccgccactgcacatcccgggctccatgtcagaagtacaggagctctgcaaacagctgcacgccaagatcgacgcggctgaagaggagaagtatgacatggaggtgaaggtgcagaagagcagcaaggagctggaggannnnnnnnnnnnnnnnnnnnnnnnnnggggcaagttcaagcggcccccgctgcggagggtgcgcatgtcggctgacgccatgctcaaggccctgctgggctccaagcacaaggtgtgcatggacctgagggccaacctgaagcaggtcaagaaggaggacacagagaaggagcgggacctgcgagacgtgggtgactggaggaagaacatcgaggagaagtctggcatggagggccggaagaagatgtttgagtccgagtcctaggctactcactgcccccacgcctgccccggtgcccggctcccagcagaacatactagggggatgcacccagagcctgccagggagggcnnnnctcacctccac

SEQ ID NO: 12092 - DNA, 750 bp, Macaca Fascicularis
  misc_feature (1)...(750): n = A,T,C or G
gtacacacgtnnncagctcatcannntccagtaagcctaaaagcacatccctcaggtnnngatatatttccctggattcatttcacttggctagagattacactgtgctcaatgccttaataaatccctgaaagaaagaaaacccacactgtgtgcaatgccttgctgtggccccaaccactgcttaggcctccaacttctccccaggccaagtacagggccctggctgccttctggaagttcaagacacctagtcctctgcagggggtggaagagtgcaaggnnnnnnnnnnnnnnnggagaagcagaacctgttggtgcaggcagggcaggtcctgaccaacctgcatcaggggatgccctgagctccacaggtctgtgggcaggggtcatgggtcctggtgaaggaagtgcatcctcaggcctgggctgtagcaagctgtctgcccttgggttcaagaaccagactgtggagccacaggtgaccagagggggccccggggctgagccacaaggataccnnnnnnnnnnnnnnnnnnnnnnnnnnnnnnnntgtccagtgtttgcccccacatggggctactcttgcttctactaaaagatatagcagttacccccttatccacgggggatacagtcccagacccccagtggatgcctaaaaccacagataacaaaccttatatatactgttttttccgtatacatacatacctgtgactaagtttatgaattaggcaccttaagaga

SEQ ID NO: 12093 - DNA, 734 bp, Macaca Fascicularis
  misc_feature (1)...(734): n = A,T,C or G
ttgagttcccgttctatannnnnnnnnnnnnnnnnnnnnnntcaagaatggccaaggaaagtggattccccatccttagaggtaaggaaacgaagaccaagggagtctaagtaatgggcccaaagtctcacagtgggctagggagagagtgtgcgatttgacccaaagtcttcttggctccaaagcaggtgccctgtgctgctccctgtaaagatacgtcaatgagagtttatgcctgttgtccgtgatgcattgaccagagtagaaaaaggatcctttgtcttgcaggcagtctggttnnnnnnnnnnngccaaaattcagatgttggtggaagaagctgtatgtacagtctttgctccctttcctttctcactgaaataagtaaagattcagccacagggctgtctacccaaagnnnnnnnnnnnnnnnnnngcattcactcacctccatttcaggcaggcagcgcccactgaagttgattttttgtgttcacagctgcagaaccaggaactgctgagggcgatgatgaagaaggccgagctggaaatcagtggcaaagtgatagaaacaatgaagagactggaggatcctgtgcagcgacagcgcgtcctggtggagcaagagagacaaaaatatcttcatgaggaagagaggatcatcaagaagttgtggtgagtgccagtcacttgcnnnnnnnnnnnnnnnnnnnnnnnnnnnnnnnnnnngttgcta

SEQ ID NO: 12094 - DNA, 702 bp, Macaca Fascicularis
  misc_feature (1)...(702): n = A,T,C or G
catagctggaccagcaacagcannnnnnnngaggccacttggctnnantcagagaccaaacagcttnnncttccgttcnncctctcagagtggctcaggcccttcctcaccagactctgtcctgagacctcggcggtccccccagattccagatgagaaggacataatgactcagatgagccaggtcattgagtcccggcagcagcggcccctgcccgaggacctggccgaggctctggccagcggggtcatcctgtgccaactggccaaccagctacggccgcgctccgtgcccttcatccatgtgccctctcctgctgtgccaaaactcagtgccctcaaggctcggaagaatgtggagagtttcctagaagcctgtcgaaaaatgggagtgcctgaggagtcactgtgccagccccaccacatcctggaagaggagggggccccgggaaggggcctcccctacatcgctgctgtcgtccacgccctgctggaccggccttaggggtgaaggtgggggcagggcccaccccgcctgggaccctgggagcagaagacgcgcctgggctccacgctctgagacaagcactcggtgagggcggcctgggcctgggcccccttggcctgcgggcctggctgcctctgggaccgagggtctgggtggaaagaccacgggtgtcgccagatgtcgcgtcagctgca

SEQ ID NO: 12095 - DNA, 773 bp, Macaca Fascicularis
tggatgtattaatgggctgcatgaactatgtgcccagcactacgctgagcttacactaattggtcagacatgctctctgctctcatgaaattggctccaaatgaatgaactactttcatgagcagttgtagtaggcctgaccacaaattcccagagggccaagtgcggatccacaggacttgaaggtcaaagttcacaaagatgaagaatcagggtagctgaccatgtgtggcagatactataatgaagatgcagaagtgtgcatggcccaaggacaaggacctccagccaggcttcatttatgcacttgtgctgcaaaagaaaagcctaggtcttaaggctgtgccagaacccatcccaataaagagatcaagtctgaagtcacattttaaagccagtataggagacttggagtcaggtagtagagactggtggggcacatggggcggttggtacttgcaaacctttaaagatggttaattcattcaataaatatttattaagaatctatgtggccaggtgcagtggctcacacctgtaatcccagcactttgggaggccaagctggatggatcatctgaggtcagcagttcaagaccagcctggccaacatggcgaaaccccatctccactaaaaatacaaaaattttctgagcgtggtggcacgcacctgtaatcccagctactcaggaggccaaggcaggagaatcacttgaacccgagaggtggaggttgcagtgagctgagatcgcaccactgtactccagcctagc

SEQ ID NO: 12096 - DNA, 655 bp, Macaca Fascicularis
  misc_feature (1)...(655): n = A,T,C or G
cgactgacaaaaaattcatcncaggaaaagtcaaaaaactactcggaaaacactgacagagacttatcgaggagacgttcctccaggctgtccactaatgggacccatgagatcctagatcctgacttggttgtatcagatttggttgatacggatcctttgcaagacacgttgtctagtaccaaggaatctgaagaaggtcagctgaagtctactttggaagctggccaggtctcatctgcactgacttgccactcctttggggatggatccggggctgcaggcttggagttgaactgcccgtcaatgggagaaaacaccatgaaaacggaaacgacttctccccttgtggaattacaagagatttcgactgtggaagtaacaaatacttttaagaaaacagatgattttgtgtcatctaatgcaccagctgtcgacctagaccataagtttagatgcaaggttgtggactgtttaaaatttttccgcaaagcgaaactgttgcactatcacatgaagtatttccatggaatggagaagtcactggagccagaggagagcccgggaaagaggcatgtccaaaccaggggcccttcagcttcagacaagcccagccaggagaccctgaccaggaagcgggtctctgccagttccc

SEQ ID NO: 12097 - DNA, 699 bp, Macaca Fascicularis
  misc_feature (1)...(699): n = A,T,C or G
ggagattagagtttttggattgccatgtgtagctgctatgtccnnngaggctttatctcatctgtgcaaactaccatctgctcaatttctgtctaccagcccctgcacccctttgactggggacttactggttgccagagttcatcttgcaggctggaagcaccagggaattcattcccccagtcaaccaatggcacccagagaaggcatggaggctcgatgcaaccccttccaccccgaaatcctcctttcctttacgcatctcttccattttgctgtttctgagttgtatcttttatcagaaactggtaaacattgcagccacagaagtagcccaatctggttcaactttgtgtagtaaaatggcaagttatttttcagttacctggacccccaggttgcaaggtacataccttgatcatgcccagatgaaccaagcaagtagccacaggcagaacctaagtgttcagtccaacaaatggggactgaattaagaagcggacactacatggcatgatctatgatccaatcagattgcactctgacatcatcccatggtatgatacaatcagatcaagcctcccacatcacctcgttacatgatccaattaggttacacctcactaccctctgtatataaaatctgcagcagcccccagctcagagagacagatttgagccagactcctctctccttac

SEQ ID NO: 12098 - DNA, 744 bp, Macaca Fascicularis
  misc_feature (1)...(744): n = A,T,C or G
ggnnnnncatctanntctgtatccacttcctggccctggcagggctggggctggggctggctttgggtgggggcagccccagccggcggaangcagcatcccagcccaccagccttgccccggagaagctccgggaggagtgagctccgtgacgctccctctgccagctggtnnnnnnnattatgtgaaccaggcagctgtctcctccccagaaagagtccttaccttggagagggtcctggagagaatttccttttccccagctaaatactctgcctgcaactgaagcagacccgggggtgtcctccctgccctccgcccagggaccacctccactgctacaaaatcaaagttttgtccggacaagagtcttgtgggcccctgctccagcttctgggtatccagagagcgctgcacttccccaaaacggaaggggcccctgggcagtgggttttggacaaattccctttctttgcatccacaatgtggggtcagagcttgggggcaggtcctgggaatgggaagcctcttccttgtgtctttcgctccacttttagctcatggcaccgatattgcagacttggaaggaagcataagtttcccatttcacaaaggggaaactgaggtgcagatgcgcgggcctggggacggccgtcccatggcttccatctgagccacctcggggccccaacgctcctggcaccctcttctcatcccttggcctatgacaggtcaccacgtgta

SEQ ID NO: 12099 - DNA, 712 bp, Macaca Fascicularis
cagtgccgatggacctcatagaaatgtacttaaaataaaaccacctatgtgcttcactgaagaagatgcaaagttcatggtggaccaacttgatggggttctaacagttttagaagaagccacgggaaccaaaagtgaaagtgtgacctctgagaatattccatgcaaaacaaagatgctgaaagaagcccacgtagaactgcttagggacagcaccactgactccagagaaaatcccagcagaaagagaaatggaatgtgcgcagatacacattcactgctcagtaagaggctcaagacatgaacgatttgcattttaaagcaagatgcgatgtccagagttatagagaatgagtagatgtgtcttatcagttaatagctctattgtacctctaaaggtggaattgtcagtttagattcgtaaacaaaaaggtaaatgagtaatcagaataacctaagtgataatcaaaccgtgtcaggattattagttcagactctagcctgttaattttcttacttgagatttctgaagctacctgatttattctattaaacgtaagcttgcaaactcaaaatacattggcaggtttacctctcatgttttaatgtttcaaattagagagcaaagtgtaacaggctccttcacttttgagacttagtgccttaaaatatgtattctataaggatttcatatataaaagtatatttatga

SEQ ID NO: 12100 - DNA, 742 bp, Macaca Fascicularis
gctttccccaacatagatctatatattaactagtgaaatgctgtattttgaagaatttttgtgtctgtagttctgtaattctgggcagtcttcatgttggttttttaggagttttttttttaaggttttataactaaggtgaatattttaaaattaagagaccggcaaatgaaaggagtaaagaaaatatagctgtggggtagaatgccactgaccctgctatgtggtttattaggattttcatctactgacttctttctcattaggtaggcttaacaacttaattgaaagttttgcaactgtctatgcagctcaacctaagtctggtttctgtcatattgcctttagattttcttctgtgcttctctctatctgctctggaatggatgagtgaatgtgttctgggtgttttagggaacatattgatagaaatggccacattgcagacgaaatcactctctctctgtttgtttgtttgtttgttttagaaaagaattgatagtaggtaattggcatcgatttttcagttatttcattaccttataatagtagtttttgagacctgaaaattgtgcaaatgtcaaatattaattgtaagtcatatctaagaattctttcttggctgtctttctaggtattccataaaatcaacacattttaaggctgaaagatactgtagaaatcatccagtcccaatcccccattttaaaactgattctagtaaaattaggcctggtaacat

SEQ ID NO: 12101 - DNA, 704 bp, Macaca Fascicularis
  misc_feature (1)...(704): n = A,T,C or G
acactaaccgatctcnnngcccagacagnnnnnnnnnnnnnngaaaaagccggctcgcctttaaaagctgccttncttccaggttcgtcgtgaggagctccgcgatgtcctctcaacagagcgccgcttccgccaaaggcttttccaaggggtcatcccagggccccgctccgtgtcccgcccctgcgcccaccccggcgcccgcctcctcctcctcttgctgcggcggcggctgctgcggctccggcggnnnnnnnnnnnnnnnnnnnnnnnnnnnnnnnnnnnnnnnnnnnnnnnnnnnnnnnnncccaaggagacgccgccggcagcggagtagtggctgctgctgctgcgggggcggcagccagaggtcccagcgctccaacaaccagagctcaggctgctgctctggctgctgagaggcccgcagcccccagcgctgcgctagagaaacccgtccaacccagagcgagcccgccccgctgcggctcccacgcggggctgggcctcgcagtttgccccgtaaagcgaattgcnnnnnnnnnnnnnnnnnnnnnntttgttctcagccacgcaaaactccctgactccnnnnnnnnnnnnnnnnnnnnnnnnnnnnnnnnnnnnnnnnnnnnnnnnnnnnnnnnnnnnntgcacggctttgcacacagcaggtgctcagtaaatgcctaatgatttgattg

SEQ ID NO: 12102 - DNA, 950 bp, Macaca Fascicularis
  misc_feature (1)...(950): n = A,T,C or G
gnnnnnnnnnnnnnnnnnttgattatacaagtaagtaggcctccagagnctctctagtggcagagcagctcacactccctnnnnnnggaaggatggcttctgcctagtacctatccttgtgnnnnnnnnnnnnnnntagcattggttcaagttctctcttgctgtggtcagagttgcttcgatgttggccaagtgtttttattattgggctcccttatgnnnnncaggacagttttcctggagccatttggtatgaggtattaatttagcttaactaaattacaggggaatcagaggccgtgctcctgactgatcgagacattattattggtttttttttttttttttaacaatggtgtgcatgtgcaggagatgacaaatttgtatgtcagattatacaaggatgtattcttaaactgcatgtctattcagatggnnnnnnnnnnnnnnnnnnnnnnnnnnnnncatcatatttatttgtattttctcaatagttttggccagaccnnnnnnnnnnnnnnnnnnnnactatgtttttctcgattatctaataaccgtagtacttaaattgaacagttgcaaagatgtcttaattgtgtaaagacttggtgtagtcatgactttagctgatacttttatgtacgagatctgtctctgctgtttaacttcattgnnnnnnnnnnntggtttcaactctactgcgaaacaaaaatagctccttaaaagtacnnnnnnnnnnnnnnnnnnnntagttatctaatcaagacacctcattcaaacaaaacctgccttaggaaaatttaatatattttaaattattttaaaagaaatacaacatcttattctttagctttcttaatcggtgctttatggaggccagtgtaacattacatgacttgttgagaaagttgaggaatttcctctaccacctttgttgctgaagaaaaaca

SEQ ID NO: 12103 - DNA, 759 bp, Macaca Fascicularis
  misc_feature (1)...(759): n = A,T,C or G
atcgnnnacatggggnnnnnnnnnnnacaccacactgctgtccaggaggccgattactcggtgcctattggcatgctgggacgagactgactacaggaagctcctgcgctactacagcaagaaccgcccggccgaggctgtcaggtgctacgagctgctggccctgcacctgtctgtcatccccactgacctgctggtgcagcaggccggccagctggcccggcgcctctgggaggcctcccgtatccccctgctctaggccaaggtggctgcagtctgcttttgcaccccgtcctccagctgctcttgcttgccactgttccccnnnnnnnnnnnnnnnnnnnnnnagtggccgtcctgaggatggggcagaatgcccagggtggccccagggtttctaaaaccccacctagaccaccctccatgtggggtatgtgcaaggccccagatccttctctctggaggaatagggaagcccaggggtccagtttgtcttcgtaaaacaaaagtggcagcagctcctcttccagagctgcctctgccttatcctgggagatggggagggagcccacccggcaagctctctcctaccccaggtaaaaggtgctcctttgcctgggtctgaattccagccctgccacttcctnnnnnnnnnnnnnnnnnnnnntcttctattcctcacatttaaagcgagtgcaacctccctcccagggtggtgtgagggttacccaatgcggtannnnnnnnnnaatgtggtca

SEQ ID NO: 12104 - DNA, 500 bp, Macaca Fascicularis
  misc_feature (1)...(500): n = A,T,C or G
gannnnnnnnnnnnnnnnnnnnnnnnnnnnnctcatttgtgacattgctggctattatcctatggatgtggcagtgnnntggacccgacaggagttgggcggatccccagtccaagtctnnggtgcctccttttccagcctcaggcaaagcgtggcaggcanatacagcatctcctccnnnnnnnnnnnnnnncctggcnnnnnnnnnnnnnnnnnnnnnnnnnnnnnnnnccacatctttctggacgagccccttggggccagcacccannnnnnnnnnnnnnngcagagaacagccttggnnnnnnnnnnnnnnnnnnnnnnnnnncttcttgcattgtnnnnnnnnnnnnnnnnnngacgccaagcacctacaagagttgggctgcttcaggctgaacgttgggagaccacttcctgtgctgacgcacagnnnnnnnnnnnnnnnnnnnnnnnnnnnnnnnnngtaagccagcccagntgangtgaagtgacatgag

SEQ ID NO: 12105 - DNA, 661 bp, Macaca Fascicularis
  misc_feature (1)...(661): n = A,T,C or G
gcgaatgaggagnnnnnnnnnnnnnnnnnnnnnnnngtggccaaggaattgggccagacagggacacggctcactccagctgacaaagcagaacacatgaagcgacaaagacaccccagattgcgcccccagtcagcccagtcttctttctctccctcccctggtacttctcctgannnnnnnnnnnnnnnnnnnnnnnnnnnagttaaggaagttttgccccatgtgccattgggtgtcatccagagagacctggccaagactggctgtgtagacttgactatcactaatctgcttgagggagccgtagctttcatgcctgaagacatcaccaagggaactcagtccctacccacagcctctgcccccaaggcattcgatgcnnnnnnnnnnnnnnnnnnnnngcaagccctctgacattgtgatcacctcagttccccagctctggcccggtgacccctcannnnnnnnnnnnnnnnnnnnnnnnnnnnnnnnnnnnnnggcaggagagcctgcaggagcgcaagcaagcactatatgaatacgcaagaaggagattcacagagagacgagcccaggaggctgactgagctcaaaggaacaggatggcacccagagccgcaggacggagactgggggcagccctcacccaactcacaac

SEQ ID NO: 12106 - DNA, 746 bp, Macaca Fascicularis
  misc_feature (1)...(746): n = A,T,C or G
atgtccaacagtatccnnnnnatgggaggagagttactcttgaaagggcaggcagcttaagtggacaatattttgtatatcattgagaattttctttacgacacttttaaaaattgtgtaattgttaaatgtccagttttgctctgttnnnnnnnnagttttaatatttgttttctaggtgaacctctgaaaaccaaaccagtacctggggaggttagatgtgtgtttcaggcttggagtgtatgagtggttttgcttgtgttttggttgtgttttcctccagagattttgaacttttaataattgcatgtgttatttttttttaagtggctttttttcaagtaaaattgtgaacatattttctttataggggcaggacatgagttatggagactgaagagtattgtagactgtacatgtgccttcttaatgtgttnnnnnnnnnnnnnnnnttttttcgtcaacttgaaaattcaaaagggacatttggttaggttactgtacatcaatctatgcataaatggcagcttgttttcttgagccactgtctaaattttttgtttttatagaaattttttatactgattggttcatagatggtcagttttgtacacagactgaacannnnnnnnnnnnnnnnnnaatgagtgtagcattgtttaaacattgtgtgttaacactctgttctttgtaattgggttgtggtgcattttgcactacctagagttacagttttcaatctgtca

SEQ ID NO: 12107 - DNA, 937 bp, Macaca Fascicularis
  misc_feature (1)...(937): n = A,T,C or G
ctatgacccatacacccaaaggattgangtctggacaaatacccagcagcttaagattttggctgattccattaacagtgaaattggaatcctttgcagtgccctccagaaaataaagtaaagccatggacagaacttggtctgtcaactgtgaatctattgatggagatccaactatttctttcatcagaaaaagtctgaaaagcaaaccttaatttgaaataagagccttaaatcctttatagaacaagatggagaaacaacaaataagtcaaaataatctgaaatgacaggatatgagtacatactcaaacgcataatggtaaatcttttggggtcatctttgctttagacatgataattccatactctcaattgagttaaatcagtaatctgtcgcatttcatcaaggttaattaaaatttgggacctgcttcattcaagcttcatatatgctttgtagagaattcataaaggagcatataaggctaaatgtaaaacacaagactgtcattataattgaattagtgggcttcctataaatcataacctatgaagtttattttctgttggagttaactatgattccaattactgctttgttattgtacctaagtaaattttccttaattcagaagcccattaaaatatttataagcattgaacttctttagtattatattaatataaaacatttttgtatgttttgttgtaattacaaatactgctgtataaggtaataaaactgtgcacctaatccccataacttccagtttcattttccaattaattatcaagtctgttttgggagacattttgaagagatttattatgcagcagatgttgactaaaggcttgcttggtagatatttaggaaatgttcattgaataaataagtaaatacattattgaaaagcaaatctcnnnntacatgtga

SEQ ID NO: 12108 - DNA, 739 bp, Macaca Fascicularis
  misc_feature (1)...(739): n = A,T,C or G
agaaatggttccatcaggcttgtgttaaggcaatggactgaatgagtgcatgttgagttgggagggggcacggggggctggnnnnnnnnnnnnnnnnnnnnnnnnnnnnnnnnnnnnnnnnnnnnnnnnnnnnnnnnnnnnnnnnnnnnnnnnnnnnnnnnnnnnnnnnnagaaaccaaccaaggtcagcacctccgtctgaagcatttggcacacaccttcaaaacacatcaaggctgcttccagtttcagaaaatagaaatnnnnnnnnnnnnnnnnncatgcacacagagctctcctcnnnnnnnnnnnnnnnnnnnnnnnnnnnncctggggattggggggctgccggggcgcccaagccctctcctgggggcccgctgggcaggcgacctgctgacccagcgtcactgctgtgctcagcccttcagctcgtccctagcctatttcctgcctccatttgacatttccannnnnnnnnnnnnnnnnnnnncctgtnnnnnnnnnnnnnnnnnnnnnnnnnnnnnnaaactaactccaccaaaatgtgggcannnnnnnnnnnnnnnnnnnnnnnnnnnnnnctaaagcgcagtgttaacatgcctcgagggcgtctgccacatttccctactgacctgttggcaaggccgaggcctggcnnnnnnnnnnnnnttccagcaaagacccccgcagaccatgtcctgctgtttgacttnngnnngnnnangaccctgta

SEQ ID NO: 12109 - DNA, 697 bp, Macaca Fascicularis
  misc_feature (1)...(697): n = A,T,C or G
gcagcccaggcagcagnngtgcaagcagcagccgcccaagcagctgtggccgcacaggcagccgcnnnnnnnnnnnnnnnnnnnnnnnnnnannnnnnnnnnnnnnnnnnnnnnnnnnnnnnnnnnnnnnnnnnnnnnnnnnnnnnnnnnnnnnnnnnnncactccagcagaacttcctggccatggcggcccagctgcccatgagcattcggatcaacagccaagcctccgagagccgccagnnnnnnnnnnnnnnnnnnnnnnnnnnnnnnnnnnnnnnnnnnnnnnnnnnnnnnnnnnnnnnnnnnnnnnnnnnnnnnnnaggagttctgtttgttcagccgccggcccccacgcctccttctgcttccaacaaaggtggtggtggcggcggcagcagcaaagcaggcggccggggaggaaacaccggaaccagcggtggccaggccgggccagcagggctgtctggaccctccacatctacctcaaataactcgttgccttaaccgcatcactccccacccgccacccaccccggagcccgccggcctgggcagggggtccaggtgggccacgcaggggccaggatggcggaagatacgggtggggagggaagatacccagaaaggagccacagctgacgccaaaaagaagagaaaaaaaaaatatatatatatacgtatatatataaagaaa

SEQ ID NO: 12110 - DNA, 1281 bp, Macaca Fascicularis
  misc_feature (1)...(1281): n = A,T,C or G
tggaaatggggaagcagcccataatatttgaaaacccaatgtactcagtcagagacagtgctgtcaaagtggttcagccaacccaggtgactgtatctggaaatgtggataataagaattatgggagtcccataaaccctnntgagatagttccagagacaagcccaacttccccagctgctgatggaactcaggtgacaaaatggaatctcttcaaacgaaaaactaaacaaactaccaactttgaaaatccaatctatgcacagatggagaacgaacaaaaggaaactgttgctgcgaccccacctccatcaccttcgctccctgctaagcctaagcctccttcgagaagagacccaactccaacctattccgcaacagaagacacttttaaagacactgcaaatcttgttaaagaagactctgaagtatagctataccagctatttagggaataattagaaacacacttttgcacatatattttttacaaacagatgaaaaaagttaacattcagtactttatgaaaaaatatatttttccctgtttgcctgtagttggaaatatcctgtgtgtctttttttacttatgccgtctcatatttttacaaataattatcacaatgtactatatgtatatctttgcactgaagttgtctgaaggtaatactataaatatattgtatatttgtaaattttggaaaaattatcctgttaccaaatttgctaataaaggtgtctgctgatttgggtggtgatcattatagtaaatgatccagcgagaaaaggaattgacttgggacctttagctgtgtcnnnnnnnnnnnnnnnnnnnnnnnnnntatcaaattatctaggaaaggagtccaggccctgctcctgggtccatttttacacattagcacttaattaatgttcaatattacatgtcaatttgattaatgggtatgttgataggggcccctatgtgttgtatagacatctggactcgactgtagactcctcagataatacagaaggtagacaaagcaattcagtttggcccttctgtgtgttgggattgtctaatcagaactctcgtttcatgtgtgttctctcactagctgccaaggcaacatttgtatttgtgatgtctatgaggaaatcccatatcattaagtgccagtgtcctgcattgagtttgtagttaattnnnnnnnnnnnnnnnnnnnnnnnnnnnnnnnnnnnnnnnnnnnnnnnnnnnnnnnnnnnnnnnngtagctggagctcagtagctgaatt

SEQ ID NO: 12111 - DNA, 666 bp, Macaca Fascicularis
ttcacatggtagtgtagggccaacatacaagctaccagtctaatgtgtatagtagactttgggaaaagcgatttttttttcatgtattcattctgaatagttgaaatgtatatttgtacagtcttttagacctattcaagtgatgctcatgatactgttattgtgtgcccatcatagatttctttttttagtgttgcccttgctgtgtaataaacgctatatctagtttacctagcaaaagctcaaaactgcgctagtatggacttttggacagacttagtttttgcacataaccttgtacaatcttgcaacagaggccagccacgtaagatatatatctggactctcttgtattataggatttttcttgttctgaatatccttgacattacagctgtcaaaaacaaaaactggtatttcagatctgttttctgaaatcttttaagctaaaatcacatgcaagaattgactttgcagctactaattttgacaccttttagatctgtataaaagtgtgttgtgttgaagcagcaaaccaatgagtgctgcattttggatatttagttttatctttagttcaacaccatcatggtgcattcatttataccatctaatatatgacacactgttgtagtatgtataattttgtgatctttatttcccttt

SEQ ID NO: 12112 - DNA, 1040 bp, Macaca Fascicularis
  misc_feature (1)...(1040): n = A,T,C or G
acagtcagcnnntgatnnnnnacacagcnnnnntagaacaaagcntcacctgggagagatacactgatgagtattggagaatcccaagaagtacatccctggaacaaaaatgatnnnnnnnnnnnnnnngaagaaggaagaaagggcagacttgatagcttatctcaaaaaagctactaatnnnnnnnnnnnnnnnnctgccttatttattacaaaacaaatgtctcatgacttttttatgtgtaccatactttaatagatctcatacaccagaattcagatcatgaatgactgacagaatattttgttgggcagtcctgatttaaaactaagactggcttgtggttaaatgaatatgttcagtttttgaattttaatagtaattccaattcagtaaatgctatcactgtttaccccttctaaagatatgattagactttgttagtaatgttcaacttttcgcaaagatggtgaagtgcnnnnnaatacttactggagattggttttatatttagatttatatagctggttatgtgaatatatttaaatactggggaaattccttcactgtctcagaactaagcaagattcacctgtgttttgtgttcatttgcctcttaaaggcaagggttgaagataaataaggtagcaatgtctagagttttggccttaacgatgccaatctaattataattccctgtatttaaaatggttccttttacttattgaaaagcattttagtatggtttatgtgtaatattaaagattattcaacacttctcacatcttacaaatctataaggtcacatgcttttaaaatagtagcaagttaaacttcactcttgaattctttacaatctaagtcaaactaagttataatttaggattgtctttaaacagccattcagaaacataaaactgtagaactgtatatttgtgattgggaatggtgcttttgccaacttaaaaggattaaagtagcggagatatacacaaattttaaaatgtgtgatcgcaagactaaagataataaaaagaaa

SEQ ID NO: 12113 - DNA, 696 bp, Macaca Fascicularis
  misc_feature (1)...(696): n = A,T,C or G
agatttatacattcagcatgttatgctctacgtggtacccatctatctgctttggaaaggaggtgcgtacactccagagcccctcagcagtttccggtgggctcttctctcaactggcctcatgttcttttatcacttcagggttttgcagatcctcggcctggtcaccgaagtgaatttgaacaacatgatgtgtccggccatctcagacccattatacggcccctggtatcgcatctgggcctcgggacaccagactctcatgaccatgacccacgggaagctggtcatcctgttctcatacatggctgggcccttgtgtaaatatatggtggatttgctccggcttccagccaagaaaatagactgaaggtgcttatttttttttttttttattctccaagaggaagcaagtcgtgacttgacttggagaacacccagttcttgatgaaatcatgggagagggcagtaggaagtttggtgtatttctttttcctcctttctgtccctttcttataccactcttccttccccagctcttccccataggatgtgctccttgagcctggggcgtagtgctgggcgctggattttcctccttccctttggctctctctctgctcctagtggccttacatggggagattgcagtgagnnnnnnnnnnnctctgcttgtcggtgctttaacaatagctg

SEQ ID NO: 12114 - DNA, 810 bp, Macaca Fascicularis
  misc_feature (1)...(810): n = A,T,C or G
atgtgtgtagtgtnnntagctcttgttgagcctgtgtgtgtgttgtgcggtcttagctgtatgctgaaattgggcgtgtgttggagggcttcttagctctttggtgagattgtatttctgtgtgtttctatcagctggatgttgctggaaataaaaccttggtttgtcaaggctctttttgtgggaagtaagcaggggaaaaagtctttgagggttcctgggctcctttgtacaacaggaaaatgcctccaagccttgcttcccagcaacctggggctggttcccagtgcctggtcctgccccttccgggttcttatctcaaggcagagcttctgaatttcaggccctcattccagagccctcttgtggccaggccttcctttgctggaggaaggtactcagggtgaagctgatgctgtacttgggggatctccttggcctgttccaccaagtgagaggagaaagtacttactcttgtacctcctgtccagccaggtacattaacagacctccctatggctgtaggaactactgtcccagagctgaggcggggggatttctcaggtcatttggagaacaagtgctttagtagtaaagtagtaactgctactatatttagtggggtggagttcagaagaaatttgaagaccagatcatgggtggtctgcatgtgaataaacgcgaatgagcaggacaggcctggctatcattgctttcctcctccccatttggaccctttgcccttacatttttgtttctgcatctaccaccatcccaccagtctattaacttagcaagaggacaaataaa

SEQ ID NO: 12115 - DNA, 729 bp, Macaca Fascicularis
aaatggagacagagctcaaggggtctttcattgagctgagaaaggctctctttcaactcaatgcaagggatgcctccatgctgtccacggctcaagctcttctccgctggcatgatgctcatcagttctgcagcagaagtgggcagcccaccaagaagaacgtggctggcagcaagcgtgtgtgcccttccaataatatcatctattatccacagatggctcctgtggtaatcacactggtgtcagatgggacccgatgcctgcttgcccgccaaagctcctttcccaagggaatgtattctgccttggcaggtttttgtgatataggtgaaagtgtggaagagaccatccgtcgagaagttgcagaagaggtgggattggaggtggaaagcctgcagtactgtgcatcccagcactggccctttcctagcggctcactcatgattgcttgccatgcaactgtgaaaccagggcaaacagaaacttgcaaggaaactggcccagagtggtgaggcagtcacaagggatttcttgcaatcagaaaaatgtgggctacatttggagcataagatctcaaatccatgagcctagatgagacaggctagcaatatgcatactctctcatgatgctggatacacaatggcagcaagctgcagttggcaatgtgatcacaaaggcaatcaaccaatactgtactctatactatactgtattcaataaattacaaa

SEQ ID NO: 12116 - DNA, 688 bp, Macaca Fascicularis
  misc_feature (1)...(688): n = A,T,C or G
agttgngatacagtctccctctttcctcctgatcctaagctcctgacaagtggccaggtggctctgggccctcctgcccctcacctaggtcaggggtcctggaatgccccgtggctctggcaccaccacactggcctctgacggtaggacttgtcccctccacatgtccctaaaaggcagcaagtcaggaaagccaggacttgggggagaagcaaagctccaggattgaaggctagggttctagggcctttgggtggggagggcccaggccaggcagtcttagctccatcccctgccccacaagattcacctgggcctccagtcccatgctggccccaactgctgcagcgctcagcttccacccagcagcctctggaggaaggcggggagcatgccctcagcgaggctgggcagcgggttctgctgtgccatctccctgtgtgcctgggcagatcaatcccccagtgcaaaacagggctaagggcacctgcaggacagcagcatgctccatccttcatgctcagctgcctctgtggccacagacttctgcccgccacctgctctctcttactcctgcctagcctagcccatccgtaagctccctcccccgcctggttcccggggcaggctgactcagtcgactgcttggtccaagcctggccctggcactagtcagggtcagcctaag

SEQ ID NO: 12117 - DNA, 813 bp, Macaca Fascicularis
  misc_feature (1)...(813): n = A,T,C or G
gcacagcaccannnnnnnnctgtgtnnncatggaccnnnnnnnnnnnnnnnnnnnnnnnnnnnnnnnnnnnnnnnnnnnnnnctggctgaggacaaccttgccccccacccaagaagccctgccctccagccacagcacagggccacagcagcccacagcagcagggttaagactcagcacagggccagcagcagcacgaccttgaccagagcctgggtcctacccgtctacctgaagtcaacagtccctgactgcctgcaggctgtgtgggcgagcaacgcaccccctcctcctctgctttgggtcccttctctcaccaaattccaactccattcccacctacctggaaaatcgcagcctccttataataatgcctccttctcctcctgccattttctacctacccattagctttcctaacgtcctactcctcacactgctctactgctcagaaaccaccaagactgttgatgccttagccttgcactccagggccctacctacatttcccacatgactttccggatgcctccaactattcttgctttccccagacagctcccactcccatgtctctgctcatttagtcccgtcttcctcaccatcccagcaggggaactctgaagcctggttgaaacgccacctcttcaatgaagttacccttgttcagctctggccacattctgcagacttcatgtcttcttgctgtatgttgttttttggttgttttccttcactctaatggactgatccagcgaagggatgggggcagtggctgcttcggctccacactgtatctgtgtcatccccac

SEQ ID NO: 12118 - DNA, 596 bp, Macaca Fascicularis
  misc_feature (1)...(596): n = A,T,C or G
gcccacctcgannnnnnnnnnnnnnnnnnnnnnnnnnnnnnnnnnntgtgcccagccttatttatttattttttaagagacagattttaccatgttggtcaggctggtcttgaactcctggcctcaagcgatctgcttgtctcggcctcccaaaatgctgggattacatttgtgagccaccacacttggccaagaataccttgttatttttttaacctgatagtgtattcaggttttatggcacatttagtttgagagtnnnnnnnnnnnnnnnntttaatccaataagtgtttcttttggttctcagatatacatacaagctgtgattgtttagatgtttccatctttttatatatgcatatacatattattattgttgtttttcatttttaggaactgaaagaaaatggtgaattgctgcctatactgagaggagaaaattaataaatcttaaacttggtgcccaactattgcaagaaatatttaattacattggaagcagttcatgatttagtcctcagaaatggactaggaatagaaaattcctgcttactcagttacatgttttgtgtatttctcaatgtcgtgctaaata

SEQ ID NO: 12119 - DNA, 726 bp, Macaca Fascicularis
  misc_feature (1)...(726): n = A,T,C or G
cagttctagcagtgcagctccccagaggcccatgtcaacacannnnnnnnnnnnnnnnnnnnnnnnnnnnnnnnnnnnnnnnnnaaagannnnnnnnnnnnnnnnnnnnnnnnnnnnnnnnnnnnnnnnnnnnnnnnnnnnnnnnnnnnnnnnacttactgttgaagacttggagaaagagagggnnnnnnnnnnnnnnnnnnnnnnnnnnnntgaattgatttgccaggagaatgagggggaaaacgaccctgtattgcagaggattgtagacattctgtatgccacagatgaaggctttgtgatacctgatgaagggggcccacaggaggagcaagaagagtattaacagcctggaccagcagagcaacatcagaattcttcactccaaatcatnnnnnnnnnnnnnnnatactcccttttgttatccttagaggactcactggtttcttttcataagcannnnnnnnnnntnnnnnnnnnnnnnnnnncagacgtttcactccttttccaataagtttgagttaggagcttttaccttgtagcagagcagtattaacatctagttggttcacctgggaaacaaagaggctgaccatggggctgaccgtgtggatgcgtgtcacactgagtgcgggagaaggtgttgtgtaatatgctgaggcggtgacctcagtggagaaatggaaagactgaattgaattttaagctaatggaaatcagaga

SEQ ID NO: 12120 - DNA, 759 bp, Macaca Fascicularis
  misc_feature (1)...(759): n = A,T,C or G
gtcatcacatggggctcacacttttcatccttccccaccttccctagtccctgcactaggttgggcagccccctttggctccaggaaggcaggaggggtgtgtccttactcccgcttcactgtggccacagcccccttgccctccgactgggatctgagtacatgtggtggtgatggagatgcagtcgcttattgtccaggtgaggcccacgagccctgtggccgtcacctgaggtgggctggggctgctcccctcaccctactttgcttccgccactcagccatttccccctcctcagatggggcaccaataacaaggagctcaccctgccctctcccaaccccctcctgctcctccctgccccccaaggttctggttccatttttcctctgttcacaaactacctctggacagttgtgttgttttttgttcaatgttccattcttcgacatccgtcattgctgctgctaccagcgccaaatgttcatcattgcctcctgttctgcccacgatcccctcccccaagatactctttgtggggaagaggggctggggcatggcaggctgggtgaccgactaccccagtcccagggaaggtggggccctgcccctaggatnnngcagcagagtgagcaagggggcccaaatcgaccataaagggtgtaggggctgcctcctccccctgttctgttggggaggggtagccgtgatttgtcccagcctggggctccccctctggtttcctattgcagtactga

SEQ ID NO: 12121 - DNA, 783 bp, Macaca Fascicularis
  misc_feature (1)...(783): n = A,T,C or G
aggagatggagagagggcnnnnnnnnnnnnngaatgatttcnannctggaaaacttcaagcatttggaaatgaatgttccattgaacagatggaacatgttcggggaatgcaggagaaattagctcgcttgaatttggannnnnnnnnnnnnnnnnnnnnnnnnnnnnnnnnnaagagaaaaacagccagtgactccaatctggatagnnnnnnnnnnnnnnnnnannnnnnnnnnnnnnnnnnnnnnnnnnnnnnnnnnnnnnntgcacaagatgttccaaatacttctgctagctaaaatgaatgcagtttgctctctgtggtttgaagagaagcagcagtctttacttttccagccaaatccannnnnnnnnnnnnnnnnnnnaacaaggaattaaagtaattaaagtgcaagtgcaatgatcgttttcacattctgcttttagtaaatgtgactcgccgtaattcgccataactggaggcctaggccttgttgaaggcttaatcaggaaatgtgatgcagagattgtgctgctatnnnnnnnnnnnnnnnnntatgggattatacttgaaatgcattgtgctaatgttcttgacggggttgagggatttctctttcccaagctcaccaaacttattccagtgttgatcgcaagctgatgatgnnnnnnnnnnnnnnnnnnnnnnnnnnnnnnnnnnntttagacaatccgtatacacgttggtgtgttttcnnnatggnnnngtgataagaaattaaataagtatttgtgagatttgct

SEQ ID NO: 12122 - DNA, 714 bp, Macaca Fascicularis
  misc_feature (1)...(714): n = A,T,C or G
aagcatggcatagagtaccagtccaagcccctgctatcagccttcgccgacatcatccactcactaaaggagtcagggcagctctggctagatgcctatcttcaccaataacaacagccaccttgtccagtctgaaagaagaggaggaagactctggagccaaagcagaggggagtttgagggacaatgccactgtagtttaatactcagaggggggtgggtttggggacataaaggctctgactcaaactcctcccttttatcttctagccacagttctaagacccaaagtttggtggacacagaagcccccagaaggagggaaggagctgttggggcaggggtgtaaattatttcctttttctagtttggcacacacaggtggttggtgagcagagagaaccaggagggtaacagaagaggagggacctactgaacccagagtcaggaagagatttaacactaaaattccactcatgccaggcatggcnnnnnnnnnnnnnnnnnnnnnnnnnnnnnnnnnnnnnnnnnnnnnnnnnnnnnnnnnnnnnnnnnnnnnnnnnnnnnnnnnnnnnnnnnnnnnnnnnnnnnnnnnnnnnnnnnnnnnnnnnnnnnnnnnnnnnnnnnnnnnnnnnnncagctacccaggaggctgaggcaggatcatctcttgaaccgaggaggtggaggttgcagtgagctgagatcacgcca

SEQ ID NO: 12123 - DNA, 846 bp, Macaca Fascicularis
  misc_feature (1)...(846): n = A,T,C or G
acaaaatggtggttgactnnacagatcccaaccgaccccgcttcactctgcaggagctaagggacgtgctgcaggaacgcaacaaactcaagtcgcagctcctggtggtgcaggaagagctgcagnnnnnnnnnnnnnnnnnnnnnnnnnnnnnnnnnnnnccaggaggaagaagagaaaaagatgctgtggttactagggccaacnnnnnnnnnnnnnnnnnnnnnnnnnnnnnnnnnnnaaaaaagctgttcttttttcgatcggggaaacagacctagatctaaggccacaactaaggctatggctctgattctggatgacaaccttccaagatgcctggcaaagccacctctctgnnnnnnnnnnnnnnnntgggcctgcgtattcatttccccttcaaagcagactgaggagggaggagacaaggttctcttggcatcactttctccctgactgcggaactagannnnnnnnnnnnnnnnnnnnnnnnnnnnnnnnnnnnnnnnnnnnnaaacagaagggatgtgtgggggttggggcccacttcctgctcctacgtcaacccccagggcctcctgnnnnnnnnnnnnnnnnctattcatctgctcccagggatgaccctggccttcaatgtttagcagaaaggagaaaagaaagcaggaaaatgtgctatnnnnnnnnnnnnnnnnnnnnnnnnnatatttagtgaatatttgatttagccannnnngcctttctttatgtgattttgtattaaagtaaaatgacttttatactttctatnnnnnnnnnnnnnnnnnctcttagttatgatggtatacatggtggtgtatatgtgtatat

SEQ ID NO: 12124 - DNA, 866 bp, Macaca Fascicularis
  misc_feature (1)...(866): n = A,T,C or G
tgcaaccagtttnnncaacaggagcttgacagcaacaaggaganngagagctttgcccgccgcacctacagtgtctcattccccatgtttagcaagattgcagtcaccggtactggtgcccatcctgccttcaagtacctggcccagacttctgggaaggagcccacctggaacttctggaagtaccttgtagccccagatggaaaggtggtaggggcttgggacccaactgtgtcagtggaggaggtcagaccccagatcacagcgctcgtgaggaagctcatcctacggaagcgagaagacttataaccactgcgtctcctcctccaccacctcatcccgcccacctgtgtggggctgaccaatgcaaactcaaatggtgcttcaaagggagagacccactggctctccttccttcactcttatgccaccggtcccattattcctgtggaggaaaaattctagtattttgattatttgaatcttacagcaacaaataggaattcctggccaatgagagctcttgaccagtgaatcaccagccaataagaacatcttgccaactaaaatgtgtggcaaatagaagtatatcaagcaataatctcccacccaaggcctctgtaaactgggaccaattattacctcatagggctgttgtgagggttaggatgaaatatctgtgaaagtgcctaggcaatgccagccaaataggaggcattcaataaacagtgtttgcatataaaccaaaaaataacttgttatcaataaaaacttgcatccaacatgaatttccagccaatgataatcctggccaaaggtttagttgttgttatttcctctgcattattttcttcattacaaaagaa

SEQ ID NO: 12125 - DNA, 767 bp, Macaca Fascicularis
  misc_feature (1)...(767): n = A,T,C or G
taaaatctacaaatcagccctgagtttattcaatggtaactgacaactaaaatatttccctagaaaggaagatgaaaggagtggnnnnnnnnnnnnnnnnnnnnnnnnnnnnnnnnnnnnnnnnnnnntcannnnnnnnnnnnnnnnnnnnnnnnnnnnnnnnnnnnnnnnnnnnnnnnnnnnnnnnnnnnnnnnnnnnnctaccagctttgacacagcactgttcatctggccaaacaactgtggttaaaaacacatgtaannnnnnnnnnnnnnnnnnnnnnnnnnnnnnnnnnnnnnnnnnnnnnnnnnnnnnnnnnnnnnnnnnnnnttgaaaaatatgcaacaaatatgggatgtaatctggatggccgcttctgtacttaatgtgaaatatttagatacctttttgaacacttaacagtttttttgagacaatgacttttgtaaggattggtactatcattccttatgacatgtacattgtctgtcactaatccttggattttgctgtattgtcacctaaattggtacaggtnttgatgaaatctctagtggataatcataacactcttggtcacatgtttttccttcagcttgaaaactttttttttaaaaggaaaagataccaaatgcctgctgctaccacccttttcaattgctatcttttgaaaggcaccagtatgtgttttagattgatttccctgnnnnnnnnnnnnnnnagacggtagtttcagnnnnnnatggtataagcaaaacaaataaaa

SEQ ID NO: 12126 - DNA, 710 bp, Macaca Fascicularis
  misc_feature (1)...(710): n = A,T,C or G
ttgtggtcaccagtaatggcatggcctggtgtcgggagaacattgnnacctcccacggtgatgtggtgtttgctggcgatggcannnagggttcacctgccaaagactttgcactgctcacacagtgtaaccacaccatcatgaccatcgggacgttcgggatctgggccgcctacctcgcgggcggagataccatctacctggccaattacaccctccccaactcccctttcctcaaaatctttaaaccagaggcagccttcctgccagagtggacggggatcgctgcagacctgtcccccttactcaagcactaatgctggccagtcctttgataccctttctcctcctctggctccctcaaggtgagtgccagggcatgagaagcacatggttccacgaggaggacccttctctcttctgtgaagatgctttgggctgcaagtaacagaaatctcaatgaacagtggcctggcgtggtannnnnnnnnnnnnnnnnnnnnnnnnnnnnnnnnnnnnnnnnnnnnnnnnnnnnnnnnnnnnnnnnnnnnnnnnnnnnnnnnnnnnnnnnnnnnnnnnnnnnnnnnnnnnnnnnnnnnnnnnnnnnnnnnnnnnnnnnnnnnnnnnnnnnnnnnnnnnnnnnnnnnnnnnnnnnnnnnnnnnnnnnnnnnnnnnnnnnnnnnnnnnnnnnnnnnnnnnnnnnnnnnacc

SEQ ID NO: 12127 - DNA, 751 bp, Macaca Fascicularis
  misc_feature (1)...(751): n = A,T,C or G
gcccgagtacgagttntnntggggctcccgggccannnnnnnnnnnnnnnngctgcaaatcatggagttcctggccagggtctttaagaaagacccccaggcctggccctcccgatacagagaggctctggaggaggccagagctctgcgggaggctaanncccgatgcccactgccctcgcagcagtgtctccgaggactagccaagtctggaggcagatgaatgctttctgatcctcaccagggctgtggaagggtgggggtgggtcattagagtgttcaggatttacagtgcagtattcacgtgtaacttttacgttttnnnnnnnnnnnnnnnnnnnnnnnaatgcaatgttgtattcatttgggtactattgtgtagtatttaggatgtatgcatgtttgtttatatgtaagcttggttggtgctttcgcttttgtggtacctttcttggatttttgtatcagagacgtgctaaactgatgaagtacattgagaacgtttccatcttattaatttacatgggactgagatgtgtgttggggtagactgctcttgcagagtttggaaaaactcaccagcaaagccggcctaaccaagaaatgtcaaggccctcatgaccttgctggggactgaaaacatcctcgtggagtaaactaatttgaactggactggtctnnnnnnnnnnnnnnnnnncacactttactaaacacatatacaaccccaccgtgagtcaacnaaagtaacata

SEQ ID NO: 12128 - DNA, 664 bp, Macaca Fascicularis
  misc_feature (1)...(664): n = A,T,C or G
tagccagtttccagggacccagcggcttcccaatacctgcaacttctccatccggggaccccggcttcaaggccacgaggtgcttgcgcagtnnnnnnnnnnnnnnnccagtgtgggggctgcgtgccactcggaccatggggaccagccgtccccagagatgctgaagtgcggcatccccttagacgtggccaggaacgcnnnccgcctcagcgtgggccgcagcaccaccagggccgaagtagacatcgtcgtgcaggacctgaagcaggccgtggcgcagctggagaaccaggcctagcgccggggccgccctccccgccccgcttctaggaaacccgtggcagggctcaggattgtccctccagttccctcctgagggctgggacaggaagactgtctcatgccccctctgcattctgtcctggagtgcatgcaagtgtgcacccccagtttccttccctggacccctgcagagctcacagggcccaggacaccaatgccacataggaacgcccacatagaaccgtcctccagtggtgaagtggaaacaccagcttcatccaccctccccactgggaactgggcaaacctgttggaagtgccctttcctggaaggtgtttttatcaaaaagatagaatccnnagtatttataactcattg

SEQ ID NO: 12129 - DNA, 717 bp, Macaca Fascicularis
  misc_feature (1)...(717): n = A,T,C or G
ttaatggcagacgactcccntccnntgaaatcttcacaaaagtgtgtacaagaaaagatgcacataagcatttcagaaactttaaaagaatctctaaaaagtatatacaggatttaaagccccttcctgggagcggaagctacgtgaggaatgtgtgggtcgccagcgatgccagcccccttcccactgagggtcccagactcgtggggcctcgagcggggagggctggacagcaggggacgcatccaaccctccccagaaactgcgcagaacaaaaccaccggcaagaccagacttttcaacagcgcccgcgccggggctttccctgcagaagttttaaggaaagaggtgcaggccaaggggaaaagcatcgcagctcaaggaaggtttttggctgagacatttattttcaacattgaaggataggtcgagtcattccgacccctctgaatttcaatcgactgatttgtggaaaaacatcctggcatggaattatggcggctggaggctgtgctccagggaccccccacggggtcagtgggacaggagcactcccagcccatttctcactgcttctttagaaaagcaaaaaaagtcagacttaaaatgttaaaaaaaacagctgatctggacaaaagggcagacccaggctctgacccagctacaggaaggaagtggccgcgccattgagacagaggtggtcacagacacacacag

SEQ ID NO: 12130 - DNA, 812 bp, Macaca Fascicularis
  misc_feature (1)...(812): n = A,T,C or G
acgagaacggcaactatnnnnnnctccagtgctatgggagctggatgcaccactgctgtgtcttccccaagagcacgcagctccccaagaccaaaagccgctgaggcaccaaaccaaaagagtcactggaactggaggacccgtcttctgggctgggtgtgaccaagcaggatctgggcccagtccccatgtgagagcagcagaggcggtcttccacatcttgccagccctgcacagatacagctttcttgctcccttcggcccccagcccctcccccatctcccaccctgtacctcatcccatgagaccctggtgcctggttcttcgtcacccttggaaacgaaaaaccaagtcggaacagcagataacaacacagcaaggccccgctgcccaactccatctgtcaacaggggcgtgaggtcccaggaggtggccaaaagctagacggaaccccattcctgacatcacggtagcctccaacacaaggctttgagatctgggcttatggacaaggtgggaaggcgcaggannnnnnnnnnnnnnnntccccaggctggacaggctgactgtcctttcccctctggcctttggccttggcttttctagcctatttacctgcacgctgagccactctcttccctttccccagcatcactccccaaggaagagccaagattttccacccataatcctttctgctgacccctagttccatctgctcagccaagcttgtatcagctctcagggccatggtaaaataaaaggtagtaagtagaaaaaaaaaaaaaaaaaaaaaaaaaaaaaaaaaagg

SEQ ID NO: 12131 - DNA, 731 bp, Macaca Fascicularis
  misc_feature (1)...(731): n = A,T,C or G
ggagannnngcaggagccacactctccagccctgcnnnccagtcctccatgtgaggtgcaggcactgtgccaccacctggccaccggccctggacagctgagcttccacaaaggagacatcctacgagtgctggggcaagctggaggagactggctgcgctgcagccgtggccctgactctggcctggtgcccctggcctacgtgacattgaccccaactccaagtccaacccctggaagcagccaaaactgaggccctgtgcatgctggtggcctcagggaccctcataacccccagactcagagcctgagagcccttcccaagccattggcttggctgcagagtagactgagagctggggccatgtatccctgtgctggcacctgctccctgtgctcagtattaattacgcccccttaactgcccnnnnnnnnnnnnnnnnncctccacccaggaaaggagggacaggacgcagcactgggctgccaggatttccctggcccgtctgggtcaacctttccatgggtgaagacaagcaagtccccctggaggcaggtggcctagaaagccatctacagggttccctaggccaggtggagatgaggatgggtaacagtattggggccagatccctaagccccccagctgtaaataggctatggccagtgcctggtcatcagaagagggaggaggagcccagacgtctgtttatgtatttatttatttattt

SEQ ID NO: 12132 - DNA, 922 bp, Macaca Fascicularis
  misc_feature (1)...(922): n = A,T,C or G
gcaggcaaannnnntcccggccnnnnnggtacacttcggagccaaggagccggcaggtgagtgtcagtggttggggccggtgttggagcccagccagcctgtctctggacctcagnnnnnnnnnnnnngaagggcgttcagtctggggcctcctttgggtctgagagggagctctgcggccccaataaccacctccccgagagagggctgggacagccacctgctggccactgccctcccagagccgagtgccgatgggcagatgctgggcagatgctgggcggatggcggatggcggatgggccccccccccagaggctcagggtgagcttgggcctccctgcaggtgtctacctggagcctggcctgctggcgcacgccatctccccatctnnnnnnnnnnnnnnnnnnnnnnnnnnnnnnnnnnnnnnnnnnnnnnnnnnnnnnnnnnnnnnnntcaccagcctgcatcttcgtctccccctaggtgcatgtccagggtcgctgggtccccttccccattgccagcccctgaccctgcacatgagtctgaaccaactgctgaggagggggcactgggcccccctgagcccatcccagggacggcccagcctgtgaagaggagcctgggcaaggtgcccaagtggctgaagcttccgggtactgcggccgggtggaaggcagggtgcggtgcccactctgccacccacagggaccacctcccctggcagggccattgggctgaagggctaggtgctgtggccggcagnnnnnnnnnnnncagctgggcgggtgggcgggtggctgggcagcaggagcccagggcctgtggtcaccctggtgtgtttgcactacagccagcaagaggtgagagccaccagcccaaggtgcccactctgccacccacaggaccacctcccct

SEQ ID NO: 12133 - DNA, 632 bp, Macaca Fascicularis
tttttctaaggtgatctatgagtcttatttacctaagcttatctgcatgatagtaaaaattgcatacaacaataagagtgaagcttatagtatgaattgcttggataacatagagcactttttataggcaactgtgtaaagcacattttctctatttaaaacttttaagacactttgttttactgcccatcaaaatacatttataaatagaaaagaatctgtatggtaacaagagaagcaatattacatttaacggaaacgtccaaaaaattaattacaaagtgatgctgcaggatctacaaataaataatgaggactaaattgtgtttcacattttcttttccttctattaaaaaaatcatgtaacaatgagaatgaaaaaaaattacagtgaacttttatttccaaaataaaaacaaatttgaattataggcagtgccatataatacaaggcatttgttggcatatgtcatctttaaactgcattccacagtctatagttcttttgtaacatacaatagagtaacaaactcttttttctcttttttttttttaaataaggggcgagtttccaaagatcagtgtggagtgctacagaaataattataggagaggaaatcataatcacagaa

SEQ ID NO: 12134 - DNA, 711 bp, Macaca Fascicularis
  misc_feature (1)...(711): n = A,T,C or G
gtatancagaaattgatgacttggatgccattgtacctgcagtaaagaaattaaaagtactttcatactgaaaacaaatcaaatcatttttactgtgtaaattgtattcttaacattttgtattttgtaggattgatcttattttgagacaagggttgtaaaatgtatttgctctcagaattcatccccttcttagtattaggtcattcttcatctctataatttttattaactttgagttcttatacagaaaatagttgcaagggtaaagtagttaattaactttagatctcttcatttattaagcaattattgagtgcttaaaatttaaggttgttttagagtggagtttgtgagtaaaagaggaggccagggagacagattacaggtagtaggttgcaatcttttagattcaggttgtagtaatctttgagccacgacaaaaggaatgccaagagctctctaaatttaggtagtaggaagctactgctctcctggcaaggattaattggcacattctgttaagatacccctcatgggtatctttcaaataggaagaagcaggaagaagaaaaggaagaaagaaaaactgtttaatcatttctgttagggtaggaaatgaatcatagggtaaaatggatgagtagaaagtctctcatttaaaaagtgtcttttgcaatcttgatgtaatgcactttttataaggacttg

SEQ ID NO: 12135 - DNA, 441 bp, Macaca Fascicularis
ggcatggctttatttgttttttttgatttgttctggtttttttttttggcttgactcaggatttaaaaactggaacggcgaaggtgacagcagtcggttggagcgagcatcccccaaagttgtacaatgtggccgaggactttgattgtacattgttcttttttttaatagtcattccaaatatgagatgcacttgttacaggaagtcccttgccctcctaaaagccaccccacttctctctaaggagaatggcccagtcctctcccgagtccacacaggggaggtgatagcattgctttagtgtaaattatgtaatgcaaaatttttttaatcttcgccttaatacttttttattttgtacccacatccaataaccaccactcatgccccagccctcgtccagtcctcctaggagcagcacccaatgaagcgggcggcgg

SEQ ID NO: 12136 - DNA, 742 bp, Macaca Fascicularis
cccacatggcccacagctcctgtgctggccaggctcccagaaaattatctattttttaagtaacgacttccccctttggggaaccccaaaatttggaggccccattctaggactctggggatcccaaaccctagagtacacacatcccaaactcccctgtgccctcaagtcctacagcccctagaagaccccaatgccctaactcctaggaccaccgaatcatggaatccccaaatccccagggaatcccaaatttgaaaatccaattccaagccaccaggaaacccaatcatgaggtcgctgtgcctggtatggaggagactgcagtcaggatatgcattccaggctcccaggcacctcaagccctattgacaggcaccaggaaaccccacacaggaattcccatccctggaaactggagaatttcaatgccctgagtccacggatttcaagacaccaaattccaagatccccagccctaaggggaccccaaatcctaaagcctccatctctagtaaatggaaggccccaaggccctgaggggatcccaaatcctggaaccccgatttcaacctacgttctagtcactggcctcaaaggaccccacagcacctgggcccgaccaacagcccgagggagaacctgaaggcccagggagtccagggcagacctggggccccaaccaccaaggacagctcacgactgccccttcactgcatgtccccaaactcagcatgactcc

SEQ ID NO: 12137 - DNA, 551 bp, Macaca Fascicularis
ctgactcttccggggcgcctggtgcaaccgtgggcaaattactgtccctctttatggttattgaaacatttattagaaggagagggcaggcgcagagctggagaaccatggtcgaggcagcttgtgatctgcctagcagccgctgacctcctcgccagcagaagcccagtcctgttcagagcagcaatgtcactgcaagtccatacccctttgccaggggttccattccaccccttttctgcagggagaggtgccatgaggcttgcttctggcttatacaggacagaggtaaggctgctgggcactgcttgtgttcctgctgataaaaggagggagtcactccaggaataagacaaaacgagaggaggaggccgtcacctctgtcctcttccatcgtacacttcctgcctctggtttaagcatgatgcatggagctacaacagccattttaggcccatgaggtaaaacatcgacatgctaagaacaaaaagagcccgatccctgatgttattgaactcctgcggaactcagcctgcctccctcagatttct

SEQ ID NO: 12138 - DNA, 732 bp, Macaca Fascicularis
  misc_feature (1)...(732): n = A,T,C or G
tgggatggaacagtgggtgcccttggagagttggtggaagaaaatgtttgagatagatagacagcttgactgctagcctgaggggctgaaggtaggtcagagggattaggactgggagaatgtggaggaggaggccttnnnnnnnnnnnnnnnnnnnnnnnctgcacagacagatgcaatggtgtgtgcacgtgtctgaagagcccatgctggggagggagtgccagaggttgtgcgggcgggtcatggtgtcaccttttgcagctgtgggagctgagtctccaggaagggcagggaaggatcctaggctcagtgtaggtacgaatgccgccttctgtggtgaccactgtcccctcacccnnnnnnnnnnnnnnnnnnnnnnncctttggggaagacggcgagggtgacgacctggacctatggacagtgcgctgctctggacagcactgggagcgtgaggctgctgtgcgcttccagcacgtgggcacctttnnnnnnnnnnnnnnnnnnnnnnnnnnnnnnnnnagccccatccgtgggcagcatgaggtccacggcatgcccagtgccaacacgcacaatacatggaaggccatggaaggcatcttcatcaagcctagtgtggagccctctgcaggtcacgatgaactctgagtgtgggatggatgaatgggtggatagaaggtggggtgtctgcgggcccactctggcagagactttgggtttgtagg

SEQ ID NO: 12139 - DNA, 771 bp, Macaca Fascicularis
  misc_feature (1)...(771): n = A,T,C or G
atcctataagcagtctttaagnnncttaacattcacannnactttttaaaaacaaatattattactatttttattattatttgtcctttataaattttcttaaagattaagaaaatttaagaccccatttgagttactgtaatgcaattcaactttgagttatcgtttaaatacgtcttgtatagttcatattcatggctgaaacttgaccannnnnnnnnnnnnnntatggttttcacctggacactgtgtagaatgcttgattacttgtactcttcttatgctaatatgctctgggctggagaaatgatatcctcannnnnnnnnnnnnnnnnatttaagtggcttgacaactgggccaccaaagaacttgaacttcaccttttaagaattgagctgttctggaacacattgctgcactttggaaagtcaaaatccagtgccagtggcaccctttccatagagagtttgcccagctttgctttaacatatgtcttgttttttatatacatatagtcaataggtccaatctgctctcaaggccttggtcttggtgggattccttcaccaattactttaattaaannnnnnnnnagctataagaacccttgtctgatatatttgcaactatgctcccatttacaaatgtaccttctaatgctcagttgccagattccaatgcagaggtggcgtggactccctttttgtgggcggggttcgtgggtagtggtgaaggaccgatatcagaaaaatgccttcaagtgtactaat

SEQ ID NO: 12140 - DNA, 667 bp, Macaca Fascicularis
tagcttggaatagcttgtacacatatacatatgatcaaatactcctgcccatggcccatttccttttgttattgttgttgctgttgctgttgttgttaattttaagaatttcaatatcaagacctgactggcaccacactttgggtattcaatttgattatatgactgaagtactggaattcattatatggctcaagtactctatttattaagaactatatttaataccaccaacaaatataggggttaaggaaaaagacatgagctatatgtgtaagaaggctctgcatgtgtatgagtcctattctgggcaaatagattcttaaggtggctttcaacttcaagatgaaggcacttaataacggttactcattttatcaggggaatttcagggaacataggcttcaaagagccagtttatctttagcagatattaaaaattgaaaactttgaagaactcatttcaagctatgattcggtgcattttcaacattgatttttgatagactgaagtgccagatcaaaattgttacccatttgaaagaatattagttgtatataaaattagattagaaagactttctaaatctctctctctttatatatgtcctattcattcacaatggattatacacaaaaaatgtattgcaaggaaataatattgatt

SEQ ID NO: 12141 - DNA, 785 bp, Macaca Fascicularis
  misc_feature (1)...(785): n = A,T,C or G
gagacagagctnnnnnnnnnnnnnnnnnnnnnnnnnnnnnnnnnnnnnnnnnnnnnnnnngtgctgaccagnnnnctttggtggatgcactggtggtacctgtaggtggaggaggannnnnnnnnnnnnnnnnnnnnnnnnnnnnnnnnnnnnnnnnnnnnnnnnnnnnnnnnnnnnnnnnnnnnnnnnnnnnnnnnnnnnnnnnnnnnnnnnnnnnnnnnnnnnnnnnnnnnnnnnnnnnnnnnnnnnnnnnnnnnnnnnnnnnnnnnnnnnnnnnnnnnnnnnnnnnnnnnnnnnnnnnnnnnnnnnnnnnnnnnnnnnnnnnnntcttcactgttacagaagannnnnnnnnnnnnnnaacccagctggtgtgggagaggatgaaactactcattgaacctacagctggtgttggagtggctgctgtgctgtctcaacattttcaaactgtttccccagaagtaaagaacatttgtattgtgcttagtggtggaaatgtagacttaacctcctccatannnnnnnnnnnnnnnnnnnnaagnnnnnnnnnnnnnnnnntttctgtttaatttacagaaaaggaaatggtgggattcagtgtctttagatannnnnnnnnnnnnnnnnnntagtcagtcaactcttagttatcagattcttaatggagtggttatttcattaagatttaatagtttttttggactaagtagtagaaaaactttcatacttaactgagacattttgtcaaggctaaaaaaaagtcttgcaaaatggggcagcag

SEQ ID NO: 12142 - DNA, 985 bp, Macaca Fascicularis
  misc_feature (1)...(985): n = A,T,C or G
ctcccataccagaggcatgannnnagtgtgaatatccccgacagnnnnnnnaccattttctccgtnnnnnnnnnnnnnnnntccgcggtatattactgcaactatcctgacgtgtgacaggtccccgatccgccccagcctgcaggccagaagcagtgttacacacttcctggaggagcgaaggaaatcctcagactcctgggttattgttgttgctgttgatgttgttttttaaaaggtgtcttggcatataatttatgctaatttattttgtctgccacttgaacagtttggggaggggtgaggtttcatttaaaatttgttcagagatttgtttcccgtagttgcattgtcaaaaaccctatttccaagttcaagttaactagctttgaatgtgtcccaaaacagcttcctccatttcctgaaagtttattgatcaaagaaatgttgtcccgggtgtgttttttctatcttctaaaaaataaaatctggaatcctgttttttcgttctactagtacctctgtcacactagttttatcaaaacccaatttttaagatcaatgttaagtctattagtgaatgtaaatttctcatcctcttgaaaagggtgaacataatttaaggactatatctaaaaataaacattaggatatctaagtttgatgtaattgtttcgggaaggaaaaaagaaaagcattctggaatgagcctacttcatttcaagtaatcttagtttttaaaacgaacggttaattaatattttcannnnnnnnnnnnnnnnnnaagtagaaggggatgtccaagtaattttggttttctaactgttgaatcataagcttgaccggcccacagaggcttttcggatgtttgtatctgtgttctgccatctctttacactcctccgacattcagtttacctaaatcttcacatttttacaccttgnnnnnnnnnnnnnnnnnnnnnnnnnnnnaggagtcacagaa

SEQ ID NO: 12143 - DNA, 828 bp, Macaca Fascicularis
  misc_feature (1)...(828): n = A,T,C or G
atgctattcctcnnnnnttcccgctttttttgggcatgggatgatattgcttttgtaatgaaacaagtttgtgtcgtatttgtaaatgtttacgtagtagcgagtactggggagacccacacacaagtcccagcccacacgtcccaggtnnnnnnnnnnnnnnnnnnnnnnnnnnnnnnnnnnnnnnnnnnnnnnnnnnnnnnnnnnnnnnnnnnnnnnnnnnnnctcccgagcctccatttcttccgttgcccgtgagtctgagggcagaggatggctcaggtgcctgctgcctgtcctagcaaggcctggggccgctgtaggcttgagcacgtggtccacagtgactgcccactgtggttctcggcccattagacccctgaagcctcagccttcccaggccagcccctccctgtccttcactgttggccccaggtgcacccctgcagcnnnnnnnnnnnnnnnnnnnnnnnnnnnnnnnnnnnnnnnnnnnnnnnnnnnnnnnnnnnnnnnnnnnnnnnnnnnnnnnnnnnnnnnnnnnnnnnnnnnnnnnnnnnnnnnnnnnnnnnnnnnnnnnnncgtgtgcaactgggcagtcatggtaagtggctggtatgcaggcagccatctctgtgccggggccgcagccacccacctggggccccaggatgaaccgtggccagcacagggcgggggtaggggctcttccctgcctccgtcagtggtaaggccctggtgcctcagagcacacgtggtggtgtccaggattcagggagctggagccgagcgactcggggacnngacaacactgtgccaggcagccgcagt

SEQ ID NO: 12144 - DNA, 718 bp, Macaca Fascicularis
  misc_feature (1)...(718): n = A,T,C or G
gcagnnnnncacactgcagctactgtcacagaggggctaccgggccgtggcccttgaccttccagtagagacagtttctccatgttctccaggctggtctcgaactcctgacctcaggggatccgcctgcctcggcctcccaaagagctgggattacaggggttttgggaactcggcaccttcaaaggaggcaagcacagaggcagggcgggcagcattnnnnnnnnnnnnnnnnnnnnnnnnnnnnnnnnnnnnnnnnnnnnnnnnnnnnnnnnnnnnnagtggccactatgccctgcccttcctgatgcgaggccaccaccagctacatggattcgtgcccattgcacccacctccacccagaactacacccaggaacaattctgggctgtgaagactccaacccttatcctgtatggagagctggaccacatcctggctcgagagtcactgcggcagctccgccacctgcccaaccnnnnnnnnnnnnnnnnnnnnnnnnnnnnnnnnnnnnnnnnnnnnnnnnnnncgcaagacttccaccttgtcctgcttgccttccttgaccatctaccttgaactaacccactcccaggtcccgacctggccnnnnnnnngacagtctggaccaccaccctcccctgaccagggagacaacctnnnnnnnnnnnggccagaggccagagggtcagacccagccaggacttctcatttcat

SEQ ID NO: 12145 - DNA, 731 bp, Macaca Fascicularis
  misc_feature (1)...(731): n = A,T,C or G
acttcacatggggattgaggggctcagacagttaacaggtgcagggggagttagggagctggtatgcttctggggctatcattgcaatnnngctgcttgaccttgctggaatcctcaacatggaaacaagattcctcannnnnnnnnnnnnnnnnnnnnnnntgggcagagaggtagccttcgagctnnncntggccacagctctgtcatnnnnnnnnnnnnnnnnnncgttttgcattgcatagaagcataaatctctaggcctctcttagaggattattctgggaatggaaaggttacaaaaacacttggtcaaagtgaagctcgatgaacgagctgaataatcaccctcactctgcaatccacagctgcagaatgatggagcagccgcagaccaactgtctgcccttccttccctagaaatacacaacctccagcccagagtcagataaccccattctcttccagcatttcctctctgtagccttgtggaaaatgtcatcagttggactgatgccatctagcttaaaagcagctggacataatttcacagctaagaaaagcctcatctcttcaacagatcgttaaaacgtattgcagagacatcggacttttgaacagccagttggagaaaattgaaagtgggtctactgattttcaccaaaatgttgacttggttcttcccaggaaacgtatgtgcttgggcacttatttttgtgccctcgcttttt

SEQ ID NO: 12146 - DNA, 679 bp, Macaca Fascicularis
  misc_feature (1)...(679): n = A,T,C or G
gacccagctgaagatcgcccagcgccttcgactggaccagcccaagctcgatgaggtcacacgacgcatcaagcaggggagccccaatggctatgcggtcctcttagccacccaggcaacccccattgggctaggcactgaggggatgnnnnnnnnnnnnnnnnnnnnnnnnnnnnnnnnnnncaggaacctggtctcctacnnnnnnnnnnnnnnnnnnnnnnnnnnnnnnnnnnnnncagtgggggggtccaagggcagagatggcacaggcatgctatacgccttcccaccctgcgacttttccnnnnnnnnnnnnnnnncagcactaaggacattgggcaaactagaagaagaacacannnnnnnnnnnnnnnnnnnnnnnnnnncctagcccaagcctgtctttcccggcgtcatgtttgtgtcacaaaagcagttattttaaaaatctgatcccctgtctaccttaccactttggtttgaannnnnnnnnnnnnnnntttggttcatttgggtggggatcaaagtcctgtccagcaccaaaactaagttcttagaatttgggggaatttttttttttttttttaacaatgatgagaagggaatccggttatgttgatttctagtgtacaagatactgnnngctgtggttctgtatttttttattttttgacca

SEQ ID NO: 12147 - DNA, 598 bp, Macaca Fascicularis
cacacacacacatagttggtatcatgatgtgtatggttttgtatcttgcttgttttgtttaattctctatcatgcccatcacgaacatttcttcgtgtcattaaaattcttcaaagtcttcattcttaatgattgcagaatcacagtggatattaataaacttgctggcttgtgtgcggtctgccctatataccctggagcacatctaactccttcctctgaacagtgaaaatgtgtccttggaccccagggcagcagaggccaggcaaccctagcccacgcaatgggcagcaccgtcggcctgctcgtggctctgggccaagcacacagatctccaggcatgcctaaacccctccgtgcctcatttccctcacgtgtaaggtgaatatcctctcacctgtctccaagggctttggtgaaattaaatgaagcacctgagacctactattactcacgcctatctgtgctcctatccatgtctgttttatttcacaccctgccttgaaatgcttttcactgcctctctgacagtatttcccacaccatgatgcctgtttgttggaactgtctggagatctttaaaagctgctgatgcccc

SEQ ID NO: 12148 - DNA, 739 bp, Macaca Fascicularis
  misc_feature (1)...(739): n = A,T,C or G
ttctctatttgcatagnnnnnnccagaaannnnnnnnnnnnatttgtagaggacctttttggggtcctgtatgagccatgtcctcaaagcttttatacctccttgctctcctacaatattcagtacatgaccactgtcatcctagaaggnnnnnnnnnnnnnnnnnnnnnnnnnatctgtcccacaaagnnnnngtccatcttctctcccaggttgtgaaagttttcaaattgtacaagtaggctggggccctgacttggctgtgggctttgggaggggtaagctgctttctagatctctccctgcgaggcacggaggtgtttctgaattttgtctacctcacagggatgttatgaggcttgaaaaggtcaaaaaaatgaaggccccttgggttctttgtaagaaaggttgattaaatatnnnnnnnnnnnnnnnnnnnnnnnnnnnnnnnntccccctgctctgtgcagctgttgggctggatgctctgtggcctttcttggatcctcatgccaccccacagctccaggaaccttgaagccaatctgggggactttcagatgtttgacaaannnnnnnncaggcaaacttcctgctacacatgccctgaatgaattgctaaatttcaaaggaaatggaccctgctttnnnnnnnnnnnnnnnnnnnnnnnnnnncgatgtctgtactgtaaatttctaatttatcactgtacaaagaaaaccccttgctatttaattt

SEQ ID NO: 12149 - DNA, 744 bp, Macaca Fascicularis
  misc_feature (1)...(744): n = A,T,C or G
ggccagctgtnnnnnagagagatgtggagcgttattcagacaaataccagatgtcaggtccgattgacaatgccatcgattggaaccctgattggcggcgtctaccccgggagctaaagatccgagtgcggaagctacagaaggaacggattacaattctgctccccaagaggccccctaagaccacagaagataaggaggaaacaatacagaaactagagaccctggagaagaaggaagaagaagtaacttcagaggaggatgaggagaaggaagaagaagaagagaaggaagaggaggaagaagaagagtatgatgaagaagaacatgaagaggaaactgattacatcatgtcatattttgacaatggagaggactttgggggtgacagtgatgacaatatggacgaggctatatactgaagaacgtctctggacccttgtgtctttcttgaggctacagagagtaactgtccctgttatttgtttttttggacaagcaaatcatttggtcagagttcacataacctctctggtccctggagatgggaatggaggatgatgacagtttattttctacgcttcccctccttccacgtttgtatcacctctgctatctgaagggagaaaggagaattgaaagaagaactggggttgttagagctgagataactgtacacgtacccctgcccaatttgtatagctctttgtggagataattaaggatgggagcagttgaaggacc

SEQ ID NO: 12150 - DNA, 693 bp, Macaca Fascicularis
  misc_feature (1)...(693): n = A,T,C or G
cctgtctgagaaactctctgaacaagaattacagtttcgtcgtctcagtcaagagcaagttgacagctttactctggnnnnnnnnnnnnnnnnnnnnnnnnnnnnnnnnnnnnnnnnnnnnnnnnnnngtaagcataagctatgttatcttacagataatttctctcagcataatttattaaaataattttatagcgaaaatggggtacatgtattgacatcaggacataaaaatactaatcactctacttnnnnnnnnnnnnnnnnnnnnnnnnnnnnnnnnnnnnnnnnnnnnnnnnnnnnnnnnnnnnnnnnnnnnnnnnnnnnnnnnnnnnnnnnnnnnnnnnnnnnnnnnnnnnnnnnnnnnnnnnnnnnnnnnnnnnnnnnnnnnnnnngctaggggtcagtgtggtcccatgcttgccttctgcaggcttggtgggttatctggaggaagtgatttgccaagtccaactaccaaatggacagtatttatgctgaggcctccnnnnnnnnnnnnnnnagaaatgtcctgacaatgagggtgttaataactgtttttaggttttttaggatgttgtggaatctttttttgttacataacaataaaaataaattcaatactcatggaatttcaagatccagtagtctgttaagttcatttgaagtctcccatttctttttttttttttg

SEQ ID NO: 12151 - DNA, 745 bp, Macaca Fascicularis
  misc_feature (1)...(745): n = A,T,C or G
gtcacctatagtattctttgtttactgtagattcactacagtattattcactccaagattattgtcagcagtcttttaattaggaattttatcttagtatcagtcaaacagaagatgcagaatactcataaatgtaaacatgaggattgctggaaagaataagacatgaacagatggcagcgttgtctttaacactatatggattagattttgaggattaataccagaattaccggaaatatatctaacctatttattatattcacttctagttggagtttgagcaagtaaatatgcattgtaatacaaacatttccttttaaaactcttcaacaggactctgacttaaagaaaacagtggatgaaagtgcacggattcagagagcatacaaccactattttgatttgatcatcataaatgacaatctagacaaagcctttgaaaaactacaaactgccatagagaaactgagaatggaaccgcagtgggtcccaatcagctgggtttactgatgattcagtaaggttaacaatgaaaattaaactttaaaaaagtgactgcaacaattaaaccttctactgagaaaatacatcacagttagaagatcatctgccaagtccgggcgtttttatggtgtagattgaaataacagtacactgttctgaatttttatataaattgtggttgggaagngtgtactaatatatanatttatcttaatttttctaactttgtatggataat

SEQ ID NO: 12152 - DNA, 745 bp, Macaca Fascicularis
  misc_feature (1)...(745): n = A,T,C or G
gactcttctgtgatgtgtataatcctcagagcaaaacatactgtaagcggctccaggtgctgtgccccgagcactcacgggaccccaaagtaaggttttccctcagctcctcccattttgcccctcctccctgcctcactgtcccacattcatccctgcctccctcacctcacctttccttcactttttcctctcaccttccctgctgcttcaccctccattcctcccttttccatgcctcctcaccgttccctgaaccctccattccttcccttctccctccttgagcccccattcttattctcccttatcaccattattcatccctccaacccggcctccctgcaggtgccagctgacgaggtatgcgggtgcccccttgtacgtgatgtctttgagctcacgggtgacttctgccgcctgcccaaacgccagtgcaatcgccattactgctgggagaagctgcggcgtgcggaagtgnnnnnnnnnnnnnnnnnnnnnnnnnnnnnngctgtggtttcatggtgcatgtggtaggtttccatgccggacgtggccgagggcaggnnnnnnnnnnnnnnnnnnnnnnnnnnnnnnnnnnnnnnnnnnnnnnnnnnnnnnnnnnnnnnnnnnnnnnnnnnnnnnnnnnnnnnnnnnnnnnnnnnnnnnnnnnnnnnngcgggnnnnnnnnnnnnnnnnnnnnnnnnnnnnnnnnnnnannnnnnnnnnnnnnnnnnnnnnnnnt

SEQ ID NO: 12153 - DNA, 747 bp, Macaca Fascicularis
  misc_feature (1)...(747): n = A,T,C or G
atgannnnnnnnnnnnnnnnnnnnnnnnnnnnnnnnnnnnnnnnnnnnnnnnnncctttaccaccgtggtgacannnaaggggacttccttacaacagcttgaactctccagaacacagtttgaaaaccactgccccagacagcaatatgtttgacctgaatggcattccaatcttttctgtannnnnnnnnnnnnnnnnnnnnnnnnnnnnnnnnnnnnnnnnnnnnagaaatactgtgtgtgaacttagaaaagtgcaagaagacaggcatgtctttgaccccaggaatgatcatgggctgaaagtggtgtcaagtgaacctagattaacagccctccactccagatggatatccagtgattcctagaatgggatatagccagagaacaattctatgcaccctnnnnnnnnnnnnnnnnnnnnncaacttctttcacaaacaccagatgctctactggtacttgaagtacatgactttgaagtcttgaccctccatgnnnnnnnnnnnnnnnnnnnnnnnnnnnntgaagctggtgcctcattgagggcatattagagcaacttgtacatttgacctcttgttgtcannnnnnnnnnnnnnttcgtgtacaagncgataactatgaaagcnnnnnnnnnnnnnnnnnnnnnnnnnnnnnaggggctcaatatctatcatcatcttttccaaactacacatcactgtatgactcaaccagtagcagttatattgccccttggtctt

SEQ ID NO: 12154 - DNA, 939 bp, Macaca Fascicularis
  misc_feature (1)...(939): n = A,T,C or G
gacacaagaatcaaagnnnnngacaagctccgtacctgttnnncggccaccgtggcttggctaggcactcaggaaaggaataagttttgcatctacaaaaaagaagtggatgataactacaatgaagaccagaagagaagagannnnnnnnnnnnnnnnggaccagatatcaggaagaagtcagaaaaggtcctctgtaaatatttccatagtcaaaacctgcagaaagcagtgaccacagaaacaattaaaggtcttcagcctggcagatcttnnnngctggatgnnnatgtcataggacatggggggcactctgtaaagtatcagagtaaggttgtgaaaactagaaagttctgttagttaccttatgatagagatatattatgtagaactccaggagggacattaaatcactttaagtataaactgactactcccacagctgagagaagttgtgacctgtacttgtactatggaaggaaggatatcaacgtgtgtatattgatgtttatataagtaactcttgaaggagacttgttctagcgtgccccatggtacatagtgtatgtcttacgccggttggtgtcaaagatagaggacttcttaaaggaacttgccattccttgctttgaccactgcatgaactgcttctaaattattttattacctaaaaatttaaaatatgccattcattgcacacacccacaaatgcaaatcattcctctctatagatgctaggatatatataaattattttataaattcttgttttaaatgtcagtgtttctatgattgtaaactattcttttcctattacagatctaatctaagtattattaagtggatagccctctagtcagttatattgctattgtaaattcttgtttgttgagtaaaatgtttaaatactatatctcatgtacaaagttgacatacatt

SEQ ID NO: 12155 - DNA, 733 bp, Macaca Fascicularis
  misc_feature (1)...(733): n = A,T,C or G
gccannnnnnnnntacagccaaaactgggcacagctgacaagcagaagcccctggctctcaacaacaggaaagcgttccacaacttcaactacttccttttcttctacaacgtgctactgggcctgggnnnnnnnnnnnnnnnnnnnnnnnnnnnnnnnnnnnnnnnnnnnnnnnnnnnnnnnnnnnnnnnnnnnnnnnnnnnnnnnnnnnnnnnnnnnnnnnnnnnnannnnnnnnnnnnnnnnnnnnnnnnnnnnnnnngtggaccattatcacaccaaccctgtgctcgtcagcttttgccacatcctgatcgcaaatcacaaggagaagaaactgcagcagaccaccaaatactggtgcctnnnnnnnnnnnnnnnnnnnnnnnnnnnnnnnnnnnnnnnnnnnnnnnnnnnnnnnnnnnnnnnnnnnnnnnnnnnnnnnnnnnnnnnnntacacagaaaattaaaatcagggcacagttcccaggaatcccaaattctgnnnnnnnnnnnnnnnnnnnnnnnntggcccccatcatctgctccaaagccaggctagtacatctgccaccaagagagggctcaatctaaccagnnnnnnnnnnnnnnnnnnnnnnnnnnnnnnnnnnnnnnnnnnnngcagatggcagacaatattggccactcatgggatggccacctgggctgaggaatgaagtctcaggactatttcactccctggcaaaaaagat

SEQ ID NO: 12156 - DNA, 684 bp, Macaca Fascicularis
  misc_feature (1)...(684): n = A,T,C or G
tgacaaagtgtgccaaccaacacgacaggtgctatgagacctgtggcaaaagcaagaatgactgtgatgaggaattccaatattgcctctccaagatctgccgagatgtacagaaaacactaggacttacnnnnnnnnnnnnngcatgtgaaacaacagtggaactcttgtttgacagtgttatacatttgggttgtaaaccatatctggacagccaacgagctgcatgcaggtgtcattatgaagaaaaaaccgatctttaaaggagatgctgannnnnnnnnnnnnnngaagatggaagaacataacctttgacaaataattaatgtttttacaacataaaactgtcttatttttgtgaaaggattattttgagaccctacaataatttatatcttgatgttaaaacctcaaagaaaaaaaagtgagggagataggggagggcacacttgtcttctcaggtatcttctccggcattgcttcctaacttattatgccaaacgtcttgaccaatatcaaaaacaagtgcttgttaagcggagaatatttgaaaagaagaatataaactcaattttcacaaccgtatttaccaaaaagatcaaatataaaattcataaggtctatgcaacattatcttatttggaaatatggggaaattattacttaaatacacatttatgccta

SEQ ID NO: 12157 - DNA, 814 bp, Macaca Fascicularis
  misc_feature (1)...(814): n = A,T,C or G
gggaggccccgagccgagaggaggtcccggcgagtggaggctgagcggccacacagcctcattggggtcatccgagagactgtcctgtgaaccctggaagacagaaggccactccaagggaaaggatccacgtcctnnctgcnnnnnnnnnnnnnnnnnnnnggtccccctcaaaaaaaggagcactctggaggacacgttttcccacctgttggctcccgtgtctgctgaccgaggacattcaggagtaaatgcacaggtcggtccaggcccgtctgggtttgnnnnnnnnnnnnnnngaggttacgaaagcgttgatcctctccttcccctgctgggcctcgcggcattcccaagggtcacatgccctggcacgnnnnnnnnnnnnnnnnnnnnttctttgcccgcctcacccctcgcgtctctctttgttgctaagttctttccctcttggaannnnnnnnnnnnnnnnnnnnnnnnnnnnnnnnnnnnnnnnnnnnnnnnnnnnnnngaattggcaggaaataaggcgattaaccctgtgtgtccacaagcctcannnnnnnnnnnnnnnnnnnnnnnnatcacactttctttaggcaaaaccagaaactttttaagtgacaaattttaatgccagacatttaaggagaggattattgttgattccatttactcatgcttgcaaaactagacacccctaaggcagaactgagaataaaaatgtttactttgggccactgggcttgatgtgtaatatttgnnnnnnnnnnnnnnnncaggccttaccgtacagagggctgggannntggaa

SEQ ID NO: 12158 - DNA, 885 bp, Macaca Fascicularis
  misc_feature (1)...(885): n = A,T,C or G
cagtacttcaagttcatgacatagttgaaggaggataattcatttttttcttggttgtcactgtcttnnnnnnnnnnnnnnntgggttcatactgtgaaataaactaaagtgaaaccnnnnnnnnnntgccataaacacgtggcacagcaccgtggaaaaagcaaagccacctctattcgtgagtccccaagccatagcaggccactccatcatctataaagggaaggaaactgcgcctgggaagtggtgggcttcagacgcgtccttttgcccgcagttcatgaaacagttccagctttggccttccagaaaatctcaacttcaccgtgcacaagtattacccggtctttttagtgtagccatggaagatactttcaaaaggagatcttcagatcataattcttagggaccaaaggtgtttttaatgagataatctttttgattttctaacaagaaaggaaatattcactttaaattttaacatcaacttttaaaggatactcagaattaattgaccatggcgataggttgtaaaatgttttcatattaagaatgtaattatttccttattgtattttttaaaagctaaagtcatatttaaaattctctttgaaagaaacaggcaaagaaacagcaaagatttttttaaattaaatatgttggtagtgcccattttaaatgactgtaaatatattttcactgtttctcaatgtatttaattcataaagtaaaaattttatgaaaagcaacttgcaaggaaaatcctagttttcagtccactcgccccattttgtagtagcttcactgaatttcctgctttcctggttgatttttctactgtttcacgtggtgtaaccctagactggcgcccttggcgtgcacct

SEQ ID NO: 12159 - DNA, 777 bp, Macaca Fascicularis
  misc_feature (1)...(777): n = A,T,C or G
tatcatttatttatccacgcatcaaggtgggggtcatnnnnnnnnnnnnnnnnnnncctccactctaaatgaagaaaagttcaatgaagcaaacacgtgacataaagtcaaataagaattgctactgtgaataagagtcaggtattgccacaaagcatacctgtgagaatctgaaccagtcagggannnnnnnnnnnnnaaagctttgattttgggggaagaagagaattaaaccaaagtcagatatctgggcctgcgaagtagaggagaggcatggggtgggcttctgnnnnnnnnnnnnnnnacttgttttccttttcacagtggatatgacctnnnnnnnnnnnnnnnnnnnnnnnnnnnnnnnnnnnnnnnnnnnnnnnnnnagcgtccaaagtgggcacatcagacacaattggcaagaccgtgcnnnnnnnnnnnnnnnnnnnatttgtgtcctgggctcccctcgctttacctgtggccgccactactgggaggtggacgtgggaacaagcacagaatgggacctgggagtctgcagagaatctgttcaccgcaaagggaggatccagctgaccacagagcgtggattctggactgtgagtttgnnnnnnnnnnnnnnnnnnnnnnnnnnnnnnnnnnnnnnnnnnntcctcttcgtagatggcaagctacagcgagtggggatttttctggatatgggcatgcagaatgtttccttttttgatgctgannnnngttcccatgtctatacatnnnnnnnnnnnnctgttg

SEQ ID NO: 12160 - DNA, 738 bp, Macaca Fascicularis
  misc_feature (1)...(738): n = A,T,C or G
gggcacatagtgagatcccgtctgtaccaaagaattagaaatattagctggttttggtggcatgcatctgtagtcccagctactcaggaggctgatgtgggaggatcnnnnnnnnnnnnnnngtcgaggctgcagtgagctgtcatcgcatcactgcaaagaggcgataaaggcctagcactggtaagaccctagcacgtgctcaccctcatcaggcagagctgacagaggctcagcagacactaacacactaacactgcttggctgatgcccctctcctcttcccccacagaggccagaccctgagctcttcgaccccagcagctgtcccggaaaatggctgagtgagccagactggaccctggagggcgtcgggggcccacgggctcgggggctcccaccccgccgctcccaccagtatggtccgccccggggggccaccattttcctccagcatgtcaccgggcaccnnnnnnnnnnnnnccacccctgcccatcactgagggctgcgctagctgatctggcatcccctcccaacctgaagnnnnnnnnnnngccatctcccgaacccacaaattattcttacagaaagatagttatctggaaattcccattccccgtctgcggtgcggtgcgtgcctgcacacttctcttaaacacagcagagctttggagtctggcccatgctccttggccagagggacagcnnnannnnnnggctgcaccccgctggccctg

SEQ ID NO: 12161 - DNA, 726 bp, Macaca Fascicularis
  misc_feature (1)...(726): n = A,T,C or G
accagggaaatnnnnnnnnnnnnnnnnnnngcataatggtaaacaattcaccacactggacagagataaagatatgtatgnnnnnnnnnnnnnnnnnnnncataaaggaggctggtggtacaatgcctgtgcacattctaacctaaatggagtatggtacagaggaggccattacagaagcaagcaccaagatggaattttctgggccgaatacagaggcgggtcatactccttaagagcagttcagatgatgatcaagcctattgactgaagagagacactcgccaatttaaatgacacagaactttgtacttttcagttcttaaaaatgtaaatgttacatgtatattacctggcacaatttatttctacacataaagtttttaaaatgaattttaccttaactataaaaggggaacctataaatgtagtttcatctgttgtcaattactgcagaaaattatgtgtttccacgtcctagttattttaaaaattatgttgactaaatacagtttgtttcctaaaatgtaaatatttgcaaatcttagctatattttaaaacataactaaataacatgttcaagatccttaacaatttatttaaaatctaagattgctctaacttctagtgaaaaaaatatttttaaaatttcagccaaataatgcattttatttataaaaatatagacagaaaattagagagaaacctcnnnnnnnnnnnnnnaa

SEQ ID NO: 12162 - DNA, 706 bp, Macaca Fascicularis
  misc_feature (1)...(706): n = A,T,C or G
ccaaggtttgnnnnnnnngctgcagcgatggcaacattgtggtgtgggannngcagaaccagactatggtcaggcagttccagggccacacggacggtgccagctgcattgatatttccgattatggcactcggctctggacagggggtctggacaacacggtgcgctgctgggacctgcgggagggcnnnnnnnnnnnnnnnnnnnnnnnnnnnnnnnnnnnnnnnnnnnnnnnnnnnnnnnnnnnnnnngactggctggcggtcggaatggagagtagcaatgtggagatcctgcacgtccgcannnnnnnnnnnnnnnngctgcacctccacgagagctgtgtgctgtccctgaagtttgcctcctgtggacggtggtttgtgagcactgggaaggacaatctgctcaacgcctggaggacgccgtacggggccagcattttccagtccaaggagtcatcctcagtcctgagttgtgacatctccaggaataacaaatacatcgtgacaggctcgggggacaagaaggccaccgtgtatgaggtggtctactgagatgtgaccccccccttcctgtacccgaactccggactcctaggggaagcagcagccgcctcgcagccctgcctaggaaccgttcatcccactgctctctggccaacagcttcacaccttcccctgctgcatgtgggggccgatgggca

SEQ ID NO: 12163 - DNA, 756 bp, Macaca Fascicularis
  misc_feature (1)...(756): n = A,T,C or G
acactttggaagattgaaaatggaagnnnngactgacagggaacatggaatgatagaccctgacagcggagatgaagcccagcttaatggaggacattctacagaggaatctctgggtgaacccactcaagccactgcgccggaaacctggtctcttcctttgagtcagaatagtgccagtgaactgcctgctagccagccccagcccttttcagcccaaggagacatggaagaaaacataataatagaagactatgagagtgatgggacatagaagccagcctgctaatctgattcctacttcacagattcatttttgtttcattcagtggtacttcagcagagttaatatgcttttctgatgaattacacaacagtttgttaattcttcattcttgtagtatttcatcacaagaaacctactcttctgtcatcttgaagtaaatagaagatcaagccttcaaatctctgaattttttctgtagtatttattaannnnnnnnnnggtttaaggagcggtcagtgtgtataaagtgtgtttcaacattatgccaaatatcaaaatgtgaaggactaattcannnnnnnnnnnnnnnatggcgggttgtaaatatgaactatnnnnnnnnnnnnnnngcaattatgagnnnnnnnnnnnnnnnttatttacacttcattgtcttcagcttctcatatatagttttgatgtgttgtacagtggaatatcttagatacttttggaaagtatttacataa

SEQ ID NO: 12164 - DNA, 746 bp, Macaca Fascicularis
  misc_feature (1)...(746): n = A,T,C or G
tgaggacatcaaggagtccatgagaccatgcggacccggctggagcgaagcatccagatgctgacgctacttcgggnnntcgaggcacgtgaccgcaacctgcaagagggcaacttggagcgggtcaacttctggtcagctgtcaacgtggcggtgctgctgctggtggccgtgctgcaggtctgcacactcaagcgcttcttccaggacaagcgcccggtgcccacgtagcccctgccacggaaggaagaacgggacgaaggaagggcagcggggtgtttgcgtatgagacttgggggtccctccccattttagtttcctgccaaaatgggagtgtgcagtcagggcctgtggtctggccccgtgagtctccttccgtcctnnnnnnnnnnnnnnnnnnnnnnnnnnnnnnaagggacggctcagcggctgcaccgacggtcctggaaatctcacatggtgggcactgcagcgttggaacgtgagcctcagatttcctggcccctctactgtaaatgtgccttagcctaagccttccatcctgtgttaccgttgcctggtgcggggcagggcctaacaaggaaacctgggccctccaagccaggctgaggtctggtaacagaatgccaggaagggggcctggaagaccacctgccccggcccctcttcctgcaggggccccacacaggcatgagggacggcctggccaaagtctannnnnnnnnnnnctggaacaaagggtggtg

SEQ ID NO: 12165 - DNA, 710 bp, Macaca Fascicularis
  misc_feature (1)...(710): n = A,T,C or G
cagaaatggaaacagacggtggagtacctcaaaagactggaatgaaaaatgaaaaaaccaacagtgaagagtgtcccannnaggagaaagttaatgcaacaggaccacagttcgtgagtggagtgattgtgaagatcattagcacagagcctctacnnnnnnnnnnncaagnnnnnnnnnnnnnnnnnnnnnnnnnnnnnnnnnnnnnnnnnnnnnnnnnnnnnnnnnnnnnnnnnnnnnnnnnnnnnnnnnnnnnnnnnnnnnnnnnnnnnnnnnnnnnnnnnnnnnnnnnnnnnnnnnnnnnnnnnnnnnnnnnnnnnnnngagatcctttctggtgatcacgaacaaaggtattggcagaagattttggttgatcgacaggcaaaacttaatcagcctcgggaaaagaaaagaggcactgaaaagttaatcaccaaagccgaaaagattagactggcaaagactcaacaagcaagtaaacacataagattttctgaatatgattgaaaaaaaaaacagttcacctcttaatacttcacaagatacttgagctgttcttgggatattcacttttattatggtannnnnnnnnnnnnnnnnnnnnnnnnnnnaaaagaaatatctttgttcctcaatttgtaaataagacactttttctagagacaaatacgatgtataccacaattttttcttaaaacattttgttga

SEQ ID NO: 12166 - DNA, 729 bp, Macaca Fascicularis
  misc_feature (1)...(729): n = A,T,C or G
gacagctgccacgtgnnnnnnacccaagtgcttttgcttacagcagatactgtttctctgtgtcctgaagtcgccagcggagaagggaatcattgtttacacatggggaccagagcagacttctccactactgtgcaatagagatacagctctcttcagagtaactgtgaaccttttataaccaacactagagttagttttagaagacaaaatatttataatgacgattgtatagcttttaagttatttttctagtatgtggtacggctttccatagccgtggtaacgcccaaactgttcatcctggctacccgtgcgctgtctccaggcttgcccctggnnnnnnnnnnnnnnntcagatgtgagcacaaggcatggccctctggactcctttctccttttccttcctgtctaggctgctcctgaatcctgttccctgacatccatgaagcccctccagcacccatctgtgcttcctacaagtccagttgaaatctcaacctccttccacacttttttctcgtgtgtggcccagatccctccccctctccaacttctgttgaatctgatcacagctctttttaggcccaggcagcattttggtccctgctccttgcccatatagtaaaacagctagaaatatcncagcaagagagtagtannnnnnnnnnnnctctgctctcgatttaaaagcgtgcacaatcaaagtactatgcaattttaggacaa

SEQ ID NO: 12167 - DNA, 720 bp, Macaca Fascicularis
  misc_feature (1)...(720): n = A,T,C or G
gggcttttcagannnnggcacgagctaagaaaaggaaggaggatttctggggtaaaacataaacctagttgagttgcctttatctaaggaaacattggcataatttttctttattgcttactgtgttaaaattttgagtgtttgaaatttttcctaacattttctagtttgaaatatttaatttccaatagaacggtttacttggaaatttttaacataggcttatacaaatttaacttttaacgaattctttttacatctatcccagagtacaaagacatagattattgaattctttacatattgtaacttttgtaataggtgtcatggatagattttcacctatccagagaatattctaaaaagataaacaaagtgaagtaaaagttaagatcccagtgtgaagtatgtatttccctaagatttgatatatgtatctttataattgatgatgttgtaaaatgaatttgttgttcctttaacctttgctgtagtgtttccttttattttagttccttctattcgtgtttgcagtgttaagataattgtactttgaaaacaccagctgtatatatttttcttatgtaacaaagttggctgaaagatatgtatatttttgatctttgagtgtattctatttgtgtaaggactttggcttacatttgaataatgtctagattttgaaaaattacctgtataatggagaattaaaactcggaa

SEQ ID NO: 12168 - DNA, 757 bp, Macaca Fascicularis
  misc_feature (1)...(757): n = A,T,C or G
acatactcacagttagtgatgtcaagtgggaacacgacagactnnngttctgtagtgcccacagnnnnnnnnnnnnnnncagccaattctacagctaaacccacagttcagccctccccttctacaacttccaagacagttactacatcaggtacaacaaataccactgtgactccaacctcacaacctgtgcgaaagtctacctttgatgcagccagtttcnnnnnnnnnnnnnnnnnnntcttgggtgtgcaggctgtaattttctttctttataaattctgcaaatctaaagaacgaaattaccacactctgtaaacagacccgttgaattaataaggactggtgattcatttgtgtaactcactgaaaccaaaatactatctttcaagatgtcccacatggaagacgctattccaggatctttaaatttccatggatgnnnnnnnnnnnnnnnnnnnnnnnnnnnnnnnngaaaaaaatcaattaaatcattgtgttcaacaggaatatttaaaatactctgcatgaatcctgtggccgtcttcttttgttctaaatagctgctgctgtgggattatatttttttttttccttaacatgccaaatgtaactttctgtaagtgatggaaaatgttgtcttgtgcagacaacatcatgactcttggcagtttaaatttagtaattttaatttagtgagcagaattgagaagaacgtgccaaatgagaatcaattaggtggatttttggctgtcat

SEQ ID NO: 12169 - DNA, 586 bp, Macaca Fascicularis
  misc_feature (1)...(586): n = A,T,C or G
tcacagtgtgagatttttttttcttttaaatgtttgtatttatttgaaggcagtgaggaccagaaggaagttttgtgctttagcacactcctccgtgttttgttcccttcctccagagtaagcatgtgcctgttcagagtctccagataccttttttataaaaagaagtcnnnnnnnnnnnnnnnnntataatccacccttaacagagcttttcttattacagtgctagaatgatttctgataaaatggtccctaactcaactagaaggctaaaaatacaagaatgaaagaataagcagagtactcacgatgcctttgagaaaaatcaaaacatcacgtagggtgacctagtttccaaaccaataaataagtagtattgtaatattaaaggaaaactgttccaatcatttaaaagtacttattaagtactgctttttacagttatgacaactgtttctttctatgcatataaatcaaggaaccaaatatctgtagccatggaaatgtctgactagaaatatttatattgaattctgaatacaaaatgtccctgtggtagnnnncttactctttatgcccggtgcag

SEQ ID NO: 12170 - DNA, 756 bp, Macaca Fascicularis
  misc_feature (1)...(756): n = A,T,C or G
gaacnnnnnnannnnnnngtacctgctcaccaacctggtagaggtagacgggcgtctcgcgtggaggttgaacttggatgccctggcccagcacctagacaagctcttgactttcccacagaggcaggagtcctacctcggaccaacactctttctcctcggtggaaactcccaattcgtgcatcccagccaccaccctgagattatacggctgttccctcgggcccagatacagacggtgccgaacgctggccnnnnnnnnnnnnnnnnnnnnnnnnnnnncttcatagatgccatccgaggcttcttggtctaagagttgctggcaagaagggggcnnnnnnnnnnnnnnnnnnnnnnnnnnnnnnnnnnnnnnnnnnnnnnnnnnnnnnnnnnnnnnnnnnnnnnnnnnnnnnnnnnnnnnnnnnnnnnnnnnnnnnnnnnnnnnnnnnnnnnnnnnnnnnnnnnnnnnnnnnnnnnnnnnnnnnnnnnnnnnnnnnnnnnnnnnnnnnnnnnnnnnnnnnnnnnnnnnnnnnnnnnnnnnnnnnnnnnnnnnnnnnnnnnnnnnnnnnnnnnnnnnnnnnnnnnnnnnnnnnnnnnnnnnnnnnnnnnnnnncaaaaaagacaaaacaaaacaaacaggaggcacaaaacccaggcttccagtccctgcagcctgctccacatttgggcacagaaggactcagacaggcactgagtgggcacgaggttttacaggagtggtcagacctcagg

SEQ ID NO: 12171 - DNA, 778 bp, Macaca Fascicularis
  misc_feature (1)...(778): n = A,T,C or G
caattgnnnnnnnnnnnnnnnnnnngatctaaganaggaggcctttgtgaaaaacannnnnnnnnnnnnnngatgacgtccctnnnnnnnnnnnnnnnncnnnnnnggattttgcgcaacagctatgtcctccccggtggatgtagtaaaaaccannnnnnnnnnnnnnnnnccaggacagtatagaagtgtgcccnnnnnnnnnnnnnnnnnnnnnactaatgaagnnnnnnnnnnnnnnnnnnnnnggttggtaccttccttcttgcgactcggatcctggaacatcattatgtttgtgtgctttgaacaactgaaacgagaactgtcaaagtcaaggcagactatggactgtgccannnnnnnnnnttcaagaaaatgatgtgacataccagtgggaatcttgctgactggatcataaaaacaaacaaaacttgttcacttattttaacctaaaatgataaaggaattttggtagagaattttggacttttctatataaaaaagaggaaaactaatgcctatttcatgtaacttttttttctcagtgtcttaaaaaggggaaagcaacacattcagcatataccctggcaaatgtaatgcagataagctactgcatttgaccatttctggagtgcaattgtgtgaatgaatgtgaagaactttaacatgttttaattacagctccaactnnntagaaaagaaactgagtgaaatgcagtttatatttataaatacttaaaaatgaagttattaaaaatattagtttttattaacc

SEQ ID NO: 12172 - DNA, 720 bp, Macaca Fascicularis
  misc_feature (1)...(720): n = A,T,C or G
taaaaccaatancccctttagaaagtaattgcttaaatgtcatgttgtagttgctttgattctattggatttttggcattttatgtaggttcatccattggttccaagtatgttagatcagctaacatctgctacttcagtaacagcctcatacagctgcaggtaggttttctccagaccaattagtttcaatagagcaaactaacagactatagtagcatggtnnnnnnnnnnnnnnnnnnnnncaaggttaggacgttactttttaagctggcagtggtatgaagtagcttacctagttggagacagataaaggatcccttacattttttcctataaggcctaaattgacattgttaaccaaggaaacagggtcagccttgaaaaatcaaggaattcattgtacctaataactgaagtaaaaattactagttgttcaacttttcctaaatgcaaatctatttttataaactaatgtaaataatgtttatattagagattaactggttttcatttttataactggtagactagaccttccttaaacttttagaaataaaatgaaggcttaacctggatttgtgaggataaaatacattttctttaactgtcctacagcaaagtagattagtcaccatgtgttttttgtgccaatgtaaattgtaatttaccaaagaaaaatacatacattgcttggtcttgcagaaaagttccctgaaa

SEQ ID NO: 12173 - DNA, 755 bp, Macaca Fascicularis
  misc_feature (1)...(755): n = A,T,C or G
cagctcaagagtnnnaaggaccagcattntgggggccattttnnnnacaggnnnnnnnnnnnnnnnnnncataacatccaaattgtnnnnnnnnnnnnnnnnnnnnnnnnngcagcagcgaggtcctgcggtacccatggggcgatgctacttctgcatgcatctacagggcatctgacatctaacatgagatgtggcatgtgagatgagacttggcatgtgagacatagggtcactagagacccttctgggtcagaggagagagactgaattggactaaacccttcctctgttcccagcacgtttctcatatagccctcagtcactgagggagtcccccgcagggttggagaggcacattcccttgggacagaggctacaggttggagctttttttccccctgtcccccaatcccatccccacctccacttcagaacatggcaccccacccacaactgnnnnnnnnnnnnnnnnnnnnnnnnnnnnnnncaactccgggtgtcttttaaaatnnnnnnnnnnnnnnnnnnnnnnnnnaaggaaaaatatatnnnnnnnnnnnnnnnnnnnnnnnnnnnnnnnnnnnnnnnnnnnnnnnnnnnnnnnttgtttttactctcaatgacacaatttttagttttatttcctgatagcaaaaggaaaaaaaaacacccatccctcaaaaaggccaaggtcccgtccccctgttgtcggtgatttgtctgtctttnntgatnnnnnnnnnnnnnnngtg

SEQ ID NO: 12174 - DNA, 943 bp, Macaca Fascicularis
  misc_feature (1)...(943): n = A,T,C or G
tgggactgatgnnnagagtcanngcccaaaaggaattgcactgtggcagcatcagacgtactcgtcataagtgagaggcgtgtgttgactgattgacccagcgctttggaaataaatggcagtgctttgttctcttaaagggaccaagctaaatttttattggttcatgtagtgaagttgaactgttattcagagatgtttaatgcatatttaacttatttaatgtatttcatctcatgttttcttattgtcacaagagtacagttaatgctgtgtgctgccaaactctggtgggtgaactggtattgctgctggaggtctgtgggctcctctgtctctggagagtctggtcatgtggaggtggggtttattggaatgttggagaagagctgtcaggaagtgtttttctgggtcagtaaataacaactgtcatagggagggaaattctctgtagtgacagtcaactctaggttaccttttttaatgaagagtagtcagtattctagattgttcttataccacctctcaaccattactcatacttctagcacccaggcccaagtctgagcctaacctctccttggggacctagcttggagtcaggacgaatggatcggggtgcagaaggttagaatcgagggcaccagcagttgggggtggggagcagtgggagagagagactcttcagctaatccttctagtactagttgagagtttgactgtgaattaattttatgccataaaagaccaatccagttctgtttgactatgtagcatcttgaaaagaaaaattataataaagccccaaaattaagaattcttttgtcattttgtcacatttgctttatggggggaattattttatcatttttattattttgccattggaaggttgactttaaaatganntntatcactgggaaatatgtgtttcatgatttaa

SEQ ID NO: 12175 - DNA, 739 bp, Macaca Fascicularis
  misc_feature (1)...(739): n = A,T,C or G
agatggaaaattgaatatttattctgtccatttcattttacagttatcttaccacttatttttgtaccatgtatttcaattgcctgtttagtgaaaaataaaaattaaaaaacctattaatttttggcttgtgtttagcttaaattttatcattaaattaagaagcccacaacaaaatatgttgccagcagccatatcccaagcccctgtgtgaagaatgttttggctgctatttcaacctaaggaaacaacctttgacctcagtcaccttaaaatgccagtgtgggcagattttttattcctcacaattaaaaaacaaacaaaaaaagacccctaggatcttgaaggtcctatttcagaaaatcttcacacatgcaaaatgtcaccaaaataaatacatttccctcaattatcattaccacccagtattcatgttttaatttttagggatataatttctaaaattagataaatcaaatttcctgcttcctattttaatgcttaaaccctcctccaacaccaagttaagcaactttggaggataaaatagttgaatctgactgaaagcatggaagaaaaacattagcacacattagtctgatcatttgccaattaggaaaggtgctgctttctacctctaccacagatgcatttgtgaaatgttgatcaatgaagccatttcaaatggttttagagnnnnatcagagataatgggctagatagatatattctaaacttg

SEQ ID NO: 12176 - DNA, 769 bp, Macaca Fascicularis
  misc_feature (1)...(769): n = A,T,C or G
agnnnnnnnnnnnnnnnnnnnnnnnnnngcannnnnnnngctgannnagtgaggcagtgattctgcctccatcctggtttccccaaagcnnnagggcaccatccttaggggagaaggtctacagttatcattattttaattccattactttcagtctggaaaactaagctagtcagaactatcatcttgcttcccaatctaagaacctgtggccctggaacacttttcaagaagtggttcattttgctttacacagtagatctgtttcaacagttctgtgtaaaccaaatgctgtttttcaatgcatttggactgctgaccatttaaaagcagcctatgattgcttctttttgtaaagcaagcaacctcccttcactttagctgttttgactatttgaattttcacatattgggcttacccagagtggagtacacctccagggcatgtggctgacactgggtagatgtctgcatctgtgctgtgtgtgtggtgtggttggccagtaggtgagtatccctgtgtgtgtgagtgaagccactccccaggctggtgctctcttcctgtgcccagtgactgcccagtggcagcccagctgcccttcactcccacctgctgccaaagtccctgtgctaatgggattacaaatacaaaaagtggaaaaaaaattttcgtaaactttgttttatattaaaaaaaaatccataagtctgtgtgtgttaaacatgaggttctgcctctgtggctgtgttgaaaaaataaagttttatt

SEQ ID NO: 12177 - DNA, 704 bp, Macaca Fascicularis
  misc_feature (1)...(704): n = A,T,C or G
tcccattttgctctgtgaaggtgcaaatccctttcttcccttcccgtctcaggctctcctgttttccctcagggtccagcatgcctttgggctttagctgttacaaaggaacccccgtgacttgacacaacttttcgcagctgctgttaggactggtggtctgggtgctcgtgcgtctgtgtcacggatggaatgtaggccctggaggaccgtgcgtcactcttcaaccagagcgcgcttccgggccagcttccctccgaggagcgagtggatttcatacaggatctcttcattgcacagactttgaatggctttacatgtttctaatgtgacttaggcgtgtgaagcagcgggtgtccacctgtgtccctcatgggtgagccctccagccgtgagcccaggcagcacggtcaccgagggtcctcctcaccaggaaccgcatccctgcgctgcctccgcctgagagtcgctagggggtccctgtcgagatcatnnnnnnnnnnnnccacccctaagtcaagtcacgggtttccatnnnnnnnnnnnnnnnnnnnnncattcagttcagcatatgaacttgtatctgtaatctgatgttcatttttatattttttgaaactgagcacaatgaaatcctttcttgaatcgttttccttttggattataaaaatatggggtaaagtgctataatgaattttatgcca

SEQ ID NO: 12178 - DNA, 747 bp, Macaca Fascicularis
  misc_feature (1)...(747): n = A,T,C or G
ccacacagtcatgnnnntgggtagttcggaaaacaaaaggaggggagacagcctggtaatgaataagatccttaccacagttttctcatggaaaatagataataaaccnnnnnatcttttttttttcttttaagaattaaaactgggaaatagaaacatgaactgaaaagtcttgcaatgannnnnnnnntcatggtcttaaaaagatacattatgnnnnnnnnnnnnnnnnnnnnnnnaaattaacctttttttaaaaaaataannnnnnnnatattatgttcctgtgtgttgaatttttaaaaaaatactttacttggatattcatgtaatatataaaggtttggtgaaatgaactttagttaggaaaannnnnnnnnnnnnnnnnnnnnnnnnnnnnnnnnnnnnnnnnnnnnnnnnnnnnnnnnnnnnnnnngaaattagtgtattttataaaaattttaaaaagaaaaaagactactacaggttaagataatttttttacctgtcttttctccatattttaagctatgtgattgaagtacctctgttcatagtttccnnnnnnnnnnnnnnnnnnnnnnnnnnnnnnnnnnnnnnnnttaggtaatatnnnnnnnnnnnnnnnnnttggttttttggagacagtagagggagattttgtaacaagggcttgttacacagtgatgtggtaatgataaaattgcaatttatcattccttttcatgttaataatttgaggactgg

SEQ ID NO: 12179 - DNA, 783 bp, Macaca Fascicularis
  misc_feature (1)...(783): n = A,T,C or G
agccagcccctggcagggcgatcgtgccaccacacaggcagcgctccagctgggaatggtcggattggcgccctcgttggattttttggttagcgtttgtttcttctccacccacggcacaggtgataaaatgggatccttggtgcggagcttaaaatgacgccagaaagccaacagctcccctccgtggggacttgccttaaacttgcctggtttgtacattttttgccagacgcatcaagaagcaatctgtgaccaagtctgagggtcttcctttaaacgtgccctccacgctaagagaagctggcgtctccctcccggaacggttttgcctttctgttcatctgtgaactgttttgtttttaattactctgtaccccatccgannnnnnnnnnnnnnnnnnnctgatgcaaaaccacaaagggaccnnnnnnnnnnnnnnncctagccaagcgagcaaacctgcagggggtttgnnnnnnnnnnnnnnnnnnnnnnnnnnntgtgcgtcattgggggaagaactgcgtcacagccaccaggacaaagcatagattgtgggtgatcctggagacacgagtttccaggattgttttgcatactcatttgcacattgttgtctgggttggacatgcgtgtgggcttcagtgtgaggcttttaatatgtatatcctgttatatcaataaaacaattatccaagtggttgaatcctgtgagacttggcaagtgtgtgcaaatcaagtatacttgacttttcaacctcttctttcaatgtaacttt

SEQ ID NO: 12180 - DNA, 569 bp, Macaca Fascicularis
tccctcagcgtcctgggtggcaaatgtggccaacctggggactctggccggacggccaatggcctgcctgggccgcgaagccaagccctttccagctcttccgatgaaggcagcccctgccctggcatgggggggccactagatgcacctgggagctccctggctggccccgaacccttgaggacctgggcacggggtcggatggacacacagccagaccgtaaaccctcacgcatccccacgcctcggggcccccgccgcccctccggacccgcagagcttgggacctggcatgccctgcactcagtcaccccaagggctgagccagattcttggatgtgatggaccagctcactgtccccagaccccatcccttctccttttcctttgtggccttaacccctctgcatcagggagccccctctgcctcttgagtacgagacctcatgggaccagatcctttgggaccacatggcacaatgggacctctgttgtacattccgattgggggatgagcgttgctatttaattactaatattattgaatgccttagaggaggccgggccag

SEQ ID NO: 12181 - DNA, 736 bp, Macaca Fascicularis
  misc_feature (1)...(736): n = A,T,C or G
ataatgagaagtctantttcaccaattatggaaacgtacagtggagcaagtaaaccacttattccagctataatattatgaagaacatttcccatgcatctacaagcttgagaaataggattnnnnnnnnnnnnnnnngggttataatattggaatagaaaaatttnnnnnnnnnntttnnnnnnnnnnttttnnnnnnnnnnnnnnnttcagcactaatatttctgggatttaaatagtaatgtttaaattatggtaaatgtaatttaaaacatctcagttaattctgtcactattattcttcaagcatgttttagacctagaaaagtatggtttgggggaggctattttattgtgtggttagcacaaggaatctaatttatagcaagtgtgaaatagttaccattttttttcctgatctgtcatcttcattgcacaacaaaatgaaattatggaaatgctcttgagctcacaacatttgtttttcttttaaagtaaatgcaagnnnnnnnnnnnnnnnnnnnngtttgcctgtgcccggacaatgaggcagagccattgttggggcaccctcttccctccctgggtttgcaagtagagnnnnnnnnnnnnnnnnnnnnnnnnnnnntgttttactatttgttactcaactatctccaccttccttttgattagcaatttgtactaagaaacaatgttatttggtgttgtataattctacttttctagtagatta

SEQ ID NO: 12182 - DNA, 758 bp, Macaca Fascicularis
  misc_feature (1)...(758): n = A,T,C or G
aattgtttactgccaattgtatacnnnnnntatgtcctttaatagcatagactggacaggtgactatagtggcttctctttttctaaaccttccgtagtctcctagaaaatcctcctgtgggccgggcatacctgggtactgcctctgcctggcagctctgtgggaaggtggaagaccccacgatgacctgatggggagccagcagagttcctgcccatggtcttgagcagaatgagagaataaaatgccaatcccaagggaagagcaggagcaggggcgcccaggccctgatccgcagctgcctccagcttgcagcagtccccagcctggagcagagcattggggaatgtctagccacgatgagaggattccctctgcaccacggtgaaccccaggagatggtattgaaacagacccccaaacatagactcctgcccaccctttgccgatgcagcctcctccatgctcttgagcaggtggggctgtggtgttctgtggtggcgtgtgattcactgagcaaacagcactttacagaagaaaatctttattttgtaatatgtgtgtccagtgggattgacactcaaaaaaagtctcatttaaaaatctttccttccttacctttgtatctcctttacatcatgagagatcaaaaacccattttgccttatatatgctaagaagcgtggcattcgttttgttcataaaatagactcatgactttaagacaggacaagcaggccagaggctttttaaatca

SEQ ID NO: 12183 - DNA, 757 bp, Macaca Fascicularis
  misc_feature (1)...(757): n = A,T,C or G
cagtggcatgatcttgactcacttcaggcttgacctggannnnnnnnnnnnnnnnnnnnnnnnnnnnngagtagccgtnnnnnnnnnnnnnnnnnnnnnnnnnnnnnnnnnnnnnnnnnnnnnnnnnnnnnnnnnnnnnnnnnnnnnnnnnnnnnnnnnnnnnnnnnnnnnnnnnnnnnnnnnnnnnnnnnnnnnnnnnnnnnnnnnnnnnnnnnnnnnnnnnnnnnnncgtgcnnnnnnnnnnnnnnnatggaagagaacacctctttatggcttactctctagaatttctgatttacgtgttctgttgaaatgtttggtttttttacgtttatagaaacaacaaaaagtcaatattgaaacgtgtcttcctgctctgttttctgttgtcagatgatgacaatgtgccgcgatgtttcacacgtatcattcagaaaaagttttattttttaattacattctattaacattcttttgcttgccactggcatgcctgaggaatgcatttggctatgattacacacactaagtttttgtaataaatttgactcattaaaaacctttttttttttaaaaaaaaatctcatttgtgactaacttatgtttgcagctgagtacttaacttctttttaaaagataccctttggattgatcnnnnnnnnnnnnnnnngtatgtcttgtagacacattagttataatcaccttgtatctctaaatatggtgtgatatgaannnngtnnnnttccatgttggaaaa

SEQ ID NO: 12184 - DNA, 758 bp, Macaca Fascicularis
  misc_feature (1)...(758): n = A,T,C or G
agcaccaatcagggaaggccagcacgctgtcgcggcgggaggnnnnnnnnnnnnnnnnnnnngccgtggaggacgctattgcgcgcaagcgggccaagatccccgggaaagcataggccatgcccctgaccggactggacgcatttttatacatagggtnnnnnnnnnnnnnnnggattttgcagttaatgtcttattttggctgtgattctttttaaaaagtaaaaaagannnnnnnnnnnnnnnnnnnnaaaagaagccacacaggagatgacgacgacgctgagtcccagcctccctccccagagcagaagtcccacaggacagacacagacagcgcgagtgaccagcacagttctcatgtaaattacaagccccagccgccagccccgccttctcttcctcctccaccgtcttctttcctggccctggtcaggcctgggcctgtggagccccagctctgcgtccccagcccgggtccaggcagccaggatccctcctgagctgagaaatggaacctcgagaaccactggtggcacctccttctcctccccgcccccgatcacccgcccccggatcagaaatatatctatattctcgactaaagtctcatcaggaaatacttcctgtcttttattttaagcatcaaattgttttagttgatttaaacaggaaaaaatacagaaaagaccaaaaaaaaaaaggccaagggtattgttggggcgtctgtctaatgtggagggtcttttttgaggggt

SEQ ID NO: 12185 - DNA, 226 bp, Macaca Fascicularis
tgagagatgcaaatgtaatatttttaacagttcatgaagttaagttattaaaataacaaaaataacataaaacttaattactttaatattatataaggtgtacgtattagccttgttttacaaacctttaaaatgcattttagaaatcaaagtcgatagtcttagttatcttttgagtaggacaagctttcctaaagtcctcatatggttggaccatggcagctaa

SEQ ID NO: 12186 - DNA, 765 bp, Macaca Fascicularis
  misc_feature (1)...(765): n = A,T,C or G
ttttgagcatatgcgtgtgattattgaaacagttagacttgccacgnnnnnnagttttagaaattgtttctagctagagggactggtgtccttccaagtctagcatttggggtatggaaaattgttgtggtgtgtggtagggtttttgttttcttttgttttgagtttttttccccctttagtctcctggctttttcctttcccctcccttctccattggccagcttgggcctcatcctcatgtcatccttctaggaaggcgcctgccccctcttgtctgccggcagcatgcatccaaggccagaactcaggcctgcagactgggctggtgcttcctccgcttcagggtatgggagttggtgaaggggctttcagaaaaaaaaggtaaagtctttggtagcttctacccactcagatcctggaaggcagaaaggttttgtggatctagattcattaggaatgtcttcttgtcagccaggccaggacctgggcttgccaagagccgaggccctcccagcaaccaggataccaccactttgggggctttgtgtacagaggtctgggcctgagacctcataggctgcagaaatctggggcagccaccatcaagaagcccctctcaggggccagaattcctttgccagtgtggatttctcaagtcgggactgcataattaaagcagttgcagttttattttttttacagcttttttcccaaaaatgatttgtagttgtgtgtgcagcactttgcnnnnnnntgtgtgct

SEQ ID NO: 12187 - DNA, 693 bp, Macaca Fascicularis
  misc_feature (1)...(693): n = A,T,C or G
gatgtgaatggttatccctagataaaatttaaaggatttttaaaaannnnnnnnnnnnnnnnnnntgaaaaataggtnnnnngnataattttattttaagctccttggttaattattttgtctattgtcttagctataagttcaaatttatacatactattgagtattaatattctctgatttcagggagaattctgtcagtcacaggatgattatgtttttgtttaacattctttccatgcatctgttattttattaattggcctgaatgatgagaccagaccagtgtttacagattttcattgtcagaaaaatctataagtctgccctttttacaatgatgattaaaaaaaaaaaaaagcataaatattagcctgcaagagcagtcctaaacaatcacaattaaactgtactacccaagaaaactgtttattgtgaagcatttaccttcaaaaaaatcattacatttctgtttcttggtggagtagcacattgtggagtgtgattcttaattcttcattaagtttatcaataggacattcatgctggataggttgtcttttgtttttatgtctcagaccattttgtgaggttgtttgcccatctcataatacagatttatgcagaaaggttgaaattatgtaaatggtttttatggaagttaatcagttacaatattttaaaggggtagaa

SEQ ID NO: 12188 - DNA, 700 bp, Macaca Fascicularis
  misc_feature (1)...(700): n = A,T,C or G
gcaaagaataccacattaatttttagcacgagtacagcagcttatcacannnnnnnnnnnnnnnnnnnncccagggctcaagcagtcctcccagctcagccttctgagtagttggaactacatgcctgtgccactatccctgactaatttatttttgtagttaggggtgtcnnnnnnnnnnnnnnnnnnnnnnnnnnnnnnnnnnnnnnnnnnnnnnnnnnnnnnnnnnnnnnnnnnnnnnnnnnnnnnnnnnnnnnngttttgtaatttgataatgtatcagtaatatttttctcccttctcctcctccatcccaggctgggcttggagcccacagaacacttaacgctggacttagctgggggcagaccaggatgatgaagatgcttgttggattcttgaggacactaagtgtctggaagccaccaaccactgtcccttctgggactcagcaacaggctcctgtgtttgttgaagtggctttgtggaatattcttgtctcctgcctcctaatagctttgagggtaaccattgttccctccctctcaaacatctcatccaggtttatgaagctccttatacccatcctctcacaatctacttttacaggtgagaaaaatgaggcttacagtttaggccactagattatacaagtcagttggcgccggggtttggattcagttcctgtctgctgctttta

SEQ ID NO: 12189 - DNA, 771 bp, Macaca Fascicularis
  misc_feature (1)...(771): n = A,T,C or G
aagaaggagcaaatgatcgannnacagaacctcctaaccacacagtctccctccgtgaagtctttggcagttcccacaatagaggagctggaagatgaagaggagagaaaccaaagacagatgataaaggaagcttttgctggggatgatgtcatcagagatttcttgaaagagaagagggaagccgtggaggctagtaagccaaaggacgtggacctgacgctacctggctggggcgagtggggtggtgtnnnnnnnnnnnnnnnngccaagaaaagacgccggtttctcattaaagcccctgagggtcctccaagaaaagataagaatttgccaaatgtgattattaatgagaagcgcaacatccacacagcnnnnnnnnnnnnnnnagtgcttccatatccatttacccaccattggcaatttgaaaggaccatccagacccccataggatccacatnnnnnnnnnnnnnnnnnnnnnnaaagctgactactcccaaggtcgtcaccaagccaggccatatcattaaccccataaaagcagaggatgtgggctaccggtcttcctcaaggtcggacctgtctgtcatacagaggaatccaaaacgaatcaccacacgtcacaaaaaacagctgaagaaaagctctgtagattgagttgctggaggagtgacagccaggagccctgacttcacttcctttggtccagttttactctggtacagggtggattccaaaactggctcagtacattgcatgtagtgagccaca

SEQ ID NO: 12190 - DNA, 562 bp, Macaca Fascicularis
  misc_feature (1)...(562): n = A,T,C or G
agagtcccggggtgcccatgcagacgccctgcttcacgctgcagtatgctgccccggagctgctggcccagcagggctacgacgagtcctgcgacctttggagcctgggtgtcattctgtacatgatgctgtcgggacaggtccccttccagggggcctctggccagggcgggcagagccaggcggccgagatcatgtgcaaaatccgcgaagggcgcttctcccttgacggggaggcctggcagggcgtatccgaggaagccaaggagctggtccgagggctcctgactgtggaccccaccaagcggctgaagctcgagggactgcgggacagctcgtggctgcaagacggcagcgcgcgctcctcgcccccgctccggacgcccgacgtgctcgagtcctctgggcccgcagtgcgctcgggtctcaacgccaccttcatggcgttcaaccggggcaagcgggagggcttcttcctgaagagcgtggagaacgcacccctggccaagcggcggnnncagnagctgcggagcgccaccgcctcccgccggggctcccccgc

SEQ ID NO: 12191 - DNA, 1045 bp, Macaca Fascicularis
  misc_feature (1)...(1045): n = A,T,C or G
tactacccttggtatgcatgagcggttcctattagcatcagtgggaactcagtactctatctgtatccacaaaagggaacttgagacccacagttattcttaatttctgatattaacaaccatacatactgctgaatttaactcaatatattcaggtaagtggaagtggtgcttaatgtagtcttnnnnnnnnnnnnnnngtgttttcaactaaaagtatatatccagaactacatccttatcagaaatacaagtaagacttaggataatttgccttcaaaacagttctcctaannnnnnnnnnnnncaatgagtgaagaacacttgactgactcttgggccacctctattacttactgcactatggnnnnnnnnnnngaatgtttacaattatgggatgtagtatttctacttgtactttaagtcaaatgcttatatgaaatatgtgacaacaaatagagaagactggctctgttagtaattatgcagtatgtactctaaggattgtggtagtataacgagcgaatgtcattaattttggagtaataactgccacatgtggggagtaggggagtaaggagagtgaattccaaacctgtgattaaaagtgtaaactatagactctactgtagtacatttcaggatctagaagttttacttttataaagatggtgtctggaagatgttgctaatgtattttacttcaacatagggaacaaactttttaagtatattaataaacctgtatggttagtttttaacaattttttaaaataaactttatggatatgacaaatattctgtgttttgctaagtgcttggataggctttctaattttgtatacgtgctagagttaatatattgaacatttttatccaaatttagtttaactcagtttatactactgattgctcattcgtttaaatgatatcctaatgtaaacgtcataaccaacacatgaacagactgatttatgtctttaaacacacaatgtaagctatagtttaatctgataacggttgctagaagttgccatttgttttc

SEQ ID NO: 12192 - DNA, 808 bp, Macaca Fascicularis
  misc_feature (1)...(808): n = A,T,C or G
agcacagtactgaggatacggggaagactgccacagtgtgtgagagggaacccccatcaagtgtggccagcccatccggttgacacatgtcaacactggccgaaacctccatagtcaccacttcacttcacctctttctggaaaccaggaagtgagtgcttttggtgaggaaggtgaaggtgattatctggatgactggacagtactctgtaatggaccctactgggtgagagatggtgaggtgcggttcaaacactcttccactgaggtactgctatctgtcacaggagaacaatatggtcgacctatcagtgggcaaaaagaggtgcatggcatggcccagccaagtcagaacaactattggaaagccatggaaggnnnnnnnnnnnnnnnnnnnnnnnnnnngaaggcagaagcccaccannnnnnnnnnnnnntctagaggctctgagccactgttaacgcacaatgttcnnnnnnnnnnnnnnnnnnnnnnnnnnnnnnnnnctgccacaannnnnnnnnnnnnnnnnnnnnnnnnnnnnnnnnnnnngatacacaacagaaaatagctgtgtttggaaacttcaaccctgcacacttgaactagtcactctcccagacttggcgtggggtcagttctttctgagtagaggatttgctggtaaaggggcagatgtttttcattcatactgataaaacaaactgaggggaacatccctcttagctggtaaacttttactcttcaggnnnnnnnnnnnnnnnnnnnnnnnnnnnngtgatttttcnnnntatttctctctccaaa

SEQ ID NO: 12193 - DNA, 721 bp, Macaca Fascicularis
  misc_feature (1)...(721): n = A,T,C or G
gggcaggggccagggctgagaactgcagccctgnnncntcnnnnagggaggagnnncagacgaacccagcaggctgaggaggtggcactgggtgaggacagttgggcaggggctgcagagggaggtagaaatgaaccctgagggctcccccgacatgccctgccctgtcccttagtagannnnnnnnnnnnnnnnnnnnnnnnnnnttgggtgaggcctggaggcttcagaggtgaatttatgcttgggaagcctgatcccaaacctgaagggaagggacttgcgtctccttgtattgaataagctgtttggaggaaggtgtccgtctgggaggatggggcagtaaatgaggttggcagagtggcagtggggnnnnnnnnnnnnnnngcttggagcctgctcattctgagcccttgctgccaaggagcccagcctcacctagcaggaaaggagatcatagccctcctcccaggaggtnnnnnnnnnnnnnnnnnnnnnnnnnnnnnnnnnnnnnnnntagatgtggaaatattttttcgaacctgannnnnnnnnnnnnnnaatttcaatggaagcataatccatgtaaaatatattttagttgatattttgtaaaatgcactttttgtgtgtgtnnnnnnnnnnnnnnnnnnnctgtatttcagtgtttacaagggaggaaggacctttcctcacctcccttttgacagagattagaagt

SEQ ID NO: 12194 - DNA, 683 bp, Macaca Fascicularis
  misc_feature (1)...(683): n = A,T,C or G
ctgaaattttataccagcaagtgatannnaaaggagactttaattacttggaagaatttaagcagcaaaggttattaaagtccagtatatttgaagacatttccaaaaaatataaacaacatcagcctnnnnnnnnnnnnnnnnnnnnnnnnnngaaattactcacatattgtgaagatgnnnnnnnnnnnnnnnnnnnnnnnnnnnnnnncaagttttatgaaactgtaaatgtgcttctgaaggaccctcagacaggttgctgtctaaaggacatgctagcaggttagatgatttcataggtgcctgttttcttgtactgttagcaggttctgacagatgagatgagtagaataatgcattggagatcttggttaaagttgaacaatcccagtactgtaccnnnnnnnnnnnnnnnnnnnnnnnnnnngcaaatgagaaannnnnnnnnnnnnnnntcctatttgaaatggactgattttagatgactgttcatctataccattttatatagatactggtattaagatcaaaagcttcctcttcctcaggacagcttctactttagatgatccaatagtaattaaagaatatacctgtacctgcagattccagtttcaaagaaatttaatattatttacacagttaaggaannnnnnnnnnnattttcatttgttagaaaa

SEQ ID NO: 12195 - DNA, 745 bp, Macaca Fascicularis
gccaatgaatcacaaggagaagtttgagaacttggggatccaacctcctaaaggggtgctgatgtatgggcctccagggacagggaagaccctcctggcccgggcctgtgccgcacagactaaggccaccttcctaaagctggctggcccccagctggtgcagatgttcattggagacggtgccaagctagtccgggacgcctttgccctggccaaggagaaagcgccctcgatcatcttcattgatgagttggatgccatcggcaccaagcgctttgacagtgagaaggctggggaccgggaggtgcagaggacaatgctggagcttctgaaccagctggatggcttccagcccaacacccaagttaaggtaattgcagccacaaacagggtggacattctggaccccgccctgctccgctcggggcgcctggaccgcaagatcgagttcccaatgcccaatgaggaggcccgagccagaatcatgcagatccactcccgaaagatgaacgtcagtcctgacgtgaactatgaggagctggcccgctgcacagatgacttcaacggggcccagtgcaaggctgtgtgtgtggaggcgggcatgatcgcactgcgcaggggtgccacggagctcacccacgaggactacatggaaggcattctggaggtgcaggccaagaagaaagccaacctgcagtactacgcctagggcgcgccggccagccccggcctcacggctgaagtg

SEQ ID NO: 12196 - DNA, 657 bp, Macaca Fascicularis
  misc_feature (1)...(657): n = A,T,C or G
ccgcaccccttccgggnnngcagaccccaccctcctgagacccctttccattagcnnnngctccacgacaagcccacctctcgcaggtcccactctgtccnnnnnnnnnnnnnnnncgcgggctactcgccctgtccctcaagtacgtccccgccggctccgagggcgctggactgccccnnnnnnnnnnnnnnnnnnnnnnnnnnnnggaggctcgggaccnnnnnnnnnnnnnnnnnngatccctggacacttacgtacaatgcttcgtgctgcctgatgacagccgggccagccgccagcgtacaagggttgtgcgacgcagcctcagacctgtgttnnnnnnnnnnnnnnnnnnnnnnnnnnnnnnnnnnnnnnacctgcgccaggcttgtgctgagctctccctctgggaccatggggccctggccagccgccagctggggggcacacgcctcagcctggnnnnnnnnnnnnnnnnnnnnnngcaggtgccctggatgnnnnnnnnnnnnnnnnnnnnnnnnnnnnnnnnnnnnnnnnnnnnnnnnnnnnnnnnnnnnnnngatggccttctacccctcagaaccaacctggcccccaggacgtagcccgaccaagcctctctctctggacccccatctcagggcctgccct

SEQ ID NO: 12197 - DNA, 603 bp, Macaca Fascicularis
  misc_feature (1)...(603): n = A,T,C or G
gaggacctgtcggacgcgctgtgcgagtttgacgcggtgctggcnnnnntcgcgtcgcccttccacgagcgccacttccactacgaggagcacctggagcgcatgaagcggcgcagcagcgccagcgtcagcgacnnnnnnnnnnnnnnngactcggagagtgcagattcactttataggaacagcttcagcttcagtgatgaaaaactgaattccccaacagactctaccccagctcttctctctcctgctgtcgctcctcagaaagccaaattaggagacacaaaagagctagaagacttcattgctgatcttgacagaactttagcaagtatgtgaaaccagaagaagttctgggtcctttcatcataagggagaagcttcagaaagctcggaggacctgctaaaatcagctactagaatctgctgccagaggggacgaagacgtgcactcaaccttctaccaggccactctcaggctcaccttaaaatcagcccttgatcccatctctgggcaatttagacagtgaaactgactttgtttacctgcctgcagcgtattagaacagacgatccatgctaatattgtattttctcttaaaa

SEQ ID NO: 12198 - DNA, 271 bp, Macaca Fascicularis
aatcaaagagtaatgtatttcaacttaaagtctgaataatgtatatcatacatcatcaagacttggttaatgttaagtgctgtaaagaaaaagtagagaaagtagaggtgggcagtttgtgtaacaggcatcttaacactggtccccatcccagtggaacaagcaatgccagtgtaccaaatgcaattccagattgtaagttagaaatgtcattgccagccattacagaagaggcaaaagtccacagggggtgtatgccaaaaggtcaagt

SEQ ID NO: 12199 - DNA, 762 bp, Macaca Fascicularis
  misc_feature (1)...(762): n = A,T,C or G
ctcctctagtccggccagaaggatgatctcgctttccttgtacaggcctataagaagcaggtacttcagttctaaattctttctgacttgtgttcttttcgtcttcataaattctacctaaggccattgtgccactgtgcacccctgagtaccactgacccaaagctttccgacagacctccctggcctgcctagaggctttcttggnnnnnnnnnnnnnnnnnnnnnnnnnnnnnnnnnnnnnnnnnnnnnnnntcctttctcttcccgttcactgagcagatccactnnnnnnnnnnnnnnnnnnnnnnnnnnnnnnnnnnnnnnnnnnnnnnnnnnnnnnnnnnnnnnnnnnnnnnnnnnnaagattcttaggtcctcttcaannnnnnnnnnnnnnnnnnnnnnnnnnnnnnnnggtgtgannnnnnnnnnnnnnnggaaccatgttgcctttcctgtcaatcatagccaccttcctgttatctcctaaatggatctggctttttctagttggaagatggtgtcagagggcctgcctgcgcagtctgtctctgggtcggggtcagggacccnnnnnnnnnnnnnnnnttaatcttctctcnnntaggaccagggggatttcaagccagggaagcaactgggaccctgaaaaccgtccctccccagcctgctctccctctctgtgccctggtccccttgctgccatgtggatgctgttgtgattgctgtttgtatattattaaaatgtttttatattaa

SEQ ID NO: 12200 - DNA, 737 bp, Macaca Fascicularis
  misc_feature (1)...(737): n = A,T,C or G
ttttatggcagagtagtctataatcatgtaaccttagtgttgtaaatacaacataataaagggttttttttttttttaaacattaatattcacattatgacgaggctgggaaaacaaagtatggagggaccaacaactatgtagtactttgaccttaacgctccnnnnnnnnnnnnnnnnnnnnnnnnnnnnnnnnnnnnnnnnnnnnnnnctccagtcaattacaaagttttttttttaattaattaaaaagttttgtagctcatgaaggaatggaaataatgatttcattttccattctgttaagaaacaggaaaagtgggtcagagtctttagtggtaagccttaaaatgcacttctggtattataggttaagatgctctgtaacgtgctatattggtaattaattagtaaaggtggaaattaaaatggtacagaactgaatgagactacaaggaaaaaaatnnnnnnnnnnnnnnnnnnnnacaaatgaatagaaatgattaacaccaatttcttctaggacttactaagctgagtcatgagaattattacttacattttacattttggtctaatatattttttgacaagtatagatgaaagcagaagaaaatccactccaatacttagttnnnnnnnnnnnnnnntnnnnnnnnnnnnnnnnnnnnnccgtaatatatatattagatgttatatacagtagacttaacaagtcagtagtctaagcaatcaag

SEQ ID NO: 12201 - DNA, 678 bp, Macaca Fascicularis
  misc_feature (1)...(678): n = A,T,C or G
ccatttaaatctaatttataatttttattttaagcagcaaatgaaacaaaaatggccagttttaagattgnnnnnnnnnnnnnnnaaaatgtaagaaggtttaggaaagcctcttgatttttgtttggccttgcattgccttggtaaagtaaaaggaaacagtacgcatggagctaggaaaccaaagcaagtttgtgaaactggcacagtgatggagaattgctgtggagagttgtagagcaaagggatgggtccttgaggcctgccattgtgtaaaggtgttcaaataaagggctgtttctacaggttaacattaaatgtgaactcaacacttcagagtctttaaagggtttctatgtgtatcaatgtaatagtgttttaccaccaactgcctttctttgttcctagttactgtaacaaatatgtgatgatagagatttattaattttgtttatccagactattaattttatttgtttttgttgtatgtaatcaaataaaatttgagtaacaagtaatggtaaggattaatgcatggttatttggaccagaaaaaagtgccatagaagaccaataactgtttagttgaggctagtctggaacttttcattagagcaatatttggttattgcacttcatttttnnnnactaagaaatgcnatttgggaatttttaatc

SEQ ID NO: 12202 - DNA, 755 bp, Macaca Fascicularis
  misc_feature (1)...(755): n = A,T,C or G
agctcattaactactacagcttcagctnnnnnnnnnnnnnnnnnnnnnnnnntgtgggtcagctnnnnnnnnnnnggaaggagcctganngaccttgtcccctcaagctcagcgttttcttcccgattgtcttctgcctttgcaccattttcctggtggctgttccactgtacagtgataccatcaactccctcattngcattgccattgccctctcaggcctgcccttttacttcctcatcatcagagtgccagaacataagcgacctctttacctccgaaggatcgtggggtctgccacaaggtacctccaggtcctgtgtatgtcagttgctgcagaaatggatttggaagatggaggagagatgcccaaacaacgggatcccaagtctaactaaacaccatctggaatcctgatgtggaaagcaggggtttctggtctactggctagagctgaggaagttgaaaaggaaagctcacttctttggaggcacctgtccagaagcctggcctaggcagcttcaacctttgaacttactttttgaaatgaaaagtaatttatttgttttgctacatacagttccagacttttaaagcggacaatagaggagactggggagaggagcatgtcaggtgtgggcttggtggttttagaagcacctgagtgcgcctacctactcctcttttcttttaaaagggcccacaatcctccaattgtctcctttagagagacatcaaactgtcacaggtgctgg

SEQ ID NO: 12203 - DNA, 740 bp, Macaca Fascicularis
  misc_feature (1)...(740): n = A,T,C or G
gacannnnngagggccnttcagaacccactnnngagtgggtgggtgggtgggactcagtccagagacctaacattcagaaaatagcattggttgcctattttgagatggatttaatctcccacagtattcatgacaccatctgatggaatcannnnnnnnnnnnnnnnnnnnnnncgttttccccaacctcttacaccctgaatgtcactttggaaaccaagcccttggaagcaagtggggtggcatgggagagaagggaggaggtgggcacaggtggtaaacttatgcgtgggcgctctactgcctcactcacagaagccagccctgagtgccaaggtcagcttggctggtctgaggccgccttcttagccaaaaacccagggttcattttcaggaaattgataatgaacaacaaaatggggacttcttttggcagatgctaggtcagttgttttcacctaataccctcttttagctgcatgtatatttatttataattataaccctggtggactgcagccttcatccttgttgggaatgagtttgttataaatcagaaatgggtccatgatgacgattgttttccaaacccagtctgttccctgctccttcgctggcaaaccccaccacacaggagtgaggccaggggcgaggagttccaagaacagaggctgcggtgagggtggcacccaggcagctgcatccggtctgttttaatttaactgtatttaatttgctt

SEQ ID NO: 12204 - DNA, 708 bp, Macaca Fascicularis
atggtaaaatcattactgcagatcccaagaaagagttggaaaatttggcaacatcattggacatttacaaatttattgttgattactgtgaaaagcatcctgaggctgcccaagaaatagaagttgagctagaacttagtaaagagatggttagtcttctcccaacaaaaatggagagattcagaaccaagatggccctgacttaatccctgtttttaaaaaaaggaaatgtgcaatattgaagtgatctttttccctagtcaaacaggcccaattccattgtgatatttacctttacggccaggtgagtgcagtttgagcttgagatacagtcaactgagcgtttgctaggatcctaaggaacataaagttaattaaaaacttacacctaattatgtaaattgccttgttaaagacatgtgatttgtattttagatgcttgtttcctatttaaatatagacatttctactctcagtttctaaatgtagattatttgttggctagtacttgatagattccttataagaaaaaatgctgggtaatgtacatggtagacaaacctgttactatattaagattgaaaaagtaacttctctagttactccttctaaaatatttgatttcctaaattccccccacccaaaatctttcccttttgaaaatactaaaaactaagttatgttattataaagtgtaaaatggtttgt

SEQ ID NO: 12205 - DNA, 685 bp, Macaca Fascicularis
  misc_feature (1)...(685): n = A,T,C or G
agaaggccgcttttcagggaccagtccgccaccatctccacattgagtgaagctcatgccaagcaaggagcccccgcctcctgagcgggtaggagagtttcttgcagaacgtgttttttctttacacacattatggctgtaaatacctggctcctgccagcagctgagctgggtagcctcgctgagctggtttcctgccccaaaggatggcttccatcatccaagtgcaccactgaagtgaggacgcactggagccaggcacctgctcatgtttaagtgtgctgttcacaccggctctggagagcaccccagcagcatccagaagcagctgcagtgttgccgccaccaccttcctgtctgcctcttccaagtctcctgtgacatttttttctttgggcagaagccaggaactggtgtcattccttaaaagatacgtgccggggccgagcgcagtggctcacacctgtaatcccagcactttgggaggccaaggcaggtggatcacaaggtcaggagattgnnnnnnnnnnnnnnnnnnnnnnnnnnnnnnnnnnnnnnnnnnnnnnnnnnnnnnnnnnnnnnnnnnnnnnnnnnnnnnnnnnnnnnnnnnnnnnnnnnnnnnnnnnnnnnnnnnnnnnnnnnnnnnnnnnnnnnnnnnnnnnnnnnnnnnnnnnnnnncgtgtca

SEQ ID NO: 12206 - DNA, 763 bp, Macaca Fascicularis
  misc_feature (1)...(763): n = A,T,C or G
gcatcacaaactgtaattactaccannnnnntcctttccgtagcctcgcctgnnngacttagagaaagaaaagcaataattttacaggcattttgaggtgtctctttgggttctttctgtttgaaaggatacttgtggaaaaaaagagcaaaacctttttaaataaattccccctgaaaaaaaaacccaaaacactggcatctgagtaggaatatgaaaatgacaccttttccaaatattaaattggaaagcaatgtctttacaaaatcataatgcttttttaaaaggcagagcactctttttttggcaattttgataagcaaggtgtagatttacatttttgtccttgctcccaacgaaatggataaacaaaaataaaataccatctactcatggaatgttgttgtgttagccagtctgaaagcccaccttaatttttatataactgtcttttagctcttcttttgacagggcaggccttgttctnnnnnnnnnnnnnnnngactgttaaacaccgatgacgcatgcactgcacttcttcgttttcttcttnnnnnnnnnnnnnnnnnnnnttcttgtgcattcctcctctccctccttcgttagaataggtatatcagctgtgtaaatagagcaagaaaacagtattctgcatctgtggcatttatgtagagttgcagttgtnnnnnnnnnnnnnnnnnnnnnnnnnnnnnnntgtgatctttactgatgcactcatgacaagtacccaatgtattttagc

SEQ ID NO: 12207 - DNA, 745 bp, Macaca Fascicularis
  misc_feature (1)...(745): n = A,T,C or G
tcctgtcccttcagatggngatcttgacggagctgggcttgcacttccgggtcctggacatgcccannnaggaactgggcctcnnnnnnnaccgcaagtttnacnnnnagnnnnnnnnnnnnnnncgaggccgctttggnnnnnnnnnnnnnnnttccaactgcacagatttccagagccgccgcctnnnnnnnnnnnnnnnnaccgagggtggggaggtgcagtttgcccacacggtgaacgccaccgcctgtgctgttccctgcctcctcatcgcgctcgtggagagtaaccagcaaaaggacggctcagtgctcgtgccccctgccctccagccgtacctcggcaccgatcggatcacagcccccacccacgtgcctctccagtacataggccccaaccagccccggaagcctgggctgcctggccagcctgctgtaagctgagaacccaccctcggcagccctagagggcgtcactgcttcctggagctcaggagaccccggacacctgggacctgtgttcctgagcctgtcctgacatctgcgttcctcccgtcagctccacgcccaggcccctggaccctggggtccacctctcctctgtctttgctgcctcagagtcagtcagtgagcctgctatcaatgaggggtccnnnnnnnnnnnnnnnnnnnnnnnnnnnnnnnnnnnnnnnnnnnnnnnnnnnnnnnaagaggcctccatccctccttccttccctcccaca

SEQ ID NO: 12208 - DNA, 779 bp, Macaca Fascicularis
  misc_feature (1)...(779): n = A,T,C or G
ctgaagagggaggccatgcgtgcagcccaggcagggtccctggagatcagcaaggccatggcttcttcacccacacagcaggatgggagaggaggannnnnnnnnnnnnntnnnnnnnnnnnnnnnncactgcagaaagaggtggccctgctgcgagctcagctgactttggagcggaagcagaagcaggactacatcgcccgctcagtacagaccagccgtgagctagcaggcctgcaccnnnnnnnnnnnnnnnnnnntcnnnnnnnnnnnnnnnnccctgaggccactgtcctggaggcagagacccgcaggctggatgagtccctgactcaaagtctgacatccccagggccagtcctgctacaccccagccccagcactacccaagccacttccaggtagcagccacagccaggagcacacagacagaagactgtaccgtggggtcacggcccctctgcacacctacaggcttgccaaaggaaannnnnnnnnnnnnnnnnnnnccaggcgccccaggtcagcaggtgttcccaggaagaggaagtaaatctgcaacacttgggagggccccaactcacctgggaatgaggcagattgcatttgcttgctccctaatggaatcacccagaggagtgccttgccctggctgagggacatccactgcctctcgtctagaatttattttcctagcacttcaccacctccttcaacttccccttcaacaataannnnnnnnnnnnnnnnnnaaaaaaaaaaaaaaaaaaaaaaaaagg

SEQ ID NO: 12209 - DNA, 1058 bp, Macaca Fascicularis
  misc_feature (1)...(1058): n = A,T,C or G
ctgaatgaataagtacaaaaggttggattttctatgttggctgattaccatattgaacacatggcatttgtagcattctttaaatctgtttactgaaatatatttgacattcaagcagttatattcagtccttcattttatagaatatnnnnnnnattattggtacagtttaaagccattaatatgttttatccatttgataattttacagtaagtaaatctcattcattttgacagttatcaaagatgtactttccacagttaaatttacattaatggcaatttttgatagtttgttttatggctttttactgttagactaatcaaaaataactttaaaaggaacaaagaaactccaacatttcacattatgcatagttatgtagccatttcacagtttctttaagatgcataaactcattgttcttgatagttcttttatttttcattataaagttacaccagattcaagaatctgagttagcagaattcaaaactattttgtggaaacaagccaactagtaacaatgcagcaacacttctggtttagctaaattctttttccaatgtaggaaatccnnnnnnnnnnnnnnnnnnnnctcagannnnnnnnnnnnnnnccaacagagaaagtgaacagcatttgttggaaagtgatggctctccctcttccctccccatttcattgtcgtaacgtaaagtgtattctgtacataatttgcaaataaaacattttattttaattgttacttattatttagatatttctcaacacttaaattcataaaattaagaccatgtaagggtatgtttttagagaaannnnnnnnnnnnnnnnnnnnnnnnnnnnnnnnnnnnnnnnnnnnnnnnnnnnnnnnnnnnnnnnnattccatgtattttgaatatgagcaaaaactgatctttattaaataagagcagacttaaagtagctttgtacgccttaatgttcattttgatttattttaaatctttacattcagaaatgagatactgtattatcagaccaggaggnnnnnnnnnnnnnnnnaatttccta

SEQ ID NO: 12210 - DNA, 737 bp, Macaca Fascicularis
  misc_feature (1)...(737): n = A,T,C or G
tgctccttggcttacctgannnctgctgtctctgctcaccctcctttctgggccctactcattggggttctgcactttccacttcttcctttctctttctctcttccctcaaaaactagaaatgtgaatgaggattattataaaagggggtctgtggaagaatgatcagcgtctgtgatgggagtgtcagggttggtgtgctgaagtgttagagagggaccatgtgtcacttgtgctttgctcttgtcccatgtgttttccactttgcatatgannnnnnnnnnnnnnnnnntgctggggtggaggggagtgctgggcgtgtgatcatgcctggctaataaggctttagtgtatttatttatttatttatttattttatttgcttttcattcatcccattaatcatttccccataannnnnnnnnnnnnnnnnnnnnnnnnnnnnnnnnnnnnnnnnnnnnnnnnnnnnnnnnctgtagatcccaagatgactggggtaggaggtcttgctagaatgggaagggtcatagaaagggccttgacatcagttcctttgtgtgtactcactgaagcctgcgttggtccagagcggaggctgtgtgcctgggggagttttcctctatacatctctccccaaccctaggttccctgttcttcctccagctgcaccagagcaacctctcactccccatgccacgttccnnnnnnnnnnnnncctctgtggcactgaaatgagc

SEQ ID NO: 12211 - DNA, 837 bp, Macaca Fascicularis
  misc_feature (1)...(837): n = A,T,C or G
tttcagtgattagatgatcagacctgtagagaagatttacacatacttttctcaaatcatggtgaaataaaatggatagactnntcagaggagcaaaagaggggataattctatttaaagaaaaagccaaggaagcttnnnnnnnnnnnnnnnnnnnnnnnnnnnnnnnnctacaattaaggaacaaagaagtgacttgggaagtactagaaggagaggtggaaaaagaagcactgaaaaaaataatagaagaccaacaagaatccctaaacaaatggaagtcaaaaggtcgtagatttaaaggaaaaggaaagggtaataaagctgcccagcctgggtctggtaaaggaaaagtacagtttcagggcaagaaaacgaaatttgctagtgannnnnnnnnnnnnnnnnatggtgcaactggacctgtgaaaagagcaagagaagaaacagacaaagaagaacctgcatccaaacaacagaaaacagaaaatggtgctggagaccagtagtttagtaaaccaatttttttattcattttaaataggttttaaactacttttgtttgcgggggcttttaaaaggaaaaccgaattaggtccactnnnnnnnnnnnnnntgagaaaggaaaaattttttgttgttgtttaacttgtctttttgttatgcaaatgagatttctttgaatgtatagttctgtttgtgttatttcagatgattcaaatatcaaaaggaagattcttccattaaattgcctttgtaatatgagaatgtattagtacaaactaataaaatatatgctatatgaaaagagcaaaaacagtttttttttttttcttt

SEQ ID NO: 12212 - DNA, 716 bp, Macaca Fascicularis
  misc_feature (1)...(716): n = A,T,C or G
acacagcnnggacaccggcnggggccacccggcncgggaggagctgggagccgggccgcagatttgaccccgacgccacagcccagccacggacactggctccccaaagggcgtgccctcaccgcccacttggtttcttttctttgttttcattttgccaaaaagggggtgtgtcttgatcaaaggagagtcacagaacnnnnnnnnnnnnnnnnnncaagtattttgccacgttctggactgtcttctccctgcaccagccagggtgtgtctcgctagccgtgcgtggtgtgaccagccagggtgtgtctcggtagccgtgcgtggtgtgaccagccagggtgtgtctcgctagccgtgcgtggtgtgaccagccagggtgtgtctcggtagctgtgcgtggtgtgaccagccagggtgtgtctcgatagctgtgcgtggtgtgaccagccagggtgtgtctcggtagccgtgcgtggtgtggaacgtatgtctttcctccctgaagctgtgcggagtgaactggggcctccaagagaggcggctcccannnnnnnnnnnnnnnnnnnnntgcctcccgccctcttggccgggatgtctggggtcctgtggggcccccgcagtggtcccaaatagctgnnnnnnnnnnnnnnnnnngggacacaggcagccnnnnnnnnnnnnnnnnnnnnnnnnnncaagtttggggacatgtg

SEQ ID NO: 12213 - DNA, 702 bp, Macaca Fascicularis
  misc_feature (1)...(702): n = A,T,C or G
aggccaagtatctggaccaggtgtgcccacccacccagcactggctcagcagaggcannnctgcccctttatnntctgaccttttgctccaccttctggccctctggcctagcctcctgccctttgcccccacatttcagatccttcacccttattctggccatagaggactgtggctggcctggcctagatccctgtgaccctggagagcaggtggtctagcccagtgatctctggctatactaacccaactcccacttatgacaccttaagctcctgccctatattctctccctgaccctggaagcttcctagcttaaccccttctannnnnnnnnnactgtctctgccttcctgccccctgaccactgccttctaccctctgccctggctgcagatggaggacctgtatgaagacttccacatcgtgaagctgccgctgttaccccatgaggtgcggggggcagacaaggtcaacaccttctcagccctcctcctggagccctataagccccccagtgcccagtagcacagctgccagccccaaccgctgccatttcacactcaccctctaccctccccaccccctcggggnnnnnnnnnnnnnnngtcccccctataatacagggggagccacttgggcaggaggcagggaggggtccattccccctggtggggctggtgggnnnnnnnnnnnnnnnc

SEQ ID NO: 12214 - DNA, 632 bp, Macaca Fascicularis
  misc_feature (1)...(632): n = A,T,C or G
agacccatgannnnnnnnnnnnnnnnnnnnnnnacagcnnnnnnnnnnnnnnnnnnnnnnnnnnnnnnnnnnnnnnnnnnnnnnnnnnnnnnnnnnnnnnnnnnnnnnnccagtgcctccaaggtctgatctctccccttgcagagtaagtccacaccatgnnnnnnnnnnnnnnnnnnnnnnnnnnnngagaggaggttccgcatggtgtctggcaggacccgnnnnnnnnnnnnnatgcgcttggtggctatgtcctgatgcctcatgtactcctcgaactccctctcggcagcttccaccttcctcaggtcgcgcagctgagcagccatctcatccggagaggtgaaaccgggccctgtcctccccatccatcatgagaggttcttgatttcctgagctagctgatgccccgtgagcaggcgtctgtcccctctggccacggcgcgcccctcgttccagtacccctggcagcggctcttagcgtgctgaggggccgcgctcagcacatatgagacgtaggcccccagaaggcggcagaagtnnnnnnnnnnnnnnnnnnggcttgcatggcctaggttcatccaccgcctccctggggcaggcaagaggcagcagcgggctcgcttccc

SEQ ID NO: 12215 - DNA, 713 bp, Macaca Fascicularis
  misc_feature (1)...(713): n = A,T,C or G
tttttgccaagcaggaaaagaactcagggccaaagacactatggagaaaggttggaataaccataagaaaggaaaagactgtcccaagcttgggaaaaagtgtatttatnnnnnnnnnnnnagaggaagaannnnnnnnnnnnnnnnnnnnnncctaagacaaaccaggacggagaccatgagaaacagtgtcaaatcatcttttcatgatcccaggctgaaagccaagccctccagagagcattctgtgacccacaaccgagcacattggtgacagaccttcggggcctgtctgaagccatagcctccacggagagccctgtggccgattctgnnnnnnnnnnnnnnnnnnnnnnnagagcaggagcatcctctctgcttgttcctgactggcaaaggaccagcgtccttgttcaaaacattccaagaaaggttaaggagttcccccaannnnnnnnnnnnnnnnnnnnnnnnnnntaactgctttggtctcttctttcatctggggatgacaannnnnnnnnnnnnnnnnnnnnnnnnnnnnnnnnattcgaattcgggtggnnnnnnnnnnnnagaggaaggagattccacaccagggtggagtttctgacaaaggtcctaagggagtgtttgtgtctgactcaggcgcctggcacatttcagggagaaactccaaagtccacgcaaagattttctaaggaatgcacaaa

SEQ ID NO: 12216 - DNA, 790 bp, Macaca Fascicularis
  misc_feature (1)...(790): n = A,T,C or G
agctcatctcancagccaagcaggtagctgcnnccacagcccagctcctgtggcctgcaaggtcaannnnnnnnnnganncggaggcaatgannngacnnnnnnnnnnnnnnnnnnnnnnnnagcgagcctcagataannnggtgaaagcagcacaaaaggnnnnnnnnnnnnnngagcaggagaatgagacagtggtggtgaaagagaagatggtcggcggcattgcccagatcatcgcagcacaggaagagatgcttcggaaggaacgagagctagaagaggcgcggaagaaactggcccagatccggcagcagcagtataagttcctgccttcagagcttcgagatgagcactagannnnnnnnnnnnnnnnnnnnnnnnnnnnnnccagagactcttgcctgccactaccaaagccttctgggctgtcagggcccaatctgcccaaccccagcactccccaaagtgcctgccaaaccccagggcctggccccgcccaatcccgcagcacatcccctttcccctccctaaccccaagtgccttcatgccctagggccccccaagtgcctgcccctccccagagtattaacgctccaagagtattattaacgctgctgtacctcgatctgaacctgccagggccccagcccactccaccctnnnnnnnnnnnnnnnnnnntccccacagcctcatcagctctcttcatcgttttttgatactatcttcccccacccccagctacccatgggggctgcagaggttgtaagccccaaacaggtcannnca

SEQ ID NO: 12217 - DNA, 965 bp, Macaca Fascicularis
  misc_feature (1)...(965): n = A,T,C or G
agtgccagcagctgcnnnnttcnnntctnnnnnnnnnnnnnnnnnncaggaagcactggacacagtgattctgcaggnnnngagctgctgctgcggtgtggccnnnnnnnnnnnnnnnctggcatctattctgggttgcttgtgaacttctactcatttcctaaatgaaaacatgcagctttttnnnnnnnnnnnnnnngttattgagtggccacaatgtagagtcgctcgaagtagttcaggattaggaattggggtttgtcatagatatattctctggtgagggtggctgggatatacctgactcaccatcttcaggacccatgtcaggtctgaccattgggagcaaagctatgttcacactgacctaagggagaatatgaaagcagtgggctggttataaatttatgtttcttagatttatcctccacctctgtaggcatggacaccctttaatcagagcacctagagtggcctcttgtttatcctaaagatactgatgggccttgttttctgttagtctgttatgtaatattattcttttcccttccttcgtggggaggcttactttgtccagtccttccattcccttctatcttagattacctaaatgttcccttctcaggaattctgtctcatcagttcttcactgtgagcaaagaggctagatgagggtgtggggggttggagttttcttctaatatcaagggttcctggctgtgaggaannnnnnnnnnnnnnnnnnnnnnnnngctgtgaagtcgttttggacctgttgtctgaaaataaagttaatttgtttgaggcatctctcttaagtaggtggaaactattgaagttcagctgacaattacagcataggctctaatgcatgaaaaggtggttggtgaatgaaaaagttgcacagagccactactttatttttccttgagaacaaatttggataaaacagttgtattcagttg

SEQ ID NO: 12218 - DNA, 1006 bp, Macaca Fascicularis
  misc_feature (1)...(1006): n = A,T,C or G
catcnnnnnnnnnnnnnnnnnnnnnnnnnnnnnnnnnnnnncnttaaaaaaaaagtatttgtcatctctttatnnnnnnnnnnnnnnnnnnnnnnnnnnnntgtgcacttaccttaacttttatctattttagtcatccaaaactattannnnnnnnnnnnnnnnnnnnnnttgcccatttcttaggcagttccagacaatgtggggaaggaaagcagtaagaaattcctgggtagcacttatgtcatggaagaagagatatcccacctcctacatatactatttgtgtaagtttttggaacaaggtcatagtcagacattatatctttagattgatgtcgaccacaannnnnnnnnnnnnnnngaggctnnnnnnnnnnnnnnnctgctgggaagaaggcctcttctggctatactgcacagtctcactgggcattcatccagaaatagagaagaaaggctgccagacttgagttgtgttgtcttttattagcannnnnnnnnnnnnnnnnnnngatggnnnnnnnnnnnnnnnnnnnnnnnnnnnnnnnnnnnnnttgacactcaagtggcacattagggaagaatgactaggacaaaaaaaaaaaggagggcaccaagggaaagggatgatggggtgggttggtgagtgtgggtgggaaatgaaatgtttagtgagaatctgctttgtgctggnnnnnnnnnnnnnnnttttatcatttgcttttcaaaccgatgcaccttacccccaccccaatgctctgtccctgcagatatcagaagannnnnnnnnnnnnncactctaaagttcagttttacatgccatcatccctctctgttttttaacaatccaaagacagaccaaaaaaaccaccacagtttattaagtacttactgagcacccatccactgccccacattgtggcaaggattgtgaggggtaaagaagcatggggcacaatattctgctgccttcatgtaacttacagtctcacaaataaataga

SEQ ID NO: 12219 - DNA, 696 bp, Macaca Fascicularis
cacccctgtggctggcgtattgctgagagtgtggtttgtaggggagatgatttccaggcatattgctgtcccttttgtgtatctgtcatccggatgcttcgtaccccacgcctccacaagtgggacagacccgagcatcctccccgcccccatagctacaatgcactccaccccggcctgtcttgcccgggtcggggcctgcggccaacaccatttcacgcacactccttgtagatggaagccagaggaaacctgaacgtgggtggagcattccattgagagtcgacttcaggagacagaaggcccatgctgatggggcagggaaagggaggtaggcattttggatgccaggggaaatggaaatgttgctttcaaaacttagtttcctttccatttcttcctagtctggcctttgatacaaatctggtagaagcctgataaattgagggcacttgtgtcctccctgtgcccccagaagattctcggagagaagtgcaagaatttgtgaacacgccagtggagggcaggtgggcagccatgggctgggcctccgtatcaggcctgctcactttgctgggagctttattctgatgtcattttgaatggtccagagggagcatcaaaagagcccaaagctccggtttccaaagagaggtattgacatttatatagattggtgctgtaacatatttgata

SEQ ID NO: 12220 - DNA, 730 bp, Macaca Fascicularis
  misc_feature (1)...(730): n = A,T,C or G
gtcagcccacagactggctgttcgcttcanntcnntnnnnctccttccannnnnnnnnnnnnnngactctgacatgctggaagtgagagttctgggccataaattccgaaatccagtaggaattgctgcaggatttgacaagcatggggaagccgtggacggactttataagatgggctttggttttgttgagataggaagtgtgactccaaaacctcaggaaggaaaccccagacccagagtcttccgtctcccagaggaccaannnnnnnnnnnnnnnnnnnnnnnnnnnnggggtcaacttggggaagaacaagacctcagtggacgccgcggaggactacgcagaaggggtgcgcgtgctgggcccgctggccgactacctggtggtcaatgtgtccagccccaacacggccgggctgcggagccttcaaggaaaggctgagctgcgccgcctgctgaccaaggtgctgcaggagagggacggcttacagggagcgcacaggccggcagtgctggtgaagatcgctcctgacctcaccgcccaggacaaggaggacnnnnnnnnnnnnnnnaaagaggtttgagtcggggcctgggcccagggtgtgcctcccatggtctgcagaggctgtttggccagctgggnnnnnnnnnnnnnnnnnnntttgtgatttcctctccttggtattaaaggcnnngtttggtgtctgtcatggtgtaactcacc

SEQ ID NO: 12221 - DNA, 684 bp, Macaca Fascicularis
agcaccatgaccaccccacaggtcctgaagctgctgctcaacaaatttaagattgagaattcagcggaggagtttgccttgtacgtggtgcatacgagtggtgagaaacagaagctgaaggccaccgattacccgctgattgcccgaatcctccagggcccatgtgagcaggtctccaaagtgttcctaatggagaaggaccaggtggaggaagtcacctatgatgtggcccagtatataaagtttgagatgccggtacttaaaagcttcattcagaagctccaggaggaagaagatcgggaagtaaagaagctgatgcgcaagtacaccgtgctccggttaatgattcggcagaggctggaagagatagccgagaccccagcaaccatctgagccacgagaacgaggggatccgggtaccccaggagccgccattgccataaaacccccaggaagctgggcactttctttccatggaaacatctagacacaaacctccccagctccggccaagccatcatttgttacctggagctggatgtagaagtcagcagacagctccccatccctggacccctgccctcctttcttccactcacaaggacttttgattttagttataaggaggacccaaaatgtgtgtgtgtacatgtgtgcgcacgccatggtacgtgtccatgtgcc

SEQ ID NO: 12222 - DNA, 781 bp, Macaca Fascicularis
  misc_feature (1)...(781): n = A,T,C or G
atnnnnnnnnnnnnnnnncacagcccacnnngatgctgcattccagctgacccatgctgcccannnnnnnnnnnnnnnnnnnnnnnnnnnnnnnnnnnnnnnnnnnnnnnaccagaacatcacaccttnnnnnnnngacttctctgggagcagcactgaaagaatttgaaactgacttttggagctttccttcttttttctttcaactgaaaatgatttaggtaaaacctttccgnnnnnnnnnnnnnnnnnnnnnnnnnccaaagaccttcctgaggctgcctcagaagcaccatgtgctgttttgaatgactctactagtatgagaaggatgtgaagatggttggctggttgggctttaacttcctgggactcataatttttaagcttggaagatagctgctgttcccatgatgggcacatttcctgagagnnnnnnnnnnnnnnnnagcatagagcacccctgccttcctcaggaaacctgaccggcaagggctctctggcttcctgaaagcttcacctcttctctccagtttatatctcaactgtatagggcattttcaagcttctgttcatggaatgagcaacnnnnnnnnnntggannnnnnnnnnnnnnnnnacaacaccactaagtttcagaactttccttagaacttgggcaaaatgtggtgataactcttaggtgcttttggtgtctcttgagattctaacttttaaagagcaaccattaatgtgtaaaannnnnnnnnnnnnnnnnnnnnnnnnnnnnnnnnnnnnntat

SEQ ID NO: 12223 - DNA, 772 bp, Macaca Fascicularis
  misc_feature (1)...(772): n = A,T,C or G
tttgataccagggtacttgagggtaagaaatgttttcaatatgacagcgaaagagggaagaaagaaatcggtccgtgtcctggtggctgtggggaacggaaaaggagctgcaggttttgctattgggaaagcnnnnnnnnnnnnnnnnnnnnnnnggaaagcaaagaacagagcactttactgtttgcattatatagaacgatatgaagaccatacaatattccatgatattnnnnnnnnnnnnnnnnnnnnnngtatcaggatgaagaaacaacccannnnnnnnnnnnnnnnnnnnnnnnnnnnnnnnnnnnnnnnnnnnnnnnnnnnnnnnnnnnnnnnnntgtacgccaaggtctctgggtctgttaatnnnnnnnnnctcacccggggcctcttctatgggctctccagacaggannnnnnnnnnnnnnnnnnnnnnaagaagggtctccatgttgtagaaatccgggaggagtgtggccctctgcccattgtggtggcctccccccggggggccctgaggaaggatccggagccagaagaggatgtcccagacatcaaactggactggcaagacgtgaaggccgcgcaggggatgaagcgctctgtgtgggctaatnnnnnnnnnnnnnnnnnntaagnnnnnnnnnnnnnnnnnnccagttcctgtacctcggagagaccaggagagactcagcccctcacagcttggggcgtggccttggtttttgtttgttttgaggaaaagtttaatctgtaaactctcaga

SEQ ID NO: 12224 - DNA, 675 bp, Macaca Fascicularis
gaatgaggaaaaccaactacatggagaatctcaaagaaaagagcgagggagaagctttactgtatgaagatagaataataacagagaaggacatgaggagagtgagagatgagcccgagaaggtggtgaagcagtgggaccatattgaggatgagagagagacggatgaggacgatgaggcttttgggggagctctgcagagcacagcaagcggaaagcagagtgtggaagcaggaaaagccagaagcgatttgggagaagttgccaagggcctgtcaggagaattaggcacaagatcaggagaaacaggcaggaagctactagaagctggcagaagagagtcaagagaaatttataggaggccttcaggagaattaggccaaagactctcaggagagttcagcagacaggaaccagaagaactaaataaactttcagaagtgggcagaagagagccagaagaactgggaaaaacacaatttggggaaataggagaaatgaaaaagacagaaaatgagatggaaaaggagtatgaatgaagacaccggtagggataaggatcaggaagttggtgttcagagggataacgggatcttattaaactggattttcaagcggatttatctgtaataggaaaaatgagggttttacttgtgctgctttccgtcactattt

SEQ ID NO: 12225 - DNA, 772 bp, Macaca Fascicularis
  misc_feature (1)...(772): n = A,T,C or G
ctgctagccggagcaaaggccgangtatccagatatgacanngagtaagtaaagccagggctggggaatcnnnnnccacttccaggatctgattctgtgtnnnactagtgtcccacttcttaccatttctgcctccattttctcctgtcagtcccgtcttttnnnnnnnnnnnnnnnnnngaaccataatttggagttgtcgaagctgctgagccggcttggacagccagtgccctcatggcttcgggaagaactgcagcattccagtctgggctgatgtcccagcctcccgtaccagcaaaatgccctctgcttccctaaggggcaagcccagagcagggcccacaagggggattagagtggcctggcccctccccctctacctcagtagccccctgagaagggaagggtatccttttcccatagttctggggcaaataaagggacttcctttggtaccccacatcatggtactaggtacctttgacccatcatcttgggaggtggggaggaatgagagggttcaggcagggtataggggaatgtattagtccaatgagatttcccttttcatccacagcagtgtatctatatatacctggatatgggagagaccccttgctatgggagggaccccttgatatggcccctttagtcaggcagtgggatnnannngtggcccggcctccctaatgtcattcacattgaatggggatgaggtcggacagtggctacatagagctgagtatgagccctagctgtgggctagaaa

SEQ ID NO: 12226 - DNA, 732 bp, Macaca Fascicularis
  misc_feature (1)...(732): n = A,T,C or G
cagctatggtttggcattgtacaaagcatcttaatgacacagtaaagttaaaaagatctttacaaattgaaatgtgatacccttgtctccaaatattttaattgccataaatttgtttaaaaatacannnnnnnnnnnnnnnnnnnactctaaactttctatactctcaataccacaaaatacatataatatactatacagatgtggaaaaatctagttagtatataatactttgctcaccattaacagctttatcatgtgaaatgcacatactgacttagaaatcctagcttttgagccccaaagtacctctgaaattttaatgtattgcaacaaataaaaatcacagtatgtaattgaaattctggttgaaaatgtcagatgcctaaatattttggataaaagaaacgtaaaacaaagatttggttcatgtacaaaacaaaggcatcctatcagtcactaacagtacctttctgcaaaatcaacaggcttttaatttatcagtgacattacctcccctccaaaaccctccccaaatatcaaacaattatttaccaaataattttaatttcaaataaaaggattttcaataaatatataagcatttccatcctccatatacaaagtttcttaaaaccattcaaaacggaggctagatagaaattttcataactgtgcttacaaccccacaactggccctcaaggtggtgcttttcnnncacgtcagctggc

SEQ ID NO: 12227 - DNA, 1255 bp, Macaca Fascicularis
  misc_feature (1)...(1255): n = A,T,C or G
tgtttatttttctatgaatccctatacatggttgtttcccctcctcttgagataatctaaatataaaccagctacttgatataaatgagaatttgtgtggatatttatttaaacaaatgtgtaattttgagtacagaattcaacagttacctccaaaagagaaacattcttaatagaatttaannnnnnnnnnnnnnntaaaattttccaagattaactggtagttcattgtaaatgaacctnnnnnnnnnnnnnnnnnnnnnnnnnnnnnnnnnnactatcaaataactgaggaatagatatggaataagtgtacatatgtaaaatatggttactagagttagatatgtgccaaagttcatttatcccaaatcctnnctgaaaagaagaggaggggtacattagtaaacattttggagtgcttaaaaatgccaaaaacaaaatggtagtttctacttggataaagtaaaaaagttaaatgtgtgtaaaagagtgttctgtgtccctctactccagcatcgtcccatgtaaaataagaaagccctaaaatactgttggagagaaaaaattaactaggttgctaccttattagcctaagtacttttatccattttgttagattttgcctgccttttggagggaaggagggaggcgatattctggattataaaaatgaattgggaacattatcacaattctagactttctattaatatttatgtgttttaataaatgtttgaaattatttatgactacttaaaatgaatctgaccagtgcttcttgtatatgtaatatgtggagttagcccctgaaatttgctttaagtgtttcggtgttgaatctgtttctaaatattcattattacatggtgcacaagtgacactccatatattccacacagacttttaccttgctgtattattatgaaaacaatacattaatctgatttttcagtaattagtaattttaggttgaaaattatccaaaagaaacnnnnnnnnnnnnnnggacnnnnnnnnnnnnnnnncaannnnnnnnnnnnnnntcaaaacttcaaagagaattcatcttttgctaatgcttgtggttctgtgntccctgaaaaaaaacaaaaataaaaattagttgccttctaataaacattgttgagttaaaaattaatctgagctataatctaaatnnnnnnnnnnnnnnnnaccggaactgaaagaaaaaagttttaataagaaagaaatagtgtttttggttcatatg

SEQ ID NO: 12228 - DNA, 342 bp, Macaca Fascicularis
  misc_feature (1)...(342): n = A,T,C or G
gaatttgatggagatgctaaagcgaaagtggagaaccttcttgggatttccaacctggagatgatggaccctgttagggagggggccggctctttccctggcagcaacatccttgcccttgtcacacaagtcagcctccatctgcgcagctctgtggacgcgctgctggagggcaacacgtacgtcaccggctggttcagcccctaccaccgccggcggaagctcatccacccggtcatggttcagcacatccagcccgcagcactcagcctcctggcgcagtggagcaccctcgtgcgggagctggaggtcgccctgcagctggctttctacccggangcc

SEQ ID NO: 12229 - DNA, 728 bp, Macaca Fascicularis
  misc_feature (1)...(728): n = A,T,C or G
gaggnnnnnnnnnnnnncccacatcctccttccccaggacctgagctcccggcatctgcagacgacccccgcagcctttccctcggacccccctcgaagccccctggactgattcccacccacgactcacagacattcctcccacagccctttcatttcctccccaccccactccccaaatacagaggtccgctttgaagtggagnnnnnnnnnnnnnnttattgagaccagaccccaagtcccccacccccatcctgctccagctttcctctaacagggaccagcgctccgctttgcccccagggggttcctctaaccaggaccagcttcctagcctcctagagaccaaaggccgcccccgcctgctggggttcctcccacccccccagcttgctggctgcccactttgccttctggcctccagctgggtgtggggggcggagcaaggcgggggacagcagcacctttttnnnnnnnnnnnnnnnnnnagagctctggccccaaggctnnnnnnnnnnnnnnnnnnnnnnnnnnnnnnnntggtcctggaatatcaccccgcactgtggggccgggcaccactagcctggctcnnnnnnnnnnnnnnnngactgctgtgtgctgcccgcctgcctgctggctctcccccagccccacgtcccctttggaagagaatgtaaaataaacctggacacaagggaaaaaaaaaaaaaaaaaaaaaaaaagg

SEQ ID NO: 12230 - DNA, 756 bp, Macaca Fascicularis
  misc_feature (1)...(756): n = A,T,C or G
gattaatnnnnnnntttccaacagtgcatcaagcatctgagaataacattatttttgagtaaaaacagaaactctttgggagagaccccctccccacaggtcagctgctcaaatgtccaccatatctagcagcgcagagagatggagctcagaggcaacttcctcttcccttgatctccggatnnnnnnnnnnnnnnnnnnnnnnnnnnnggttagacacgttcctgttgcctctgacagctnnnnnnnnnnnnnnnnnnnnnnnnnnnnnnnnnnnnnnnttacagatcttttcatcacaggttcaatagcgtgagaaagagacactagagtctgaggaagatagaggggaagggaagttaaatccgtaaatgctcctgagtcttcnnnnnnnnnnnnnnnnnnnnnnnnnnnnnnnnnnnnnnnnnnnnnnnnnnnnnnnnnnnnnnnnnnnnnnnnnnnnnnnnnnnnnnnnnnnnnnnnnnnnnnnnntcgcannnnnnnnnnnnnnnggggaatcctcccctctcggccacactctgtgctcnnnnnnnnnnnnnnnnnnatgtgaagcaatggtatgggaaaattgtttgcagaaggatgaaaaggctttattcccaaacgtcnnnnnnnnnnnnnnnnnnnnnnnnnnnnnnnnnnnnnggcttggncccacgacaaaggaacatcatattttttcaaatcgtttttaaaaaatacacacatatctgnnnatcttcactcagtgcctct

SEQ ID NO: 12231 - DNA, 773 bp, Macaca Fascicularis
  misc_feature (1)...(773): n = A,T,C or G
gaaagatgtgtatgcagttcnnncagctagagcggaggagaaagagnnnnnnnnntcggaagcccagatcaatacagcaaagcggctcctggagaaggggaaggaggcagtggnnnnnnnnnnnnnnnnnnnnnnnnnnnngaccaaagaagagaggaagaaggagaaannnnnnnaagctctgcaggaatttgacttggccttaagaggaaagaagaaaaggaagaagtttatgaaggatgccaaaaaaaagggggagatgacagcagaggaaaggtcnnnnnnnnnnnnnnnnnnnnnnnnnnnnnnnnnnnnnnnnnnnnnnaagaggaatcgcagagccaagcgggcccgagnnnnnnnnnnnnnnnnnnnnnnnnnnnnnccnnnnnnnnnnnnaaagcaggggaagaaatctgtatttgatgaagaactcaccaacacaagcaagaaggccctgannnnnnnnnnnnnnnnnccttnnnnnnnnnnnnnnnnannnnnnnnnnnnnnnnnnnnnngacgaggaggaaactttaaatctaaatccagatacaagaggaggaagtagctgttgtggcctgaagaaattcatgggggcagcccttaaatcccttccctgtgggaagtcatcctggctggtctgtcttttctccgtttgttcaaaaaacaaaaaaaaagtttggtgtggtggtatggtatgtagctattttcnnnnnnnnnnnnnnnaatctcctttcttgctgattagctttcacataatgactatataa

SEQ ID NO: 12232 - DNA, 703 bp, Macaca Fascicularis
  misc_feature (1)...(703): n = A,T,C or G
actgtctggctctgatcagcgcaggggccagccaggggcatagccagggaggggccacgtcacttcccactggaaatctctgtggtctgcannnnnnnnnnnnnnnngaacgggtggattccccaacctcaacctcctttctcctctgctcccaaaccatgtcaggaccaccttcctctagcgctcaggagcccggagggtcttcacccactcttaactccagtgtcagctggcatgggctccttcctgagtgcaaaggtcaagggccccctctgtgaaggctcagcagaggtgggatcccacaccccctcctggcccctccctgccctccattcaggaagaaacctctccttcccgtgtgagaagggccagagggtccaggcaccccgnnnnnnnnnnnnnnnnnnnnngcccctcttggctgccaagcacccagatcccacggacatttggggaaagggctccttgggttgccggtgaacttcctgtggccaccgcctcctgctcctgacctccctggcagggtgctatcacttctgtcttggcccttccagtcttataaattggtttccagcccnnnnnnnnnnnnnnnnnnnnnnnnnnnnnnnnnnnnnnnnnnnnnctgtcagggagggtggttactgtggatggaatagtggggcctnnnnnnnnnnnnnnnnnnnctgcccacatcttggagggc

SEQ ID NO: 12233 - DNA, 870 bp, Macaca Fascicularis
  misc_feature (1)...(870): n = A,T,C or G
ttttttgtgtgcagactgnnncatttatttttagcnnnnnnnnnnnnnnnncannntgtgtaatataaaccatgtgtcntgtcaaagtgaaagacattttaaatctntagcatgggnnagtgggcaggtgcgcacagtcgaagccacacctgatccgttttctgtgcactgtagccttagtgtcaccttcattcctgtgtctccctgtggtannnnnnnnnnnnnnncttttttatcatttctactgaagttgggaaattcagcccgagaaagtgtcnnnnnnnnnnnnnnnnnnnnnnnnnnnnnnnnnnnnnnnnnnncnnnnnnnnnnnnnnngacagggtttttggtttttgtgggggctagaaaaaaaaaacataaaatgagacagttaaataataatacgaaggtgtgctacagaaaatctggtattcttgctaacattgccccttcactgttgcttaattgtgaatagccaaaagctatatgttacggcttgttgtgtgaaggtaactaagcaaaagtgttccatgactttagagtacatccatgcagagtccattatttgagtttgccatttaataactttgttggaaaatctataaaaaagaaaaacaagtttgcaagtgactannnnnnnnnnnnnnttgagtgaaagtacttcaggcacgctgcctnnnnnnnnnnnnnntgcagggagggaggacccacactgctacacttctcatcccctttggttttactgcccaaatctaaatagatacttttgattatagatncnnngttcttttactaagagatagtctctacctgtagaaatgtattttgaaaacacttattttacacagcaattttgtatccatttatact

SEQ ID NO: 12234 - DNA, 721 bp, Macaca Fascicularis
  misc_feature (1)...(721): n = A,T,C or G
tgaattttttttcttggctgttcaaagtaatgtgtttttcatttttcaaaannnnnnnnnnnnnnntctactttgcagctgcgatggggagagctgtcccgctgcgtgcgttccctctataatttcctcagagctcacatacgtacctctctcatgagtgaactcagacttcctgttgttttgctttattctatcatttgctttgtggttttgctgtaaatattgaaatcttaatcgttgagaggcacaaccgagctttctagctctccacccccgcagcccatccgagtctgttcatctggtaacttctgtttgggatggcagcaagcagaggctggggcctgcctgcagtcnnnnnnnnnnnnnnnnnctcacttttgcctagggtccagtttgggcttagaaaatattcaaagagaataatgaggattttttgtgtttcctagacattttatgcatttatttttgtgaaatcaccttcgctaactttcaccgagcactttgagcacagtggaacttcggaagcagcaccagcctcaccccagaatctcagttggcatagctagaaactgagtcccttcctaggacactggccgtggccttcagggtgtccagtgccaccagtgtggcattggtgttgcagaccagnctctgaagacaaaccgagcaccccggcggcccctcactcaaactaagcnnnngtcttttttctgtctccact

SEQ ID NO: 12235 - DNA, 750 bp, Macaca Fascicularis
  misc_feature (1)...(750): n = A,T,C or G
atggtgttgtatcagtaaataaacatagtggccagttnnnnnnnnagtannncccagaacaacgatctcacctctacgggataactgcagtctacccctactgcccaacaggaagaaagtaaatacagtaatgtaaaggaagacttggagtttacaatcagaacctggaccctgaagaacagtgactgcaaaggcaaagtaaaaaaggaattggccattagacgttcctgaacatacaagatgaacattattagtgcaaaaagacttttgtgaaaagttgatacctcaatctttactactgtatttttaaaaatgaaggttattgcaagtttaaaaaggtaatagaattttaactgttgctttaaagcaacttcttgtaaacacttatcattaatatttaaaaggtcaaattcattcaactaagagtttaagactctaaatgtgatttttgctatggattccttctggccaagaaattaaagcacatgtgatcaatataaaaatacaatcctaaaccttgacagttagagaagccannnnnnnnnnnnnnngaaaggaccaattatttatagtttcccaacaaaagttctaaaattttttacctctgcatcagtgcatttctatttatatcaaaaggtgctaaaatgattcagtttgcattttctgatcctgtagtgcctctatagaagtacccacagaaagtatcacatttataaataccaaagatgtaacagttttaaaatttctaga

SEQ ID NO: 12236 - DNA, 761 bp, Macaca Fascicularis
  misc_feature (1)...(761): n = A,T,C or G
ttttgtagtatttacattaatcattcctttttttgtttactcataaagggcttgtaactctgtattcactgnnnnnnnnnnnnnnnnagatgcaattgaaattacaagtgaagaccgtgttatacaggtttgttattttggaaatctgtctttctggattcttgttttgttagttccagtttttaggattgaacctctccaatatgattttttttttctttttgaagttcaggagaccagtttttcctnnnnnnnnnnnnnnnnnnnnnnnnatnnnnnnnnnnnnnnnnnnnnnnnnnnnnntagattagaaaacatactaacaattaaggtcttagaaaatgcctgtagaaatgccacatttgcattcattatttccactagtttgtttgacaaggagagactgaaaagggtgattgctggcggcttgggggtagtcctgttgtaggagggggaatgctctgaccataaggtctgcgnnnnnnnnnnnnnnnnnnnnnnnnnnnnnnnnaatttgcacttacagaaatatactagaaacaactaaaagtttcagaaataacatacctagtaagtactgaataaattacacattattagcnnnnnnnnnnnnnnnnnnnnnnagcaacatagcttaaatgcttgcggataacagcaaaaaagggagttgcaccagnnnaaacatccttttgtctgagaattagctccactttgatttcacttctgggctctccagtactttcactgtaatgtgactgtga

SEQ ID NO: 12237 - DNA, 737 bp, Macaca Fascicularis
  misc_feature (1)...(737): n = A,T,C or G
ataaaattcaaagatattttagcatgcagcttcctagatgatttatggagctaagggatgaggaactgtccaaggagagtcaagaannnnnnnnnnnnnnnnnnnnnnnnnnnnnnnnnnnnnnnnnnnagtacttgaatcttgataaagatcacaatggcatgctcagtaaagaagaactctcacgctatggaacagctaccatgaccaatgtcttcttagaccgtgttttccaggagtgtctcacttatgatggagaaatggactataagacctacttggactttgtccttgcattagaaaacagaaaggaacccgcagctctacagtatattttcaaactgcttgatattgagaacaaaggatatctgaatgtcttttcacttaattatttnnnnnnnnnnnnacaggaactaatgaaaatccacggacaagatcctgtttcatttcaagatgtcaaggatgaaatctttgacatggtaaaaccaaaggatcctttgaaaatctctcttcaggatttaatcaacagtaatcaaggagacacagtaaccaccattctaatcgatnnnnnnnnnnnnnnnnnnnnnnnnnnnnnnnnnnnnnnnnnnnnnnntgacagtgaaaactctacagaccttgatgatacatgatctctgaaagactagactgtcttatattaagagatacttgaatgctgcatgtaaagcctttaaagcaaaatcctcagaatggtctaa

SEQ ID NO: 12238 - DNA, 740 bp, Macaca Fascicularis
  misc_feature (1)...(740): n = A,T,C or G
agaaggtggaagnnnnnnnnnaggacgcgtactaccggagccagtgacatgcactcaaacatgannntgcccccgttgagcttggagagtcgtcagcgttccgtaggcaccaggacgacctggccgcagagcgtgtatttgcttccccgcaggctgcacaggtgcactggcccgagagctggcccgcgagtaccctcgtctccaggtgactgtgtttgacctcccggacgtnnnnnnnnnnnnnnnnnnnnnnnnnnccgccggaccacaggcagcnnnnnnnnnnnnnnnnnnnnnnnnnnnnnnnnnggaccccctccccagcgctgagctatatgtcctgtgccggatcctgcacaactggtcagacgacaaagtccacaagttacnnnnnnnnnnnnnnnnnnnnnnnaagccaggggccggcctgctgctggtggagacgcnnnnnnnnnnnnnnnnnagggaggcgcagggtggcctgatacagtcnnnnnnnnnnnnnnnncagactgagggcagggagcggagcagaggcgagtaccagtgcttgctggagctgcacggctnnnnnnnnnnnnnnnnngtgcacttggagggtgtcctggatgccatgttggccaccagagtggccccctgaagcccaggcagcgtgttcattatagcgacgtcctcccccaggctgcaggtggaccacctggtccccaaatatataggacagtcacataggagcgtgcagt

SEQ ID NO: 12239 - DNA, 737 bp, Macaca Fascicularis
  misc_feature (1)...(737): n = A,T,C or G
agaatgcagaattcatgggagaggattaaacttccacgagaggaagaaatccaagaggaacaaaacagagaatggtctttgcagcagcaaagggaatggaagaacgcccgtgctgaacaaaaatgcgcagaggccctctacacagagacaaggctgcagtttgatgaggcagccaagcacctacagaagctggaaggcaccaccagaaaggcggtttgtgcatctgtgaaagannnnnnnnnnnnnnnnnnnnnnnnnnnnnnnnnnnnnnaaaagcgagagaaaaagcaagaacaagaggacaacttgactgagnnnnnnnnnnnnnnnngtggggacctgctctccgagaacnnnnnnnnnncagccagctccttcgggccccaccgtgtggtccccgaccgctggaagggcatgacgcaggagcagnnnnnnnnnnnnnnnnnnnnnnnnnnnnnnnaagtccaggagaagctgaggctccaggaagaaaagcaccagcgagacctgnnnnnnnnnnggcggaggattcagggggcccgcgccgccctgctgtttgagcggcagcagcggcggcagcagcgtgacctgcgcagagctctggacagcagcaacctcagcctggccaaggnnnnnnnnnnnnnnnaaaaatacatgaatgaagtctatacaaatcaacccacgggagattatttcacacaatttaatacaggaagtcgataatgaggaagacactc

SEQ ID NO: 12240 - DNA, 181 bp, Macaca Fascicularis
gcaggacaggtatcagcgtcacatggcaagaaaagtccttgttgagggagagggggtgccggggtacccgggggctggggaagcaaggaaataagtcatctgtgtgctgactggggataatggcatcaaatgtcagtccttgacatttggggggaacagcaggtgccggagctaaaaggta

SEQ ID NO: 12241 - DNA, 738 bp, Macaca Fascicularis
  misc_feature (1)...(738): n = A,T,C or G
tagtctctctttaaggataatctttttagagagaagtcnnngtattgtgtgtttgtctannnnnnnnnnnnnnngttaaaatttgggcattttggagtagtctcgttttttttccttttatnnnnnnnnnnnnnnnnngctggaatagtctagtttttaattcacttggccagctagtacaatgatgatttaagattattttaagtaagaatacttgacgatatagatatgctaaaacagaaatgaattcttcttggtgatggtttttctttggcaaccaggtgagataatggatannnnnnnnnnnnnnnnnnnnnnnnnnnnnnnnaaagtgaaatgggtggacatcagtgataaactgaagctttatgccagtcattttcagttcatcaannnnnnnnnnnnnnnnnnnnnnnnacactggagcgaggactctgaagctgactgccatgggttgtagctgatggtctccgtgtaagccaaaggcccacagaggggcgtatactgaaaagaaggcagtatcacagaatttgtactataaaaagggtagggtaggcnnnnnnnnnnnnnnnntttnnnnnnnnnnnnnnnnnnnngtgtttcacatcagaataaaatgagtaagatgaactagaacacaacattttcagctttttggtcaaaaggaatataagtagtcatatttggtatgtatttaagcatgacttaaatgaaatgtaaacannctaatgctctttg

SEQ ID NO: 12242 - DNA, 693 bp, Macaca Fascicularis
  misc_feature (1)...(693): n = A,T,C or G
gggagnnnnngnnggcccatgtccgnnccttcaccccccaccagcaagctcatatccctaactccatcatgaccatcttggaggccagcggcaagcaggagccagaggccaaggaagcgcctgcagggcccttggaggaggacgacctggagcctctggccttggccccggccccggccccggccccccggcccccgcaggacctcattggcctgcggctggcccaggagaaggcnnnnnnnnngcagctggaggaggagcagaagctgaagccgggaggagtgggagccccctcttcctcctcctctctctctccctcggcccggccgggcccgcccccgtctgaggaagccatggatttccgggaggaggggcctgagtgcgagaccccgnnnnnnnnnnnnnnnatggatgacgactcagggctgaccgaggccgcgctgttggactctagtctcgagggccccctatccaaggagacagcagcgggcgggctgacctctaaggaggagcggagcccccagaccctggcacctatcggagaagatgtcgtgaagacccccagcccggctgccgaggatgccagggaacccgaggccaaggggaacagctgacggggctgggggcggggaagggggatgggacggggatgcggggctgggggacagggcggggcttgacctgcaggtgctt

SEQ ID NO: 12243 - DNA, 983 bp, Macaca Fascicularis
  misc_feature (1)...(983): n = A,T,C or G
tcagatgatgagatgctgcagtgacatgatgagcaaatgaaagcatgtttaattcaaagaagagagtaaaggatatggctgctcctggaacatcaagtgttcctgctccaactgcaggaaatgctgagaaattagaaattgctnnnnnnnnnnnnnnnagaatcnnnnnnnnnnnnnnnnnnnnnnnnnnntctcaggtagatgtgatgcaacaggccaccaatgcaattcttagaggtggcaccattctggctcccactgnttcagcaaaaaccattgcagaacaacnnnnnnnnnnnnncaatgccaagctcaattatgtgcctttagagaaacaagaagaagagagacaggatggtggacagaatgaatcttttaagagatatgaagaagaattagagatcaatgacttcccacagactgctaggtggaaagttacctctaaggaagctctgcagaggnnnnnnnnnnnnnnnnnnnnnnnnnttacaatcagaggaacatacttccctcctggtaaagaacccaaggaaggcgagcggaagatttacttggctattgaaagtgccaatgaactggctgtgcagaaagcaaaggcagaaatcaccaggctcataaaagaagagctgatccggctgcaaaattcataccaaccaacaaataaaggaagatacaaagtcttatagacatccggaaaaaagatttttacctgtgctggtctatgatagatgtggcagttgcagtctgcagtttacaatgtattgtaaattaagatttttaaaaattctgtcttgctgattttttttaaatacaagaaactagtatttggtaaagaaatctgtccgtaagtacccccacaatcaatcaaactatatttaaagccggcctgttttcagagtgtgatgtcctttaatgtaaacttaaatatcaatattttaaatgtctggataatattctagaggttaaaaaaatggaaatatttg

SEQ ID NO: 12244 - DNA, 613 bp, Macaca Fascicularis
  misc_feature (1)...(613): n = A,T,C or G
cagtnnnnnnntctgtctgtgggcgtcacggtggcccctcnnngactgagtggctgcccacgatatcgggggtgggatggacaaagcgtgtggtgtgtgacaggacacagcccgaggtcatgcggcccaccgtgttgcagggttcagagcccagctacctggaccgcacggagcagctgcaggccgtcctgtgcagcaccatggagaaggtgggcagggcctcgggttgggcggggcctcgggaggggcggcctcaggctgggcggggcctgagactgggtcagtcctggccagtggcccccacttcagcgcaccccaggccacttccgccctctgaccccgactcctaccgcagagcgtgcttggtggccaggaccagctgcgggtccgtgtcacggagctggaggacgaggtgcgcaacctgcgcaagatcaaccgggacctgttcgacttctccacgcgcttcatcacgcggccggccaagtgaggcccagagacccggacccaaggcgcccaggcctgagccccacgcctcccagcgaccggagcccacgggtgtggcccccaccagcccaggcctggactctccccagttctgcgtcgtgtttgggct

SEQ ID NO: 12245 - DNA, 752 bp, Macaca Fascicularis
  misc_feature (1)...(752): n = A,T,C or G
atccaggagcacctcagggtcattggggctgtggggaccggcattgcctgtgtgcaggtctttggcatgatcttcacaagctgcctatacaggagcctcaagctggagcactactgaccctgccctgggcttggctgcggctctctgtgccttgctgctgctgcacccaactactgagctgagactactaagtgccaggggttgggctccctgatgacacccaccctgtgccatcaccataacctctggggaccccaaccccagaggcagcttcaagtgcctttcgctgcacaccaaagcccagcagggaagtaaggggggctggcgggacgacggtatcgggggtgttttgtggggctgcctgaacacattttnnntggtggtcagatgcaggctagaaggggccttgctgagtagggcaaggccgagtgttcccagcagggggagaagcccttcacgccccaggcccttcagggattggggctttgccttgcagccacatggccccatcccagtcagagaaactgagtaaggtctgacccttgggcctgggcctctgcccctccccacccaggcctcgtctccctcagagcccctgctttcttccccaccgcggtcaccaccacccgaaatgccacatggtcactgtgcactgccccatccatgtgcctgtgtggggcaggggcctcccagttttgttcactgctgtacccagatgcctacaatcatccctgccacatacagggctcaaa

SEQ ID NO: 12246 - DNA, 432 bp, Macaca Fascicularis
  misc_feature (1)...(432): n = A,T,C or G
aatgtccctggagagggacccaccctggagggaactgtaggccannngnnannncatgtgtttcctctgccacccagcccccatgnnngcggaccnnnnnnaagatgctccagggggtcatagtggaccctacaaacctcccttcagtagcccggaagttggtcttccatggacaacacaaaggaggccccgaggtcctggcctcacctgaccaggatcaaggtcagtagcctcccttggcttcagagagggaaactgcgtctcctgcagccccagcggcttcaggcgggccggggctccaggaagccggccacctccaagcagggcccatcctgtccggatttgcaaattttaggctcctgagccaagtatggaaggttcagaattatgtttctatcctggaggagaagagagctccctttgttttctttc

SEQ ID NO: 12247 - DNA, 749 bp, Macaca Fascicularis
  misc_feature (1)...(749): n = A,T,C or G
ttaatgaaaggctaaaagagcacgaccttgaccccaccgcaccnccatacgactcacttgcaacctatgcctatgaaggaaatgattccattgctgaatctctgagttcattagaatcaggtactactgaaggagaccaaaactacgattacctccgagaatggggccctcggtttaataagctagcagaaatgtatggtggtggggaaagtgacaaagactcttaacgtaggatatatgttctgttcaaacaagagaaagtaactatacccatgctgtctccacttcacaatatttgatattcaggaggtttttcctgccagtcagcacaatttttttttcccatttacttcttaatttgttcattaattacattaattctttcctgtaggatgtctcatggaatatatacaacattttatttaatcacttccaagagccaaagctatggaaatacagtgttgtccatcttagtaaataaaagataatttcagaaacatgaacaggattgttctcccttaagcaacctcacaaacaagccgcttctgttagatacatgtcctgcccttgcaaatgaagcttttaaaaaggtgaagaaaaattttaaggtatatcctgttctgtacattaaattaaaaaaaatgtacatgtggtgttagtaggtgtgatatgcaacctggtatacagacatttgtgcaatttcatttcatcaaattctatctgctaatgttttatatttatatttttgt

SEQ ID NO: 12248 - DNA, 751 bp, Macaca Fascicularis
  misc_feature (1)...(751): n = A,T,C or G
ggttgttatatnncatcaggaaattcagataatggcaaagaggatctggagtctgaaaatttgtctgacatggtacaaaagattactatcgcagagccgagtgactgaacacacactctcaactatatatctacagatgcattccgttttaactcttcttgagctaaaacatcaaataagagaggaagataaatatttgtaaataaaacctaggatttaaatgttttaatctgaataattgtacataaaattttgtatcactaacattccaaattattgtcaataaaatacatatttattattttaaatgctatgtgttaatatttcacttgcctgtattagaaaggcataatgtaagactttggtacgtgtgacatatgctttatttgactttcttttacaagtacaatatctgcaaaaaacaaagtaatcttttttcctacctgccagttttgaatttgtatatgttattaaacaaatagtaatagaggattcattgttgaaacaagttgtccaagcaatgccatattcatttttacacttattgggaaagtgtgagttaatattggacacattttatcctgatccacagtggagtttcagtaattatattttgttgacttcattttgttttctagtataaaagtatagataatgtgttgtcacttctgatttagtgaaaccaattnnnaataattgtacagatgttttgtctttaagtgtaaatattttaaaatttgacataacctaa

SEQ ID NO: 12249 - DNA, 754 bp, Macaca Fascicularis
  misc_feature (1)...(754): n = A,T,C or G
agacagcgtgtgccaagcagatgagaattcgaatggcaggcagcagattctgagtctgggcatggacctgcagttggaatggatgaagttagaagatttccaaaagcaccttgatgggaaagatgagaattttgctgcagcagatgcaattccaagtaatgtgttaagggatgctgtaaaaaatggggattatattactgtaaaagttgcacttaattcaaatgaagaatataacctggaccaagaggattccagtggaatgacactggtgatgcttgccgccgcgggagggcaggacgacctcctgcgactcctcataacaaaaggcgcgaaagtgaacggtcggcagaaaaacgggaccaccgccctcattcatgccgcagagaagaactttttaacaacagtggctattcttttggaagcgggagcttttgtcaacgtccagcagagcaatggtgagaccgcactgatgaaggcctgtaaaagaggaaattcagacattgtacgacttgtgattgaatgtggagctgactgcaacattttgtcaaagcaccagannnnnnnnnnnnnnnnnnnnnnnnnnnnnnnnnncgtgcttgtgtacgacttgctgaagagccatttagagacgtaagtggcaagcgactgtgccgtgttgagtcccatnnnnnnnnnnnnnnnnnnnnacacattatcattggagcggcctctgcgtaactgctcagaaaaacatccagcacaagtcctgatggtt

SEQ ID NO: 12250 - DNA, 717 bp, Macaca Fascicularis
  misc_feature (1)...(717): n = A,T,C or G
catcaatagactgnncnnnnnnactcattgtaaggtcataaaaacctgggccaactgcacaaatacggtgcctcaaaatgactgcaacaagaaaccttaaggtgccttaccgacgaaaaagatcaaataannnnnnnnnnnnnnnnnnnnnnnnnnnnnnnnnnnnnnnnnnnnnnnnnnnnnnnnnnnnnnnnnnnnnnntcctcttaagaatgtcccaactaaagaccagttaaaatattagagtacgctcttgtgaatttccactttccaggtaggtgaccaaatttaggtggtcaagatataaaggtgacagttttaagtgtgaaacgtatttcactttcatactgccttcaggacagaagcaaaccaaatttaccaggtttggctggaagagttttgtgcctcatcttttaccggtttgaattttttcaaaccagtgactgatacctgccttgcacttagtaccttaataccaataacctaatggtacttaggtgagtaccatttgcgcaatcactgttttacttataagcagatacagatacatccaaacccttacctactaggtatcctgctagggttttcgattccaactcttgtattaagtttaatcaattctactttcctttcagttttaggtgctaatcagtcaatccaatattccccacctttgtctgaaacaaaaactgttttaagatgtctacattgaactat

SEQ ID NO: 12251 - DNA, 672 bp, Macaca Fascicularis
  misc_feature (1)...(672): n = A,T,C or G
cctgtgcnnnnnnnnnnnnnnnnnnnngtgtcaccannnnnnnnnnnnnnnnnnnnnnnnnnnnnnnnccctacaccgagtcagcagccaccccccattccttcttccctccagcacctgctaaccacaagtgtgctttctgtctctatggctttgcctattcttgctgaaaacatttcaatctgcctatgatctgtgagcccctcacttcgagatttcctgcctttccaggcagaaccaaagtnnnnnnnnnnnnnnnnaatgatagnnnnnnnnnnnnnnnnnnnnnnnnnnnnnnnnnnaatcacagaagtaggatagannnnnnnnnnnnnnnnnnnnnnnnnnnnnnnnnnncttgtcaagcagttgaactgtttctttctactcacctaggacagtcagacagaagtatgcaaaatgactggggctgattcttttctgaatagtcccaaaacagcaagaggacttgagtcctagcattaaagagttcaacatgtctaggtcaaagaccgctgttgtgttggaaggatgtaaaaccctgctgcacaggatagaatgtttggagggaggatcctgagaaacacgagggatcaaatagtcctgaactttctagggcaaagggagcagccatttgccatctaccgtgtaaaataatgaaatcttatcatt

SEQ ID NO: 12252 - DNA, 766 bp, Macaca Fascicularis
  misc_feature (1)...(766): n = A,T,C or G
ttgatgatgtgcaaggtcatgacctcatgggcagtgtcaccctggaccactttggggaggtgccaggtggcccagctagagccggccagggccgtgaagtccagtggcaggtgtttgtccccagtgccgagagccgagannnnnnnnnnnnnnnnnnnnnnnnnnnnnnnnnnnncctgtgtggccgtgagctgcctgtcgagctcaccggctagcccaggccacagccagccatcaccgcctgccgtgtctagcctggtgcctactggggcagggcagcaggcttttgtgttctcttaaaatgttttctcctccctttggtaccttaatttgactgtcctcacagagaacgtgaacgtgtgtgtgttgtgttaattctttctcatgttgggagtgagaatgccgggcgcctccagggctgtcggtgtgctgtcagcctcctgcaggtggtgcggccgtgcacacctgtgtcgtgtctgctgttgtgggactgttgttaacacgtgatgctgtgggtctgactttctcttctacacgtcctttcttgaaatgttgagtccagtcctttgttgctgttgctgtcgttgtgggcatcttgctgctaatcctgaggctggtagcagaatgcacattggaagctcccaccccatattgttcttcaaagtggaggtctcccctgatccagacaaatgggagagcccgtgggggcaggggacctggagctgccagcaccaagtgtgattcctactgcctgnnnctctatcca

SEQ ID NO: 12253 - DNA, 935 bp, Macaca Fascicularis
  misc_feature (1)...(935): n = A,T,C or G
catatagaatatannnnatactgtatacatttgnnnnnaaacattatnnnnnntagttgtgaaacagttctcattttgtaatacttaataatctggannnngcccgtcagtattacagttagtttgttttctggtgactcataaaataaggtttcctgtttcatgtagaatagtgtttgtcaactgtnnnnnnnnngccccagcacatgccacantcttacctgtaccattggttgataattgtcatgactcatttggacttgaagcaagactgtccccaggcacagtatcggaatccctggagattatgattcacgctttttggagaatatgctctcttttcacccccacctcctaagagccactaatgtaaaatacagaaacatagctgaggaacaaatagaccatttccatactaaaccagtttgttgactttagattttttccaatagtgtnnnnnnnnnnnnnnnnnnnngtggagggcttgccatgaaaatgcaacttatttaagacattcatgagacgtattaacttatgctgtctccttttagaagggaaaacttaagtgtggaatgcattgtatgggcaaagaagctatgaagatacatgatacactttgtacaactatcctgcagcccattggttgcttatatttatctcttggctcaagttctgccctttggagaaatactgagcaagtctttcattctatgtgtgacagccctctgaatatttgaagttatttgttggaacttcaggttataacggccttagttcatttattctgcatttgttcaataaatttaactgaattcttcaactatttcatctaagatagtttctggaaattccactctctcaatctttctgtggacacagtctattttgtcattgtctcaatatgaatctcttaaatagaaatgagctgtatggtg

SEQ ID NO: 12254 - DNA, 1031 bp, Macaca Fascicularis
  misc_feature (1)...(1031): n = A,T,C or G
caggtgagagagagatgctngagacaacaaactcctggacagttactttgattggaattccaccagcccctcgaggagttcctcagattgaagttacatttgacattgatgccaatgggatcgtacatgtttctgctaaagataaaggcacaggacgtgagcagcagattgtaatccagtcttctggtgggttaagcaaagatgatattgaaaatatggttaaaaatgcagagaaatatgctgaggaagaccggcgaaagaaggaacgagttgaagcagttaatatggctgaaggaannnnnnnnnncacagaaaccaagatggaagaattcaaggannnnnnnnnnnnnnnnnnnnnnnnnnnnnngaaagaagagatttccaaaatgagggagctcctggctagaaaagacagtgaaacaggagaaaacnnnnnnnnnnnnnnnnnnnnnnnnnnnnnnncatcattgaagctcttcgaaatggcatacaaaaagatggcatctgagcgagaaggctctggaagttctggcactggggaacaaaaggaagatcaaaaggaggaaaaacagtaatagcagaaattttgaagccagaaggacaacatgaagcttaggagcggacagacttccnnnnnnnnnnnnnnnnnacttcagtctttttactgtgtttttgcagtattctatatataatttccttaatttgtaaatttagtgaccattagctagtgatcatttaatggacggtgattctaacagtataaagttcacaatgttctatgtccctagcctgtcatttttcagctgcatgtaaaaggagataggatgaattgatcataataaagatttaactattttatgnnnnnnngtcaaggggtgaaaacatctcgcacacaacaattaaggtagtcatccgtagacttgaaatgagacgannnngggnnngagatagatcctttnnagttagcctagttttgttttatttggnnnngtgtgtacatggggtcnnnnnnnnnnnnnnntacaagtcaa

SEQ ID NO: 12255 - DNA, 726 bp, Macaca Fascicularis
  misc_feature (1)...(726): n = A,T,C or G
catgaatntntngnnnnnnttcctgtgcataaatttcagaagacaccacagggatggcgagaagtattcattgacattgatccacaggnnnntgataaactgaggtttgttnnnnnnnnnnnnnnnnnnnnnnnnnnnnnnnnnnnnnnnnnnnnnnnnnnnnnnnnnnnnnnnnnnnnnnnnnnnnnnnnnnnnnnnnnnnnnnnnnnnnnnnnnnnnnnnattgcattaactggagnnnnnnnnnnnnnnnnnnnnnnnnnnnnnnnnnnnacaaagacagataccttcagagggttttgtggccacaagcttcatgatgtcttaattgccccaggaacagcagatctaannnnnnnnnnnnnnnnnnnnnnnnnnnnnnnnnnnnnnnagggaaaagtagcctctctgggcccaataaaacaacacacatttttaaaaaatatgggtannnnnnnnnnnnnnnaggttcttttagataaatcaaatgagccatcagtgaggcagcagttacttcaaggatatgatatgttaatgaatccaaagaagatgggnnnnnnnnnnnnnnnnnnnnnnntgctacctcatgagagacttgaaggtggaagacatcagaggaatgcacgtcagtcaaaaccctttgcatcccttgtagctgggtttagtgaacttgcnnnnnnnnnnnnnnnnagcttggacattttccccttcagtcggcccaagaat

SEQ ID NO: 12256 - DNA, 745 bp, Macaca Fascicularis
  misc_feature (1)...(745): n = A,T,C or G
annnnnnnnnnnnnnnnnnnnnttgaacgaatannnnnggttcttggaacgccaaatgaggacacatggcctggagttcattctttaccacatnnnaagccagaacgctttaccctgtacagctctaaaaaccttagacaagcatggaataagctcagctatgtgaaccatgcagaagacctggcctccaagctcctacaatgttccccaaagaacagactatcggcacaggctgccttgagccacgagtattttagtgacctgcccccacggctatgggaactcaccgatatgtcttctatttttactgtcccaaatgtgagattgcaaccagaagctggagaaagcatgcgggcnnnnnnnnnnnnnnntagttatggcaaaagtctatcaaacagcaagcactgacaagcagcacattctcaagagcacacaggattaagttnnnnnnnnnnnnnnnnnnnnnnnnnnnnnnnnnaatgaggaggccaataatatgaagggaatcatggatcagttttctttcgctccctgtggtggatttcacttacaagaaaattgaagnnnnnnnnnnnnngttttctctgcaatttatttaaaaccttgcnnnnnnnnngataccttgtgatttccaagaactatgtgaagattaagctttgcttactgatacatggcatgtattcttttcagtcttttgtgtttgattttgtttgatttccctctgcagcacagtgtctctgtaaag

SEQ ID NO: 12257 - DNA, 741 bp, Macaca Fascicularis
  misc_feature (1)...(741): n = A,T,C or G
taaaggannnnnnnnnnnnnnnnnnnntgtgcagcnncnnnggctgtcagcnnnnnnnnnnnnnnnnaagtctcggtcggnnnnnnnnnnnngggaactgcagcatgagattgaggtgtaccgcaaannnnnnnnnnnnnnntggagggcgctggacctggatgtgctgctgacccctatgctaggccctgctctggacttgaatgccccaggcaaggccacaggggctgtcagctacactatgctctacnnnnnnnnnnnnnnnnnnnnnnnnntnnnnnnnnnnnnnnnnnnnnnnnnnnnnnnnnnnncnnnnnnngaacattacaggggctactttggggatatctgggacaaggtgctgcagaagggcatgaagaagagtgtggggctgcccgtggccgtgcagtgcgtggctctgccctggcaggaggagttgtgtctgcggttcatgcgggaggtggagcgactgatgacccctgaaaagcagtcatcctgatgactctggctctggaggacttgannnnnnnnnnnnnnnnnnnnnnnnnnnnnnnnnnnnnnnnnnnnnnnnnnnnnnnncaaggaaatgtcctgcatggggcagaggcttctgtgtcctctcccccaaccccctgcaagaagcgccgactccctgagtctggacctccgtccctgctctggtcccctctcttcgtcctgatccctccacccccatgtggcagcccgtgggtagacatgggc

SEQ ID NO: 12258 - DNA, 696 bp, Macaca Fascicularis
gcagcacggaggactcgctccatgttcatgctcagatggcagagaatgaagaagaaggtagtggtggcggaggcagtgaagaggatcccccctgcagacaccaaagctgtgaacagaaagactgcctggccagcaaaccttgggacatcagcctggcccagcctgaaagcatccgcagtgacctagagagctctgatacacagtcagacgatgtgccagacatcacttcagatgagtgtggctccccccgctcccatagtgcagcctgcccctcgacccccagagcccaaggtgcaccgagcccaagtgcccatatgaacctctctgccctagccgagggacaaactgtcttgaagccagaaggtggagaagccagagtatgaagtggaatgtatgctcctgttctgagaagcacacttgtaactgcatcttttggttgttttttttgtttgttttgtttttttttttttggcaaggggtagggatttatgtattttatttcaaagattctctggttacaggttttcacccagggaaattctgagaaattcacagtttcttaccagataaaacacgaaaagtttggcgttagtccccctcccccccctccctctttttagttttaatttattggttaaactgatggcagcaatccgtgaggtgtgtcaaagaggtgtaaatagtgtatgtgtgtat

SEQ ID NO: 12259 - DNA, 754 bp, Macaca Fascicularis
  misc_feature (1)...(754): n = A,T,C or G
cgtatgcgatgccatgctgctgtgcttnntatcaggattattannnnnnnnnnnnnnatnntgcacaggacccggccctnnnccannnnnnnnnnnnnnnnnnnnnnnntccttcatcgatgacnnnnnnnnnnnnnnnnngcagggcaagagaaaccgagggagagaagaaatcaactttgtggagattaaaggtgatgaccagctcagtggggcccagcaatggatgactaagtcattgacnnnnnnnnnnnnnnnnnnnnnnnncagcaaaaagaaaggtgagcagccaacaggccagcagcggcggaagcannnnnnnnnnnnnctnnnnnnnnnnnncaaggagcgggagctggaactgaagaacacctggtcggagaacaagctcagnnnnnnnnngacccaagccaaatatggattctagggctctggaactgatggctcccaggatctcctgccagcccagctggcctggcccccagcttcacctctgggaccccagcagctgctctaagcccaggatctctttccccaaggacccagccctcgcctctgcgagaatgaacatatttgatagatttttcttaacaagttagaaaattcagctcctgtctgtcctggagctagcaaagacttgtgtgatgcctctgaaggggctctgagttctgggatgggagtttnnnnnnnnnnnnnnnnnnnngaaatgttgaaccctccccaccaccacttttttttttttttaaaccaggga

SEQ ID NO: 12260 - DNA, 526 bp, Macaca Fascicularis
  misc_feature (1)...(526): n = A,T,C or G
ggagtnnngcacagcaggaggggaggtagaagaagnnngacctccacccccaaccctgcctccagctctgcctccccctgagtctcccccaaaggtgnnnnnnnnnnnagaaccagaacccgggctgctgttggaagtggaggagccaggggcagaggaggagcatggggctgacacagctcccaccctggcccctgaagtgctcccctcccagggagaggtggagagggaagaggggagcccctcggcaggcccccctccccaagagcttgttgaagaagagccctctgctcccccaaccctgctggaagagggaactgaggatgggggtgacagggtacagcccccaccagagacacctgcagaggaagagatggagacagagacagaggctgaagctctccaggaaaaggagcagnnnnnnnnnnnnnnnnnnnnnnccgacttcatcgattgtccccctgatgatgagaagccaccgcctcccacagagcctgactcctagccatcttctgcaccccactct

SEQ ID NO: 12261 - DNA, 728 bp, Macaca Fascicularis
  misc_feature (1)...(728): n = A,T,C or G
ctnnnnnnnnngannnnnnnnnnncgagcgntnnnaaacaagcagggttatgtattaagctctattgaaggccgagtggcagttgagtatttggacccaagccctgaggtacagaagaagaagtatgccttcaaatgtcacagactaaaagaaaataatattgnnnnnnnnnnnnnnnnnnnnnnnnnntcttttcacaatatccacaatacatttgctacaggtggttctgatggctttnnnnnnnnnnnnnnnnnnnntaacaaaaagcgactgtgccaattccatcggtaccccacgagcatcgcatcacttgctttcagtaatgatgggactacacttnnnnnnnnnnnnnnnnnnnnnnnnnnnnnnnnnnnnnnggaacatcctgaagatggtatcttcattcgccaagtgacagatgcagaaacaaaacccaagtcaccatgtacttgacaagatttcatttacttaagtgccatgttgatgataataaaacaattcgtactccccaatggtggatttattactattaaagaaaccagggaaaatgctaattttaatattataacaacctgaaaataatggaaaagaggtttttgaatttttttttttaaataaacactttcttaagtgcatgagatggtttgatggtttgctgcattaaaggtatttgggcaaacaaaattggagggcagtgactgcagttttgagaatcagttttgacc

SEQ ID NO: 12262 - DNA, 716 bp, Macaca Fascicularis
  misc_feature (1)...(716): n = A,T,C or G
caaagcacagnnngtgagacgcctcattgctaatgactttgtaaatgnnnttaactctggagtagatgtcttgctaactcccactaccttgagtgaggcagtaccatacttggagttcatcaaagnnnnnnnnnnnnnnnnnnnnnnnnnnnnnnnnnnnnnnnnnnnnnnnnnnnnnnnnnnnnnnnnnnnnnnnnnnnnnnnccctgttgcactctcaaaccaagggttgccaataggactgcagtttatccaccctccccccaccccaccgttggcttgccacccagagccaagagggtgctgatcagttnnnnnnnnnnnnnngctggacagagtgggggagggagggacagacagaaggccaaggtatggtgtggtgtgcagaggtggggaggaggcgaggatggggacagaaagcgcacagaatcttggaccaggtctctcttccttgtcccccctgcttttcttctcccctnnnnnnnnnnnnnnnngccgccgcccctcccctgccccgttggtgtgattnnnnnnnntgttagatgtggctgttttgannnnnnnnnnnnnncacccctgcccctccctgatccctgtgtgcgcgccccctttgcaatgtatgcnnncttgccccttccnnnnnnnnnntaatttatatatataaatatctatannnnnnnnnnnnnnnacatcccaaccaaaaccaaccaaacaaa

SEQ ID NO: 12263 - DNA, 1139 bp, Macaca Fascicularis
  misc_feature (1)...(1139): n = A,T,C or G
gggttgcggcccatttgtgagnnnnntgnnnnnaatttctccatgcnnnnnnnnnnnnnnnttataaactcagctgccaagacctactacatgtctggtggccttcagcctgtgcctatagtcttcagggggcccaatggtgcctcagcaggtgtagctgcccagcactcacagtgctttgctgcctggtatgggcactgcccagnnnnnnnnnnnnnnnnnnnnnnnnnnnnnnnnnnnnnnnnnnnnnnnnnnnnnnnngccnnnnnnnnnnnnnnnccagtcgtggtgctagagaatgaattgatgtatggggttccttttgannnnnnnnnnnnnnnnnnnnnnnnngattttctgattcctattggaaaagccaaaatagaaaggcaaggaacacatataactgtgtttcccattcgagacctgtgggccactgcttnnnnnnnnnnnnnnnnctgtctaaagagggagttgaatgtgaggtgataaatnnnnnnnnnnnnnnnnnaatggacatggaaaccatagaagccagtgtcatgaagacaaatcatctcgtaactgtggaaggaggctggccacagtttggagtaggagctgaaatctgtgccaggatcatggaaggtcctgcgttcaatttcctggatgctcctgctgttcgtgtcactggtgctgacnnnnnnnnnnnnnnnnnnnnnnnnntagaagacaactctatacctcaggtcaaagacatcatatttgcaataaagaaaacattaaatatttagttnnnnnnnnnnnnnnnnnnnnnnnnnnnnnntttgaaatannnnnnnnnnnnnnnnnnnnnnnnnnnnnnnnnnnnactcataaaggaaaacgatttctaaagcnnnnnnnnnnnnnnnnnnnnnnnnnnnnnnnnnnnnnnnnnnnnnnnnnnnnnnnnnnnntctcctgccctagatgccatgcttccttttgtctgttacagttgccacgttctttgaataacaaattatataacattttaccctgtctcaccacaaggacaaagtatggatgtggcagagtcctgatgaaagatatatccaaacaagataacttatatgtataaaattaaagcatatagtatacatttactgttagtttgt

SEQ ID NO: 12264 - DNA, 681 bp, Macaca Fascicularis
  misc_feature (1)...(681): n = A,T,C or G
cctcacccccaggcnnnnnnnnnnnnnnnnntctggctgcgcactcccgacagcgacgtccacgcagcacagggatatgggccattccatgacgtgcccaggccaacgtcgcaggacagttgtgaaaataacatgatgcgcggccaagaccacttcctgagggcaagtcatagcactgagacactgagaggccatgttcttcatgagacagaaagggaaacagactcagagaggagagaggcgctccaggccgctgcagccaacaaacccgcgccctcttcacacgcagctcctcaggccattccccatgagtcccccacacccaccccatcctcggtctttgcaaagacgggcccgagcttagtttccccaggactggccgaggaaggggcactggccacagctgctccccgcgcccctcagggtggacccagcatctcaggagcacctcagggtgtgggttaagagacaggcctccaccccnnnnnnnnnnnnnnnccttagctcccagtgcccccagaccccgcagctctgtgccccccaagaagtagccagacacacgtcggggcgccaagcagggccagctccatggacccatggacaagcccagccccgcctcagggaaaacagggcctttccctacaggacannnnnnnnnnnnntggcagattgcaggagcca

SEQ ID NO: 12265 - DNA, 734 bp, Macaca Fascicularis
  misc_feature (1)...(734): n = A,T,C or G
tggagaagaattgcctctcaaagctgcttctataagcagccnacatcctagctaagcaaagaagaaacacttcccacatccagggctgtctaaaagaactttctgtgatgacagaaatgttctatatctgcagtgtccaatatgctaaccatttagacacatggggctagtgaacacttgaaatgtggctagtgtgactgaggaaggaaaatttaaattttgtttaattgtaattaatttaaattaaaatagccaaatggggctactagcttttgtgttagatagcacagtatactttattctctttcttgcgttgtagaaccagctgggagaggtgtgagtcagtcatgggcttgatgtcccatggtcttcactattctagcttgcnnnnnnnnnnnnnnnnnnnnnnnaaagaaagaatggtatttggaattaaattcaagatgttaacttgacatctatatattgcacatattcctgtgtagtgcatggaatggtctcctgggagtacctgtgattgatttgagtgataactgatcttaaagaaatgacagtacggctccacttcaccttcctagtgactatcatgtgttcccagtcagagtgactcagcagagattattttgttctcttgtgcagtttattctgtgtcattttatttttgtaatattgtggcagctaaatgattattctgtgtatgtttttcaaaatattaggtggcttatatttttaaa

SEQ ID NO: 12266 - DNA, 1329 bp, Macaca Fascicularis
  misc_feature (1)...(1329): n = A,T,C or G
gnnnnnnnnnngtgatatcggaagaannnnnnnngacagatgaaagttttccaccccnnnnnnnnnnnnnnntctaactacatggattttaatgaagatggttttctccagggatttaagggccagctcatacacacatacaacaagaacagctccgtgtgtgagaactctggttactnnnnnnnnnnnnnnnnnnnnnnnaatgtcatcctgctgggagactccatcggggacctcaccatggccgatggggttcctggtgtgcagaacattctcaagattggcttcctgaatgacaaggtggaagagcggcgggagcgctacatggactccnnnnnnnnnnnnnnnnnnnnnnnnnnnncttnnnnnnnnnnnnnnnggnnnnnncagcacatcctgtgccagggggaccagctggagatgcaaggcccctgagggcacaggcttcagcccgacctgcaggccgtggtgaggagtccgctcccccatggacacagagcagagnnnnnnnnnnnnnnnnnnnnnnnnnnnnnnnnnnnnccctccgtcctcctttccctgagcaccttcatcaccagaggcttgaaggagccccgccatgtggcagggtacnnnnnnnnnnnnnnnnaacctggaccacagcatgtcagtgctctagggattgtctattccagggatttttttcaacacttttaaaaatgggaagttgttcttcaaacaaatataatgtgcgaaacagatcaaaatttttaaaatgaaaaaaaaaaaaaaaaagattcaggggatgtgggtgggggtagaacctggacctcttggccctgggggcacaagtgatgcttctaggaacacagtttgggaaccaccacaannnnnnnnnnnnccccgtccaagcacagcctgattgtgtctggttcagggtggggnnnnnnnnnnnnnnnnnnnnnnnnnnnnnnnnnnctttatnnnnnnnnnnnnntcaaacttgaaattcatttgggatcggtggggttgaggcaaccctgtctgagagccccctctttggggatccctgaggggatgcattcgggtgtggatgtccccctatgccctaggctctcctttcacctcttctgggtcggggcnnnnnnnnnnnnnnncctgaaaaggggaatttagagcagggacctgagggtcccaaggtgaaagaagtgatgtgtgcactgtggtcttgcattcttgggctgaccctgaagagccagttcagcattgtcttagctttagaggaaatcaccggcacctttcctgcagtgtttgactagccgttggaaagttctgtgttattctgcagat

SEQ ID NO: 12267 - DNA, 723 bp, Macaca Fascicularis
  misc_feature (1)...(723): n = A,T,C or G
tgcacgnnngctggacannntcgccgggctgtgcnntcttgtgttcatagacggtggtctgtgctggcagaggctgctcccccccagttggggctatcgagagagtgggggacggtggccacacgtcccccaggtgatctcctggtgcatggctggtggctcttggcgagccatcccttgctcctcagggctggcgccaccgttgtgtctgagcccaccctcccctgcttcctcggtggggccccttccactgttggccttacctgtcctcagaaaggaagagccgactccacccagccagctctcccttttatggaactcgagnnnnnnnnnnnnnnnnnnnnnnnnnncttgtgagtaactctcaactgtcctggagagcagaggctgtttggggtcagaggaggcctcggtattacctgcgaatacatctgctttccaggctgctatttattctgagacgactgtgctgtagcttcccttgcagctgcaataccccnnnnnnnnnnnnnnnnnnnnnnnnnnnggggtagaattctccatttattttactacttaatacaaaacatttatttttgannnnnnnnnnnnnnnnnnnnnnnnnnatgtttcctttcccaaatatgcaaatagtggctttgtttgctcaattttgtgagtgnnnnnnnnnnnnnnnnnttgtataactcaagaagattacttttctatcttgcttaagcnnng

SEQ ID NO: 12268 - DNA, 577 bp, Macaca Fascicularis
  misc_feature (1)...(577): n = A,T,C or G
cttccacccccannntaaaggaagatacttactctgcccctcaccatttataccaaagaaatcataggtgaaaccccctaccctccccaacattaaatgctcgagaggaatcttaaggcagggccatgcacacaacctgcacacgcacttggagggcccaggtgtctgtccaccaggccccacgcagtagggactggaagatggaaaatgtgtcatctggttgcgttatcactcccgccccctaccccagcccgtcttccggaatttctcaactaagtttgattattgggcaggaaggaggtcatgggttcatttcatttttttgtgtttttaattaaaagaaaggttacctcagttttcactccttagacatggatgtagctaccttttttgtatgtcttttttttttttttttttaagcaatcgtgttgaattaggagtatacttagtgtggaaagggtatgaatttgccatgtgatttgcaaatggggggaagctactgtgagtgtgtgtttttttaatttacactatagagtgattttttttcccccaacnntcaagtttttaccttgcatgt

SEQ ID NO: 12269 - DNA, 755 bp, Macaca Fascicularis
  misc_feature (1)...(755): n = A,T,C or G
ggacnnnnnntcaagtannnnnagatagtgtcctaggatcctttgagggtgctggtagcaggtgagcaggacaaagttgaccaaggacacttatttctagattatgattcttctgtttactcaacaatttaaaaagaaaaaaaaaggacagacattgaagagctacacattgtatatatatcaccacagactataaagaaatggaattatttccttctttgtcacatatctgtagtaggatttgccaagannnnnnnnnnnnnnnnnnctgtttcttgttttccaaaggtcatacattgtgtttgnnnnnnnnnnnnnnnnnnataaatgtgtttaacgagttaatttcatttttctggctttggtctattctccttccttacaggctaagccctnnnnnnnnnnnnnnnnnnnnnnnnnnnncacttgttccttcatctacatgttttgttcatttgcagccagtttttannnnnnnnnnnnnnnnnnnnnnnnnnnnnnnnnngcaagtataactttaattccnnnnnnnnnnnnnnnnnnncacatgaggtgnnnnnnnnnctgagatagnnnnnnnnnnnnnnnttgcgtttcaaaactgccatgcccccctgtgatgctcnnnnnnnnnnnnnnnctttgccttnnnnnnnnnnnnnnnnnnnnnnnnttttctctccaggtgcagccagatctcacaaagtacaaacgaatgcctttcttttcttgtttataatggtcactcactgtgt

SEQ ID NO: 12270 - DNA, 549 bp, Macaca Fascicularis
  misc_feature (1)...(549): n = A,T,C or G
cacttccgttatttgctgcggtggaccgtgggcagccagggtcggtgaaggatcccaagatggcnnnnnnnnnnnnnnnnnnnnnnnnnattgactgggtagcttttgcggagatcataccccagaaccaaaaggccattgctagttccctgaagtcctggcatgagaccctcacctccaggttggctgctttacctgagactccaccagctatcgactgggcttactacaaggccaatgtggccaaggccggcttggtggatgactttgagnnnnnnnnnnnnnnnnngaagattcctgtgccacaggataaatatactgcccaggtggatgccgaagaaaaagaagatgtgaaatcttgtgctgagtgggtgtctctctcaaaggccaggattgtagaatatgagaaacagatggagaagatgaagaacttaattccatttgatcagatgaccattgagnnnnnnnnnnnnnnnnnnnnagaaaccaaattagacaagaaaaagtatccctattggcctcaccaaccaatcgagaatttataaaatt

SEQ ID NO: 12271 - DNA, 869 bp, Macaca Fascicularis
  misc_feature (1)...(869): n = A,T,C or G
gaggggaccccannnggccctgannnctgcccctgcctggcccaggcccnnacggcgaacgggacgaccagcaagtgttcatccagaaggtggtgcccagcgccagccagctgttcgtgcgtctctcatctactgggcagcgggtgtgctccgtgcgctccgtggatggctcacccactacggccttcacagtgctggagtgtgagggctcccggcggcttggctctcggccccggcgctacctgctcaccggccaggccaacggcagcttggccatgtgggacctaaccaccgccatggacggcctcggccaggcccctgcaggtggcctgacggagcaagaactgatggaacagctggaacactgcgagctggccccaccggctccctcggctccctctcggggctctctgcccagcccctcaccccgcatctccctcaccagcctccactcagcctccagcaacacctccttgtctggccaccgcgggagcccaagccccccacaggctgaggcccggcgccgtggtgggggcagctttgtggaacgctgccaggaactggtgcggagtgggccggacctccgacggccacccacaccagccccttggccctccaccagtctcggcactcccctcacacctcccaagatgaagctcaatgaaacttccttttgaannnnnnnnnnnnnnnnnnnnnnnnnnnnnnnnnnnnnnnnnnnnnngccatgatgccttgggatgccctggtcctgggggactcaggtgcctccctgattcctatgnnnnnnnnnnnnnnnnnnccagggcctccttggaataaatggtcattgttactaggtccccaccttccctcttttctggaagcca

SEQ ID NO: 12272 - DNA, 770 bp, Macaca Fascicularis
  misc_feature (1)...(770): n = A,T,C or G
cgccaggcacagaggacatggacagtcnnnnnnnnnnnnnnnnnnnncgggctctnnnnnnnnnnnnnnnnnnnnnnnnnnnnnagcagcaggaagagatgcgcnnnnnnnnnnnnnnnnnnnnncggactcgcaggcagctggtacaacaggccaagaagctcaaggaatacggggcacttgtgtnnnnnnnnnnnnnnntccgtgacctcaaccggaggctccaggacgtgctgctcctgcggcttggcagcggtcccgnnnnnnnnnnnnnnnaagtaaagtcagaatgtctcgagnnnnnnnnnnnnnnnnggagcactttcagtgaggaagcaaatacgtcgtcctattaccccgcnnnnnnnnnnnnnnnnnnnnnnnnnnnnnnnnnnnnnnnnnnnnnnnnnnnnnnnnnnnnnnnntgggttgatgaggagaannnnnnnnnnnnnnnngtaacccaaggagattccaagtacacgaagaacttggcagttatgatttggggaacagatgttctgaaaaacagaagcgtcacaggagtcgccacaaaaaaaaagaaagatgcagtccctaaaccacccctctcgcctcacaaactaagcatcgtcagagagtgtttgtatgacagaatagcacaagaaactgtggatgaaannnnnnnnnnnnnnagactctccaaagtcaacaagtacatctgtgaaaaaatcatggatatcaataaatcctgtaaaaatgaagaacgaagggaagcaaaatacaattgc

SEQ ID NO: 12273 - DNA, 750 bp, Macaca Fascicularis
  misc_feature (1)...(750): n = A,T,C or G
tgctgcggctgtggcgagcatgggggctgttctgtnnctgttgtggaagtagctgctgagtgaaatggcgggggccgctggggtccatcttcacactgcataggtctcttccaggcatctgggctggggtgggagctccgccgcagaaggtcgatggggggtccagtctgtgatccttggtgctgtgtgccccaccccagcctggggaccccacttcagaaggtaggggccgtgtcccgaggtgctgactgaggcctgcttcaccctccccttcctgccgtgttggagtaccacaggggaccagggccagcacaggggaccgtctcagaagactctgcttttctgtccctttttctccacactccactgacaaacgtccccaaaggtttccacttgtgggtttcaggtgttttcaagcacaccccaccaaaacaagcaagtgttttttcagtcgttttgcttttttgttttgtgctaacgtcttactaatttaaagatgctgtcggcaccgtgtttatttatttccagtggtcgtgctcagccttgctgctctgcgtggcgcaggtgccacgcctgctcctcgtctgtgtcccgaccacgcagggccatccactgtgacgtcggctgaccaggccggacaccctctgccaagtaatgacgtgtgtgcctgggaccgtttctattctgtgttaatggctaacctgttacactgggctggggtgggtaggggtgttctggcttttttgtggg

SEQ ID NO: 12274 - DNA, 673 bp, Macaca Fascicularis
  misc_feature (1)...(673): n = A,T,C or G
tcagaagcctctcaaggtttttttgtcagaggctccaaatagaaaataagaaaaggttttcttcactcatggctagagctagatttcactcggtttctaggcacctcagaccaatcatcaactaccattctgttccaagtttgcacctgtgcattttctgtctgccccccactcactttctcaggaaaccttggccnnnnnnnnnnnnnnnttggtccttgagaagtgggaacaccctacagggacactatcactcgtgctggtggcattgtttacaactagaaannnnnnnnnnnnctgatgccccttgaggaaacagggctgtgaggaggaggattgtaacttaggcctagccttttttaacagcctctgaaatttatcttttctcctatggggtctataaatgtatcttataataaaaaggaaggacaggaggaagacaggcaaaagtacttctcacccagtcttctacaccgatggaatctctttggggctaagagaaaggttttattctatattgcctacctgatctcatgttaggcctaagaggctttctccaagaggattagcttggagttctctatactcaggtacctctttcagggttttctaaccctgatacggactgtgcatactttccctcatccatgctatgctgcattatttaattttt

SEQ ID NO: 12275 - DNA, 729 bp, Macaca Fascicularis
  misc_feature (1)...(729): n = A,T,C or G
tgtaaaatgttaaattatttttttaatagtagtgtaagaattctggctgctattagttattgttattttctgggtagaagctatttgaaaagtccagtttctgtcccagtgtagcaaaatgtagttcctcggttgtttttctttaaatgctttataattttacactacctttttaatatacaaacctcattcttcattggacaacttgaaggctttgatttctttaaaaatttaaattttaatgtgtgtattactttgacagttccctcaactttgagatgcactgatcactgtgcttgaaaaagacaaaactgaagattgtactatgaagtttattgaataattttcataaattatttatccaaatgagagatttttagatttttgtattctgcttagtttaaaaaaaatagtagtttaaaagagaggctagtaagtttgatgctattcttgccaaacaaactcagccaaaatctttaaagtaacaagtgggaaaaggatgactaatcgttctgcttctgagtacattttccaaaacgttggaaagaaacttctgaattgaaatcttgaatgtattgaatctgtcaaggtacacagcggtgcctttgtaaatgttcattaccttatttaatcaggtgataagtggtgtaatgtagcagagcttaagaatagaactcaattatcactttttgtgaacanagttggaattgtcatgttactgtgtaattg

SEQ ID NO: 12276 - DNA, 764 bp, Macaca Fascicularis
  misc_feature (1)...(764): n = A,T,C or G
ggcagcacacgccnnnnnnnnnnnnnnnnnnnnnnnnnnnnnnnnnnnnnnnnnnnattacannnggtgaannccgacannngaaacgttttaagttacaccaagttcatagcctttgttaacctttcatgtgttgaatgttcaaataatgttcattacacttaagaatactggcctgaattttattagcttcattataaatcactgagctgatatttactcttccttttaagttttctaagtacgtctgtagcatgatggtatagattttcttctttcagtgctttgggacagattttatattatgtcatttgatcaggttaagattttcagtgtgtagttggcagatattttcaaaatcacaatgcatttatggtgtctgggggcaggggaacattcgaaaggttaaattgggcaaaaatgtgtaagtcacaagaatttggatggagccattaataatgttgaagttacagcatttcagattttattgtcagatatttagatgtttgtcacattttttaaaaatcactcttaacttttaaactctcaatacagtatattttgaccttaccattattccagagattcagtattaaaaaaaaaaaaaaaacattacactgtggtagtggcatttaaacaatataatatattctaaacacaatgaaatagggaatataatgtatgaactttttgcattggcttgaagcaatataatatattgtaaacaaaacacagctcttacataataaacattttatactgtt

SEQ ID NO: 12277 - DNA, 682 bp, Macaca Fascicularis
  misc_feature (1)...(682): n = A,T,C or G
gagaggnnnggactggcccctgggannnnnnnnnnnnnnnnnnnnnnnnnnnnnnnnnnnnnccttcctcttctttaaccctctagccctaggacggctttggtggagaggggatagaagcccatgacttcagacagactttctcctnnnnnnnngaggcaggccttctcccgggctgctccagacatgggagttgggaatagggggcaccttgcagcgccttcctgctggggctccctccttgcagcacnnnnnnnnnnnnnnnnnnnnggtttcctttcccaggctcacccaggctctgctcaggctgggaggcagagagcacaaaccgtagaattttttaaatgnnnnnnnnnnnnnnntggctgtggctggggcccctggggctgctggagctgctgcctctgttctggaggacaaggcttctccttcttccctggtgcccgtctnnnnnnnnnnnnnnnnnnnnggcagaaccaggnnnnnnnnnnnnnnnnnnnnnnnnnnnnnnnnnnnnnnnnnnnnnnnnnttagctgagccaccatttnnnnnnnnnnnnnnnatagtgtgagtaaaacattgatcaagaccatcctgacgaagacagtgaaaccccatctctactaaaaatgcaaaaaattagttgggcatggtgacaggcgcctgtagtcccagctactg

SEQ ID NO: 12278 - DNA, 731 bp, Macaca Fascicularis
  misc_feature (1)...(731): n = A,T,C or G
caggggcacagggggtgtggtgaccganntngacnnnnnnnnnnnnnnnnnnnnnnnnnnnnnnnnnnnnnnnnnnnnnnnnnnnnnnnnnnnnnnnnnnnnnnnnnnnnnnnnnnnnnnnnnnnnnnnnnnnnnnnnnnnnnnnnnnnnnnnnnnnngggcctttgccaggggnnnnnnnnnnnnnnnnnnnaccaagaagagcggggcccacctgagnnnnnnnnnnnnnnnnnnnnnnnnnnnnnnnnnnnnnnnnnnnnnnnnnnnnnnnnnnnnnnnnnnnnnnnnnnnnnnnnnnnnnnnnnnnnnnnnnnnnnnnnnnnnnntggtgagccggaacgtggccnnnnnnnnnnnnnnnnnnnnnnnnnnnnnnnnnnnnncccgggatgaggacacacttcagaacccagccccactggagnnnnnnnnnnnnnnnnnnnnncaggaaaatggccattgcatggacaccaatgaatgcatccagttcccattcgtgtgccctcgagacaagcccgtatgtgtcaacacctatggaagctacaggtgccggaccaacaagaggtgcagtcggggctatgagcccaacgaggatggcacagcctgtgnnnnnnnnnnggcctttttaggtgggtattcttccgccgcctttagaatctctgagcctctctctcgggcctcatatctttctctaggcctcggactttgccttcagttatatgcactta

SEQ ID NO: 12279 - DNA, 435 bp, Macaca Fascicularis
ctgagtgcagaggtcctaagcccaccctagttgggctgactcgactggaaatttggttgtgacagtggcatggggagggggctgggtgagggtattctgtgtagtgcccagtccaggcctcttcatctggggactttttggcctaaccctggaagcctggaaagttgcccacttttctctttcaggttaagccagcaatttcagggccaaccgagctgtaaacatgttagtaatgaggacaactagcatttgtacagggcttcacagtttacaaagcgctttctcatacattatcacatttgatcctcccagggccctgccaggttgttttgcatatgtgcattttaatttcaaaaagtcttccttccaagcgtgtatgatggaatgagtaaattgattaattggcgtaacttattttgcatggatccaacctaa

SEQ ID NO: 12280 - DNA, 719 bp, Macaca Fascicularis
  misc_feature (1)...(719): n = A,T,C or G
gttggtggctgtgctgatgttctgtaggcgcatcggctcaggttgtggagggaaccccaagtgcatgcacagggtgtttctctggtgcttgggtctcctacgagggcctggggctgagnnnnnnnnncacaacatgattctgaaccacggagactcgctgtccactttcatcnnnnnnnnnnnnnnnnnnnnnnnnnnnnnnnnnnnnnnnnnnnnnnnnnnnnnnnnnnnnnnnngggaggcacagtgtctgctgggaccggcagaacctgaagggtctcagaggaggaggctgctggttccagcaaatggnnnnnnnnnnnnnnnnnnnnnnnnnnnnnnnnnnnnnnnnnnnnnnnnnnnnnnnnnnnntaactcctgggaccagctcatgaggcagctgggcctcacaaacaatgagatccacatggtaagagctgatacagcaggcccaggggnnnnnnnnnnnnnnnnnnnnnnnnnnngggtcaacaaaactggacaggatgcctcgatccacaccctgctggatgccttggagaggataggagagagacatgcaaaggagaggattcaggacctcnnnnnnnnnnnnnnnnnnnnnnnnnacgtggaagatggcacaggctctgccgtgtccttggagtgaaagactctttttaccagaaagagtgttaatagtttttttggtgttaatagtttttttgtttgtttgtttt

SEQ ID NO: 12281 - DNA, 1023 bp, Macaca Fascicularis
  misc_feature (1)...(1023): n = A,T,C or G
tagacaatatggctgagttcnnncgannnactgaacagnnnnnnnnnnatggtaactctatgaatagtctttccagtgtcagcctgcctttagctaagataattccaatagtaaacggacagatcnnnnnnnnnnnnnnngaaacacctagtcattttgttcaggatctgttgacaatggagcaagtgaaagactttgctgctaatgtgtatgaagcttnnnnnnnnnnnnnnnnnnnnnnnaaatgatttttccttcaagaaaaactacagtggggattcgtttactttttaaaatacactgggtaaatcaactatacttagagtaacagtttgttatcaaaatgtctgataaaatatattcttaataaaagtcttcatttcataatgaaatcaatttatttggcatcttaatatatttttttagattcatcaacagaccagtttttgtgggcacatatatgtacacgtgtgcaaatatcagaattgttaatgatttgttacacatggacattcgttccaaactgactaaaaatcaatgtagatattttatatacatatatatatgaatatgaaattcagtgtactttgccatattaatactgaggaaaaatatctgttggagacataggtctagaatatgtgaattttgggaaaatatgctgtttaattataatgttccctagaccgctgtaaacagaagtgaatctgacttttctctagctacccttcaaaataataaattatttgtttcaaatataccttgatggaggacttttttattcttatggaagtagtaaatttcaacaactatgatgaactatttttcctttgctatttcttcactatattttttaaggttttattagcaagacttagaaagttacatattgatttagaggctaaaattgtgttgatgctgtttactcacctaattacatagttttaatcatttgtatgtacttatataattttaaaaacttaactttgtattgattttgaatnnnngtgaaaatctactgca

SEQ ID NO: 12282 - DNA, 740 bp, Macaca Fascicularis
  misc_feature (1)...(740): n = A,T,C or G
gtcactccagctgatattctttgatggggaagaggcttttcttcactggtctcctcaagattctctctatgggtctcgacacttagctgcaaagatggcatcgaccccgcacccgcctggagcgagaggcannnnnnnnnnnnnnnnnnnnnatttattggtcttattggatttgattggagctccaaatccaatgtttcccaatttttttccgaacnnnnnnnnnnnnnnnnnnnnnnnnnnnnnnnnnnaacatgaacttcatgaattgggtttgctcaaggatcactctttggagannnnnnnnnnnnnnnnnnnnnnnnnnnnaggtgtgatnnnnnnnnnnnnnnnnccatttttaagaagaggtgttccaattctgcatctgataccatctcctttccctgaagtctggcacaccatggatgacaatgaagaaaatttggatgaatcaaccattgacaatctaaacaaaatcctacaagtctttgtgttggaatatcttcatttgtaatactctgatttagtttatgataattggttctagaatcgaattcaaaagtcaaggcatcatttaaaataatctgatttcagacannnnnnnnnnnnnnnnnnntatcctgtagatcatcctattcttatgtgtctttggttatcagatcaattatagaataattatgttgtgatattgtgtcctaaattgctcattaatttttatttacagattgaaaaagagggac

SEQ ID NO: 12283 - DNA, 883 bp, Macaca Fascicularis
  misc_feature (1)...(883): n = A,T,C or G
tttgaagcacagtagnntgccaaattcagagnnnnntncnangtnntataatnntaagtgttgttctagatttcctctagagaaggttaattggaatctccattgcgtttctctttttccctctctttctgctgaggttaggaaacaggttaaaactcagagaactccaataataatggtttaaaaacatcaggggcttcctgtatctcatgtcaggaagccgaggagtaggcagtctgggtctgtgggtgtcaacatcccagttttgttctatctttctgtcccacctgcactgggatgtggcttctacactcgagtttgcttcttggtttcaagacagtggtgttctttccatggctgagcagattattttgagagatgggtgatatgtgaagagaaatctggaaacttcttctgggtagatatagggtaaaatgttttaaatgttgagcactttgtacatggtttgagggcataatctttgtcatccattttcttcccctcgacaatatcaggttactgtcaacattaatccatttaaaagagcatggactgttgccattaatacttttggattccatataacccttaacatgataacttctagaaaatgtgtgtgccatggacacaaagaagggaacaatagacaccagggtttacttgagggtggagggtgagaggagggtgaagattgaaaaactgcatatttggtgttatgctggtttcctgggtgacaaaattacctgtacaccacacccttgtgatacacaacttacccatgtaacaaacctgtgcatgtaccccttgaacctgaaataaaagttggaaagtaaaaaaaaagtgtgtnnnntatatttagttgaatcaaatannnagacgatca

SEQ ID NO: 12284 - DNA, 646 bp, Macaca Fascicularis
  misc_feature (1)...(646): n = A,T,C or G
acctaacatagttgggaaaggtagattgaatgagacatgtnnnnngtgcttctaagtgttctgtcccgtaggnnnnnnnnnnnnnnnnnnnnnnnnnnnnnnnnnnnnnnnnnnnnnnnnnnnnnaaaattgacttgcttgcctaaaactacagtgcccccttagcctccattacctagtatctcttacagtttgctatggctctcaaataatataacgattggtgaacattattcnnnnnnnnnnnnnnnnttctctnnnnnnnccacgcatgttgcttttgaaagtatcccgggatagtgggaagagcactgctttaggagtcgagctatctgagttctcgctctactccgtcccagcagagatgatgtatattcttggttaagtcatttatcctctctggatttgnatttcgctcacctgtaaaatagagttaatatgtatataagattgattccgattccgaagtcataactgccagcagaaaaactccgtactgttcattgtaaaacgaaaggtgaggaaggctcgtgggtggtgagtctctgctctgtaatattgggaaagtcacacagaggggaaccatttgagggatacatgaggacagagtaaattgaggtttggggatnatcaattcaggcaagac

SEQ ID NO: 12285 - DNA, 727 bp, Macaca Fascicularis
  misc_feature (1)...(727): n = A,T,C or G
cataactaaaggttgtacacatagatgggcacactcacagagacaagtgtgcatgtacacacacacagaaatagaaacacacgtgtcacatggagatttcagatgatcggctctgtatccggttaagtcggttgctgagatgtagcctgcactnnnnnnnnaaggaaatttgacctccaagcagccccaacaggtcctgggccgggccctccctttgtgctttgtctctgcagttcccacaccttttataaggccaccctagtccctgcttgctggcagggggctggatggggggcagtactaactcttagtgagtgcagagggctttataaatatcaccttattttatcaaaacccatatgtaaagctttcatcaaggaaaagggcttgcagtggtagaaaaggttgagtcagtagggacttgggttccctgtgtgtgaggggggcattcttgccggccagctgctcccgaggtggccttgagaaggaagaagcaggatgacagagcctgagcagcggaaccagactgcactctcccctctggcccggcgacctgggctgtggttgagagagacaataatgaggccagaagtagccggagccagtcgggaagggcaggggaggacnnnnnnnnnnnnnnnnnnnnnnnntaaccatctgctcccaggctgtgtgcaggaaatggcatttannnnnnnnnnnngctcattctcatgaaatactgcca

SEQ ID NO: 12286 - DNA, 769 bp, Macaca Fascicularis
aatggctgtggcttccacgtctacctcggatggaatgctgaccttggacctgatccaagaggaagacccttcccctgaggaaccaacctcttgtgctgagagctttcgggttgacctggacaagtctgtggcccagctggcagggagccggcggagagcagactcagaccgcatccagccctccgcagaccgggcaagcagcctctcccgaccttgggaaaaaccagacaaaggggccacctacaccccccaggcacccaagaagttgacacccacagagaagggccgctgcgcctccctggaggagatcctgtctcagcgggacgctgcccctgcccgcaccctccagctccaggctgaggaacccccatcccctgcccccccgcacccggggcagctgtcccggatccaggacctggtagcaaggaaactggagaagactcaggagcttctggcagaggttcaaggactgggagatgggaagcgaaaggccaaggacccccctcggtctccgccggattctgagtcagagcagctgctgttggagacggaacggctgctgggagaggcgtcatcaaattggaaccaggcaaagagggtgctgcaggaggtcagggagctgagagacctgtacagacagatggacctgcagacccccgactcccacctcagacagactaccccgcacagtcagtaccggaagagcctgatgtgagggcggggtggggtctggaattcgttgggttggacagactcttatctccgtgtg

SEQ ID NO: 12287 - DNA, 841 bp, Macaca Fascicularis
  misc_feature (1)...(841): n = A,T,C or G
gagactcacctnncataaagcttcnnnntcacattatgtnnnngagcagacgttctagaaaagacccctnnnctcatgagctcccccatccctgctacagaaaannnnnnnnnnnnnnnnnnnnnnnnnnnnncccaccaattcacacaaaacaccccccacaccgnnngcagtgggctgacccaccaattcccaccgcgccccctccgccccgnnngcagtgggctgacccaccaattcccaccgcgcccccctccgccccgcctggcagtgggctgacccaccaattcccgccgcgcccccctccgccccgccggcaaggcaaaagggaggcccctgggcattgtccnnnnnnnnnnnnnnncctctttctttgttcaaagaaccagttttccttggccgaagaagtctcttccccatgttagtcctatgccttgaaatatcatgcaccatgacccacagccatctggttatgtcttttttttttcctaaaagataatgtttatttttaaaaaggaaggaaggagcaagtgaagtttcnnnnnnnnnnnnnnntggggaagccgctgaatccacctgcttctcctttgcaaccaacagcaaacagcttcctctggcctcagggcagaaaaagggaatggcagggagtaagaggcgctgggcttggggcctgttaccaagaaggaatgggttgtcatctggcaatgttgcgtgtcacaagagagcctgtatataaattaaaatagtcaagacaacactgaccttgcacttgtacataactatacagtagtgtccagaatgctcagacattcggcgtgtacataaacagaaaaaatcttca

SEQ ID NO: 12288 - DNA, 1114 bp, Macaca Fascicularis
  misc_feature (1)...(1114): n = A,T,C or G
agctattacaccagttttaacaccttcctcgtgttatgtttaaaaaaataaataaatttaagaaaaccattttaaaataatgcacagttgcagcctggaaaacttaaggtggcgccttatagtatcaattttaggagctttatttggtgcatttaacgcaactggtaattgcaaaatccacttcgcctgtgttaagtgaaaaatatagactgttatcttgttggccctatgaaattctgcacttttcattatatactctaccttcattaattannnnnnnnnnnnnnnnctgccttagcactcagttgcgttctttttctttttcttcctgttcattatgctttaattctgaggaccatatgagggtagaatatattatcttttaaaaattacaaagatttgtataggcaaaccatttcttaaagttgatggccaaattttaaagtgttatttttcatatcatttataatcttgtcacaatccacttaaagaagtttggttatatttcagtgaaaattatcttacagagtaggttttttttcgtgggttggggggtaactttactacaattagtaagtatggnnnnnnnnnnnnnnnaaatgaggagtgccagcagtgtgataatttaaacatatttaaacaaaaacaaaaaaatgaatgcacaaacttgctgctgcttagatcactgcagcttctaggacccggtttcttttactgatttaaaaacaaaacaaaaaaataaaaataaaaaagttgtgcctgaaatgaatcttgtttttttaataagtannnnnnnnnttactgtgtcctgtaaaatacagacacttgacccttggtgtagcttctgttcaactttatatcacgggaatggatgggtctgatttcttggccctcttcttgaattggccatatacagggtccctggccagtgganngaaggnnttgtataagatgacaagggtcagctcaggggatgtgggggagggcggttttatcttcccccttgtcgtttgaggttttgatctctgggtaaagaggccgtttatctttgtaaacacaaaacatttttgctttctccagttttctgttaatggcgaaagaatgaagcgaataa

SEQ ID NO: 12289 - DNA, 796 bp, Macaca Fascicularis
  misc_feature (1)...(796): n = A,T,C or G
aggacgagcactgctgcatgacagtctagcatcatgtcagtcctgtgtcttgagtttcttagatctaggcaggagtactggaagaggaaggtgcncagggaacacttagtccaagttcttctttggggcccagagtattcacaaaaggagggcacgggagagtccctcgggctcaagaaaggctaaggggataatgagaaaagcaggaaaatctggagcaggtataaatgagggtttttcaccctcagcatgattgacatgtcaggctgggtgattgttgtaggggactgtcctatgtgttgtaggatgtttaagcagcattcttggcctctgtccactagatgccagtagtaccctgtcccctagtgtgacaaccaaaagtatcttcacacgtagccagttgcccccatttgagaagcactggtggtgtcgatgagggtaccttctgtgaaagccttcaggagagtgaacagattttctcttgcccccgccccgccccgccccgccccgccaccccaggcaggaaagacccccacggacctggtgcagctgtggcagaccgatactcggcacgccctggagcatcctgagccgggggctgagcataacggactggaggggcctgatgagagtgggcgggagacccctcagcccgtgccagcccagtgaatttgtgccccagcacagccagctacccagcccctctctgtgtgcagccagagggtcctaagaatgactctcagagctaactgagggcccagccttttttctgcgtgatacaggagcacccacaaac

SEQ ID NO: 12290 - DNA, 469 bp, Macaca Fascicularis
  misc_feature (1)...(469): n = A,T,C or G
agagaatcgggggacnnnaggtcacaagttgccatctaccttgggatcaaaccgaaaccgccccccggctgctccgattcccgtggagtgtgaagctgaccagctcgcgccctcccgaggccctgatggcagctttgnnnnnnnnnnnnnnnnnnnnnnnnnnnnnnnnnnnccagccacagccgttcctgctggcctgccagcacgggggtgcgggcaggcccgagcccctgtcccacttcgaagtggaggtctgccagctgccccggccgggcttgcggggagttctcttccgccgtgtggcgggcaccgccctggccttccgcaccctcgtcacccgcatctccaacgacctcgagctctgagccaccacggccccagggcccttcctcttcctctcccttgtccccttcacttctaaaggaggggaaggggccagggaggggattctcccttnnnatcacctcag

SEQ ID NO: 12291 - DNA, 1030 bp, Macaca Fascicularis
  misc_feature (1)...(1030): n = A,T,C or G
tatatnnnacacannncagtctctgntnnttggaaaggtatctattacatcctgcnnnnnnnnnnnnnnnactaagcagggagaataaagataattgtattttatgttttgcacacaaacacagaatttgtataaccatatgacttcatagttgtgatctcaaaaaagaaggaatttctcctttgtttcttgcagttaatgtaagaatactttaaatctctaagcttctgaagtgttagaggtagagatggtctagtaaagatgtagtagtaatgttttatccatttagcatgtgtttattttttcatatgtactcaaaggtgacttattggttcacctcagtgatattacatacagctaaaaaaaatcattcattagcaaaaggaaaagtggtctcaacctaacatcagaagtgtttcttattattattttatattgggttgaatattgaactctaacacttttctacatacaaaacactgtcatgaaggttatgcataattgcattatagaggaatgtagtatgtcataagtactttgtaaagatttgacattcaactgtagtatccatatgttgcttaaatttctttatgagccccatgatggaaagacttaaagatgaatttgagaaaaattgaagaaattagattatcaggttctgttaaattgttacatgtatcttgcttaaatttctgtttattaatttatatccacccaattacataaagcagatttggaggaaacaactgaggttgtgcaatattttctgtgataattgcttttttattcttgtgttttctacttaaacatgatgtctgtcatcaagtattatagtcagactttctttttttctagattgttaaaattggtaaatgaactttttttaaaatcatcttccatgttgcagttagtctttcttttcaatacaagtctttcacagaagtnnnnnnnnnnnnnnnnaggaactagcattgggcagaatgtgtcatttttaggcactttgtattctcaacatgcannnngttaagaa

SEQ ID NO: 12292 - DNA, 575 bp, Macaca Fascicularis
cttccaacttcctttactaagatgaggctgggcattgcctgggacaacctatgcaaaggccatgtgccccttgccctaacaactcactgcagtgctcttcatagacacatctcgcagcatttttcttaatgctatgcttcagtttttctttgtaagccatcgcaagccatagtggtaggttttgccctttggtacagaaggtgagttaaagctggtggaaaaggcttattgcattgcattcagagtaacctgtgtgcatactctaggagagcagggaaaataatgcttgttacaatttgacctaatatgtgcattgtaaaataaatgccatatttcaaacaaaacacgtaattttttacagtatgttttattaccatttgatatctgttgttacaatgttagtgatgttttaaaatgagattgaaaatctaatgcttctaagaaggaacagtagtggaatgaatgtctaaaagatctttatgtgcttatggtctgtagaaggatttttgtgatgaaaggggattttttgaaaaatctagagaagtagcatatggaaaattataatgtgtcttttt

SEQ ID NO: 12293 - DNA, 497 bp, Macaca Fascicularis
aaacattcaccttgtcttccatcaagacacttgaagaggctgtgggtaatattgtgaagtttttgggaatgcacccttgtgagaggtcagacaaactgccggataacaagaatacccacactttgattttggctggtgtgttccggggtggtcatgacatcatggtgcgttcccggatgatgcttttggacacagtgtcaatgcaggtgacagccagaagtttggaggagctgccagtagacatcatcttggcatatgtgggataagcagccagcttgcataggaccttatgcccttcccccccaacactacctggaagttgtgccttcctcatgaaactggcggaaaccccttcccaagcttctgtattcaaaaacaattaggaatcattgcagatttttttttttattctgcccttaccccccacccgggaatacttgggggtgcctttttttttttttttttttttttttaatagggaatgattttaagcttgt

SEQ ID NO: 12294 - DNA, 764 bp, Macaca Fascicularis
  misc_feature (1)...(764): n = A,T,C or G
attnnnnnnttttatgccgcattgttcgtggcagtagaccccatctgttcgtctgcacagctatgaggcgacactgttccgtctgcacatgaaggacccccatacagcctctctcccacccctgacaacccgagaaggcgtgtggggccctgccaacgccacttcctcagcagaaacccgtcatgacgcggctgcttcggaagcagacgtctggggacacagcctcagtacccagtcttttccctagttcctgaaacttccctaggaccttaggagaatagtaggaggtcatatagcatcccagtgtcactagaattttgaagacagaggaaagtggaggttagtttgtggcctttttttcacttagccatcgcagtcagctgcagaagtcctgtgaccacctagtcatggccagaggcccgggaccagtgacaccctgcgtccnnnnnnnnnnnnnnnnnnnnnnnnnnnnnnnnnnnnnnnnnnnnnnnnnntctcctactgtgaagtcagctgtgctctctgctttccactcgcttccacggcttccgcctccagatgttgagtgaccagctctgtggccctgtgtctccagaggcttgtgattaactgtggcggcagacacagcttgtccacagcttgggccaggcttcccctgtcctcccaccggtcggctgcttggcaaggctgtcaataaagcagaagacggcagttttnnngttcccagtggtccgtctggatgtgataacctgtcacttgtgtgt

SEQ ID NO: 12295 - DNA, 685 bp, Macaca Fascicularis
  misc_feature (1)...(685): n = A,T,C or G
gaaaccctttggctgtgtagnnnnnnnnnannnnnncagtgnnnnnggaacaataaaaaggcanctgagaattcatgctcaggagtcttcctatgtatgtgatgagtgtggaaaagccttcactagcaaaagaaatcttcatcagcatcaaagaatccatactggagagaaaccctatgagtgtagtaagtatgagaaggcctttggaacttcttcccagctaggtcttcctgagcatgtccactctggagagaagcctgtgctggacatttgtcgttttggcctcccagaattttttacccccttttactggtaatagtacactccagtgaaatgtactgagtggattccatcttctactcaggaatggaatgtgtgacacagnnnnnnnnnnnnntctgatcgatccctcaagccacagttactgatgcagatgtcagtagatggtccagttagagtcccaggattgcaagagctaataggaagaaatattctctgcacccccacacccnnnnnnnnnnnnnnnctgagaagaactcctagactctcacagaggctgagaatgaagtcctcacagcaaaaaagccatctgagaattggagagcagtcaaagactgaagataannnnnnnnnnnnnnattaaaccatgcctgaagctaaaaatacatacgggttttgaatgcag

SEQ ID NO: 12296 - DNA, 1332 bp, Macaca Fascicularis
  misc_feature (1)...(1332): n = A,T,C or G
tctgtggagatcaccaaactacagacagaaaagcaggaactgtacagaaaacagaagtgtttgcaaaatcagttgaggtgcaaggagagaccgagactgtaatagccaccaaaactactgatgtagaaggaagactgtcagcattattacaagagactaaagagttaaagaatgaaattaaagctctgtctgaggaaagaactgccattaaagagcannnggattcatctaatagtaccattgccattttacaaactgagaaagacaaactagagttggaaattacagattctaaaaaagaacaggatgatctcttggtgctcttggccgatcaagatcannnnnnnnnnnnnnnnaagaataaactcaaggatcttggtcatccagttgaagaagaggatgaacttgaatctggagaccaagaagatgaggatnnnnnnnnnnnnnnnnntggcaaggacctagatcatatctagctttaaaatctctaggaacgatagagattatatcataactccgaagatggaatctaaactttggtttacctccacggaaaataaagatttagaaaccaggtggaaaacattcactattaagactattgatatatttttgtaatgttgccacccatgttgaaaaccttaaaactaaatttatgtagaacatacatcttttatttaaatccatctgaactgtcccaaaatataatttgcaaagagcttcagacaccaaaaatacaccattttaaggcatgtggtggcaatgctatttgccttagttcattggttgtttactttgcaaaatttgtgacttttaagtactaacacatttgtttgaatgtgtattgaattggaattattatttctgaattcagtgtttgagtccttagttgatgattttcttttaaataaattagtttatttaaaagcaagatagcctgggctgggaattagtgtatatcatcagccctccatctaatgtgattgctaagatgtgcaggataggagagcttagaatgagtgccttgacatctacatatggctgcattccgtacctcagtgaagaagccgaaggatgctgacacacagtgatgtggagggcgttcaggagaaacttttgcaacagtgtattaatgtgattggttttctttttgttttaagctaaacatctaaaacaaatttcaagttaactgttcatacaactcagatttagtattattgtttatcataaaacattatgttcctagttttaaaaagacccaaactatgatttatataatttattggcatttttgctgaataggtgtaagtcagataatagattttaaaaaag

SEQ ID NO: 12297 - DNA, 703 bp, Macaca Fascicularis
  misc_feature (1)...(703): n = A,T,C or G
agttgtggatccaaatgggctcgccagannnnnnnnnnnnnnnnnnnnnnnnnnnnnnnnnnnnnntgagaaaatgtctcgtgcnnngnnnnactattataagcttaatatcattaagaaggaaccggggcagaagctcctgttcagatttctaaagactccgggaaagatgagccaggacaaggacatccacctggagccgccggagagccacgagcaggacagaatggagttcaaggacgagaggccagaaatcnnnnnnnnnggggcaggtggactccaggcacccggtaccgatggggcagggaccgagtctcctatgaaggcagcctcctcctcccagcagagcagcaggatccccagctannnnnnnnnnnnnnnnnnnnnnnnncattgcttgggagggctgggaggcctcccatccaggacactgggggcaggagggtcatcttttgggcagggcgatcctggggctaaacggggtacaggggagtgttctctctcctgctgcagccccgggagaggaagccaggcaccggtagagcatccagccccacccctgtaaatgnnnnnnnnnnnnnnnngggaacgaggtccctcagtgagcctcagatttcctcacctgctcctgaaaaccccgcgctcaggggcnnnnnnnngaaatgggaaaagtgtcagtgctttgaggcagcacgaacagcct

SEQ ID NO: 12298 - DNA, 796 bp, Macaca Fascicularis
  misc_feature (1)...(796): n = A,T,C or G
tgccaaggtcannnnnnnctctgtctgtgctgtgtttggcctgggaggggtcggcctatctgctgttatgggctgtaaagcagctggagcagccagaatcatgcnntggacatcaacaaggacaaatttgcaaaggccaaagagttgggtgccactgaatgcatcaaccctcaagactacaagaaacnnnnnnnnnnnnnnnnnnngnnnnnnnnnnatggaggtgtggatttttcgttgaaagtcatcggtcggcttgataccatgatggcttccctgnnntgttgtcatgaggcatgtggcacaagcgtcatcgtaggggtacctcctgattcccagaacctctcaataaaccctatgctgtnnnnnnnnnnacgcacctggaagggggctgtttatggtggctttaagagtagagaaggtatcccaaaacttgtggctgattttatggctaagaagttttcactggacgcattaataacccatgtcttaccttttgaaaaaataaatgaaggctttgacctgcttcgctctgggaaaagtatccgtaccgtcctgacgttttgaggcaatagagatgccttcccttgtagcagtcttcatcctcctctaccctgcatgatctggagcaacagctgggaaatatcataattctgctcttcagagatgtattcaataaattacacataggggctttctaaagaaatggaaattgatgggaaattatttgtcaagcaaaaatttaaaattcaaatgagaattaaataaagtgtgaacatcagctgggaaatgaagc

SEQ ID NO: 12299 - DNA, 700 bp, Macaca Fascicularis
  misc_feature (1)...(700): n = A,T,C or G
ttacaggtgtgagccattgcgcctggcctgtagcaaataatnnttaagcannnnnnnnntgtatgatgttgggtttagcatcgtatgttcagagtattttaaataagaaagaattaatctgtctttagtatacaggatggnnnnnnnnnnnnnnnnnnngtataagaatacaatttacctttcccaaacccttttttccttatttttttctttcagataactttaattatttaatcccacactgattaaaatatgtctatctaaagggatctactactatttgctttttaaaaagtgttccctatttatttaggaaaaagtgaagcaagcaactgaatttatatgtaaaaatcacatttagacccgtggatcaaagattattttaaaaaattagatattaatttggtatcagtaaaaagtggcttttttcttagtatatacataaataaaatgaaaattaagagtataagcagttgtgaatcattacaagcagtctggaataactaactcctagggataaccatttctatcctgttccaaagtcttattttatagtttgaaaagcactttgcacacagttctcgtatataaaagtaaagatgtaattataggatatagtgttcttgctttgtttaataagaacctcatttaaacctgacagctatggtatttttttaatgatcaagttcttttctgttta

SEQ ID NO: 12300 - DNA, 817 bp, Macaca Fascicularis
  misc_feature (1)...(817): n = A,T,C or G
tgcacagccatagannnnnnnnnnnnnnnnnnnnnnnnnnnnnnnnnnagtcagagtgcatcaacaagtttgcttcagtctttgggaccatgcctctcaaggtggttgaacaccgagctgaccctgtcctgtacaaagacgactttnntgagaaactgaagagcttccccaacattggcagcttatgaaacgtgccattggtggaggtctgaatgtgagactgggacagagcgagagaacaaggcctccnnnnnnnnnnnnnnnnnnnnnnngggttaagggtggaaggttgacctacttggatcttggcatgtacccacctaacccactttctcaagaacaagaacctagaatgaatatccaagcnnnnnnnnnnnnnnngcctctgttcttgtatttcttatgatctctgatgggctcttttcaaaaatgccaagtggaagnnnnnnnngcatgctccagagttaaatccagcngaggctccttttgttttcagttccgtgtaacaatctggaaggaaacttcacggacagtaagactgctggagaagagaagcctatcagcccattttaggtctggggaatcatgtaaggggtacccagacctcacttttagtcatttacatcagtgagttctttcgaggaacagccaaacccagaatttggtgcaaaacccaaacatcttggtgggatttgataaatgccttgggacctggagtgctgggcttgtgcacaggaagagcaccagccgctgannnnggaccctgtcagttccatgaactattcctctttggtttggctttttgatatgataaaaa

SEQ ID NO: 12301 - DNA, 752 bp, Macaca Fascicularis
  misc_feature (1)...(752): n = A,T,C or G
caaatatgaaacactnnattcattctgcctcnnnntnnnannnnnnnnnnnnnnnnnnnnnnnnnnnnnnnnntccgaagatgaatggttttcttaagattttccatgaacgcattcatttttgaaggtttaaggttcctaaaaaaacaggaaggctattcaggtcaaagtatttcttgaatccactgacgaagactactggtcaaaaacaggactggactgtaactaatataaaaggaagctatgacttatccagttgcattgtactatgggcgtgtacagcataaaggctgaaaaggaaaaaaactcaacaaatcagaatcgtctgcatcattgtttctaattacagatgcaatatcaagaagtacgcacatttagtgcacccaattataccaagtttatggaactatcctttaagaccaccctttgtnnnnnnnnnnnnnnnnnnnnnnnnnnnttctgtcctattctggccctctgagcctgagcgaacttcatgttcagtagcaaatgccctgtcagaaattatccagagtctgtgtgtatgtacatgcaaatatttatgtaaacacacgtggatacacagaccactcccgtggcattccagtttacaaatccattcatttagatatggttagcatgtgacaacttcctgaggctcactacctagaataatgtatcacaacagtttcagtaggcatctttcactgacatatttttggttacaacatacaaatgtctatgtagtttgt

SEQ ID NO: 12302 - DNA, 841 bp, Macaca Fascicularis
  misc_feature (1)...(841): n = A,T,C or G
ctgcgtgccgtgtggagcagacagagcgnnnnnngaaggctgcagagcaggagctgattgagaccagcgagcgggtgcagctgctgcattcccagaacaccagcctcatcaatcagaagaagaagatggagtcggacctgacccaactccagtcggaagtggaggaggcagtgcaggagtgcaggaacgccgaggagaaagccannnnnnnnnncacagatgccgccatgatggcagaggagctgaagaaggagcaggacaccagcgcccacctggagcgcatgaagaagaacatggagcagaccatnnnnnnnnnnnnnnnncggctggacgaggcggagcagatcgccctcaagggcggcaagaagcagctgcagaagctggaagcgcgggtgcgggagctggagaatgagctagaggcagagcagaaacgcaatgcggagtcggtgaagggcatgaggaagagcgagcggcgcatcaaggagctcacctaccagacggaggaggacaggaaaaacctgctgcggctgcaggacctggtggacaagctgcagctaaaggtcaaggcctacaagcgccaggccgaggaggcggaggagcaagccaacaccaacctgtccaagttccgcaaggtgcagcacgagctggatgaggcggaggagcgggcggacattgccgagtcccaggtcaacaagctgagggccaagagccgtgacattggcaccaagggcttgaatgaggagtagctttgccacatcttgatctgctcagccctgggggtgccagcgaagccccatcctggagcctgtgtaatagctccttgggaggaagcagaataaag

SEQ ID NO: 12303 - DNA, 674 bp, Macaca Fascicularis
  misc_feature (1)...(674): n = A,T,C or G
ccatggcccctgcagcagaaaccaaagtcnnccatanngtgtgcanngccaccnggggagtgagtggcgagcgggaagtctccctgcttntctggggccagagcagcttngaggaagtgaagagacccctctccccagcaccccacatcttcctctgggagacactcacaccccctatcctggccagtgatggaggggtatctctgggggggtgctcagcttccatctacttccctttcttcctgtgttcccagccccaccctcagccagggccaggcccccatgtaggagcttcctagcgagcggcctcccctcacttcctcctggtggtcccgtggcctctgctgaatcagagctgagaacggtgccaaaattcaacgatgccccccagtccccttcctccctcccccaagccccccgggcctcatgaccttggggctgcccccctcggtgctcctggagcctccagtagagtagcgtcacaagcaatctccctggcgcttcctggggtggggacccctgctccgtccccacttcctagctgcccacttttcagtgttatgaagcctggggacggggcaggcacccgcggggctctcccacacgccccctacactgcccaccannnnnnnnnnnnnnnnnnnngttcactccacatgtgcccaggcggaaag

SEQ ID NO: 12304 - DNA, 721 bp, Macaca Fascicularis
  misc_feature (1)...(721): n = A,T,C or G
aaaggattgnntcagagctcttcccnnnnnnnnnnncagagagttcattnnnnngagagaccatttgaatgtcatgagtgtgggaggaccttcaatgatcgnncagccatctcccagcacctgaggactcacactggagctaagccctacaagtgtcaggactgtggaaaagccttccgccagagctcccacctcatcagacatcagaggactcacaccggagagcgcccatatgcatgcaacaaatgtggaaaggccttcacccagagctcacaccttatcgggcaccagagaacccacaataggacaaagcgaaagaagaaacagcctacctcatagctctcaatccagttgaagaaactttgtcttttcagcttgaccctacaatataacgtgcacaggcctgcttgtgaatcagaactgaatgtgaaagggaagcattgagtgaggacattcccaaaaccaaaggacaactgaggagactgcccagcacataatgaataaataaaatgagtgaagagttattaacattagttggaaaaaagatttcccattcacttgatattgtttgttcactcatttagtcattaaaagtgagattaataaaatctgaaatgttatataataacttttaaaaagccaggtaattaataatctgcactgatattatatcnnnnnnnnnnnnnnnnnnnnnnntatgaattaaggattaaaagatagt

SEQ ID NO: 12305 - DNA, 707 bp, Macaca Fascicularis
  misc_feature (1)...(707): n = A,T,C or G
tatgattgcagattcaggcaaaatatataaaactgcaaaacnnnnnnnnnnnaaaagcaaagaaggatgctgctgctgtgggtannnnnnnnnnnnnnnnnnnnnnnnnnnnnnnnnnnnnnnnnnnnnnnnnnncagagaaagaattaaaattactctgcagcnnnnnnnnnnnnnnnnnnnnnnnnnnnnnnnnnnccttagcagaagaatatggtttgnnnnnnnnnnnnnnnnnngaaattatttctagcatggacaatccagataatgaaatagtgttgtacttaatgttacgggctgttgatagatttcataaacaacatggtagatatccaggggtatctaactatcaagttgaagaagatataggaaagttgaagtcttgtctcactggcnnnnnnnnnnnnnnnnnnntatctgtaatggtgaaannnnnnnnnnnnnnnnnnnnnnnnnnnnnnnnnnnnnnnnnnnnnnnnnnnnnnnnnnnnntcttggggggagctgctgctcaagaggtcatcaaaataatcaccaaacaattnnnnnnnnnnnnnnnnnnnnnnnnnnnnnnnnnnnnnnnnnnnnnnnnnnnnnnnnnnnnnnnnnnnnnnnnnnnnnnnnnnnnnnnnnnnnnnnnnnnnnnnnnnnnnnnncttcgggttgtgctttagtctgtaaannnnnnnnnnnnnnnnnntaaa

SEQ ID NO: 12306 - DNA, 721 bp, Macaca Fascicularis
  misc_feature (1)...(721): n = A,T,C or G
accaccactggggagaagatcacgaaggtgtacgaactggggaatgagccagagagaaagcnntgggtcgaccgatacctcaccttcatggaagagagaggctctcctgtctcgagtctgcctgccgtgggcaagaagcctctggacctgttccggctctatgtctgcgtcaaagagattgggggtttggcccaggtgaataaaaacaagaagtggcgtgagctggccaccaacctaaacgttggcacctcaagcagtgcagcgagctccctgaaaaagcagtatattcagtacctgtttgccttcgagtgcaagatcgaacgcggggaggagcccccgccggaagtcttcagcaccggggacaccaaaaagcagcccaagctccagccgccatctcctggtaagtggcggcgctgcagtcactggcccaggaatgccgaggcgtctggcctgggaggttccgggaaggtcgtttcacagtcaggccaacagagaactcgggacctttgagacgcgggttcctgcgtcgttttgtttatttaattggacgcccattggcagtgttaagggatgagagaattaaatctggcatgtggccatttctgattggcccttggaaggcaccccttcttttgctgtaccttaatcaaaacaggcttttgaattctgagccatatacgtttattccttatacaagtttcaaaaagattccatctaccac

SEQ ID NO: 12307 - DNA, 775 bp, Macaca Fascicularis
  misc_feature (1)...(775): n = A,T,C or G
ggaaaaggcggtggtactnnnnnntgctactactacttagtgcnnngctgtgtatagggtgctttcacatacatctcatttgaatgtcacaagaatccctgaagtgattaaaagtcttgagaggtcaggcaatttttgtaaggctagaaggaaaagtgaggtttcagacttcatttcttttaaagttnnnnnnnnnnnnnnntaatggacaagatagatagtaaattatttcaggctttgcaggctatgaagtgttgcagctccttacctttgctgttatagtgtagctggagccatagacagttacgagtgagcacagctgggtgccagtacaattttaacgatcaagacnnnnnnnnnnnnnnnnnaaccatcatttgttgatcctctgcttgaaagcacgaataagaacagagcagtcatatggtttcagaaagtgttattctgggattccaggatagctaaattttgtaactactaatagcacacaggaaaataatttggtataggaaacaacatatccctaaataatgcttatttaacttcattataaatacatctacttaacaaaaatagattttgtgagggtcacttcgtttaggtcattatctcaacccaccctcctaccaacctccccaaactctggtttgagccaatatgtgttctattgttcttagagcaccagccgactgtacaacaattgttataaaaatgtttattgtttaccaaagacnnngtggacctcttatcaaatgctgctggtaacaaaatctat

SEQ ID NO: 12308 - DNA, 757 bp, Macaca Fascicularis
  misc_feature (1)...(757): n = A,T,C or G
ggtgagagcttcccttgnncnnnnnctggtgcctccccacctggcttcaaatttatgagcattgccctcatcatcctttcttgttccagagtgagtggtcctcttcctaaggaggtctgcttgccatgggccaaaaggcactgggtgggtttttttctcttcctaccctcaggattggacctcttggcttctactggattggggatctgggaatagagactgtgatggggcagatggcatgatgtctacactcccagagagactgtgaggatgagattaatagtggggcctttgtgagctagaggcggggagtgtctattccgggttttgttcttggaggactgtaaaagtgaaggacaagacatggacgatggagataagaaaagcccagcttgatatgaatggacatcttgaccctccctggaatggcgccggctctgggggcagagtgaggaggagaggggaagggctccttacagcctagtctccccatcttaagacagcatcttccacagagtcacctcctctgcccagagctgccctcagagcatccnnnnnnnnnnngtagaggcttctagaagggaagaagttgtccctctgaggcccccgtgggtgacctgcagagacttcctgcctgggactcatctgtgatctgggacagaagcagaggaggctggctgctgtgataccccctgacctcccccagtgccttcttcagaatgtctgcgctgtcttctgaccctgttagtcactgtgt

SEQ ID NO: 12309 - DNA, 742 bp, Macaca Fascicularis
gagagaagaagagaaacgccggaagaaagaggagaagcggaaagagatccgaaaaggcccaaggatctccagatcccagtctgagttatagccctggagcagctcagggctcaaggggccacaaggaggcaggtcgggaggaagaagaggtggagatgtggttgtggtggagagcaccagccagccccttccagaaggagaggccacattttcccagccccctggagctgggtctgagccctggctgaagggactgagcctcagatggctggcttttctctcaggggcctcctgctgaaggggccttcagagaactttatactggaaatatgaccctgtgcagactgctgggggaggcagggcgatgcctgcctggactcttttggtggctgaaaacctctggccagctggcttccactcttggtggggaagcagcagaagtaggttccgagccacaggtgagggtgccaccctgctgctggccccacggtgtcacagagctgcctggcacaggtcccagcccctctgcagagacacaataaacgccagcggaccctttggagcaaccaaggctcagggatgtagaaacagcttggaggatgtttctgccccaccggtggtgggggccaggccctggcggggcagagaagcaaggggcttggcttgggcctcctgttcctaccccagcactgcccttgacaaaggattggtgttgggaagggacctggaagtgtcctgggat

SEQ ID NO: 12310 - DNA, 717 bp, Macaca Fascicularis
  misc_feature (1)...(717): n = A,T,C or G
aaagcagacaggtgtgcagcnnntggccgtgaaagcatggctaatagggccacannnnnnnnnnnnnnnnnnnnnnnnnnnnnnnnnnnnnnnnnggaaaatgccacaatcaccaatgcaaacattggaagattatnnnnnnnnnnnnnnnnnnnnnnnnnnnnnagtagaaaatatgtcccagaaatgtcatgagatcgctgtgtgttgcctgggacacagatcaagggcctattgtggagagctgaggaccaccagtctgcctggaggccagggagcagtggctgagtagctctgcccttgctctggtctataccttaagaatgtcaaagaatgaatctcagcgcctctctttggcactctgacttaaagtgcaaaaagctcctgtgctgaggcatgctatcatggaatgagactggtttggcctaggcttgatgaatgggtagtcattttgcagaggctatgggaagagggtgataatagaagagtggcaactataggaaattatcaacataccttggccagcaggttagagaatcnnnnnnnnnnnnnnnnnnnnnnnnnnnnnnngcagggataaccaagaacctagcatttattaagcacatatttattaagtgctcagtgtttcatatacatgcaagtattattctcagtttacagagaaagaaattatgtcccaggggctaaagcaaccagctcaaggatacatagaaa

SEQ ID NO: 12311 - DNA, 444 bp, Macaca Fascicularis
gagctgtatcagccttacgaaggtacgagatgtttgcttttgtcaaaagctttattcagatataattaacgtaaaataaactgaacatatttaaagtgtacaatttgataagtttcacaccttgtggagaacatgcataccacagttaacatatccgtcatccctcaaagtgtcacaatgcccctcccgctgactcctccccagaaaaccaccaatgggctttcattctgcattttgtagagttttatgtgaatggaatcatatagtatgcttttttttgtctggcttctttcactttgcataattattttgagattcatatgtctccatcttgctgctcgtatgaattcattcttttaaatatttgttgaatattcccttgtatggatataccacaattcgtttacccatttacttgttgatgacatttgggttgttttagtt

SEQ ID NO: 12312 - DNA, 787 bp, Macaca Fascicularis
  misc_feature (1)...(787): n = A,T,C or G
aagcaagcatanttgctgnttagagctatacttaaggtatagagattcttttccannnatggtgtgtaaaatcagtatttgtgtttaattttgcaggtttttcaaggattaactaatgtgcaaatacagtggtgatatattgatactacattttaataatgcttttgtatggcactttatagttttcagacaccttttgtaacagccctgtgagacagtactatccttgttgtaaagttgggggggctctggaggctctgaaaagtttttggtgatattcccctaagtttataccacaaaatgatggagccagaatttagttgcagaacttctgactccaagtccagagttctttactagacacctggtttcttactagctttttgctaggtttttatttaacagtgaaannnnnnnnnnnnnnnnccgatcattttggcttattatcaaataccatttcttttttattgcagagacccagcagatgtcactctcattnnnnnnnnnccaaagaaaaccctnnnnnnnnnnnnnnnnttaggtaactgaagtgtatttccagtgcaatttaattttgaactaagatttgatatagagttgtaattggcttacatgactctttgaaaatatatcatccccgggttctcaggcgaaggaggcaattcaaaagtaaaaaagaatattcgaatacagtaaatactctctgttctcacacaaatgctgtttcttagctttaacttgctttgacaacctactgatgtaacttctttgttaatgtgaaatattt

SEQ ID NO: 12313 - DNA, 679 bp, Macaca Fascicularis
  misc_feature (1)...(679): n = A,T,C or G
cnnnnnnnnnnnnnnnnnnnnnnnnnnnnnnnnnnnnnnnnnnnnnnnnnnnnnnnnnnnnnnnnnnnnnnnnnnnagcctggccaacatggccatttctgctgaaaaaaannnnnnnnnnnnnnnnnnnnnnnnnnnnnnnnnnnnnnnnnnnnnnnnnnnnnnnnnnnnnnnnnnnnnnnnnnnnnnnnnnnnnnnnnnnnnnnnnnnnnnnnnnnnnnnnnnnnnnnnnnnnnnnnnnnnnnnnnnnnnnnagaagcaagactctgtctcaaaaaacaaaaacaaaaaaaaagattggtgttaattataaatatggacgaattctgctctctgctctccatggttgtcaacactgcaaagttgagacctcgtatctcacccacactgctgcaacagctttactggtgccttgctcccagccttctcctcctcggtccatcctccacacagcgctggggaagaggagccactgaaacaaaagtcagcaactggttgtagttcataaacacagagctgtttgtgtcccctgtatctggaatgccattatnnnnnnnnnnnnnnnnnnnnnnctactccccttaaaactcggttcaggtagcagctccactaggaagccttggctgaccataatccattcaattccattccacctcttcgcaggcagtctggggttagg

SEQ ID NO: 12314 - DNA, 742 bp, Macaca Fascicularis
  misc_feature (1)...(742): n = A,T,C or G
ctagggcactnnnnnnnnnnnnnnnnggcggcagaggatgctgtgtggagcgnnnnnnnnntcatcacccaccnnntcaacgccatgctgcctttccaccaccgcgacccaggcatcgtggggctcctgaccagtgaccggctgcccgcgggccgctgcatcttctacggaatgattgcggatggcacgcacaccaaccccgccgccctgcggatcgcccaccgcgcccacccccaggggctggtgctggtcactgatgccatccctgccttgggcctgggcaacggccggcacacgctgggacagcaggaagtggaagtggacggtctgacggcctatgtggcaggcaccaagacgctgagcggcagcatagccccaatggacgtctgtgtccggcacttcctgcaggccacaggctgcagcgtggagtcggccnnnnnnnnnnnnnnnnnnnnncccgcccagttgctggggctggagaagagtaaggggaccctggactttggtgctgacgcagacttcgtggtgctcgatgactcccttcacgtccaggccacctacatctcgggtgagcttgtgtggcaggcggaggcagccaggcagtgacaaggacttcggctgagaggacgcccannnnnnnnnnnnnnnnatcagggctgagtggttggggagctggtctccagggagtgagtcgggagccctgctggaatgacgcccagggcctttgctgccgccctggagg

SEQ ID NO: 12315 - DNA, 754 bp, Macaca Fascicularis
  misc_feature (1)...(754): n = A,T,C or G
gatgagtatgaatgtgatactaccagaaagtaatnnnccaacagnnnnnnnnnnncnnnnnnnnnnnnnnnnnnnnnnnnnnnnnnnnnnnnnnnnnnnnnnnnnnnnnnnnnnnnnnnnnnnnnnnnnnnnggaagcccttgatgccaattctcggaagcaagaagcagagtggaaagaaaaggcaataaaggagctagaagagtggtatgcaagacaggacgagcagctacagaaaacaaaagcaaacaacagggtggcagatgaagctttctacaaacaacccttcgctgacgtgattggttatgtcacaaacataaaccatccttgctacagcctagaacaggcagcagaagaagcctttgtaaatgacattgacgagtcannnnnnnnnnnnnnnnnnnnnnnggtggcccggctgtgtgactttaaccccaagtctagcaagcaggccaaagacgtctcccgcatgcgttcagtcctcatctccctcaagcaggccccgctggtgcactgaagagccaccctgtggaaacactacatctgcaatataatcctactcagnnnnnnncnnnnnnnnnnnnnnnttaattatgttgagttcttttggaccaaacctttttgtctttagagttgatcattgtttgtgattgcatgtttccttcaactgtgttctccctggcattcagagaggagggggaggagcaagaggaaggggagggaagcctcccaacagtagcctcaacctgtgctt

SEQ ID NO: 12316 - DNA, 764 bp, Macaca Fascicularis
  misc_feature (1)...(764): n = A,T,C or G
tcaagagcagaatgagaagatnnatgctccacaaggnnnnnnnnngacagaccccattgagnnnnnnnnnnnnnnnnnnnnnnnnnnnnnnnnnnnnnnnnnnnnnnnggcatgagcagtggaagataaactgtagaattaaagatcccacttccagccgggcccctcatgtatccactggccgaccgcagagtgtccctacctcctctccagagcannnnnnnnnnnnnnnnnnnnnnnnngccacggtgccatttactccaaggactcaactttctaaaattccacacctgaggtgacctctagtcgctcagcatccactttgtgtctccaaattgtgtaggactctgtaatcttttgattagtttctgagaaaacacagtgaagcatttcacttttttttattcaaagccatttaataaaacacagttggnnnnnnnnnnnnnnnnnnnnnnnnnnnncaccagtacgtaccaatagttctcttcattccttgggccagcttctcaggtggctttagacctcaacaagccgtatcttcgccagtgttctatcttgttgccctaaattaataannnnnnnnnnnnnnnnnttttggtgagggttggctgtggctgtcgttttgctaatgcatctcccannnnnnnnnnnnnnnnnnnnnttaccatgactcaaatcttnnnnnnnnnttctactattcaattcctcaaaccgaagctccttgaaaaaaattatgtataatgttatttgttttattatagcaa

SEQ ID NO: 12317 - DNA, 747 bp, Macaca Fascicularis
tgaaacacagaaaactccaagtcacacaaggatgttaaaagatggtcaagaaaggcccacaatccttaaaagcacagccttctaacatagcttccagtaagggagaaaccgaaaaggaaagactgtcttgccagaaatggccagcttgtgcagactccgagtccttcagtgacaaaggcctttgctgtttatcctcttgatctgtgtctgacttgctcatggatgggcactcacactcagaggctacatatggtcctagagcaccaccttcctctagggacactgtggctacctatagacaacttcatctaagtcctattacaatggtggactcagcatctccgaagaagttaatttttcactagaaccagtgagatctggaggaatgtgagaagcatacgctaaatttacattttaattttagactacttgaaaaggcccctaaataaggctagaggtctaagtcccctgccccttttcccactcccctctaatggtgaactttagaggaaaaggaagtaattgcacaaggagtttgattcttaccttttctcagttacagaggacattaactggatcattgcttccccagggcaagagagcgcagggctagggaaagcgaaaggtaatgaagatggagcagaatgagcagatgcagatcaccggcaagtgcattgatgtgtgagctcttagaccactcagcatgatgactgagtagccttgtttacatctgatcaaagcactggg

SEQ ID NO: 12318 - DNA, 656 bp, Macaca Fascicularis
  misc_feature (1)...(656): n = A,T,C or G
caggccccaggagannnncaggggcctgccatacactcccagcccaccctcaccccagcctcttccccacattaggggtttcttggaagctggctctcactcccctccaccctctagctagaggtaggatatccctgactcttgggctcccagccctaaaactcactgcctcccccaagggccccctctaaggagagtgtgggggagcccnnnnnnnnnnnnnnnnnnnnnnnnnnnnnagagaccctcctcctttcacgaggaaaagaccttcccctgaatccctaaaaatgtttacagtctctgctggttccctccgtgtaaataccactaccacccgtgcgttatccagcccgcccggcctggcccggacgctgccatctctctttctgggagtttagacaatgttgcccttggatttttttctctctcttaatttctccctttgctttggggggtaattggatattgggagnnnnnnnnnnnnnnnnnnnnnnnnnnnnnnnnnnnnnntcattttctttaggaaggttttagggaaaagaaaatggggtgggggtgggagtggtaaggggagaccggggagtcagtttcagacagttctctatgcttaacttatttatttattgcattttacttttaannnngttggtctt

SEQ ID NO: 12319 - DNA, 1147 bp, Macaca Fascicularis
  misc_feature (1)...(1147): n = A,T,C or G
cagcagaacagagtgnnnncagcagttctccaggtgaaaataagtcccctnnncgcccatgtggcttgaatcactcagactccctgagtcgaagcgaccggattgacgccgtcacaccaacactggnnnnnnnnnnnnnnnnnnnnnnnnnnnnnnnnnnncaagtctatatccccgattactcggtgcgagccctttcggatctgcagtttgttaagatctcaagacagcaataccaaaatgccttgatggcatcccggatggacaaaacccctcagtcttcagacagtgaaaacactaaaatcgaattgactcttacggannnnnnnnnnnnnnnnnnnnnnnnnnnnnnnnnnnnnnnnnnnnnnnnnaactgtgtgacgcacagtaaggccaaccacagcctgcacaacgaaggcgccatctaggccgcnnnnnnngcacccgcccaggcctgcacccacccactcccgagggcccggccccgtctgcccatgacttcactggtgtgagcttgtccgccatgctgcaccctgcaacatcctgagaccaaagaccttgtgcccttcccaggagccgcggaggaggacggtgaggggaggaatggaaactagaaatatgaagttggcggccggggcatggcgttcaagattttggagatgaactgattccgcccaaatagaatcatgtttattttttcagctctccccttcatcgttattcacgctctctgccctcgatttgcatgaagttgaaaattgtcgcgatttattttttcaagagatcatgtttttaaagtgtcttttgcagagttttaagttgttctgtctgaactctgctgtgatcccatgatgtgaccctaataggctggacttgcccctccggtagccttccttggccctcccagggaggagcacccttcctctgtgccccagtgggcatcactgtcgaactcgctggctgaatgaagaagaccgtgttactgcagagcctgccaagtgtgtcatcacggtggggtgtagcctgcctcagagggacctgcagtcgcctctctgagctcagtggtattttgagaagttaatgtttaactgtacccctttccctcaggaagatttaacatttgcttgggaatgtgattttgctcccc

SEQ ID NO: 12320 - DNA, 727 bp, Macaca Fascicularis
  misc_feature (1)...(727): n = A,T,C or G
gcgtgccgtggtggagagcnnnnngcnnnngcaggaccgtgcccgcgaggacctccaggcccannngcaggagacgtgggccctggcccgggacgctgcccttgtcctggannnnnnnnnnnnnnnnnnnnctgagctgtcatcccgagtgaggcgggaccatccccctggtgcagccaccctgggcccaggcctccccgcagctgacgccaagggctggcaagtgtccctgcaggccatgagcctccccgagctctcgggagccctggaggaccgtgtccacgagatggggcaagcactgtgctcagtgacccagagcctggagaagctgcaggtgctgaacgggaagaagtggcgggagccctagcccgcgggccgaatctgacgttgggtgattggtccaccctgaagctgtgtgccagggagtgaagaggacagtaagcaggcagctgccacgtgcagcccaggcccagtgggggccagaggatcaggccccgggagcagccggcagacagaggcaagacaggggctgcggccctggccgagcacctcgggccagcactgaggcgggacaagggtcnnnnnnnnnnnnnnnnnntgaggcccagagttcatgggctgccctggcccagaccaggcagggcccnnnnnnnnnnnnnnnnncatacacacacacaggtgccaactgaggtgtgaccttaggggtgaggactggggcgcctggaaa

SEQ ID NO: 12321 - DNA, 758 bp, Macaca Fascicularis
  misc_feature (1)...(758): n = A,T,C or G
gagagagaannngaaccagatcagcgccgtnnntcaggattctgagagcatccttgcagacctnnnnnnnnncaaaggcgcaggcccagagatccgagacgcaattcaaaatcccaatgacattcagcttcaagaaaaagcttggaatgcagtgtgccctctcgttgtgaggctaaagagattttacgagttttccattagactagaaaaagctcttcagagtttattggaatctctgacttgtccaccctacacaccaacccaacacctggaaagggagcaggccctggcaaaggagtttgcggaaattttacattttacccttcgattcgatgagctgaagatgaggaacccggctattcagaatgacttcagctactacagaagaaccatcagtcgcaaccgcatcaacaacatgcacctagacattgagaatgaagtcaataatgaaatnnnnnnnagannnnnnnnnnnnnnnnnnnnnnnnnnnnnnnnnnnnnnnnnnnnnngcaatgccacaatgcactttgtctcggaaaacaaaaccctgccaatagagaacaccacagactgtctcagcacaatgacaagtgtctgtaaagtcatgctggannnnnnnnnnnnnnnnnnnnnnnnnnnnngtgaagagaccctgatgttctgcatgagggtgatggtgggagnnnnnnnnnnnnnnnnnnnnnnnnnccctgnnnnnnnnnnnnnnnnnnnnnnnnnnnnnnntaagaatagtagtg

SEQ ID NO: 12322 - DNA, 318 bp, Macaca Fascicularis
cagcagctgagctgggtagcctcgctgagctggtttcctgccccaaaggatggcttccatcatccaagtgcaccactgaagtgaggacgcactggagccaggcacctgctcatgtttaagtgtgctgttcacaccggctctggagagcaccccagcagcatccagaagcagctgcagggtggccgccaccaccttcttgtaggcctcttgcaagtgtcttgtgacattttgttctttgggcagaagccaggatctggtgtcattccttaaaagatagcgccggggccgagcgacagaggctcactccagtaatcccag

SEQ ID NO: 12323 - DNA, 720 bp, Macaca Fascicularis
  misc_feature (1)...(720): n = A,T,C or G
gtggtgtctccaactacactgactggnnngaggtgtacaacgccacgcgggtnnnngactnnngctgcctggagttcagtgagagatgcgggctgcacgcacctggcacctggtggaaggcgccgtgctacgagacggtgaaggtgtggctccaggagaacctgctggctgtgggcgtctttgggctgtgcacggcactggtgcagatcctaggcctgaccttcgccatgaccatgtactgccaggtggtcaaggcagacacctactgcgcataggctgcctgcttctctgccaaaaggacgcccacagggagatggccgtgcccacagctgcctttcccaccaccagcctcggtgctctgccccatgctgggaggagggagggagggacaggtgcccggagcccccggaaccctgtttctagaaggccctggctcaggtggcttcagggcctccaaaccccccctgggaggggtggccacgtgctggctatggaacccagggcaggggtgggaggggtctccagtactttttatatttacatattctccaaagcagtgttcacacgggtgccagcctgtggcccccagcctcccgggaagcgggttggggctgcaggaacaggggcttggcatcctggaagtggccccactggtcctggtgctccaggcagggccatggaccccttacctacattccacagtgggcccgtggggctcct

SEQ ID NO: 12324 - DNA, 724 bp, Macaca Fascicularis
  misc_feature (1)...(724): n = A,T,C or G
aaaacagtgcataaannnccggtaacnngtccacctggccgaggcagcccagagcagcgggacaagctggcggccggagaacgcccagcccagcccacccccgctcacgtcctgcgcacccctccgcccgtccccaccctctgcccccagccttctggcgtctctagaattgctgctgacagcgaccaggacagagcccgcccccaatcagcccgcagcccctcctgcccctccggccaggccctcactccctcccaggtggtggctggcacctctgctcctcacatgggtcgcggggcgggcttgtcccgggtttgtttgagacagtcttttttttattttgtattgttatttttnnnnnnnnnnnnnnnnnnnnnnnnnnnnnnnnngcacctttcccaccgggaagagcgggcctgctgccttccctcctgggggctgggggtgggacagaccccagtgggggccagccagggccacactcagcccagcgtgggctggacccgcctccgtgctccaggggctggcctgtcttcggggcgccggcttccaccactcgccgccccacccctgcactccannnnnnnnnnnnncccagccggcccctcattagccccagggcctgcggtccggatggnnnnnnnnnnnnnnnnnnnactgtcttcccgccagagccccgtcttcctctgcggggctctccggacccccactcccgtcacctcca

SEQ ID NO: 12325 - DNA, 654 bp, Macaca Fascicularis
  misc_feature (1)...(654): n = A,T,C or G
gaggaggcctggagnttcctanangnnnnntacttctgctttatctctctgtccaccattggcctggnngactacgtgcccggggaagcccctggccagccctaccgggccctctacaaggtgctggtcacagtctacctcttcctgggcctggtggccatggtgctggtgctacagaccttccgccacgtgtccgacctccacggcctcacggagctcatcctgctgcccccaccgtgccctgccagcttcaacgaggatgaggacgatcgggtggacatcctgggcccccagccggggttgcaccagcaactctctgccagctcccacaccgactacgcttccatccccaggtgtctccagggagcaggacccatggagggagccctggtgtaggcctaggcggtagactcttcctcagcagcctggcaggcaggaaatggacataggacccaagnnnnnnnnnnnnnnnnnnnnnggtgctgcccgtaaccctgacaccattgtaagagctgtccccatttgtatgttgtgctaattgtatgttgtgtcctgggccctggaatcatccttgttgagctcaaatcccaacttagccttatctggcctgtgtccttgggcagtcaccctacctctctgatttcctttccttat

SEQ ID NO: 12326 - DNA, 667 bp, Macaca Fascicularis
  misc_feature (1)...(667): n = A,T,C or G
gtctacagcctggggtgactgcaggatggatgagggggcggcgggggctgggggggctgggtcgggggtagacttccacttccttttggtccctggtaactgggatcacaggatgtctaagacccttgccccctccctgcccagagcccgtgccggacagccagatggtcatcatcgtcacagtggtgtcagtgttgctgttcctgttcgtgacatctgtcctgctctnnnnnnnnnnnnnnnnncactggcgccagcggcggatgggcacctacggggtgcgagcggcttggaggaggctaccccaggccttccggccatagcatnnnnnnnnnnnnnnnnnnnnnnnnnnnnnnnnnnnnnnnnnnnnngtgactcctcagggttgaggtccagcgctggccgaaggactgtgacaggcagcagggactcgggacattgccttttctagcccgaatacaaacacctggacttagcgctgtgcccacagtgtctcctcctgggataagaacggccacggaggggagccaccatgggggacccctctccccagatgcctcccttcccaccctctccttcacaggggcctcccagcccaggcgccaggcccccatctggcctgagtagctcactcctactgagggagggtgggggaacacaccctggc

SEQ ID NO: 12327 - DNA, 698 bp, Macaca Fascicularis
  misc_feature (1)...(698): n = A,T,C or G
acgcctcacctggnnnnnnnnnnnnnnnctcaacgcggcccagtgcnnnatgccgctgcacgtggcgccgctgctggccgccgccggcctgcacgcctcgcccatgtccgccgaccgcgtcgtggccttcatggaccacatccgcatcttccaggagcaggtggagaagctcaaggcgctgcacgtcgactcggccgagtacagctgnnnnnaagcnnnngtgctgtncacgtcagacgcctgtggcctgtcggatgcggcccacatcgagagcctgcaggagaagtcgcagtgcgcactggaggagtacgtgaggagtcagtaccccaannnnnnnnnnnnnnnnnnnnnnnnnnnnnnnnnnnnnnnnnnnnnnnncaccgtgtcctcctctgtcatcgagcagctcttcttcgtccgtttggtaggtaaaacccccatcgaaactctcatccgcgatatgttactgtctgggagcagcttcaactggccttacatgtccatccagtgctcctagaccttgggcgcttcccacctgcccccgtccccctagagactcagtggacccacctgggccaaggactccaaagccgcggggacaccgggaggtgcagcgggccaggcaggccgggcgggagggaggagggccgagacaagagcagcccacccagcagaaatacaacccgagctacaaagca

SEQ ID NO: 12328 - DNA, 714 bp, Macaca Fascicularis
  misc_feature (1)...(714): n = A,T,C or G
ccttctcagctgtatatatgatattatctcctttcacgggccccagcttaagggcaaatgtgagttaatgtgtagacaaaggcaagggacaagagagagttaacatctagacagtggaaaaagccgtnnnnnnnnnnnnnnnnnnnnnnnnnnnacttgcaggtttcgctttttcccagggttgactacaagaaagaaaacgaggtttttgcaagattaaaatgtgggtgaatgtgcctaaattaaccacccccatttttatcatatttccaccatcactttagggttttaagagtcaatgctcacctgggtggagctggtagtacattttgcttcttagaaagctaagtcctgggttccgtctgattttaggttccgggaacttcctgagaacacccgatcgcagagggtaattttctggagtnnnnnnnnnnnnnnnnnnnnnnnnnnnnnnnnnnnnnnnnnnnnnnnnnnnnnnnnnnnnnnnnnnnnnnnnnnnnnnnnnnnnnnnnnnnnncaactcgcagcaccggtcagctctcnacnnnnnnnnnnnngtgtggaggaccgaggggttgggggnnnnnnnnnnnnnnnnnnnnnnnnnnnnnnnnnnnnnnnnnnnnnnnnnnnnnnnncacttcatcacctacgagttcctgcaggagcanntcaacccccaccggacctacacccgcagtcnacatcatctca

SEQ ID NO: 12329 - DNA, 697 bp, Macaca Fascicularis
  misc_feature (1)...(697): n = A,T,C or G
ccccaagcccttnatgccactgttcaccagtcctacccacaccatgccacgcagctccatgcccaccannnnnnnnnnnnnnnnnnnnnnnnnnnnnnnnnnnngcagtcccagcatgcggcccccagtcctgtccagcatcaggcggggcaggccccacacctgggcagtggacagccacagcagaatctgtaccacccaggggccctgacaggcacgccgccctctctgccaccgggaccttctgcccagtcccctcagagcagcttcccccagccagccgctgtgtatgccatccaccaccagcagctgccccacggcttcaccaacatggcccatgttacccaggcccatgtccaaactggaatcacagcagccccgccccctcaccctggggctccccacccgccccaggtgatgctgctgcacccaccccagagtcatggggggcccccccaaggcgcggtgccccagagtggggtgcctgcactctcagcttccacaccctcaccctacccctacatcggacacccccaaggtgagcagcctggccaggcgcctggatttccaggaggagccgatgacaggattcgtgagttctcattagctgggggaatttggcatggaagagctgaggggctgcaggtggggcaggatgcacgggttctgggtggggagtgaggggtctggaggcagg

SEQ ID NO: 12330 - DNA, 921 bp, Macaca Fascicularis
  misc_feature (1)...(921): n = A,T,C or G
agtgaaaaaggctgctgtccagtttttgaataatgctnnnnnatccagaaaaaacaaaatgccaagaggtttaaaagacggtggatggtcagaaagatgaaaactaagaagtaaatcaatgctaaatgaagaatctgtactttgtatgtatagaatttatctaataaattattggtagataattttaaaggatcattataaaaatcataaacctatttgaggaattactcaaccacatttcattcttctggagtagaattgtgccttgcaatcctagaggaaaaagtggtttaagaaggaattttctttttaatgtatttaactgaattcaagccatactcataccagcaatagcacctcgtctactctcccctggggggtgggaggggtggcaaaaatggcacggacaaaaaggagaaatggacattccagaaaagtctccaactgcagcccttagacaatttgctgttaaagattcagtggacaaaatatagctaactaacagcgtttaaatttttacttttaaccagtctggggatttgcttgcctggtgagtctcatatgccatattatgaatatgaaaaaaatgaatttaatttcctgttgcctttctgtgtcacccataatatcaggtttaaccctaatccagggatgccagtaaactgaaggcagttttaggttgtagaactcagattaattgtagaaaccattaattttaattgctctaattttcatattaatcataaaaagtatgcaagtacctaatatataaactcaattgacactgtatctgtagaagtaaatttttaatggctggttaattatatcactacattttattgcaatatagtactcatttaagcacttaaaaatggaaggtgtacaaagattaaattaagacacggtaaattgactaaatat

SEQ ID NO: 12331 - DNA, 182 bp, Macaca Fascicularis
aacatcatcgccatcaactttcttctgggcatcatgcgagtgtcatgatgcccacccttggagcaaggcaacctcggagtcagtcctctaataaaataaggcgccacccatcttaaaatttctttaagttttatcatcaaagacaacttcagcggttaattataaaagaagtgttgcttcgt

SEQ ID NO: 12332 - DNA, 763 bp, Macaca Fascicularis
  misc_feature (1)...(763): n = A,T,C or G
cgctcgcagcttcgtcagagaatcagacggcaagccaggcctctgagaagacagcagtgtctgacatttgaanaatgtctttgatggaagctcagattgatacaaatgtagaacatatgatagtggatcccccaaagaaggctcttgccactagcatgctcactggtgaagcaggatcattaccctccacccacatggtggtggcagggatggcgaattccactccccagcaacagaaatgtagagagtcctgttcaagtccatccactgttggctcttccctaacgacaaggaaaattgatgcaccagcagtgcctgcgacaggccagttcatgcgtattcagaatgtaggccaaaagaaagctgaagagagtccagcagaaattatcatccaggccattcctcagtatgctattccttgtcactccagctccaatgtggtggtggagcccagtgggcttcttgagctaaacaacttcaccagtcaacagctggatgatgaggagacagcaatggagcaggacatagacagtagcacagaggatggaactgaacccagccctttcagagctctgctgaacggtcctagtgtttggacacaatagtgcactttaaaacctgcttggttaccaagtgtccagggaaacccttgtattttgatgactaaaaagagcactttgcctgtacttaggctgtggaccctaaagcagcagtgtttcaacaagatattgctgcaggagcagcatttaaaacaagataaaac

SEQ ID NO: 12333 - DNA, 614 bp, Macaca Fascicularis
  misc_feature (1)...(614): n = A,T,C or G
ggacaatatacaccaccagganntccttgacgaccnnnaatatccaggatggacctgactttcaagaccgagtggtcaacagtgnnnnnnnnnnnnnnnnnnnnnnnnnnnnnnnntggtgtgggcccnnnnnnnnnnnnnnnnnnnnnnnagagaagatggtggccaagcagcacgggaaggtggtgatggccaannnnnnnnnnnnnnnnnnnacagacctcgccattgagtatgaggtgtcggcggtgnnnnnnnnnnnnnnnnnnnnnnnnggggacgtggtggnnnnnnnnnnnnnnnnnnnnnnnnnnnnncagttggaggccttcctgaagaagctgattggctgacaagcaggggtctgtgataaagaacttagtcatcccttccacctcctactgtgaagagcaaccctgggtcccacactgaaatcccctctagtcacccatcctcaccccccagggagccccctcccacctcacctcacaggcagtggggcagaaaatgattaatgggctggggagccctggagaaccttgactctggaagtctcgaggcacctccttcgctccttagctggcccattggnnnnctgagccgggggctgaact

SEQ ID NO: 12334 - DNA, 1094 bp, Macaca Fascicularis
  misc_feature (1)...(1094): n = A,T,C or G
agaggcttcgctggattcggtattatgctatgatccnnnnnnngcaaaatggaatgaagtaaaaaaacttcctnnnnnnnnnnnnnnnnnnnnnnnnatttcacataaagggatgatatattgtctaggaggaaagnnnnnnnnnnnnnnnnnnnnnnnnnnnnnnnnnnnnnncaaccccaaaaaaggagattggaaagatctggctccaatgaaaactcctcgttccatgtttggagtagcagtccataaaggcaaaattgtgattgcaggaggtgtnnnnnnnnnnnnnnnnnnnnnnnnnnnnnnnnnnnnnnnnnnnnnnnnnnnnnnnnnnnnnnnnnnnnnnnnnnnnnnnnnnnnnagaagctccatcagtttnnnnnnnnnnnnnnnnnnnnnnnnnnnnnttggtggttttgctatgattcaacnnnnnnnnnnnnnnnnnnnnnccactgaagtcaatgacatatggaagtatgaagatgataaaaaagaatgggctgggatgttgaaggaaatacgctatgcttcaggagctagttgcctagcaacacgtttaaatctcttcaaactgtctaaactatgaacaaggtgacaaaacatagattgggaggtggtttgtttggtgaatggggctttaatttattgttttttaaannnttgtacagacactcatgtagaaattattcaggaagttattgtctaagagatgagcagtaggtaacctcagtcattgactcttcaatgtaatgatcagagattaaaaccattttctaataagaaattaaatattcagttgaacaaattattttgtgaatctgttgcactcaatggattgtaaaggaggctccnnnnnnnnnnnnnnnnnnnnnnnnnnttgcattgttagggtatccttacactgattttctactacaattggaagtggagaatatgtgcatctacattcaaaaaatttttaaaatatcaaaaacctttcctcgtgcnnnnnnnnnnnnnnnnnnnnnnnnnnnnnnnnnnnnnnnnnnnnnnnnnnnnnnnnnnnnnnnnnnnnnnnnnnnnnnnnnnnnnnnnnnnnngggaattat

SEQ ID NO: 12335 - DNA, 625 bp, Macaca Fascicularis
  misc_feature (1)...(625): n = A,T,C or G
tttatttcctcnnnntttgnnnnnnnnntcaggcagcgggcaggcctgggaggtgccggtgcccctgcccctgtcccatctccaccacctgcacgttttaagatcctctgcggccaccagaccctgccagccctggggccggcgggaccctgcgcccctcaagacgctcctctttattttagtgcccctctcagctgaggaggaaccgagagcggcgctggggcacctgagcccaggaaggcaagcaggccggccgggaccgcgagtgccnnnnnnnnnnnnnnnnnnnnnnnnnnnnnnnnnnccacctccggctgtaggtgcggccccattccctccacagccctgtgccgggctttgtgtgctcagggcttggccagctggggccgcccatccctgccctaggccctgctggcctggacggnnnnnnnnnnnnnnnnnnnnnnnnnnnnnnnnntgcgggagccatctcatttggcatcgccccttgtctcgggctggtggggagtgagtgagggttatagtcactctccccactcagggactgcctatcccggcacccagtgctcatcccatgggaccnnnnngcagccagggagagggcagaannnctcgttcccgtcca

SEQ ID NO: 12336 - DNA, 761 bp, Macaca Fascicularis
  misc_feature (1)...(761): n = A,T,C or G
cagacttttaatgcataaaaggccggatggtgcgtccaaggttnnncatttatgtttgtcaggagtcactgcagttgagggagcagcaacaacagcagcagcaacagcagcagaagcaggaggatggagactcnnnnnnnnnnnnnnnngtttaccatgccatctatctagaannnnnnnnnnnnnnnnnnttgacagaaaaaattgctcagcttttcagcatttcccctnnnnnnnnnnnnnnnatttacaagcaggggccaacaggaattcatgtgctcatnnnnnnnnnnnnnnnnnnnnnnnnnnnnnnnnnnnnnnnttttattctggacacaatgaaagcagaaaccaacgatagctatcatattatactgaagtaggagtgcggtgtttcgtgcccagtggctgctgcttccttcacctctgaaaatggccctctcaaagggggatatgaatggagatttgaaggtctgcaagannnnnnnnnnnnnnnnnnngtgtggaggagtccaggccatggaggcagaatcctggtcctttgtgttggcccaagctcttgtggcacnnnnnnnnnnnnnnnnnnnnnnnnnttctgcagctgtttcttagttaaaattnnnnnnnnnnnnnnnnnnnnnnnnnnnnnnnnnnnnnacataatttagagtgtatgtagagcataatgatgatgggaattgtgtgatgtttaacaggaagatcttaaattttgtgatatggagnnnatgtaattttttcta

SEQ ID NO: 12337 - DNA, 469 bp, Macaca Fascicularis
cattactgtgtgagtgtgcaaattcacagcaaagtagtcaggaatcgatctcgtgaagcccgcaaggaccgaacaccccctccccgatttagacctgcggtgagtatttaaaaagaatggaagccaggggagtgttggtttaaaaaatttcattctggcgggtcacggtgtcctatgcttgtaacctcacactttgggaggccagggcaagacgattgctagaaaccaacagttcaagaccctatgttttcaaaaaatatttagaaggaagccaagcatgatagtgcgaacctatagtcccggctgctcgagaggctgaggcaggagggtcacttgagcccaggagtttgaggttgcagtgagatacgattataccacttgcactccagccagggcaaaagtgagaccttatctcttaaataaaaaaaagttgcatcctcctgtggtgcaggggatataagattaaggt

SEQ ID NO: 12338 - DNA, 736 bp, Macaca Fascicularis
  misc_feature (1)...(736): n = A,T,C or G
gtccagtcatccctgagnnnctgtgaagagggaagcctctgtgtcgtcaggaagtgaaggggccacgggccacacactgtgtgccacctgcggcttgtgtctcgcctgtcgtctggactcagcacccaggctgcacgtctgacacctgagaggcgagagagtggggctggcctaggagccgaggctggggccctgtgctgtgtccccaggacggtggccttgtttgtcctaaacacacccagcatgggttccggcttnnnnnnnnnnnnnnnnnnnnnnnnnggtgggtggccacatgtgcttgagcctggccctcagccacctgctccacgggtccctggggcagctgcacgggctcatggacccatcaggtctccacagctcccctgcagtgtgtgcagcccacgatgtctgtggctnnnnnnnnnnnnnnnnnnnnnnnnnnnnnnnnnnnnnnnnnnnnnnnnngtgcgcctcttnnnnnnnnnnnnnnnnnnnnnnnnnngccaggtgtcatgacacgccgcgctgggcttgtgctgcagctgggtggtgtggccctcattcttgtgttccagctgctgggcagtgctctgcccgtgtgctgcgcctgccggctgcgtgtgctgccgtggatctcctgcgtcccttgacccctcccgccatcagaggaaaggccactccccgaggcaccacttccctgtgtggctgcagaggggccctcaggtgtggcact

SEQ ID NO: 12339 - DNA, 716 bp, Macaca Fascicularis
  misc_feature (1)...(716): n = A,T,C or G
ctgcctagagagacacannngtcttgtgtcaaggcaggaggaaccccggatgaccttctgaggtctcttcagcactttccatcagtggnnnnnnnnnnnnnnggttagttgccagcaacatctctgttgctggatgggcactgtctttaatcctgggctagtatgttttttccaatacgtgacctcagtcttactactgaccagttctatgggtctcttgctaggtggtaaggatttttattcttgggcttttagagccagttaggtcataactcttatgaaatatagagtgtcctaaatatcactgaaataaaaagtaggaaaaagaagcnnnnnnnnnnnnnnnnnnnctgctctgcagattctagtttggcttnnnnnnnnnnagaatggcannnnnnnnacctgaatnnnnnnnnnnnnnnnnnnnnnnnnnnnnnnnnnnnnnnnnnnnnnnnnnnnnnnnnnnnnnnnnnaattttctttcctctggctgatcccagccctgaaggaagagtaaacctgcatctctccatgcccaaggnnnnnnnnnnnnnnatgcagggcacatgtggcttggtttaaaaaggtcatcttagatttgtcttagtaaatgtaataaattattttttagatcctgaaatttataataaaaatactttacctaccctgatcacaaaacctgatgttttaaatgtgctttctttttgaaattt

SEQ ID NO: 12340 - DNA, 786 bp, Macaca Fascicularis
  misc_feature (1)...(786): n = A,T,C or G
caaaaagtagccaggtagtatnnnnnnnnnnnnnnnnnnnnnnnnnnnnnnnnnnnnnnnnnnnnnnnnnnnnnnnnnnnncannnnnnnnnnnnnnnnnnnnnnnnnnnnnnnnnnnnnnnnnnnnnnnnnnnnnnnnnnnnnnnnnncaaaaaaaaaaaaaacaacaaccagaatctcaatgtattctcaaagtaaaaaggcataaccaagcatctcttatcttgccttattgctatcctatgtacgtcccattgcagaacagcagatttgagatttttctatatacttcagagcactgaaaagaaaagaagagtttggagaggagagtgtagaaatcccaatggtagcatgtaccaacaggtgagcagaaaggtagttttagcctgacatttgagttatactctgtgctgcctgagcaagatttatggaatcatataattaccttttcatgtatatttgaaatcagaggtgtttaaaatgtctgtgagataccaatatagccttaacatatgtnnnnnnnnnnnnnnnnnnnnnnatttggaatacacataaactgctaatattgaatcattacttatcaagtattatctttttggaannnnnnnnnnnnnnnnntttataaagattctaaccatgcatctgagctggtaatattttaaaatctccattatttgtgtaaaactgtttataagcagtgtttgagagggtctgttttaccattatcccctcaatatcatgatcatccaatctcaaagtaaaaaaaaaaaaaaaaaaaaaaaaagg

SEQ ID NO: 12341 - DNA, 723 bp, Macaca Fascicularis
gtccagacccaagagagcaaagcccagaaagtggtcaaaatggggtttatattttcaaaatctatgaatgaaagcatgaaaaatcaaaaggagttcatgcttatgagtgctcgacttcagctggaaaggcagctcatcatgcagagtgaaatgagggaaagacaaatggctatgcagatcgcgtggtctcgggaattcctcaaatactttggaactttttttggctttgcagccatctctttaacagctggagcgattaaaaaaaagaagccagccttcctggtcccaattgttccattaagctttatcctcacctaccagtatgacttgggctatggaacccttttagaaagaatgaaaggtgaagctgaggacatactggaaacagaaaagagtaaattgcagctgccaagaggaatgatcacttttgaaagcattgaaaaagccagaaaggaacagagtaaattcttcatagacaagtgaaatcctgtttagcaatcaaatctcaaagcacagaattgttgacttgaatcatggtttttacaattttttaaatgctcaagattttgatattgtagattttattttaaaatattaaaatgcaagatgagttttgagctattttaaaataaaatttataacattcaacacaaaatcaaggaggtgctctaaataactttcagatttcctctctctgtgtgcattaccaatatctaagtgtaa

SEQ ID NO: 12342 - DNA, 723 bp, Macaca Fascicularis
  misc_feature (1)...(723): n = A,T,C or G
ccgcnnnnnatcnnnnnnnnnnnnnnnnnagggagagcaggcagccttcactgaggataggatccatctctgatctgtcctggcactggcacaagctaagcatatgcccagtaaatgcttgttgtttggctgatggaataaagggnnnnnnnnnnnnnnngaggcctctggacccatctgtcttcctgggggcagcccaggacttttggccaatcccagnnnnnnnnnnnnngtagagggtctgtccttgtcaaaaggcaggtgctagacagtctagaccacggtttctcaaactcatacctgacatttggggccagataattctgtgttgtggggcctgtccggtgtatggtagggtgcttagcnnnnnnnnnnnnntctgcccactagacatcagaagcactcccccaattgtgacaactaaaaatatctccagacattggcaaatgttctctgtgggggcaaaattgccctcagttgagaaccannnnnnnnnnnnnnnntgcactgtccagtacagtagccactaaatacatgtggctaaacttaaatttaagttaattaagattaaaagctcagtttctcagtcacattagtcattcaagtgttcagacagccacatgaggggacagtgcagctacagaataatgccatcatggcagaaagttctgtttgttggacagtgttggtctatactgactcttattctcagggagatcacag

SEQ ID NO: 12343 - DNA, 745 bp, Macaca Fascicularis
  misc_feature (1)...(745): n = A,T,C or G
gggcggcaaaagtatcgggcgcggcacggtccaggcgctgcacgcggcgggcgcgcgggtggtggctgnnnnnnnnnnnnnnnnnnnnnnnnnnnnnnnnnnnnnnnagtgcccggggatagagcccgtgtgcgtggacctgggtgactgggaggccaccgagcgggcgctgggcagcgtgggccccgtggacctgctggtgaacaacgccgctgtcgccctgctgcagcccttcctggaggtcaccaaggatgcctttgacagatcctttgaannnnnnntgcgtgcggtcatccaggtgtcacagatcgtggccaggggcttaatagcccggggagccccgggggccatcgtgaatatctccagccagtgctcccagnnnnnnnnnnnnnnnnnnnnnnnnnnnnnnnnnnnnnnnnnnnnnnnnnnnnnnnnnnnnnnggtgatggccctagagctcgggccccacaagatccgagtgaatgcagtaaacnnnnnnnnnnnnnnnnnnnnnnnnnnnnnnnnnnnnnnnnnnnnnnnnnnnnnnnnnnnnnnnnnnntggaccgaatcccacnnnnnnnnnnnnnnnnnnnnnnnnnnnnnnnnnnnnnnnnnnnnnnnntgctgagtgaccgaagcggcatgaccacgggctccactctgccggtggaagggggcttctgggccaactgagctccctccacacatctcaaaccccatgccgtgcccatcctacccccaatc

SEQ ID NO: 12344 - DNA, 741 bp, Macaca Fascicularis
  misc_feature (1)...(741): n = A,T,C or G
atgccaggcctgactgcctactttggnnnacttgaaatctgtggtgtgaagggtggagaaacagtgatggttaatgcagcagncagctgagcnnnnncnntgttgtgggcagatgcnaagctcaannnnnnnnnnnnnnnnnnnnnnnnnnngtctgataaaaaggttgcctaccttnnnnnnnnnnnnnnngatgttgtctttaactacaagacagtagagtctttggaagnnnnnnnnnnnnnnnnnnnnnnnnnnnnnnnnnnnnnnnnntttgataatgtaggtggagagttttcaaacactgttatcggccagatgaagaaatttggaaggattgccatatgtggagccatctctacatataacagaaccggcccacttcccccaggtccaaacccagagactattatccttcaggagcttcacatacaaggctttgtcgtctaccgctggcaaggagatgtccgccaaaaagctctgaaggacttgctgaaatgggtctcagagggtaaaatccaggacaaggaatatatcatcgaaggatttgaaaacnnnnnnnnnnnnnnnnnnnnnnnnntgaaaggagataatttggggaaaacaatagtgaaagtatgaaaaaaggacacatggaatctggaggccatttacatgattacttaatttgtttttcaccatttagcaaaaatgtatactaccttaaatgtctaagaaacagtacttgtaatgagttgatct

SEQ ID NO: 12345 - DNA, 734 bp, Macaca Fascicularis
actgctcagtagacacacgtggctagtggctgccatactggacagctcagggcattttcaccatcgaagaaagttctattagacagccttgcttgagtcctgtttcttcctggccttggggttccctggggaactcactgacaatgcaagctcctgggcccactgcagacctcctgaaccaaaggctccagggctggccatatgatccgcgtggatggcaaactccctaggccattctgggaccgaagtttaagaagtgctgtcctggaactttctaactcttaagctcctgagcaggagtcagactcagccctgagcctgcactgcctggcgggcgcagacactgaacagggtctcaaacaccttcagcgtgtgtgttgtgtgctcacgtgccacacggtgtctcctgcacacaacccagtgtacgcaccacccacgtgcacacagcgtccttccacactgtatgtgaacagcctgggccctgcaaacacaaccatctgcacacacctacacccccaagcacatacacatggtccgtgccatgtcacctccatagggaaaggcttctctccaagcgtgccaggccaggacagccctcctagccatgaatccttactcagctacctcgggttggggtgggagccccagccaaatcctgggctccctgcctgtggctcggccccagctcccaagacctgcctggctgtgtctgaacagaaggtctgggagaagca

SEQ ID NO: 12346 - DNA, 764 bp, Macaca Fascicularis
  misc_feature (1)...(764): n = A,T,C or G
acttttattggcttggttttctagcattgctggtgcagtgggggcctgagctggggagcagttggcagcgtcactgggcctgtttgggactgggttgagccatcgagccaccgtgagaagcaactaaaaggcacgctgggcccagcccaaccctgaaaggccggtggcgggagagctgggcgggagcaagcccttcccaggagacaagagggagaaaccggggctgctaagctttgatgcctgctccccgccccccacccaggaggctggggtttgatgcttcctgtgtctggcagcccagcatccaggcaggtgagcaggtcagatgtggggagggcgagggcccctgaggctgggctgggagggtggagaccgggccttccctgaggaccactgctagctgacagtggtctccagtgtgcaaggggcgtgggcctcaggggccagcctggactcgcccgcacactgtgtgactttgggcaagttgcccttccactctgggcttctctttccttctctgcataagggactgtcacgtgggcacggcccctagcaagtcacaccgtgcaccgaagttgctaattccacagtggcatctcgggtttgtcctcctgcccagcatggccgagttgcctccgtcccagtaagaattaggctgtggtatggcgggaagggacttcctgagccccggctccatgcttggttggctggacgcaagctgcagtccctgtgccgganntctgcaaatggctgtgtctggcgtc

SEQ ID NO: 12347 - DNA, 101 bp, Macaca Fascicularis
  misc_feature (1)...(101): n = A,T,C or G
gccgacagcttccaggcagctctgggctcactgcctgttgacaaggctcaggagctccgggctgtgctgggcctctcctagatcgcnnnntgcagccagtc

SEQ ID NO: 12348 - DNA, 1666 bp, Macaca Fascicularis
  misc_feature (1)...(1666): n = A,T,C or G
agggcctggcaagagaagaatcatccctggctggagcnnnnngatgnnnatcnnnaaacaactgagaacatacgtgtcactgtcatccccttctacatgggcatgagggaannnnnnnnnncccnnnnnnnnnnnnnnnnnnnnnnnnnnnnnnnnnnnnnnnnnnnnnnnnnnnnnnnnnagctccgggagcggcactggaggatattcagtctctccggcaccttggagacagtgcgaggccgaggggtagtgggcagggaacctgtgttatccaaggagcagcccgcgttccagtatagcagccacgtctcgctgcaggcttccagtgggcacatgtggggtacattccgctttgaaagacctgatggctcccactttgatgttcggatccctcccnnnnnnnnnnnnnnnnnnnaagannnnnnnnnnnnnnnnnnnnnnnnnnnnnnnnnnnnccagctgaggccccaagtgcttccttggtcaccaggaagaacaactgtcatcccacaattgctgcagaactcttctctccccatcatgggccacagtgggtctcttaatttgattgtggggttctttttgtggtgagggtggtataacttttcttcagaagacccatgtgggacacctccaaggctggcctcctcataagccctgcctataccatgttccagtaaacctctccacctaggaactgttttcagctgccacaggcctggaggagtttcctggcctgtcacgtgaggtttgatcagtaaaccagtgcacgcttggccacccttgccatttctgctcccagagtctcagacttcccttctgacccagtgtgtgcccttgattgctttctctgctgcccttccagggagctgccccccggtagggcatgtgcctgtttccctctcagcctggaggctggctggacatctcctacggtcaatgtgcctctcagctagttggcagggttgctggactggactcttgttcactttaccttttgccaaatgcagagagggagaccagtgtcagagtcagagtggcctggctcttagcactgaccaaccattgccatttctggcctcgctaggcccaggagaggagggaggcaagccagtcgggtttcctggagcaatgggtgcgccagccctgagcatgactctgccaagcatccagaccacaaatgcaggaatttggccgaggagcagctttaggtatggatgacgactaagccaagctacttcctgagcttctctcagatttccaagagccagagatgaattgtgctgcaacttgccccaattcttaggatttcttctcctttgccactgcagtgattgttagaggtcatttccttgaattaatattaaatcacagttccagcccttgttagtgttgtccttagtcctccagggggagccggggttgcagggcaacagtacagtcgcgcttatgacctagctagaacacaaggtcaggtgataacggaaacacaggaactcagcccatggccgcaagctggccaaggcctgctcactgtaaacatggctctgtaccattgagtttagcacaattttattagaaattagtgtttgcttccatcactaatgctgagcaaccaaacattacagttatgtgataaggaaaaattctctcctgcccagga

SEQ ID NO: 12349 - DNA, 770 bp, Macaca Fascicularis
  misc_feature (1)...(770): n = A,T,C or G
tggaggcgggcctgttcttcccaggcagcgggggacttatcacttagannnncccaggagctgcactgcctgacgtgggcctggaactggaggtgcggcccctggcagtcaccggcctgatcttccacttgggccaggcccggacacccccctatttgcagctgcaggtgactgagaagcaagtcctgctgcgggcggacgatggagcaggggagttctccacatcagtgacccgcccctcagtgctgtgtgnnnnnnnnnnnnnnnnnnnnnnnnnnnnnnnnnnnnnnnnnnnnnnccggctagaggtggacgcacagagcaaccacaccgtgggcccctcgctggcggctgcggctggtgccccagcccctctgcacctcgggggcctgcctgagcccacggccatgcagccctggccccccgcctaccgtggctgcatgaggaggctgacagtgaaccgggcccccgtcaccatgactcactctgcagaggtccacggggcagtgggggccagtggctgcccagccgcctagggcactgccaaccctggcctctggttaggcccttgcaggtgactcctctcactgccctttgtgctcacctcataggtgtttattgggattctaggctctatgggtgacagatcttgtttctggagatggtttaaattatatctttttaaatgaaagaataaaatactgcaaaatgtttttatacttggcccttccacctatttttaattgtgagagatttgtaatcactggtcc

SEQ ID NO: 12350 - DNA, 779 bp, Macaca Fascicularis
  misc_feature (1)...(779): n = A,T,C or G
acagctggattaggcagtgnnnaannnnnnnnnnnnnngacaaagccttatatacccttgtaaataaggttcaatatggaatttttccagataactttacatttcaatttactgatggattctttcataaagaaagaaaattacaaagatgctttatctgtggtttttgaggtcatgatgcaagaagcctttgaagtgccttccacccaacttctctccctctatgttttattnnnnnnnnnnnnnnngaagacagacttcagttgggaagaggagaggaactttggtggatccctattgcttccaggcctaaaacaaaagaactcagtgggtttcagttcccagttgtatggctgtgcacttcttgggaaggtggagttgcagcaagggctacgggctgtgtaccnnnnnnnnnnnnnnnnnnnnnnnnnnnnnnnnnnnnacagagccctgcaagtgatggagaaagtggctgcctccccagaagacataaaactgtgnnnnnnnnnnnnnnnnnnnnnnnnnnnnnnnctgaaggctctgacttcagctgatggggtttcagaggagcagtcccaaaaagatgaagacaagcaggagtgggaaaaactggtggagcagttagacatcgaggaaacagannnnnnnnnnnnnnnnnnnnncctggaacgatttcaggtgaatcatagcagaatgtgtctctcttagcagtgtataaaacacacttctctcatgtggtgatggacaagcattctttctgcatcaattcacacacaaag

SEQ ID NO: 12351 - DNA, 709 bp, Macaca Fascicularis
  misc_feature (1)...(709): n = A,T,C or G
annnnncgcctccccaccactgagccatnnncagcagcanctgctgcgtctgcactgatgaccgtctgagcccagctcagcgttcctggacaaagcctcactccnnnnnnnnnnnnnnnnnnnngaatttctcagaatgtcaaggttccctcccactcttatttttttaggttaaagttaattnnnnnnnnnnnnnnnnnnnnnnnnnnnnnnnnntgtagcgtaggcttttcccgagggtcgctagaaactcggcttcgcgttgctctgcttnnnnnnnnnnnnnnnncgccactcaggagaggccgggtaaggcccgtgtgaggactgaccctggattcctcgaaaccgccattgtgatcattactctgctctttggaaatggctgtatcatttttttgtactaatgtgaatnnnnnnnnnnnnnnnnnnnttttccatcctagtgagcagctggccacgcaggtggtggcagcaatggtgttnnnnnnnnnnnnnnnnnnnntttttctcctcgtggatttgaatgaaatgccaataacacgtccacttcagcgtgtagttcccgcggagcactttcgaggcctggccgggttgggccgcgtctcacctgggcctnnnnnnnnnnctnnnnnnnnncttatcaacatttgggggagaactttgtatatttttttcatttggcttttctttaccagtttctgatttt

SEQ ID NO: 12352 - DNA, 929 bp, Macaca Fascicularis
  misc_feature (1)...(929): n = A,T,C or G
catgttacttcgcttttnngtgcacttctatgatatggagattattgaagaagaagcnnnnntggcttggaaagaagatataaccnnnnnnnnnnnnnnnnnnnnnnnnnnnnnnnnnnnnnnnnnnnnnnnnnnnnnnnnnnnnnnnnctgctgaagaagaagaatcagaggaagaagctgactaaagaaccagccaaagccttaaattgtgcaaaacatactgttgctatgatgtaactgcatttgacctaaccactgcgaaaattcattccgctgtaannnnnnnnnaatatttaaagcagaagcacgtcagttaggattttcttctgcataaggtttttttgtagtgtaatgtcttannnnnnnnnnnnnnnnnnnnnnnnnnnnnnnnnnnnnnnnnnnntagatagtatattagcagcatgcaataattacatcataagttctcaagcagaggcagtctattgcaaggaccttctttgctgccagttatcataggctgttttaagttagaaaactgaatagcaacactgaatactgtagaaatgcactttgctcagtaatacttgagttgttgcaatatttgattatccatttggttgttacagaaaaattcttaactgtaattgatggttgttgccgtaatagtatattgcctgtatttctacctctagtaatgggctttatgtgctagattttaatatccttgagcnngggcaggtgcacaagtctttttaaaagaaacatggtttacttgcacaaaatctgatcagttttgagagacgttaatgcccttgaagtggtttttgtgggtgtgaaacaaatggtgagaatttgaattggtccctcctattatagtattgaaattaagtctacttaatttatcaagtcatgttcatgccctgattttatatacttgtatctatc

SEQ ID NO: 12353 - DNA, 705 bp, Macaca Fascicularis
  misc_feature (1)...(705): n = A,T,C or G
gaactggccaacagnnngcgnnnnnnnnnnnnnnnnnnnnnnaatcgagcccgggactcggactacgaaatggactcatcctcccggagccacctgcgggccatagacaatcagtacacacctctctgnnnnnnnnnnnnnnnnnnnnnncaacagctgcccttgaggaacacaggcagaagtgtgaatttgtgaatgtaattgatctttccttccttccagagagagatttaagggacactgttaactgcnnnnnnnnnnnnnnnngtgacccttctattaggcctgttgaagggccctcctgtaagtttcatctatcacctggctttctccttattgtttacagatgtagttcttgttagaggatgccgctagctcctgcccggggtccctatgcccagtccctgttactcttagagaaaggagttggggtgagggcnnnnnnnnnnnnnnnnaacttgttctctttttcactgacactgtcacagcagatgacagactttctacgggaagtgggggtcatcaggaagcccagaacactaataagcggttctcccatctaccgtcagtccatgtggcaggtctactgtgtccatgccacagatgaccacacctaatcctgcttctactctcagctttaggacaaaagctctgtcagagggacaagctgaaggtcaaaaatgattttaaacatttacctcagac

SEQ ID NO: 12354 - DNA, 760 bp, Macaca Fascicularis
  misc_feature (1)...(760): n = A,T,C or G
gccaagcaatccgtaaagtacatanagagcacaggttnnnctnnnnnnnnnnnnnnnnnnnnnnnnnnnnnnnnnnnnnnnnnnnnnnnnnnnnnnnnnnnnaaagggcagataaaagaagatnnnnnnnnnnnnnnnnccacgagcaaacaggtagaaggtattgaaattgtggaacttcagctgtcacatgtgaaggacttgttccattgtgagaaatgtaaccgttcatttaaattgttttaccattttaaggaacacatgaaatcacactccactgagagtttcaagtgtgaaatatgcaataaacggtatcttcgagagagcnnnnnnnnnnnnnnnnnaaattgttaccaccttgaagaaggtggagtcagtaagaagcaaagaactgggaaaaaaattcacgtatgtcagtactgtgagaaacagtttgaccattttggacattttaaagaacatcttcgaaaacatacaggtaattagcaaatactttcttaagatttttttttcccacatgcacttcaaatttaaatatataaaatcttttttaaaaaatagtgcctcagaagccatctaatgtattatctctaatgtgtaggctaagtacacattgtgtatagtattatatgttcaaatattgatgctttaaatgcaaatcagtatcaactttggaagtaattgttatttttatgccttgtccaatttttgtattttttaaagaaatagagaaaatagtttgtgatttatttcctaaaga

SEQ ID NO: 12355 - DNA, 755 bp, Macaca Fascicularis
  misc_feature (1)...(755): n = A,T,C or G
gtggtgagtgccttctgtacagtcgactgcaaatgaaacgcagaggaaggtgcccagaagcgcctgtggcagaggcgcatgggaagcccggggcccaggctcatgcaacacgatgctcaccgcggctcgggccgtggggccgtcagagaaacctttttaaaaaatggagatgaatattacagaattggacaacctgaactgcttttcaaaaccagaagaaggaggttcttagccgtnnnnnnnnnnnnnnngctggggagggaggcctgactttagcaacagctgtgggtgggctggaggccggcgcagcttggggcccccagcgccagctgtctcggccactgcctgggcagcgcttgctccaaggggtcagcaaaagcgactgatggctgccacttccaggacccacgagacaggcctcaggtaactttactgcagccaaagcccaggctggaaggggttccggctctgccgcattctgcatcccaagtgggcacgtggaggaagggtctgaaggaaggctccggagcacaggccctggtgtccctgcgaggacgctggacctgcaggagcggggagctgcagtnnnnnnnnnnnnnnnnnnnnnnnnnnnnnnnnnnnnnnnnnnnnnnnnnnnnnnnnnnnngatgtcttgctgagcgcctggtctgtcctcttgaactgcccttgcccagcactgcactctggaggtgggtggtgcaggcggtggnnngacacnnnccagctcaagccgc

SEQ ID NO: 12356 - DNA, 738 bp, Macaca Fascicularis
  misc_feature (1)...(738): n = A,T,C or G
tgnnnnnnnnnnnnnnnnnnnnnnnnnnnnnnnnnnnnnnnnctttggtcttaacttattattcaagatcaaaccagaagnnnnnnnggactttggcatctcccttctcttctatggcctctactatggagtnnnnnnnnnnnnnnnnnnnnnnntgtgtnnnnnnnnnnnnnnnnnnnccatagggnnnnnnnnnnnnnnnnnnnnnnnnnnnnnnnnnnnnnnnnnnnnnnnnnnnnnnnnnnnnnnnnnnnnnnnnnnnnnnnnnnnnnnnnnnnnnnnnnnnnnnnnnnnnnnnnnnnnnnnnnnnnnnnnnnnnnnnnnnnnnnnnnnnnnnnnnnnnnnnnnnnnnntcgtgggaaagaagcagacgtgtccctactgcaaagagaaggtagannnnnnnnnnnnnnnnnnnnnnncctgggagaggcctcacgtcatgtatgggcaannnnnnnnnnnnnnnnnatacttnnnnnnnnnnnnnnnnnnnnnnnnnnnnnnnnnnnnnnnnnnnnnnnnnnnnnnnnnnnnnnnnnnnnnnnnnnnnnnnnnnnnnnnnnncccaccccacacgccgtggagctcagggcactctcctccctgcccacaaagacctcctgggtgggaaagactcaaaggggcacnnnnnnnnctcaggacccctccggttgtgtcggactggggagggttatgatggagacccagccagtggggctatcagcagtggggggc

SEQ ID NO: 12357 - DNA, 707 bp, Macaca Fascicularis
  misc_feature (1)...(707): n = A,T,C or G
ccccaaatccatcnnncnttcccnnnnnnnnnnnnnnaattctagaataagagcactggataagtacacttgaacacatttttctaatcttagaaagcatctacaaggcctgttgtcttgacccattactcaattgtccccgacatattatctgatattcacctttctaggaagcagatcaaagctttcccttgtaactgccctttctgaacagagcaggcatgnnnnnnnnnnnnnnnnnnnnnnacagacaggaggggaaacaggaggaaccatacaactgtttttgnnnnnnnnnnnnnnnnnccagattatagaggctgccttacccttagaatgttatttagaccaagtttagctnnnnnnnnnnnnnnnnnnnnnnnnnnnagggtagcaaagaatcgcatgcaccaatgtaaacaggagtcaaaacgcattattagtcaaagannnnnnnnnnnnnnntagaaatgtatagctgtgattaagctgcatatgnnnnnnnnnnnnnnnnnnaagtggatggctagtatacaagttnnnnnnnnnnnnnnnacacctctcatctgcttgaaatatggaccactattctaannnnnnnnnnnnnnnnnnnnnnnnnnnnnnnnnntaaattcaaacttcacagaannnnnnncagttcgccaccagacaggattgtgtctgcaaactctnncttcacagatgcc

SEQ ID NO: 12358 - DNA, 697 bp, Macaca Fascicularis
  misc_feature (1)...(697): n = A,T,C or G
gatgtggcaaaaagcnnnnnnnnnnnnnnntaaccaaggaaaagttctaccccagaacatgactaccacgcatgctgtggctattttgttttatacattgaacagcaatgttcgttctaactttactagagccgtggcctatgttgccagggctnnnnnnnnnnnnnnnnnnnnnnnnnnnnnnnnntatttacactactacctcaccacagcagtccagctgctgaggaaagacagcgtcatgaagaatggcactcctctgtgctatgaggtgcattatagnnnnnnnnnnnnnnnnnnnnnnnnctacacaggtgccaccattcgatttggccaattcctctccacatccctcctaaaagaagnnnnnnnnnnnnnnnggaaccagacannnnnnnnnnnnnnnnnnnnnnnnnnnnnnnnnnnnnnnnnnttctccctcaagaaggaagtcttgatccctccctatgagttgttcaaagttataaatatgagctcccacccaagaggaaactggttgcagttgaggtcaactggaaacctgagcacgtacaactgtcagctgctaaaagcttccagcaagaaatgcatccctgatnnnnnnnnnnnnnnnnnnnnntcctttttggccagtgtcatcatcttttccaaaagccgagtataaaggaatcttgtgactccttttattaaaaaactt

SEQ ID NO: 12359 - DNA, 736 bp, Macaca Fascicularis
  misc_feature (1)...(736): n = A,T,C or G
aggtgagccagggctgctgnngccnngtaaagccagcagtccccattcctgggctacgctggtgggccagagctggcccaggggaagttgctaaaggatgtcttccggcctggggatgttttcttcaacactggggacctgctggtctgcgatgaccaaggttttctccgcttccatgatcgtactggagacaccttcaggtggaagggggagaatgtggccacaaccgaggtggcagaggtctttgaggccctggattttcttcaggaggtgaacgtctatggagtcactgtgccagggcatgaaggcagggctggaatggcagccctggtcctgcgtcccccccactctttggaccttatgcagctctacacccacgtgtctgagaacttgccaccttatgcccggccccgattcctcaggctccaggagtctttggccaccacagagaccttcaaacagcagaaagtgcggatggcagaggagggcttcgaccccagcaccctgtccgacccactgtacgttctggaccaggctgcaggtgcctacctgcccctcacacctacccggtacggcgccctcctggcaggggaccttcgaatctgagaccttccacacttgaggcacctgagaggactctgtggggtgggggccattgcaggggtgctgggctgtcagggacctttgctataccagaactgcggtcactattttgtaataaatgtggctacagcag

SEQ ID NO: 12360 - DNA, 698 bp, Macaca Fascicularis
  misc_feature (1)...(698): n = A,T,C or G
cagttttctagccagctacctcggtactccaattcaggttaacttccctacggaacagcacagatgtccacagatgtccannnnnnnnnnnnnnnnnnncgccaccataccccagtccttggggcacggaggggtggtcgcttcccaaggggcagcagggactccggccaccccagctcttgtttgggttgattcctctcctttttgctcttggttttccgacgggtacgaggctggcaccctgtcccccgggagccttgctttccagcaggaccagaccaggggcctccctcctgtccccaggggttcccggcccctcgcaggccccacccatgcccttggcctcagggtccaacaactgggggcgcttccggggctctgccttcaggatcccgcagctgggcacccccctcgccccccaggagaccggggcacaggcagggcaccgaccttacctggttctccagacctgctgcctgcggtctgttttgcttttatcctccccagcccagaattttcctttgtataaacagaactcctagtcaggaagcaatatcatttcaggtctaaagaaagggacgtgcatctggccgagggcagttcagtctcgctgcagagcccgcagcccgctgcgcagctcggcccctcccgcccgcacgggcagctgaaggccgctgttttctaatatttgtattcta

SEQ ID NO: 12361 - DNA, 736 bp, Macaca Fascicularis
  misc_feature (1)...(736): n = A,T,C or G
aagcnnnnnnnnnnnncagctttnnnagttttcccannnagtctgtatcaagagctaccaggaggcccagcctccgtgtctactcaagggcagcttggtcctcttgtcctgcagaagcaggctgctgtgaccctgggagcttgacccgggaacagcaggtggtccagagagagtgtggcctggcccctcaacctagcgtccctcctcctgtctcctggagccagtcttgagtttaaaggcattagtgttggatacagctccttgtggccggagaacacccctctgttgatgaagctcagggtgcactgaggaagcagaggcccctcggggtgccctcctgaagacagcgtcaggtcatcagctatgtccttctggtgctctcacatctgctcttcaccctgcacctctaggagcagctgcacctgactggccacgtgggggcagtggaggcacaagctcagggtggccgggctacctggcacccacggcttacaaagtagagctggcccagtctccctccacctgaagggggcactctgactcctaacagtcttccatgccctgccatcatctggggtggctgtcaagnnnnnnnnnnnnnnnnnnnnnnnnnnnnnnnnnggaggcttgcagggtattttccaggcggggaaacagtcttaaataagtaaggtgacttgcctaaggcctctgaacccccttgatcctggagtctcacaccagactgcatgtgaaa

SEQ ID NO: 12362 - DNA, 634 bp, Macaca Fascicularis
  misc_feature (1)...(634): n = A,T,C or G
ccccagcttnnccnntgccaggtgttngggctgnnggctctgcggccaagggtcctccctgcgaatccgcaccctcccctgggcccatatcaaggctgcccccttcctcacatacttcggactcttccaggttcactgaggggccctggtctccccacagtcgtcccaggctgccggctctccttggcagctatatgggcaccccagccccctgtgccccaccctcagatgctctttgctccagacctgcccctccctctagaggctgcctgggcctgttcacatgttttccatcccacataaatacagtattcccactcttatcttacaatgccccccaccgcccactctccacctcactagctccccaatccctgaccctttgaggcccccagtgatctcgactccccctggccacagacccccagggcattgtgttcactgtactctgtgggcaaggatgggtccagaagaccccacttcaggcactaagaggggctggacctggcggcaggaagccaaagagactgggcctaggccaggagttcccaaatgtgaggggcgagaaacaagacaagctcctcccttgagaattccctgtggatttttaaaannngatattatttttattatt

SEQ ID NO: 12363 - DNA, 670 bp, Macaca Fascicularis
  misc_feature (1)...(670): n = A,T,C or G
agggtctctggnnnncagnnnnntaggannncagccctggtctgctggggaattgaagatgaaaggagagataccttgaaaaagtagagaacagtcataaggcagctttcatcacacccttttaacacttatctaaaagaatttaaattctttaaaaaaaaattacactacaagtttataagcccaaatggctctgtgaaatcagaagggcagacgcctgcaaacttctgtctgaagacctaccagggacaagcaggtaagaactggggtgtgagtgtgtgtgacgggatctgcaatgaactggaacgaacgcacatgtcctatccaaaggcatcagctgcacttgcttgttgtcaagtgtaaagtcagcaggacctggtttggctttaaccatttttcaagaaaactggaaatctagatttttgtgcgaacatgcctgattttaaaaggttgactcaagtttttacaaaatactatgtaggacatccaaatacatacctgctgactgatgacaaacccaggagtttgtgtctcttttataaaaagtttgccctggatgtcatactggcagttggaggacacagtttctattgtaaatttggatttacgactgaagaaggacatttcctctttaaaaaaagttagattataagaaacagaggcgtctcac

SEQ ID NO: 12364 - DNA, 794 bp, Macaca Fascicularis
  misc_feature (1)...(794): n = A,T,C or G
gcagctgcagggcnnnnntcctttccctgggctannnnncctgtcgaggggaggcacacttctggcaaacgtttctcaaatctgcttcatccaatgtgaagttcatcttgcagcatttactatgcacaacagagtaactattgaaatgacggtgttaattttgctaactgggttaaatattttgctaactggttaaacattaatatttaccaaagtagaactctgagggtgggagtgctgctctctcggagggagggtgggagtgctgctctaaattggcactggctccactatcatttgactttaggattctggtgtttggtttcttcattctttactgcactcagatttaagccttacaaagggaaagcctccggccgtcacatgtaggacgcatgaaggtcactcgtcgtcaggctgacatgctcacacattacaaccgtagagagggaaaatcctaagacagaggaactccagagatgagtgtctggagcacttcagttcagctttaaaggccaggacaggctggccacacgcggctggcggcctcgttccagcggcggcgtgtccttgggcgtctcatgctctgcggctcaagggctggcacttttttaaatataaaaatgggtgttatttttatttttttttgtaaagtgattttcggtcttctgttgacattcggggtgatcctgttctgcgctgtgtacaatgtgagataggtgcttctcgtgatgtttcgccgcggcttggggattgtacacaggaccggctcacgtaatgcannncctgtaaca

SEQ ID NO: 12365 - DNA, 330 bp, Macaca Fascicularis
tgtgtgtggtgcttgctcctgttgtgtttgcttgctcacattcctttgggtttttgctgtgcgttggggtgaaggccatagtttccagctcccctcaacgatatcttttgacaataagaaagaaggtttataaattgtaggagcaggatggaaatactttggtgccctttccaacttttaggatgggcccccaggagacatatgttttcgtgggccctcattggtgtttattgtaccccccatcacgtgcacatgggacataccggggtggagggtcatctcaggtgtgtatgtcccagcaagagatctgtggcccgcatctcgctgtcc

SEQ ID NO: 12366 - DNA, 727 bp, Macaca Fascicularis
  misc_feature (1)...(727): n = A,T,C or G
gtgtgatgatcccaacccaaagcagctgtctcgccttcagaacgtgcagcctctccatgtctgattacagtcagtctccacattgcagttccaatggcctggaccataaggataaagcctgtaatatatgcaactagaatgtctgccttttcaaccccatattagttattgtattttatagagcttttcactggaaatctacataaatgtcagtaaaccaaataaaagttcatttccaaggggaatcaggagcgagccacacccgaatggtagaaagatctcagggttaactctttatttttgtagttttattatctaaggcacagccattctgttctcacttggttctgagataatggtgagaacagaggatgagttgggtctgttggggggaatctggacacttgtttattctgacggagttcacttcttcagaaccttcctgaaataaagcagaaaccggtcactaggtcttcagaaaggacgtccctctgccagagacttccagcgggatagagaggagcccgcggggcgtgtgctgatggaagtctgcttgtttgttctgtgcacctgaggcgctcagccgtgnnnnnnnnnnnnnnngagtgtagccctgtttcactnnnnnnnnnnnggcacggccgcctgcgtgtctgtccacctcaaccctccgtgtatctgagggagtaaagtactgtatggatgttactgagcactacacatgatc

SEQ ID NO: 12367 - DNA, 748 bp, Macaca Fascicularis
  misc_feature (1)...(748): n = A,T,C or G
tggacagtgtaaggttgtggtcccactgccnnnnntctctaggtgttannngaagacagcataaggggaccactgggctccagggcctccctcgggacctggggacaggagaagcagaactaagaccccaagcatctgggactcgggcctcagaaggcacaaggccagtgagcctgtgctgttggccctcatagcaggggagggcagccagttggtcaggcagaccctggcactggggcgatgcaggcaacaggtggtgcagttacctcgatctcacttggaacttcagcctttctcctttcctcctcagcagcctcctcgggcagctctcgcctgagtgctcttgggggtggctgggcacagtgggtccagagacccagtagttcaaggggtagccagccagctgtggacaagaaggcagtaggcacggtttgaggcgtgaggagcaccaggaatgagaaattggttttgaggatcctttgtgcccaccccctgccattcttacagagagttggggttctgaacaactctgcagggcctgtgatggtcctctcaggaggctgcaccttgggctgtgtggtggggaaaggtcagaagcctcattatgaagcagccactcctcaggtcccctttgcctctttgcaatgcattgttctggggcttctggacttcccagcttttgggctcgtgaccctgcctgccctgctcactgctaaaagaaggactttttaacctggtgcccatgggt

SEQ ID NO: 12368 - DNA, 717 bp, Macaca Fascicularis
atttataccattattaacctgatgtggtctgcttaaaaaatgaatatatcagtgtttagatataaattgcaaaggtggggatatatacttaaacaatttgtctttagcatttggtagtctgaaatggtgacagattgcttgttaaaattgtgaaaactctgttgtgtcctctcttcctacatttgtccctgagagtgctctatgattactaggttcttgattcccatatatggcaatcaggcagaggcgttccttgggcattagagagttccgaagcttaagatttgttttggttgggtcaagtccttagtacagttgaaaaatacagcattaaagactaatcaattgttttgtctcaccagtcattttaaatagtagaatacttatttctcagtgcttaaaatttctttttcaactgtgagattgaataagcaatctgtatttctgtgaaaaaaacagaaaaaatatattaaataccataaaatataactctgccttttaaagttttgctgaagaatgtgtctgtggttaggatagcacaagcattaacttttgttttatagttatgctttttaaaattcattgtttttaaatttagacttcttatttccacactggattatgagatatttaataattttccaccttatatttcttttacacattttgctgttctcttttttgttattgttatgccaccataccattttgttaaaa

SEQ ID NO: 12369 - DNA, 701 bp, Macaca Fascicularis
  misc_feature (1)...(701): n = A,T,C or G
tctgcatatgtnngnnngatatcaccaaactggaggatgnnnatgtattnnntggggannnnncatcacacaccaaagtccannnncgctacgtggtgnnncatccattcttagacgagatnnngattgggaagataaaaggctgcagcccagaaggagtgcacgtctctctaggctnnnttgatgacattttcatccccccagagtcactgcagcagccagccaagttttaggaagcggagcacgtgtgggtgtgggagtatgagacggaggaaggagcgcacgacctctacatggacaccggcgaggagatctgcttccgggtggtggacgagagatttgttgacacatcccccacggggcccagctcagcagatgccaccacttccagtgaggagctgccaaagaaggaggctccatacacgcttgtgggatccatcagtgagccaggcctgggccttctctcttggtggaccagcaactagccctggggctggacagtggaccctaccagcttgcaggaaggtgcttacggcagtctgtgaagacaagagcagataaggctgatgctaacagcagatgagggtaatgtgtctcgagatggacactggggcagggccaggagtgcccaccagcttgcccccctcttccaccatataggccctgctcctccccccggagcttctcaagtcgctgctttc

SEQ ID NO: 12370 - DNA, 772 bp, Macaca Fascicularis
  misc_feature (1)...(772): n = A,T,C or G
gcaggactgancnnnntgaggaacgtgggcacagaggtatatcagcacacgtgtgatcaccnnnnnnnnnnnnnnnnnnnnnnnnngccggaatcagcagcttctgagannnnnnntctggaggaaggcttttgcctctatccaaaagatttcctccaaaaaaaagatttcggcgtcgacacggacgttgttgcacaaagcacttaaagaacgagagcatcttgttcattgccttgttcacctaagcatagggggannnnnnnnnnnnnnnnnnnnnnnnnnnnnnnnnnnnnnnnnnnnnnnnnccttcaccacagacaccttcttgtgagtttttagtctgactgtgggggtgggggggtgtgaatgaaatggatgtcacagagtgtcatgtgtctgatgcagccgcctctgctgtgtattaaatgtcaaaatctgaatatatctggatatgtactaatcaaataatcagcatatacatttcagccaaagccatagaagaaaaagcaatagttgcttgaattatgatcatctaccaccaactctgctcagccctgtaacagggcagggagagggtatcacagggaaagcagggaaagctttgacttgtccctatctatacattctctgtatcttttgggggtaacttcttggcagtttttcagtgttcagccatgtcagttgaaactagatttttctgtagagtttttacttacccatgtgagcctaacaaacactatcctattattcgttttctcaggctatgtgaaaa

SEQ ID NO: 12371 - DNA, 799 bp, Macaca Fascicularis
  misc_feature (1)...(799): n = A,T,C or G
ttcagctgtgnnttaaaatctggatgnntttatttagtgatgttcaacnnnnnnnnnnnnnnnnncataatgtgcattgcttatgaatgccttcatatactaatacagatactctgataatattacgctctagtaaggatcatgctgaattttgaaaggacacaaaacatctaatgccaatatatacatgattagctaacatctttgctatcaagaccacttgtttttaaataaagatgcaagtgtccgttgtagattattgggatgaagctaaatctccagaatgcagcagcagctgagcatgttaaaatggggaaggatgatagatacatgtatgctggtcctactcacgcaatgcccgtgtgctcaaaaaagttatttgtttttgttacgtgtgatttttctatttctctagcccaaagtgcattacagaagatacacctatagaaccattaccttctgctatatgtgccaggcctcatctactcctgtacattaatgaattactttagatgcaaatgcagattacaatggagtgggggaagtactttcattacccaagcctcagaaaaacaagaacaacaacacagcaaacagattgagggattgttgtggtttttgactaaggtgtatgttagtttcatcagaaacttaaaacatagactgatcactcagaaattaaagtccgttttactgtgaatatagcaatatagtactggacacagtacaggtgaaactgaggagagcattgcttgtaaaatcctgagtttccataaggaaaatgaaaactcctttaaaa

SEQ ID NO: 12372 - DNA, 738 bp, Macaca Fascicularis
  misc_feature (1)...(738): n = A,T,C or G
aatacgacagttgcctattgtannnaggaggtggagcattaccggannnnnnnncnnnnnatcaatgcccgtcccatcaagaaggtggctgaggctaaggctagaaagaaaaggagnnnnnnnnnnnnnctggagcagaccaggaagaaggcagaagccgtnnnnnnnnnnnnngacatctcagaacgagagnnnnnnnnnnnnnnnagaagtctctacaagaaggctgggtttggcaaggagaaacaccatgtcnnnnnnnnnnnnnnnnnnnnnnnnnnnngccgcaaagtgcgccggccagctggagtcagaggtcatttcaaggtggtggactcaaggatgaagaaggaccaaagagcacagcaacgtaaggaacaaaagaaaaaacacaaacggaagtaagcagagctgccaggctcaccaggagagcatggggactaggaggaagggtgtggcatggctcagtctggccccnnnnnnnnnnnnnnnagcccctgctcacatcacagctgtctgaagaacagtgaggcggggtgcctagaactcccgtggtggtcttcggcggagaggacgatgtcctcctgcttgcctgaaggaaggtctcccnnnnnnnnnnnnnnnnnnnnnnnnnnnnnnnccacgaccctttttttaaactgttaaggggaagttcagtgttggagcgacactcgatgtagtctacacctggacatgtgggccccttaagcctccccc

SEQ ID NO: 12373 - DNA, 547 bp, Macaca Fascicularis
cagcaccagaggccacatgaccattcatatgagatcaaaaccggtgatgagcataccaggtaaaaggagttgagctctgttaggaggaagaaaagctgataagggcacagcagggagtgtgattgagcagactgtctaaggggaggtgggaaacagagttagcaggactttaaggccatctctttcctggtgggatgactgaattctctctcttactgcccaccactgccactgccacccaacttccacagttgacctgatcatgaagacctgctttagccccaacagagtgattggactctcaagtgacttgcagcaagtaggaggggcatcagctcgcatccaggatgccctgagcacagtattgcaatatgcagaggatgtactgtatggaaaggtgtcagatgacaatactgtgggccgattcctgatgagcctggttaaccagagtacccataaatagttcccggaataattcgagaccatggtcaacagaaacatcaatgacctgatgacggtgacgtagttgtccaacgtcacgagcgac

SEQ ID NO: 12374 - DNA, 748 bp, Macaca Fascicularis
  misc_feature (1)...(748): n = A,T,C or G
cagcagnnnngctgtgtgccnnnnngctgcannnnngtgtgctgcaagcctnnctgctgtgtgcccnnnnnnnnnnnnnnnnnnnnnnnnnnnnnncagcagtctagctgccagccggcttgctgcacctcctcccaaagccagcagggctgctgcgtgcctgtctgctgcaagcctgtgagctgcgtgcctgtttgctctggggcttnnnnnnnnnnnnnnnnnnnnnnnnnnnnnnnnnnnnnnnnnnnnnnnnnnnnnnnctgcagaccctcctcctccgtgtccctcctctgccgccccatgtgcaggaccgcctgctgcgtgcccgtcccctcctgctgnnnnnnnnnnnnnnnnnnncagtccagctgctgccgcccagcctcctgcatgtccctcttctgcagccctgtgtgctcaggtcagaagcccagctgctgatggacacgccccccagtgccagccaggctcagctcccacctggaagctgatagtcacgtcctgaattgctcctgcactttgaccatttcccggtgtctgctattgagctggacagtggaagaactgaatgtctatactcaatgctgcagcccttttgcggggtgggggttgcttctagaaagttcccatggcagtggcctcccctccatatctcctacttctcgtgagggtcagctcagccttgacccgtgaggtctctgtcctcctggctcagagccccagagccttctttggaggccctnca

SEQ ID NO: 12375 - DNA, 727 bp, Macaca Fascicularis
  misc_feature (1)...(727): n = A,T,C or G
gcggagtacagataatnnnnnggaaggtaactgtttactacgacagagacgtggcatttggaaacgaaacttagatgtttcatggagcttattttgagaannnnnnnnnnnnnnnnnnnnnnnnnnnnnnnnnacatggtcagttaactcagagataccccaactgtttatcatcagctcctctgaaatgtgatnnnnnnnnnnnnnnnnnnnnnncttcgccagtgcgttcgatgacacgctgacggcaggtggtccctgctgaaacccccacgcctccgctttagcatctccacactctgaagctgtctttcgaaatgtgtgcactgagccccttgtttgatcacatttgtgtaaagtttttttannnnnnnnnnnnnnntaacagggaagaagcttgttatannnnnnnnnnnnnnnnnnncttaggtgtttagattttttttttttacgatagggaagatgcagccatcactgggatattttagaatcccaaggacatcagaatgaagtatcagttgtcagattcttttaacaattatgtcttcagagaaaaaaagattcattttctcattttaaaccaattaaatattctgggtgagacagatcactcatttgcctacgaccttttagaaaagttgttttgttgaaatactgtacctacgcttaatctaaatttgcattgactatgttttagtgtatttataaatggnaactcagttcgaaa

SEQ ID NO: 12376 - DNA, 733 bp, Macaca Fascicularis
  misc_feature (1)...(733): n = A,T,C or G
gtagacatttgatnnnnngcagcttantactacaagcagtggcagagtgaatgtccttgtacattttgaggtacatgcttaattatgttcttgagacagtttctaaaagtggaatgattgatttgactggttcacagggctttaattgtacaatttctctctctaattagtactatatgtgtgtgacctccctcccctgccagaatactccttggtcaattgtaggtattcttttttatttaattgttgccaatataaaaagtggtatgtcacttttaaaatttgtatttctttcattacaaataaggttgatatgtcagtgttgttattggcttttcgtattcctcttaacgtgaaccgtctgttcattgtctttacctgtttttgtttttagcaagtagtacttaatttaaagtgtgaacataatatataagatgccaagaccatcatattgatgacaaaaatatattatgtggttgtagtgcatgtcttggagttaaactcttaagtatcaagaaataaaataatttcattgtttctgttactaacattaaaagtgtgcaaattgtataaaattaggtactttgattagtaaaaaaaaaagaaattgaatgttttatatatttttttttattttattaagcatgcccagttatgccaagcatagtaaaaataaaggtcaagtagcatttataatagaagtactgttacccctagcatgagtgtaatggaa

SEQ ID NO: 12377 - DNA, 740 bp, Macaca Fascicularis
  misc_feature (1)...(740): n = A,T,C or G
agtggatggatgctggtggcagctgcagtccacccagnannnnngaggccntccnngcaggacattgcggacggccacggccaggccagagagagtgacggaggcagccctattctgcttgcctaggcccctgccaccttggggagaaagtacttctttattttatttttagacagagtctcannnnnnnnnnnnnnnnnnnnnnnnnnnnnnnnnnnnnnnnnnnnnnnnnnnnnnnnnnnnnnnnnnnnnnnnnnnnnnnnnnnnnnnnnnnnnnnnnnnnnnnnnnnnnnnnnnnnnnnnnnnnnnnnnnnnnnnnnnnnnnnnnnnnnnnnnnnnnnnnnnnnnnnnnnnnnnnnnnnnnnnnnnnnnnnnnnnnnnnnnnnnnnnnnnnnnnnnnnnnnnnnnnnnnnnnnnnnnnnnnnnnnnnnnnnnnnnnnnnnnnnnngccacagagaaagtacttctccaccctgctctccgaccagacaccttgatagggcacaccgggcactcagaagacattgatgggcaacttccagcctactaattccccagattgcnnnnngctgggcttctgtgacagctgcttttgtctcnnnnnnnnnnnnnnnngactttgttggccaaggccaaagctaggcctggccagatgcaccggcccttagcagggaaacagctaatgggacactaatggggtggtgagaggggaacagnnnnnnnnnnnnnnntcatttcct

SEQ ID NO: 12378 - DNA, 505 bp, Macaca Fascicularis
  misc_feature (1)...(505): n = A,T,C or G
gcataagcccaagtttggatgggccggaaacccccgagagatgtgccagtcatgtccacggacttanncaccccattccatacctttcttccccggggggtcccctttaccgttattccctagcgtcccaggccgttaatagggtttacctgccttccctcccagcaccttgccnnnnnnnnnnnnnnnnnnnnnnnnnnnnccccatcccccccattccccgggggagctggggaattcctgccaagcaccttgaatgggaggggcctcacagagggcagggccagggtccagcaggggtggggggttcctgctctgcccctgcccgtccccacccagtcttgccctcccatcctctcatctgttccccgctggagacggaagatcttttattttctattatttataacttcagacttgggccccctgttctttctttcccattaacttgagtgacctgtgtgagagacagacagatgccccatgaggatgnctggacaaggac

SEQ ID NO: 12379 - DNA, 708 bp, Macaca Fascicularis
  misc_feature (1)...(708): n = A,T,C or G
cacccagacctcccctcagcagatgtcttccctccccgacccnnnnnnnnnnnnnnnnnnnnnnnnngccgcactgcactgagcacagggcaggtttgggccctgacttgggcctcaggctgcagtgggggtggatttcagagcctctcatggcagcatctaagtgaccagagctgggatgagagaggggaaggggcagtgggagtggcgctatggggcgggccagccctgctcctgcgccagccctgccctctgcccccgggccctgggctctgtgctagggatggtgaagaatggggacgtgccggcctggcaggagtgggaagcaacacgcaggggtcccgggcctctccagccttgccctcatgcttacccaagctcccggtgtggttagtggttagcacagagctcacccgccttgcctggctcccagctgagggtctgtccccaccggtgctccgggggaagaaacgccagccttgcttctgtatggactgctgatctggcctgctgtcctgttcagtgggcattgtctttcgagcagcaggagaataggatgcctctcacatgccagttcccagctggccagctgctcagggctcaggctggggcctcccattgacatcctcccccaacactccctctccgggcctccgttgcccctcctgttgggtgagggtgttgagtgtgacttgtgttgaaacctgg

SEQ ID NO: 12380 - DNA, 758 bp, Macaca Fascicularis
atcagtgatgaaacagagagcaggagaacccaacagcccagatgcagaagaggccaacagtccggacgtgacagcagcctgtgaccctgcgggcgtccccccaccccggtgagcaggcccaaggcagtggggacccacatccctcacacgcaaaactggcctcttcgtgtcactggtgtctgaaaccgaatccagaacaagcctgtggcctgtgaagcgtctgtttctaatgactgcagactggtggcacgataggaggcttctgaatggccaggaccgctttcttgtggagcggatgaaaacatattcttttagcgtgttagaaatcactcgttttactttgtttctttggccaagctgggtctagtctttctgttgctgggaatagacattcagaagtcgtacttctatcaagaaacagaactccccttgcggaaatttcaggtctcttgttaagcctgtattggtcttaaggtccagtatttttttaattattacttatagaaagaatctataaattcctggggaagtgtgttataagctttaataattacattgagttacacattagtagtgtgacattaacatgcggtggggttaatatctgaggcctcagatgactgtgccttttggaataaagggtaaaataaactccagagtaagagctgtattgtgaattgtcatacttattattgagggggacttatgtgcttttattgaatggagtgctttacaatttttatttttaaatggggttg

SEQ ID NO: 12381 - DNA, 739 bp, Macaca Fascicularis
  misc_feature (1)...(739): n = A,T,C or G
tcgcccctttatatgaaattgtcatcttannnncagagactggcatgactgcatttccactcattgatagcgtggacccccacggcttcatctcctaccgcctattccgggacgccacaagatacatggatggacaccatgttaaggacatttcatgtctgaatcgggatccagctcgagtagtagttgtggactgcaagaaggaagccttccgcctacagccctataacggcgtcgccctgcggccctgggacggaaactctgatgaccgggtcttattggacctgtctgccttccttaagaccactgcactgaacggtgtggaggatgtgcgaactgtgctggagcactacgccctggaggatgatccgctggcagctttcaagcagcggcaaagccggctagagcaggaggagnnnnnnnnnnnnnnnnagctctccaagtccaacaagcagaacctcttcctcggctccctcaccagccgcttgtggcctcgctccagacagccctgaactctgggcctcctcaaactcagtgccggagtccagggcnnnnnnnnnnnnnnnnnnagacttgggccaccactgtccaataaagtacatcccannnnnnnnnnnnnnnntgtcccgagagtctccagatgggggcaccgggatgaggtccgggactttcgggtcaccatcccacagtggctgatcggctgccaatcacagagtgggggctttgttggatcagagca

SEQ ID NO: 12382 - DNA, 1102 bp, Macaca Fascicularis
  misc_feature (1)...(1102): n = A,T,C or G
aaatnnngcaagccaatcccagtcatgctccttggggtgaccctcttgaagaagaagtacccattggccaagtacctgtgtgtcctgctaattgtggctggagtggcccttttcatgtacaaacccaagaaagttgttgggatagaagaacacacagtcggttatggagagttactcctgctnnnnnnnnnnnnnnnnnntggactgactggtgtttcccaggaccatatgcgggctcattaccaaacaggctccaaccacatgatgctgaacatcaacctttgnnnnnnnnnnnnnnnnngaatgggaatcctgttcactggcgagctctgggagttcttgagctttgctgaaaggtaccctgccatcatctataacatcctgctctttgggctgaccagtgccctgggtcagagcttcatctttatgacggttgtgtattttggtcccctgacctgctccatcatcactacaactcgaaagttcttcacaattttggcctctgtgatcctcttcgccaatcccatcagccccgtgcaatgggtgggcactgtgcttgtgttcctgggtcttggtctcgatgccaagtttgggaaaggagccaagaagacatcccactaggaagagagagactacctccacatcaagaatatttaagttattgtctcaaacagtgacatctcttgggaaaatggactcaataggaatatgggactgagttccagtctttttaaaaaaataaaatcaagcaaaatgacatattctaaaaaatgcacttggattttaacaagacagagttggtggtttttgttcttcatgtcctggagcacagtctatggtaaataaagagggagggaagaggcagagccggatgttcattactcaggctgctcctcttgtgggtgtggttagcatggttgagtgggtgattcccccaagagcctgaacattatagggaggaactctatgagatcgcagaattgtgctaacggcttctgttccgatgggtgaggcttgtcccattagagctggtcccatttgaggacaggtggctctccattagagccagagaatgtaaaagtcactttttctcctaaagctc

SEQ ID NO: 12383 - DNA, 619 bp, Macaca Fascicularis
  misc_feature (1)...(619): n = A,T,C or G
cacacannnnntaccactgccacacnnnnngaatcatgcagggaagnnnctgcccctgccctagcacacacaggcacccactccctccccctgctgacatgtgtatgtgtgtgtacacaccacgcacacacatgcacaagtcatatgcaaacagccctccaaagcctatgccacagacagctcttgccccagccagaannnnnnnnnnnnnnnnnnnntctgccctgtccatctgtccgtccgttccctggagaagacacaagggtatctccatgctctgtggccaggtgcctgccaccctctggaactcacaagagctggcttttattcctttcgcaccctttggggacaggagccttcaggactgctggcctggcctggcccatcctgctcctccaggtgctgggcagtcactctgctaagagtccttccctgccacgccctggcaggacacaggcgcttttccaatgggtaagcccagcggaggcaggacgggagagccccttgggtgctgctgggccttggagcaggagtgaagcagaggcgatggggctgggctgagccagggaggaagggcccagctgcacctaggagacacctttattcttcaggcccgtgg

SEQ ID NO: 12384 - DNA, 809 bp, Macaca Fascicularis
  misc_feature (1)...(809): n = A,T,C or G
ttttggcagaatggcagattggctcatcagtgaagcgcagtatcttagctctagattctgttttcatgnnnnnnnnnnnnnnnacgtggttagatctgtttgtgctcagtcaagaactaagaaatagtatgaactgtaagtcaagatgggcaactcagatggagcagcttagtctcacatagtttgcttgtctttatttatttttctagtgccaaatgtattccatttttaaagtaagccagagtgagtcaaggcatatacacactttctcaaaaaacttcctaaacagatttgggggtttagtgtgtccaactcctcatgaaatgtattcgatccacttaaatatattccatatttttaacacaaaatgtaaagcttagcaccaatcattaatttatgtnnnnnnnnnnnnnnnnnnnnnnnnnnnnnnnnnctctttagtcctcactgttaaataaaatccaatcataataagtgattaactagcaaaaggttaagctatttatagcaaatttctagatcattagaaaagcactggtagttgtaccacaatatcagtgttgactttgaacttctttaaagagatcatgaattattttcccttagccaaaacatgagatatttaacctagttgtctctaaaagttttgtaatcatgagttatatatatgtcatctcctattcattgcttttatgtgatcaataaatcttttacaaacccaactactcatttcttttttagtaatactttgcctttttnnanctgtgtatggaatgannnnnnnnnnnnnnnnnnnnnnnntttttatc

SEQ ID NO: 12385 - DNA, 756 bp, Macaca Fascicularis
  misc_feature (1)...(756): n = A,T,C or G
atcctgaccagnnnnnnnnnnnnnnnnnnnnnnnnnggtgcacttggagaggccttgctggttttctcagagcggaagggctcctgaacaagacggtcaagagaaggagactcaccagctgctgcgggagaccatcactcctggtctcatagctccctgttgaatgtgtcggaaagaggaacgcaaggacagtgggcagcgccatcgccctcacccacgtgaatgtggtggtggctgatgaggcnnnnnnnnnnnnnnnnnnnnnnnnnnnnnnnnnnnnnnnnnnnnnntcgctgcagaggagcggtctgttacgtcttcccatttggaagctggttctgcagaaacaggaagtacaggatttcacaggcnnnnnnnnnnnncctcgactgagcttcacacctctggatgccacatgctgtctcccaaagactgctttcggtgcgaggtagtgggcctgaggggtttggttgtctttttttttttttttttcatttttaaaattttaaaatttttatttattggccgggtgcggtggctcaagcctgtaatcccggcactttgggaggccgagacgggcggatcacgaggtcaggatatcgnnnnnnnnnnnnnnnnnnnnnnnnnnnnnnnnnnnnnnnnnnnnnnnnnnnnnnnnnnnnnnnnnnnnnnnnnnnnnnnnnnnnnnnnnnnnnnnnnnnnnnnnnnnnnnnnnnnnnnnnnnnnnnnnnnnnnnnnnnnnnnnnnnnnnccggc

SEQ ID NO: 12386 - DNA, 706 bp, Macaca Fascicularis
  misc_feature (1)...(706): n = A,T,C or G
tcgggttcgctggtggcccaggcccaggcttggggccaggagctannnnnnnnnnnnnaaaagtnnnnnnnnnnnnnnnnggaaatgggtcggctgcgggaggcggtggccgaggagcgccgccggagcgggnnnnnnnnnnnnnnnnnnnnnnnnnnnnnnnnnnnnnnnnnnnnnnnnnnggggcgctccgagcagtttgagaaaacagcagagctgctgaaagagaagatggaacatctcattggggcttgccgagacaaggaggccaagatcaaggagttgttgaagaagctggagcagctttcagaagaggttctagcaattcggggagaaaatgctcgccttgccctgcagctgcaggattcccaaaannnnnnnnnnnnnnnnntctccacctacaggaatcatctactgaatgctgctcggggctacatggaacatgaagtgtacaatatcctgctgcgaatccttagcatgcaagaggagtgaggcagccttactgtgtgccctcagggatacgagattctctgttggaataagaaatgctgctnnnnnnnnnnnnnnnnnnnnnnnnnnnnnngggggtgttggccactaggaaatggtatgggcagggcttcacctgccattatagacctnnnnnnnnnnnnnnnnnnnnnnnnnnnnnnnnnatgagaccagaggaggtgtggatggaaacaag

SEQ ID NO: 12387 - DNA, 637 bp, Macaca Fascicularis
  misc_feature (1)...(637): n = A,T,C or G
cattggtgcgtggttcttaaccctctggacccagcatnnaggagctncnggaacccacgnnnnnnnnnnnnnnnnnnnnngtctactcactgatgaggttnnnntgactccggggnnnnnnnnnnnnnnnnnnnnnnnnnnnnngcgtggccccaggccctggcatcctctgctcgctgaccaaggtgtggccccaggccctggcatcctcccctcgctgcacgtggnnnnnnnnnnnnnnncgctccctgtggccgcagcgacagagcctgcaccctggctgtctgcggcgccagggccccagctcccgcctgccacccgccctgtcctcgcagcctccagactcgagtccagaatctgtttctgtcaagtcagtcacccccagctgcacacggggacgctgagcgctgcgctctcacgggtctgttcccgtcagagggtggcaggggtgagccccgatcccttccagagaataccagcttcccagggnnnnnnnnnnccttcactgaagccattttgtacatggggacagggtggggacctctcttttttggtgttggacgttggaccattggggaggggttcagaggcggcggtcctgtccttgactccgtctgtccgtgtggccttgctgccg

SEQ ID NO: 12388 - DNA, 727 bp, Macaca Fascicularis
  misc_feature (1)...(727): n = A,T,C or G
gacccctccanncanncnnnngccaccaaagtggcagggtcccagtcacctccatcccttgtgcccggcaccaagcccagaacacaggaggtgctctgcaagggtctgcgcggggtggctgccttgggggctaaaggcagagaggcaagaggagaaagggacgggcccnnnnnnnnnnnnnnnnnnnccaccattcagcactgagaccgaggcttaaggagtccatccaaacgactccatagcactgcgttcagactgnnnnnnnnnnnnnnnnngaaggccctgtaactgcccagctgtgggagaggagatgccagcccgggagaagagcagctagccctnnnnnnnnnnnnnnnnnnnnnnncccatcccaacaaggatgggaaatcaagacagatgctgagcatggatctcccagaggtggtgactgcaccgcgcagaggagcgtctctgcctgggaggagggagagggctcccgccgggctgccagagctgggcaggtacccgcaccttcagccagacacacgccgggcattcttcagatgnnnnnnnnnnnnnnngacctgggacgccccagaacacctacagatgctgcccctcgtgctttctcagccaaaccagggtgcagaggggctggggcagccaggaaaagggtttggtggtctggagggtttttttgtttttggcttggggcttttcttagaagtgatgtgttgctagaaactca

SEQ ID NO: 12389 - DNA, 1188 bp, Macaca Fascicularis
  misc_feature (1)...(1188): n = A,T,C or G
gacaggcactannngggtttggggnnncgctatagggtgtggggaagttaggaactggtgnnntcaggggccatacccacnnnnngaggagctgctgaggtacctccaaggaccagcctttgcggctccatggaaaggaagcaccatcattcctgttgaacgtcacatctttaacccctaactggctaattagcatagtcacatctgagccccgaatctgacattagctgaaagactagggctgaagctatgtcctcataagggttggatgctctcgttgaccctctcaggagcatctcttcaactctgagtgttaagttttgagcccccaggctggtggctctgtgtgctgtgatcggagctccgggagtggttttcccaccttaggtttgttacagtgtcggctggagacattgaggcaggcactgccaaaacatcaacccaccaggtggccttgtgaggagctggaaacacatgttcctcttgggggtgttgggtgaacaaagaggaagagggtttggannnnnnnnnnnnnnnncaagaacccccctttacccccatgcccaacattgcacacacatgtgctggccacctgctgagccccaggtggannnngacaagcagcccttagcccttccctcctgcagcttccaggctggcacggagcatcagcatccccagaaagccatgcacagccaccagtccactnnnnnnnnnnnnnnnnnnnnnnnnntgtctgttccatgcttgtnnnnnnnnnnnnnnnnnnnnnnnnnnnnannnnnnnnnnnnnnnnnnnnnnnnnnnnnnnnnnnnagtagaatgggggtagcacctcctaagaaggcacttctnnnnnnngaaagnnnnnnnnnnnnnnnnnnnnnnnnnnnnnnnnnnnnnnntctgnaggcacagnnactcctgttcatgcccatactccaggcggaggaggatccctttgtccacaagtaaaaggaaatgctcctccagggagtctcagcttcaccctgaggtgagcatcatcttctgggttaggccttgcctggcttcctcaaactacgtgagcttgcctctccctcccaaaatgctttccgtgagttgcagttttttcctagtctgttttccctccttggagacagggccctgtcagtttattcactctatgtccttggtgcctggagcctg

SEQ ID NO: 12390 - DNA, 714 bp, Macaca Fascicularis
  misc_feature (1)...(714): n = A,T,C or G
ttttttaaacttgacatcagagaaagtctctcaggnnnnnnnnnnnnnnnnnnnnnnnnnnnnnnnnnnncagccttgggaggagataaaaacatcttacgctggagtaaaggagaagtacccgagtgaatactgcttttctggtacatacattctctcnnnnnnnnnnnnnnnnnnnnatttcacagctgattcctgggagcacatccatttcattggcaagatccagggcagcgacgccggctggactttgggctacatgctgaacctgaccaacatgatcccagctgagcaaccattgtccacacctctctcccattccacatatgtcttcctcatggttctgttctccctggtccctgtcatagtggccatcataggcttgctcatctttcacaagccttcgtatttctggaaagatatggtatagcaagagcagaggaaatatgctggggggagtgaggaaaaaaattgtccagggagcattttcctccatcgcagtgttcaaggctctccttccctgtttgccagggccactcttgaccagagtgaagcttccttggcttttactgaagcctttcttttggagctattcaacatcctctgcctcaaggacttccggcagacactgtctctttcatgagtttttcccagctacccctttctcctttgtactttgtgcttgtgtaggttttaaagacccgacacccttca

SEQ ID NO: 12391 - DNA, 750 bp, Macaca Fascicularis
  misc_feature (1)...(750): n = A,T,C or G
cctttatttggatacagntgcaacattacagttttggatcattaaatgaacagacttggtgatatagtactgacaagcannnnnnnnnttctgggagtaagtggttttctagttcatgggggaggagaagagatatgtgcaagatcttctccagaggagaagagaaccatggttctcannnnnnnnnnnaagnnnnnnnnnnnnnnnnnnnnnnnnnnnnnnnnnnnnnccagtcttggtcaaccatccaggattttcatcacagcaaatcaaaatctccaatttttcaaactaattgtaggtaggagagagaggataactccagactgtcttataaaatgatctagatactaagtgtcctccattcatgagttggcaaaatcttcagagtgactgttggagcaaggagcctttcatgtgctcccagttattatatagtgcatagaggctggtaagtgttagtcctgtcagaccacctcgtgctatccctcgaagaccacctgtacatttatacaacatgcctgtcatagttccagccgctactgtgttaaggtcatcttctgcacctcgtgttttctcaatgatgacaccaaatnnnnnnnnnnnnaaagccagagaacctagagtattagcccaaagtgccccttgcctagtcaccatattcaaaatctgtacatttcttggtttggaccaggccatgttctgggtttcataacttccatagccgaagancatcnnttcnccaacgca

SEQ ID NO: 12392 - DNA, 663 bp, Macaca Fascicularis
cctggcaaaccttgttggcctggcagaaaatataacccaggaacgtgacagtcttatgtgtttggcaaaatgtttagaaagtgagaaggatggagtgctcaacaaagtcatcaaaagccacattcgcctgggaaagctggaggaaaaagtcaagggctacaagaagcaggcagcactgaagctgggggacatcagtcaccgtctgctggagcagcaggaggacttcgccggcaagacagcccagtaccggcaggagatgcggcacctgcaccaggtgctgaaggacaagcaggaggtgctggaccaggcgctgcagcagaacagagaaatggaaggtgaacttgaagttatttgggaatctaccttcagggaaaaccgaagaatccgagaacttctccaggacacactcgcgaggacaggcgtgcgggacacccctagagctctggtggcccccaacctcaatggcgtctctcaggcagacctgctggatggctgtgatgtccgctcctgtgacctgaagactcctgcccccacccgccagggtctgcgggagcccgtggtgtaggctcctctggcctgagggtctgcctcacacaggccttccctggagggcagcccacggtggcagccagaggtgcgtaagcccactgagcgctgcggggc

SEQ ID NO: 12393 - DNA, 753 bp, Macaca Fascicularis
  misc_feature (1)...(753): n = A,T,C or G
agtgaggagtagagaaagggcaggaccctcctcatcacacagctggtgtttcaggctgtggccagtgcagggtgggatttcctagctgtggatgaggtaataaggtgtctctgagggatgaggtgtctcagagagttgagtccatggggcagtcagaatagccttaagagaaaatcatgaagaagaaaaggtcctcctttagctgcctctacttggtatcttagagagggcttagagggctctcnnnnnnnnnnnnnnnnnnnnnnnnnnnnnnnnnnnnnnnnnnnnnnnnnnnnnnnnnnnnnnnnnnnnnnnnnnnnnnnnnnnactttctttgtgtgtgtctggtcagcatttttctccttttggtgttttatgaagccatacgataannnnnnnnnnnnnnnnnnnnnnnnnnnnnnnnnnacccaaagccagcaccaaaccctgggagtccctgaagcctaacagaannnnnnnnnnnngcaaaaggaatttggctgagagctcacttnnnnnnnnnnnntcattgtgtctttgtagatagaaaannnnnnnnnnnnnnnnnnnnnnnnnnnnnnnnnnagaacaaaacttcatatagaaagttctaggcaagtatttgatggtttcnnnnnnnnnnnnnnntttgtgtttccacctagccttgtaaaatgttcctgtggtattttgtgtcacnnnnnnnnnnnnnnnnnnnnctcacatcccaccttcctacaaatagctaaaata

SEQ ID NO: 12394 - DNA, 699 bp, Macaca Fascicularis
  misc_feature (1)...(699): n = A,T,C or G
cgagtccccaatgatgacctgggggaggttgagaacacaccgttgagagttgaagggtcggaaaccccctacgtggacaggacacnnnnnnnnnnnnnnnnnnncctggagccgggccgcagggagcgactggggctgaagatggccaacgaggctgccgccaagaaccgggccaagaagcaggaagccttgcggagagtgacagagaatctggccagcctcactcccaaaggcctgaacccagccatgtccccagccctacagcgcctcgtgagcaggacggccagcaagtacacagaccgagccctgcgggccagctacacaccatccccagcacgctccacccacctcaagaccccggccagtgggctacagacccccacaagcacaccagcgcctggctctgccacacgcacccctctcacgcaggacccggcctccatcacggacaacctgctgcagctccctgcccggcgcaaagcctcggacttcttttagagctaggcctgggctgggcccatagacgcttcatggagcctgnnnnnnnnnnnnnnnnnnnnnnnnnnnnnnnnnnnnnntcggggcccaggcctgggccaaagctgtttactacgccaggagccactggagaaaggggctgcgctggggccaggctggcacaggacgcacaggcccacgccacatcccagggccttgcca

SEQ ID NO: 12395 - DNA, 581 bp, Macaca Fascicularis
  misc_feature (1)...(581): n = A,T,C or G
gcccggcggtgagggcggctccatccaggaagtctcagcaacaggaacccacaaggcgacactctagctaaggttatagatagctgggagacgagggcccttccgcagacgcgggaacaggccagatctttataaataaacatccagtaaagagaaatgacaactctaaatcatccacgtgaccttctctggcattcgggtacaaccagatgcaactgagggatttccctgccctccctcttccctgggaggggcggggcggggcggggcggggccgggtgtgccacagcatgtgtgtctcggatgcagttttgcttctgaaacaagctccttccccggggtcctcgctcgcggcctccatcacaccagggacaactgtccccgcagcagcgcctcctgctggcgcccgagagaccggcacgccgtggcccctcccccaaggaaccgagcaaaggatggtggcgccaaagcccgcgcgagcccacagaacaccggcccctaaactccagccacccggcggaagcatgagacccgcccacgnnnctctgtgttcccgttcgcagcatcacaccctgtctcat

SEQ ID NO: 12396 - DNA, 784 bp, Macaca Fascicularis
  misc_feature (1)...(784): n = A,T,C or G
cacgccgcggtcaacttcggccnnnnnnnnnnnnnnnnnnnnnnnnnnnnnnntcccccaaccatgcgagccccgccgccaactgccaagggcgtggtgaccattgagcagatcgtggacacgctgccggaccgcggtcgctcctgctggcatctgggtgcagtgtgggcgctgannnnnnnnnnnnnnnnnnnnnnnnnnnnnngcatgtacccagaagagcattttatcgagaagcctgtgaaggcggctatggcccgattccgcaagaaccttgaggccattgtcagcgtgattgctgagcgcaacaagannnnnnnnnnnnnntattactacttgtnnnnnnnnnnnnnnnnnnnnnnnnnnnnnnnnnnnnnnnnnnnnnngtctcactatgggaaggccagctgctccagccagccggactccagactgcctggcaggctgtctggccaggcctcttggcagtcacgtctcttcttccgaggctagtacctttctgtttattctttgatcttcagggaaccccatagnnnnnnnnnnnnntaaacaccatagggacccattctacgcagagcaggactgcacagtgtcctgtccacacccagctcagcatttccacaccaagcagcaataacaaatcacgaccactgatagatgtctgttcttgttggagacattggatgattattttctgttnnnnnnnnnnnnnnnnnnnnnnnnnncacatagtgggtacccaattcaattattattgaatgaattaagaattggtgccaaaaaa

SEQ ID NO: 12397 - DNA, 693 bp, Macaca Fascicularis
  misc_feature (1)...(693): n = A,T,C or G
cttaaggaactaagtgatagnnnnnnnnnnnnnnnngaaagcataagtttgttttnnncagctgaggcaagtggtagagtacacaggataatgaagtnnnnnnnaaaaagcaggatgcacataaggtgcatggctgttgttttacctggagaaaccacatgattgggacctgaaggtttactgactgaggacaggggcnnnnnnnnnnnnnnnnnnnnnnnnnnnnnnnnnnagactgtaggggtgagaacacacaattattagcatcatttctgagtgatctcacagattttttttcttgtgnnnnnnnnnnnnnnnnnnnnnnnnntctcccatgttccttgtaattctattctctcaccttcactttattatttgtattcaatggnnnnnnnnnnnnnnnnnnnnnnnnccttgnnnnnnnnnnnnnnnnncacaccnnnnnnnnnnnnnnnnngctatgaagtgaataatggtactgaaagtaaacctgaagacctttctcagatctattttaagtctgagtctgaccaaccatggaaaatattcgacgtgaattaatgtagagaactataaagcatttatgacagctccaaggaaaatcatctgctctatgcaggagatatgtttagagacctctcagaaaaacttgcctgatttgagggtacacagtaccattttaatcctctgaaa

SEQ ID NO: 12398 - DNA, 744 bp, Macaca Fascicularis
  misc_feature (1)...(744): n = A,T,C or G
ctgacagagannnnnnnnnnnnnnagaaagaatgctgaagagttcaccctccaatatggagtggaccggccctcctaactcatgttctgaccctctgtgcactggatccttggcatggtggatggacacacctcatggactgaggccagagccccctatggcccattccccactcattttttctttcttaggttgttagtcattcgtttgtgtgtgtggggtagagggaagggagctgtgagtgtgtgtgttgtgtgtgnnnnnnnnnnnnnnntcacctggccacaggtacacccttcccacagcctttgcatcccccagagccaagggagtttaagtttgcagagttacaggccagttctccagctctccatcttagagagacaggtcatctcgccggcccgcttgcaggaaatgagcccagcagccaactcgaatccccctagggctcaggcactgagggcctggggacagtggagcgtatgggtgggagacatatggagggtaccctatttacacctgagtcagcaaagccactgatgggaatctacagatttaggtgctaaaccgtttattttccacggatgagtcacaatctgaaaaatcagacttccatcctgaaaatctgtatgtttcaaaaccacttgccatcctgttagattgccagttcctgggaccaggcctcagactgtgaagtgtgtgtcctccagcatccagtccagggggagccacagaaaccatgat

SEQ ID NO: 12399 - DNA, 724 bp, Macaca Fascicularis
  misc_feature (1)...(724): n = A,T,C or G
cactgctcgcactgcgatgagannnacacactgccccagaacggcaccatcaagctctacaaggagctccgctgccctctggatgacttcgagctggtcctgtggtcatcaggctctcggggcaagagctacccactgtgcccctactgctacaaccacccacccttccgagacatgaagaaaggcatgggctgcaacgagtgtacgcacccctcctgccagcactcgctgagcatgttgggcatcggccagtgcgtggaatgcgagagcggcgtgctggtgctggaccccacctcgggccccaagtggaaggtggcctgcaacaagtgcagcgtggtagcgcactgcttcgagaacgcccaccgcgtgcgggtgtccaccgacacctgcagtgtctgtgaggccgccttgcttgacgtggacttcaacaaggccaagtccccactcccgggcgacgagacgcagcacatgggctgtgtcttctgtgaccccgtcttccaggagctggtggagctgaagcatgcggcctcctgccaccccatgcaccgcggcgggccagggagaaggcagggtcgagggcggggccgggccaggaggccccctgggaagcccaaccccagacggcccaaggacaagatgtcagccctggccgcctacttcgtatgatggccctgtcctccctcacccaggctgcagtgctatgcagacacctcatggcactcaa

SEQ ID NO: 12400 - DNA, 701 bp, Macaca Fascicularis
  misc_feature (1)...(701): n = A,T,C or G
atgccctgtggagctgattaggctgggannnnnnnnnnnnnnnnnnnnnnnngttcctcattcctacttgtggaggatcagtagctattatgannnnnnnccatttggagaagtnnnnnnnnnctgagggggacacataatatgacaaccacattnnnnnnnnnnnnncatgtctggttttttctcttttccatatgtcactggggaacggctgcctgtacctctcaagctttgaattttactggaaactgaggcatcaagatggctgtggcagctagnnnnnnnnnnnnnnnnnnnnnnnnngccttgtgaaaaagtgtctttctatgcaataagatgaattttcnnnnnnnnnnnnnnnnnnnnnnnnnnnnnnnnnnnnnnnnnnnnnnnnnnnnnnnnaactggtggcttaaagactctgcatctttttctcaggaattctgcctaagttatctgccttttctaccaccaaaaagacttttagttttctatggtttctcctgaattttggtagggtaaggtatttnnnnnnnnnnnnnnnnnnnnnnnnnnatctcagggaaaaattttaatcactgtgtataatgatagtaaaccttgattaacaacagagaaattcaggatgtaaagccatagaataggatttatgaacgtgggatacctcagactgtttgttttctttctgaaagaaaagtgtg

SEQ ID NO: 12401 - DNA, 678 bp, Macaca Fascicularis
caggtcacatttccatctatgaaccaatcatattcagaggtggaatgctaattggccaggcctgggtcatatatacaagtctaggttaagaaggagcttcatccctgtccaattgacatggactgattaggggtattaatggaagaggtgtgccaccacaagagaatgtaccctgggcagatcaaagaacatgttctgtatgtcaggcttggccacaaaagaatgacacaagtactgtgccatagatcagaacctctcttttaatactgcctttttagcatggttgagatagctaagatctagtactgtcactcaggtatgtcccaattctacctacatttattgaagggtcaacagttctgatctcagcattgggtaaagggtgggacatttagatttatggtccttggtgaaaacaatttacaacgttctgttgtgtagtaagtgtaagtgtacatatgcctggaaaagagacaaactatcagaaagttgcactgttgcggtatgggccaaatccaacataatacccgctatacctctacagaactaaaaccttagtttctcagatctttacatacagcctacattttactaactcttgcatgggcttgtttcacagcaggaaactatactcatcatatccttatgatagagaagacaacattcaaaaaaggtgtg

SEQ ID NO: 12402 - DNA, 756 bp, Macaca Fascicularis
  misc_feature (1)...(756): n = A,T,C or G
aggcggagagcaggnnnnnnnnnnnnnnnnnnnnnnnnnnnnnnnnnnnnnngtggggcctgtggaatgagtgtgcgtggaggctctcctctgctgggggaatgagcccagagannnnnnnnnnnnnnngccccctgtgtccacctgtgggtatagccgggtatggctctgcaccccttgcacccctctgcccctcattactgggccttggtgggccagggctgccctgagaagctgctccaggcctgcagcaggagtggagcagacagaagtctcctcaatttgtgtctcaaaagtgagaatcttggagatgctacaaacagaacagggtcgtgtttgcaggggtgagggccctcatctatggggaaaggttttggattttgaatgtggtctcaggatatccttatcagagctaagggtaggtgctcagaataagacaggcattgaggaagagtcttggtttctctctgcagtgccaactcctcacacaccctgaggtcagggannnnnnnnnnnnnntgcatcaagtgccttaatgcctcatatgaggaggatgtccctgggccagggtctgtgtaaatgtgggcactgnnnnnnnnnnnnnnnnnnnnnnnnnnnnnnngccagggtctctccctcaggtatttttcatgaagtgtatgaatgtatgtaatgtgtggtggcctcagctgaatgcctcctgtggggaaaggggtaggggtgacagtcatcatcagggcctggggcctaagggaa

SEQ ID NO: 12403 - DNA, 746 bp, Macaca Fascicularis
  misc_feature (1)...(746): n = A,T,C or G
cacacagcaccccggagcctctcgtcccttcttattctttggctgctcctccaacgtgatgagaagggctgttgcggggatggcacactgcttggtttggatggcgggttcatggccagttggtgtaatcagcaaagagaaaaagcacagtttagcacccctgccctccccattaggaaaagtgtagggactgagaaggnnnnnnnnnnnnnnngtgtacagaatcctgaggactccgagattggaaagaaagaaccagaccagtgcccttcctgactgcatccgaaacttcacacaggagtttctnnnnnnnnnnnnnnnnnnnnnnnnnnnnnnnnnnnnnnnnnnnnnnnnnnnnngacagctctaactcaacactggcagccaccgtctcgcttctgcggaggagcgcgcccgtctcccacaggtgccttactgcgttccctcccaccgctttcatttttctgacctaataattatgggaaatggaaagtctgggccagcatcaataaaacgacaccaaaaataagtagatgaggaaatcaaatgaatatgagaacatcttgttctttaatatcacgggtttttgttaatgtttcatgagtaattttccccacttgatttttcttctataaaatcccatagaacaatgtttatgctatagccatttaatatatgtacaaattgtaaagaatatgtataaatgttttacacgaatgtaagagcatgtagaagccaacatacaa

SEQ ID NO: 12404 - DNA, 756 bp, Macaca Fascicularis
  misc_feature (1)...(756): n = A,T,C or G
cacactggtgctgttgagatgtcccaaacctcacgtccttaactgtgctctccctcctttcctctcccttgagcttgtttctgcccagcactcgtgctcattcacannnnnnnnnnnnnnnnnnnnncctacccgacttccttgctagtctctatgaggtccttattgcacttattggggttgaagctcttgagaggagctggaactgtctgccccannnnnnnnnnnnnnnnnnnnnnacccaagtggattctgagacaggcaccatctccttgttccccctctctcttttgcctcccactgactgcccttttccatgtgtcttcattctgcctgaagaaggctttcccaggatgcacgtcctcagagggagcagcctatctcccccaagctggaggcggcagaggactgggccaagccccaacctgcctcccagccaggctccttcaggccnnnnnagttagcagagcccctgagcctaggcctgtgtctagccccagtggctnnnnnnnnnnnnnnnncagccagggggtcctgcttagaagccagtcacctgccctctgcctgcagccatggaagggggtgtgcatgtgcctctgtgtgtgtggctgagtgtattccgcgcgtgtatgtggagggagggagggaggggagcatggtgtctcccgctccaccgccctttgtcgagccccatcagctgcccccttttactttgcattgaacggcctgtccaaagatcctctctctagggcagca

SEQ ID NO: 12405 - DNA, 717 bp, Macaca Fascicularis
  misc_feature (1)...(717): n = A,T,C or G
acacactgggaaacatcataaatcacaaantcctaaaggacccacaggtgctannngctggctacaaagtcccccaccccttggagcacaagatcatcatccgagtgcagaccacgccggactacagcccccaggaagccttcacnnnnnnnnnnnnnnnccnnnnnnnnnnnnnnnnnnnnnnnnnnnnnnnnnnnnnnnnnnnnnnnnnnnnnnnnnnnnnnnnnnnnnngtaggggccagagggggctctgctcagcctgtgagcccagttcctacctgcgcgtgaccctccgctccaggcactatgccgaggagagcggccagtcccagccatggcccgccttgtgaccacccctcaccctgacaccgacgtatcctgtacatagattaggttttatattcctaataaaggatggcggaagagacctggatgtggacttgagcagcggtgacttcacaagcaaatggatggtcaggcttgatgcaggcagatgacctgtttcaggggcctccggttggcggggatgaattcattctggaccaaagctccggagcccagggtctgctggggaggcagtgctgagccggagggaagtgtgcaaacccatgagctcccatgagtctctgctctagaagcctcagctcctgggcctgcctgtcaatcaaagcaggaacactttttcccgcataactcgaaacacctttccacaggct

SEQ ID NO: 12406 - DNA, 731 bp, Macaca Fascicularis
  misc_feature (1)...(731): n = A,T,C or G
cctgtggtctgactgagctgtccaggcatcacctggtnnnctgtcatgttaaagcnnnctgggaagccagccactctatgcggcagtgaaacatgaagttgttaatgaggacctgttttggtgggattgtttggggagaggactgtgttgatgcagggcaaatcccagaacgagatgagaggaagctagaaaaacttaatgtctctgaattnnnnnnnnnnnnnnnnnaaactaacctaacatagattctttggactatgagtttgaatctctccttgcgaaacaacgttatacgcttagttttcttcttcctcttgcagccggcacagaaaggtgtaagtggtggctgaaaattgagnnnnnnnnnnnnnnncaatgtgggtgctggtttcttgtgaaatgtgtccctaaacctccttctccttgcaggcagccacccacccaggtgtctaagataggaaatgctcctttctttctctaatcccatcgtgggnnnnnnnnnnnnnnnaatatgaccactactgagaaatagtaatgacttctgcaaatgcaagggtcttcccctcctctgtcccttaagtaccctcccttttccttagaccccgtttttgccatcccccaaatgttgtggtatggtgaaactaatcccctgaatgtgaattgctatccttattgcccttattagagaagagccagctggtatattgtcaggaagcactatttaaaatgtg

SEQ ID NO: 12407 - DNA, 737 bp, Macaca Fascicularis
  misc_feature (1)...(737): n = A,T,C or G
atttaaatatnnnnnnnnnnnannnnnnnnnnnnnnntcttctgccaaggctacttcctttaacaaagtctttttaattcagccttgtccaactagggaaaataatgatggacaagtctagggatttgaagtcagtgaacttttagtgtcagggaataaacatggtgggtagatcaggtttgaaaaaaacttctttagaggtattctcaataccagacaggggcccatgggaatgacttcagaagcatcccagataatagatgggtaagaaggctagacaccctgaagaacaagtgagacagctggcctctggacagaggtaggcatagtacggtacaatatatcattcctctggtcctaaatataggaatttattcatgtttttaggtgatggtggtcattgaaactcacatgtcttcaggtgtagctacaattgtgtaatgtacaatattagagaaaagacaggcttttaataagtaacacacaccgtatataaaatagcctttctggctggccacatggtgaaatgcataccttcccagtactggggggaaaaaatgatctttcttagaatgtgcaagtttcatgagagtaatatattgatatgattttgaaaagaattgttgatagttacatcttcaaacttgcttatcattccagtatgcgtctttaagatattgtgattctaagtagatgactttatattcttgattaaagagtgctatacgtgttaagaa

SEQ ID NO: 12408 - DNA, 751 bp, Macaca Fascicularis
  misc_feature (1)...(751): n = A,T,C or G
gcccagcagcttcctttccacaccattcaatggaagannnnnnnnnnnnnnagactgattttgccttaactcaagagaattcctgttctccttgtgctatgatttggacacaagattctggacacctggaacttagctgtgtactcttgtaccctaaacaatgggtttgagttccagcctttattcttttttttcatttttcagatcaccatctaagttacatctttagctcaggtccatccttctcaagatctccttcttagcccccagcccctggtgctgtctgtggtcagatgaccttactcaggagcagatatctccttggccgccatggagcctcatccatccacacgtnnnnnnnnnnnnnnnnnnctcactgctcttctagatgtgccttcccgcttggcttccagcggcttgtgctccctctgtctgccaggtatgagaaggacgcgtaagaccgcccacattcaccctccctcaaggccctgtgccataggggtggcccctgacctgcccccagaacttttggatactggaggcagttgcataggcctctctctctgggtaccaggactcagtccagcccaagaccactctgggcagctccnnnnnnnnnnnnnnnnnnnnnnnnnnnnnnnnnnnggatttctacagtgttctataaaagccaaaagggagagtggatttgggaagagtgagggtggttggggaggggggaccgatgtgcctcattgttgagtggtgatta

SEQ ID NO: 12409 - DNA, 1082 bp, Macaca Fascicularis
  misc_feature (1)...(1082): n = A,T,C or G
actgtctggtacttgatgnnaagaaaggcagaagccaaaaagaaattcaggaatttaactaggaaaactgaatctgccctcactgaagactgaccgtgctcnnnnnnnnnnnnnnnnngttcattttagtaatggttcctgaattctnnnnnnnnnnnnnnnnnnnnnnnnnnnnnnnnnnnnnnnnnnnnatctccctgctacttcttgcatccttcacatccctgtcttgtgtgtggtacttcatgttttcttgccaagactgttgatcttcagatattctttgccagatgaactcatttgctaactccagaaattcctgcagacttcctactcggccagcggttgaactgatagatnnngtaatactgactgtcaagagaagagcctaggagcatagcgagggaatgaaccttacttgcactttatgtatacttcctgatttgaaaggaggaagtttgtaaagaaaaaaatggagggggtagatgccacagagaggcatcatggaagtcttaacagcaggaaacagaaatctgtgtcatctgaacaatttccagatgttcttaatccagggctgttgggctttctggagaattatcacaacctaatgacattaatacctctagaaagggctgctgtcagagtgaacaatttataagtgtcccatggggcagacactccttttttcccagtcgtgcaacctggattttctgcctcagcccnnnnnnnnnnaaaataatgactttctgaataaagatggcaacacaattttttctccattttcagttcttagaaaaactaaaaaactagatattagttgttttggttgctttgttggaatggaatttgaatttaaatcaaaggaaaaatatctccctggtagttttgtgttaacctctgataactgtggaaagagctaggtctactgatatacaataaacatgtgtgcatcttgaacaatttgagaggggaggtggagttggaaatgtgggtgttcctgttttgtttttttttttttcagttttcctttttaatgagctcaccctttaacacaataaaaaacagggtgnnntatttaaaaa

SEQ ID NO: 12410 - DNA, 770 bp, Macaca Fascicularis
  misc_feature (1)...(770): n = A,T,C or G
acgcacgggccacaggcatgttcttgcagtatacagtgccggggacggagggtgtgacccagctgaagctgacagcggtggaggacgcgaatgtgggcaggaggnnnnnnnnnnnnnnnnnnnnnnnnnnnnnnnnnnnnnnnnnnnnnnnntacgaatctcgggaccagtaactctacgtgggtctgagcttggagtacgtgtggtcaccaggactgagtcgcttggaacagcagagcctgctccttgcgcaccacagggattaatcctgcttgtgctgggaaatgcaactcagaagtgttcacttatctagtgcaatatgttcacagtttattaatgctttaaacagcttcatgttttagaatttgtgtattgtcaatacttaattgggggtgggagagactgagctacactactgctaaactatttttagcataatatatactgtttttatgagttcccaggtttactagaaggttctggcccatcgatattcatttcatttaactcttccacagaaccagtttgggtagtaggaactcagnnnnnnnnnnnnnnnnnnnnnnnnnnnnnctctaatagccagtttacagcacttgccttagcctgttttacagactgtccacttaccttatcactaattttggacttttgggctgtgagtgatcctttgatacttcactaaggggaacgtgggggctttgtgttttgtacttttcactcactatttcactttattaagatgactgtacagcaattttgtatataaa

SEQ ID NO: 12411 - DNA, 757 bp, Macaca Fascicularis
  misc_feature (1)...(757): n = A,T,C or G
catgtgacatctatgtggagctaattaagctaattcttcttttgtacatacatagtcctgtaagaatacattcannnnnnnnnnnnnnnnnnnnnnnnnnnnnnnnnnnnnnnnnnnnggccagaagctttccacaaaccagtgaaggtggtagcaaagaaagcctcttagatgaggagctggcggcagttgatanctagacagcaaaaaccaaccactaattcagcaaacgcaacctcattcccaaccgcttctctttaaatggccttaagtgtgtgtgcatatgggcacgtgcgggcagaaccatacttattccctgttcctggcctaccacctctgctcccctttctcttctttaccatttaactatttcctctgctttgtttctcgtcactgctgctannnnnnnnnnnnnnnnnnnnnnacctggcggacatcgcaatccgtgggcacacttaggactacacatttgcattnnnnnnnnnnnnnnnnnngatggggacaggtgaagagaagacttgggggaaacagaaatatacacatgacatgagacatgcatatctagtgtcaattgattcgactggacagaggacaccagactgctgacagtgctatgtaagattacgagtgatcctccctctattttgcaaacagtctgtaatctaagtaactgataaaactttaaaatatgcaaattttaaaatgatatagtttgatttactcataaaatgatcatgtatgctgtnntaagaaaaaa

SEQ ID NO: 12412 - DNA, 696 bp, Macaca Fascicularis
  misc_feature (1)...(696): n = A,T,C or G
atggtcactgcggnnncttgagtgaaaatggagcattccgggctgaggagagccgccagcggctagctgaggtagcactggcatatgccaaggcaggatgtcaggtggtagccccgtcagacatgatggatggacgtgtggaagccatcaaggaggccctgatggcacatggacttgnnnnnnnnnnnnnnntgatgagctacannnnnnngtttgcttcctgtttctatggccctttccgggacgcagctcannnnnnnnnnnnnnnnnnnnnnnnnnnnnnctaccagctgccccctggagcacgaggcctggccctccgagctgtggaccgggatgtacgggaaggagcnnnnnnnnnnnnnnnnnnnnnnnnnnnnncctacctggacatcgtgcgggaggtaaaggacaagcaccccgacctccctctcgccgtgtaccatgtctctggagagtttgccatgctgtggcacggagcccaggctggggcatttgatctcaaggctgccgtactggaggccatgactgccttccnnnnnnnnnnnnnnnnnnnnnnnnnnnnntactacacaccccagctgctgcagtggctgaagaaggaatgacggagacagtgcaggcctgagaactagaactttaaaactaaagaactttagaactaaaactttaaaacgttcccggggcctcagagaa

SEQ ID NO: 12413 - DNA, 716 bp, Macaca Fascicularis
  misc_feature (1)...(716): n = A,T,C or G
tggcgttccagtgaagttttngactcnnnnnnnnnnnnnnnnnnnnagaagaaacttgatgagaccaccnnnnnnnnnnnnnnnnnnnaggaagcccagaannnnnnnnnnnnnnnnngaccccctcccnnnnnnnnnnnnnnnnnnnnnnnnnnnnnnnnnnnnnnnnnnnnnnnnnnnnnnnnnnnnnnnnnnnnnnnnnnnnnnnnnnnnnnnnnnnnnnnnnnnnnnnnnnnnnnnnnnnnnnnnnnnnnnnnnnnnnnnnnnnnnnnnnnnnnnnngacagttgtgttttggttttgtttgttttgttttgtgttttgcatttgtacatttactgttctttgggatgcctctgtctaaaggaaccatgtttcagtatctggaactatctttgtttttcttgttnnnnnnnnnnnnnnnnnnnnnnnnnnnnnnnnnnnnnnnnnnnnnnnnnnnnnnnnnnnnnnnnnnnnnnnnnnnnnnnnnnaaagcaatggggatttccattccttctgccgtcatggaaaacaactttgtggatttgacagaagatattgaagaacctaaaaagacggatgttgctgagtgtggacctggtggaagttgaggctgcctggtatttgattatatattatgtacatactttttcattcttaacttagaaatgcttttcagaagatattaaatatttgtaaattgtgtttttaattaaa

SEQ ID NO: 12414 - DNA, 675 bp, Macaca Fascicularis
  misc_feature (1)...(675): n = A,T,C or G
gggcagacctctgcaannnnnnnnnnnnnnnnnnnnnnnnnnnnnnnnnnnnnnnnnnnnnnaactatgnnnnnnnnnnnnnnnnnnnnnnnnnnnnnnnnnnnnnnnnnnnnnnnnnnntcatcaagctcgatggaggcaaagcacacggnnnnnnnnnnnnnnnnnacagcacgttctctggcttcatcatatactccgactgagctccccgtgtccctccacccacgtccctcacccccgcgggatcccctccgggcggggcagacgatgactcgcccctgcccacccgctcgccgcccggccctccccggctatgacgcccccggcccgtgctcaccaccgcctgggccacagctaggccctcccgccggctcgctgcagagccgggcccagcgcgccctgtccccgtgcccgggnnnnnnnnnnnnnnnnnnnngcccggcccacgctatatatttgtacaataggactgtttactgcccacctccgcctgccagcccaccccannnnnnnnnnnnnnnnnggcggcggggttgcttcctgcgctctgagatgagctgccctcggctccctccggggtggcgcgccctagggaaagggggagttggggactggattgcttccnnngcaccctcagagcccctgcccggctgtgccccgtctgaccaaagc

SEQ ID NO: 12415 - DNA, 661 bp, Macaca Fascicularis
  misc_feature (1)...(661): n = A,T,C or G
cctgtagacaccnnnnnnnnnnnnnnnnnngctgggcctccctttctctaacttcccnnnnnncatgcctggggggcatacagtccaacccaggccctctcctcnnttcctgccaaggtttatagaaacctgagaatctgagggcgatgtctggccgctggtcaagaagccaacagtcatgtggctcgcagatgcatcctgcatcccagtccccctcccagcacnnnnnnnnnnnnnnnnnnnnnnnnnnnnnnnnnnnnnnnnaggtgtgacatggtcagggggcccatctgctactcttccccagcagctcccctgttccagttctggttgctgttagttttccctnnnnnnnnnnnnnnnaccatggctgggtaagcaccaataagcacagctgcccccttggtctcctgtatcccagtcactagtcttccctggcccaccccaccctcatcctcaggagccgcagccacttcttagagagtttcaaaaggagagcctttggcgccttttccgtctaacctttgagtccagccctttccagtttnnnnnnnnnnnnnnnnnnnncactcaagctgtgctcaaaatctgtaaacgcatttatttacaccaagcccttcccataaaacacannnnnnnnnnnnnnnagnnnnnntttccc

SEQ ID NO: 12416 - DNA, 547 bp, Macaca Fascicularis
  misc_feature (1)...(547): n = A,T,C or G
aatacaccctggccccacggtagggccccgtgctgcccccaccctctctggaaggtcctccagctccgctcgagacagccaccgggagggagccccggaccaagccgcaggctgatgccgtagaggaaacgctttggggagcatgtggccgccagccccaggagcccagcgtcttcagacgctcccagggtgaacccgcacattgtctccgctnnnnnnnnnnnnnnnnnnnnnnnnnnnnatactcgggtagtcttcgnnnnnnnnnnnnnnnnnntgctgcgcctgggcccctctcccaccacctgcctgcccacagagctctccagggcagaagtccgggtgtgctcagcgggtgccctgcgaggggtctctcgggctgacgtcaggccttggtgggctgcactctcatctggaggctccagggaagcgtgcgcctccaggaccattcannnnnnnnnnnnnnnnnntcctcatggctgtaggactgaggttcccacgtccttgtccctgctcccgcagcccctccacggtcaaaccagcaatg

SEQ ID NO: 12417 - DNA, 745 bp, Macaca Fascicularis
  misc_feature (1)...(745): n = A,T,C or G
catgtagcagncnnncaaatgggtnnnnagataccgccagatgtttacaagacatggcagtgattgctcctatgcttgccaaacttggatatgacccgtatgccaacccacctaactatggaaaacctgatcccaaaattcttgaaaacactcgaagggtctataagggagaattccaactacctgactttcttaaagaaaaaccacagactgagcaagtggagtagcaggaccaggagcctcttccatacatgaggaaagactgctgccttttcaacggaagggaaattcctaggactggctgtcccctgctgagctcggtggagcgtctgcaccttggctatgtctcctctgcttttgccagtttccttccactgagaggatggaggtgtccgcacagctttgggtctcatgagggatctgcctcctgagcaaagagctcttgatcctgattccatgcacagccctgcggtaaggagcccagaagaaacgtgtttcctgttaaaactgctcttgtcctcttttcttaccagattatgaagtttgtgttcaaggagagggtttaaaaatgggatcctgtaagcagacttgggcagtctccttttgaaataggttgtctgtacatgttctaatgttttgtagaacacgtgtgcctgtttaagtgtattgatgtgaataatattaaataattatttaattcattgtattgtttctgagaagttgggaaattatcattatacattta

SEQ ID NO: 12418 - DNA, 540 bp, Macaca Fascicularis
  misc_feature (1)...(540): n = A,T,C or G
cgannnnnnnnnnnnnnnnnnnnnnncacatgaaaaaatcctgagaatgtctcccatctcggcctcttccgaagaaactggccaggcaaggaaagaggccggtccccagaagccagtgggcgtggggtgtgatactctctatagccactacagggcgcgcgcaggtcgcggatctccccagctcccacctcagnnnnnnnnnncaaatcagatctctgtgtcccgacatgagaaggtcgccaatggggtgttgggcgaccagggccttcccggagtcttcgtcctttacgagctttcgcagacgatggtgaagannnnnnnnnnnnnnnngtccttcacccacttcatgacaggcgtgtgcgccatcattgggggcatgttcacggtggctggactcatcgattcactcatctaccactcagcacgagccattcagaagaaaattgatctagggaagacaaagtagtcacccctcagcgcttcctctgtctcctgtctctccccggcnnnnggttgtcccccagcctccaccaccctcca

SEQ ID NO: 12419 - DNA, 712 bp, Macaca Fascicularis
  misc_feature (1)...(712): n = A,T,C or G
ttaaggatgttcggcttttnnntttaatttaattttttaaaaacattttcctatgttaggagtgcaagaatagccagcatttcagattttgacatatgttcattttatgcatatttaagaaattatagctgcatatcccttctttcaaaaaatgttgcttttttttctaaaggaattttaatatgttcctttaaaagaaagcaatttaatcaattgcaaagcaattatataaaaccacaaagaatgtactgaacctactaaccctttaacatacattttagggtcctagcgcagagtccttgtttaaaggtcattgactcatcatctatcagtaatgagaggattggaagaataattttgcatacaaatgnnnnnnnnnnnnnnnnnnnnnnaatctctttaagttccttgaaaatggagttgggttttttttgtttctaaatgctatctgcttttaactagtagttgcctacatctggggacttcagagaagaattatattttgttagttatgtagacacagtggttatggaagcatttatttacagtacccttttcgtgtttggtttctgaacttaaaattgcccttatacttaataatatggtctgcatttaatatgaaaagtgttttcttgataaatctctatcgtactatttggatanntttgtgnnnnnnnnnnnnnnnnnnngtatttgtgggattggtttaggg

SEQ ID NO: 12420 - DNA, 707 bp, Macaca Fascicularis
  misc_feature (1)...(707): n = A,T,C or G
caaagcagtagaaatagcttggtnnnnctatggtgnnnntnnnnnnnnnnnnnnnngctaattgagcaatccatgtaggactacttttagaagaaacaaaaagtctgttttttaaagtaatgttttttcttatgagaaaaaggtttagatagaattgggttttattaatattaatttaatgctattagcaatttccttatactatattatggaaaagactgaagaatacaattctgagaaatataaaaaaattttaatggtacagtcatgttgaaagataaatgttgctaagtcctggtatgatggtgtcagcttccttggggaagtacttcttgagttacgtaactaatnnnnnnnnnnnnnnnnnnnnnnnnnnnnnnnnnngataatatagcaaaaaatgatagcagaagatcattaaaaacttaaaatatattttattagaaaacatttatctgaatgaatatttccttgatgctggtnnnnnnnnnnnnnnnnnnnnnnnnnnnnnnnnnnnnnnnngtggttcaataagtaaaatgattacagataatactgtattttccttatatggaaaacttgtacacccaatgactaaacctttcaaaataaaatattttctatnnnnnnnnnnnnnnnnnnnnnnnnnnnnnnnnnnnaatctaaaacttggatatgattcttatgtttttttaataggaaaactt

SEQ ID NO: 12421 - DNA, 703 bp, Macaca Fascicularis
  misc_feature (1)...(703): n = A,T,C or G
gtcctccacagaacaaaggctcaataaatatttgatgagttgatgttttgcctgtttcagaagttatctaagataagcgtaacatttgctttcctttgcagtttgcccagnnnnnnnnnnnnnnnnagacactgggaggagaaaagttccctctcattgagcagacatactaccccaaccacaaagagatggtaagtggctcagttgggatattagtctttctgctgttttcattttgcacttagccacctggtgactgtggggctctgacaaggacctcagcgtctcaaccccaaagactccactgggttgaactacagaacttgtgtggctggaatagctagattnnnnnnnnnnnnnnnttgtcaaattctggagatagaatagggaagaacaggagtaagggcagtttaatcaagctgagagaataacaaacttctggaccaacaatcagatctcactgcttttgagtcccagccctgactgtgccacttgttgttgaacaagctacatttcctcactgtgtgcagtttccaataagacggtcaannnnnnnnnnnnnnnnnnnnnnaggatactctaatagggtacatacacaatttaagtgagagccattaagtaatagcctctgggaaagtgtgaagcactctactagatgtagggcattgctcctactattattactcccctgactctcccattc

SEQ ID NO: 12422 - DNA, 762 bp, Macaca Fascicularis
  misc_feature (1)...(762): n = A,T,C or G
gacacactggagatgtcatgagccttnntcttgctcctgataccagactgtttgtctctggnnnnnnnnnnnnnnnnnnnnnnnnnnnggatgtnnnnnnnnnnnnnnnnnnnnnnnnnnnnnccggccacgagtctgacatcaatgccatttgcttctttccaaatggcaatgcatttgccactggctcagacgatgccacctgcaggctgtttgaccttcgtgccgaccaggagctcatgnnnnnnnnnnnnnnnnnnnnnnnnnnnnnnntcacctctgtctccttctccaagagtgggcgcctcctcctcnnnnnnnnnnnnnnntttaactgcaacgtctgggacgcgcnnnnnnnnnnnnnnnnnnnngtcttggctgggcatgacaaccgcgtcagctgcctgggcgtgactgatgatggcatggctgtggcgannnnnnnnnnngatagcttcctcaagatctggaactaacgccagtagcatgtggannnnnnnnnnnnnnnnnnnccattccaacttggacgcgttaccatgagagcatatcctatccaaccgtactaacgtggacaccctacacctcccctcagaacttcaaaagggcaagatcttttttccttcacttattgctgaaaccaagagcacaattcccagtaagagaaggatctctgtgctgtaaaactaaaacaaattgtgcattccttccggggccatcgtctttgttttcttttttgtcttgaatgaatttaaaaggaaa

SEQ ID NO: 12423 - DNA, 729 bp, Macaca Fascicularis
  misc_feature (1)...(729): n = A,T,C or G
agcaggagcannngnctgtgccatgccagtggannnacgtgannncagtgccctcggcccccagagaggacagtggcagcgtcccctccacgggacccagccagggcactcccatctcactgaagaggaagtcagcgggcagcatgtgcatcacccaattcatgaagaagcgcaggcacgacggccaggttggtgctgaggacatggacggcttccaggcagacacagaggaggaggaagaggaggagggcgagtgtatgatcgtggatgtcccggacgctgcggaggtccaagccccgtgtggagccacttccggagctgggggtggtgtgggggtggacaccagcaaggccgccctgcctgcgagcccactgggcgcgtcgtgagagcagtggtgacgtacgtagaacgcttagggtgtcctccccacggagcagatacttgaaccgactcgattcctgtgtaaagagcactttgtcctgcttcacggacctccccaaggtgtgcagagttctatataggatgctggattagttcctttgatatttgtaaaaattcccccaagagctgcgtatgaatctgccctttaataaannnnnnnnnnnnnnnntggcctatcgaggaagcctgcgggcacaggagcaggcgtggaatccagtacttgtaaatgaattgaagagccaggaccacccacctggccatnnnnnnnnnccccgtgtataaacgagg

SEQ ID NO: 12424 - DNA, 796 bp, Macaca Fascicularis
  misc_feature (1)...(796): n = A,T,C or G
tgcatttacagnnnnnnnngcatatatttggctggctggaaaggcaacccccagctatcagacgggctggtgtatgaggggttctgggaaggcccaaagaagtttgcagggggcagcgcagcacaaagcagcatctttcagtgctttgacgtcctgctgggcatccaacagaatgctggtggaggacatgctgctcagttcctccaggacatgagaacatatatgccaccagctcacaggaacttcctgtactcattagagtcaagtccctcagtccgtgagtttgtcctttcaaaaggtgatgctggcctgcgggaagcttatgatgcctgtgtgaaggctctggtctccctgaggagctaccatctgcaaatcgtgactaagtacgtcctgattcctgcaagccagcagccaaaggaaaacaagacctctgaagacccttcaaaactggatgccaaaggaactggaggcactgatttaatggaattcctaaagactgtgagaagtacaaccgagaaataccgtttgaaggaaggttaacgtaacccaacaagagcacattttatcatagcagagacatctgcatatattcctgtcattacccattgtaacagagccacaaactaatactatgcagtgctttgccaataatgcaatacaaaagacctcaaaatacctgtgcatttcttgtaggaaaacaacaaaaggtaattatgcgtaattatagtagaagttttataatctgtatcttaatgattaaatcaaataaataaaaatgcataagatataaatatct

SEQ ID NO: 12425 - DNA, 728 bp, Macaca Fascicularis
  misc_feature (1)...(728): n = A,T,C or G
tatgaaaactataaatggcgagtggtganctcctcctttcctcatagtcctcaggctttggttacttttgcatatgccatttgaagcctccaacttttaccagtttaacatccaaagttcacagcatcaccattcatggtgtaagaacagttttgcagtataacacgatctgataatcattcagttattcaattgtaaataattactgggatggtttcttggctttaagtctactgaataaaatctatgaaattgtactctgtgttaaccatccactaggatagaataccggaaactgtgcatgcaaaaatacgagatgggtccatttgtacacaattcgtagttannnnnnnnnnnatataaatatgttcacatgcactatgtgtatgaaaatagattgtctgtgttcagacgaaagtaaaacatttttttcaaattgttaaatttaaaggttttctgggagaaattnnnnnnnnnnnnnnnntgtctatttgacatcagaaatttccacttaaaccaaaataatgagaaactttattctgtatatttataaccttcattgagtatacttcccccttatttatacctctgcatttccttttgcgcttcacatctttctaaaatgcagcttggttttaaaataaaagaacattcattttgtgattctaaacaaccttcagtaaataccaccagtatggtactggtgaatttctcagcataaaatcgac

SEQ ID NO: 12426 - DNA, 1066 bp, Macaca Fascicularis
  misc_feature (1)...(1066): n = A,T,C or G
attataggcgtgagccaccgcgcctgaccaggatcctgtannntaaaggcccatactgtaaaggtcagcctacctaggaattctgccacatttacacacgcccctggccaaagtaatttttttttttccatgtagaacaaattatgggcagaaaataaagttggttttagaagtactgtttgtggctggagaactgtaaaaatcttttaaagggataagggaattagtggctattaatataaccactacttcagcccctgaaacacaaaatcactgttacacggaaaactggttatcaggccagatttatattcatctctgtctagagcacttcatgtctatatgtgttgcttatgttgtctccaaagtctctcatctcttttaaaaatcactgcaaataaagcaatactgaagacttgagagaatgcaccttaggggaaggggctgtttcaagacagaaggcaggaaatacctgccttttgagtaagatcctgcnnnnnnnnnnnnnnnatnnnnnnnnnnnnnnngattagaaatacacatcctcctgctgaccttctgccttgaatagctatcttaaaagctgaagtttgaactgacagcatctgcttgacaggtgccagtttcctctcggcagggggaagatgactctatgtatcttccgttgcctcagattcctgtggccccaagaatcccaccaatcctcattcccccaaacatgctaacaaaaatcccttattgtgggtattaaaataacagttacactgtatgcgtatttatgtgctccttttgtctggtttatttttcttttcatcatgtataagctgaatccagcattagttgctcacatcttccccaagtgtctccaacagaatttttatgtcccagcttgttttaaatagaagtgaaatattaaggaaaatagatttaagggaacttgtgcaacttttttacacattgttctcaaccatttaatttattgaaaggagatgctgcgacagttttgatttagcagcaattattctcgtttacatagttatgattttatttgttgttttgctctgta

SEQ ID NO: 12427 - DNA, 750 bp, Macaca Fascicularis
  misc_feature (1)...(750): n = A,T,C or G
accagtagcttaactttttnnagnanntttaggtnnnctgaaaggagtttagagacccttattgaaaatatgatttaaaaatccaaagcataaaccataagaaaaattttaaataaacatctttaaagctacatcttccatactgatacatgcattgcatatgttgacattaagtacattttataatgaagaaaaataatcatagttaaaaattgaaagacctaattactaccttacatgagcctattgaattttggggaacgtgttcgtaaacccagactagctttgttgaatagaagttgannnnnnnnnnnnnnnnnntgggtagatcaaatgacttagagactgaattatcctatcagtggttatgtggggttggagannnnnnnnnnnnnnnntcactgttgcttctaggctcccttactttgtaggaatatggtatactttcaggaatattctatatatgtttcataagtacagacaacttagggaggaaaaaaacatgggtaattgaagcttgtggtttaataattccctaacagcacagctatgaatattttgctggggtacactggaggtaggaagactactggaaatttttgcacttgaattttgtttttaaagctgttttctttaaagaatggtagaaacagattatccattccaaagtgtcttttcnnnnnnnnnnnnnnnnnnnnnnatgtcaatatctcttatgatggtgaaaaaaaggaattaatcgatgcaaat

SEQ ID NO: 12428 - DNA, 745 bp, Macaca Fascicularis
  misc_feature (1)...(745): n = A,T,C or G
ttnnnnnnnnnnnnnnnnnctgcatcagagcgctagccgagcacaagaagaagaatacctgttcattcttcagaagaacccagatctctttcagagaggccttcaacttatggcagatcaacctccatgagctcatcctgcgtgtgaaggggttgaagctggctgaccgggtcttggccctaatatgctggctgttccctgctccactctgattggaattgctctccctgccccattctgatgtctttccactcctcagcccctcatcctgcctccacccagctgctccatttttgccacatggtggcctgcagccccagagtcactgtccatgtcaccatcctcctcctcttttggaatcctctctgcatactgtggcccttatctcagggcccacaggctgaactgtggcatagctctctcttcttctccaagaagactcagcagcctacattcccactcctggtatgtgccattgggttggatgtccccactacttccattaacccttcccattgccaagacgtgccacgggtgccactgggggcacactgaacttgtagggagtttgattttgttggaggtgaacatggtctctgaacttgacagagaacagcttccctttcctagccatgtcaccctccaaaggaagtcacacctcagcgaggtggtttggcatctggggccgactccattgcagccatgagctcactgctgtcagtgacctttggtgttttctgtactg

SEQ ID NO: 12429 - DNA, 700 bp, Macaca Fascicularis
ccaatacttagcagttggggattaaaccatccttgccctcagttctctccaatattaccaggcccaactcagtcttcagtgattttaaaaagcattgacatccagaaacagtaatgggggaaaatatttgggaccaagctgaagcactgatcccactaagttaaatactttccagtctaaggcaggcctgaatcaactgtctttaaataaaattttaagtgatgctgtattatatataggaaaaaatgcttaaaatcctgtcatttagaaacagtgaaaagtgtcttttgagattaaactgactctttaccatagggaaaaatattactgtgtgtttacagattcattcctgtggtcaggccatttttaagggaagagttatttaatataaatagtccctgattttaaattctgtttaatgatgtccattccccttccaagaacaaagtggtgaatttcggttaggctggtctccctcttaaaattggcagtgctgttccttgtgctgcccctgtcttttcctgatttttttttttttaaacacacgttgaaacatttcatctattatctctgcctcatttctggggggttgtgtatcagttctctaacacttgttcctgagaactaaaggtctttttttattcttatttcctctctcataaacatttggtgaccttttaccaagtggtgagttagattt

SEQ ID NO: 12430 - DNA, 772 bp, Macaca Fascicularis
  misc_feature (1)...(772): n = A,T,C or G
tgcagacagannnngatgtnnnntggagtggggttgtgggtggtggggggactgcctgactcccagagggacttgaaactgaagcaagaaggttgcattctccatcaagggaattaacttacctgaactaagtagaaatgccagtcttccactgccccctccctgccatcttttcttcttctactttggggagttgatggccaggaaaaaaggnnnnnnnnnnnnnnnnnnnnnnnnnnnnttgcccaccagggggctggtgcnnnnnnnnnnnnnnnnnncacagttgagtcannnnnnnnnnnnnnnnnnnnnnttggaacttttctgtctccgtgtgatccactagcccacaggatcatttggaaccttgaatagctctgcttggacaatggggttggggaatagggttgtctttcctatgaaaatgccatctgtagaccttgtgagtnnnnnnnnnnnnnnnnnnnnnnnnnnntcctctgcttgacatcttccctnnnnnnnnnnnnnnnnnnnnnnnnnnnnnnnnnnnnnnnctgtgtatgtgaaagtcattttacatttcaaagcagtgtgtgtttcatatttttatatttttaactctttattcttggatgtataaagtgaactttttggcttctgtaagtatgctctatgcacctactaatgttttatcatgtatttatatgttgtacacagtactggctgattctgtaaatggatgtattgtacagagaacatgaacgtctcttcctaattttacatcttc

SEQ ID NO: 12431 - DNA, 719 bp, Macaca Fascicularis
  misc_feature (1)...(719): n = A,T,C or G
tcctatagacatagctgactgcccagaggacaagcatgaggcnnnnatggaatgctccatccggagcctgcttgccttgtccctcccttcacccagggctggagcagtgcctactccatagagtcagtgatcatgcagatcagtgccacactggtgaaggggaaagcacgagtgcagtttggagccaacaaatctcaatacagtctgacaagagcacagcagtcctacaagtccttggtgcagatccacgaaaaaaacggctggtacacacccccaaaggaagacggctaaccctggagtatcacccttcctccctccccaggcaccactggaccaattacctttgaatgctgtatttggatctcacgctgcctctgtggttccctccctcatttttcctggacgtgatagctctgcctattgcaggacaatgatggctattctaaacgctaaggaaaaaaaaaacaaacacagaactgtttcaagtactcaagactgacttacagaccaaccaaccaccttgctggaacccttgctagcaggcattcttataaaagaaactttcgagcctccttatattgctggaaactcagctgtgctccagactagagcctccttacctatgctatggatttttaatttattttctcttatttcatgtacactgcttttttttggttacagtgtatgatggatgtgtatgaaaaaannngtatctt

SEQ ID NO: 12432 - DNA, 696 bp, Macaca Fascicularis
  misc_feature (1)...(696): n = A,T,C or G
catnnnnnaggacgnnnnngcgcgctggcgtgacggnnncccggaggaagcggagcnnncggggagctggggaccgcagcggggctgcagtcacatcctgtgcgggtgagcggcgggccaggcccggcagttgtttcgacacgcgccgagcttcgcagctcttccaggggctccgctgcccgagctagcccgggcccagttctggggcgaaaatgccagcccttcnnnnnnnnnnnnnnnnnnngaaggaaaaactgaaaatggaagttgagcagcttcgcaaagaagtgaagttgcagagacaacaagtgtctaaatgttctgaagaaataaagaactatattgaagaacgttctggagaggatcctctagtaaagggaattccagaagacaagaatccctttaaagaaaaaggcagctgcgttgtttcataaataacttgggagaaactgcatcctaagtggaagaactagtttgttttagttttcccagaaaaaaccaacatgctttttaaggaaggaagaatgaaattaaaaggagactttcttaagcaccatatagatagggttatgtagaaaagcatatgtgctactcatctttgcnnnnnnnnnnnncttttttaagagggcagagagtatcaaaggttcaattatggaaatatgagcattacttgagcatgacacttctttcagtata

SEQ ID NO: 12433 - DNA, 737 bp, Macaca Fascicularis
  misc_feature (1)...(737): n = A,T,C or G
ggacggtgggnntnnnnnacganngcctcgtgccnnncnnnnnnnnnnngannnnnnnnnnnnnnnnnnnnnnnnnnnnnnnctccagattgccgatccnnnnnnnnnnnnnnnnnnnnnnnnnnnccgagctgcctgtggaggaggcggnnnnnnnnnnnnnnnagaagctgagacaggcattccaaggggactccatcccagttttcgacctgctaatcctgggggtgggccctgatggccacacctgctcactcttcccagaccaccccctnnnnnnnnnnnnnnnnnnnnnnnnnnnnnncatcagtgactccccgaagccaccgccacagcgtgtgaccctcacgctacctgtcctgnnnnnnnnnnnnnnnnnnnnnnnnnnnnnnnnnnnnnnnnnnnnnnnnnnnnnnnnnnnnnnnnnnntggaggaccnnnnnnnnnnnnnnnnnnnnnncgccctggtccannnnnnnnnnnnnnnnnnnnnnnnnnnnnnnnnnnnnnnagccgcccgactcctgaccgtacccttcgagaagcattccactttgtagctggccagagggnnnnnnnnnnnnnnnccaggcacacggccccaggggctgggcccctnnnnnnnnnnnnnnnnnnnnnnnnnnnnnnnnnnnnnnnnnnnnnnnnnnnnnnnnnnnnnnnnnnnnnnnnnnnnnnnnnnccctgcccggggctcaacacacaggctgtggctctgg

SEQ ID NO: 12434 - DNA, 725 bp, Macaca Fascicularis
  misc_feature (1)...(725): n = A,T,C or G
atagggctnnnnnnnnnnnnnnnnnnnncagctatagcnnnnntcctggtcttggtgtctgcctgtatccttcgatttggcaccaggtctctctgcaactccatcatctccctgaacactacaattagctgttctgaagcccagaaaattccatggagaccccctggaactgctctgcagttttactccaacctacacaatgccgaagtgagacccaaggatagaaggaaagattcacataagtatctgtagctgtgtgggtgctcaccagtgtatcctgagcttggctcaccagtgagaggagctgaggggnnnnnnnnnnnnnnnnnnagcagttaagagtggtgtgtgggtgggaaggactggatttgaaatggtcccattcctgacactcctgtccctgtctcccacagacctcttcttgggtgaatttggtattgtggtgtgtggtcttggtgctccaggtcgtgcagtggaagtctgaagccaccccacaccggcctctggagaggggtgaccctgagtggagctctgagacagatgctctctttgggccacgcctttcccattcctgaagaataaccagagtgcttcctgcagccaaagactccannnnnnnnnnnnnnnnntcctcttgcccccacaaggccctgtttatgttgggagtcttagttttcctttcaggggggaaacgtaatgacaggcccccctcctcctcttcctac

SEQ ID NO: 12435 - DNA, 730 bp, Macaca Fascicularis
  misc_feature (1)...(730): n = A,T,C or G
acatggaacannnaatnnnnngtctccctgtagccagagacacctcagtgtgggggcccccggtgttgtcacaatcacgcatcacaagtcgcctgcagccgcccgaagagccaagagtcagtattccggccagcttcacgaagtcagagaggttcagcgaattgttaggagacttctctcagaattcagaaagcggagaaagcaagcgtacaaaaatatggatgtaaatggaagtacagttaaatccacgcttgtagcaaagactaggcccaactccatggataataagaaaatagctctgggtgttttgaaactcaggaagtgtcggacataacgcagattccccccattttctgccgtgcttcactttttctctcctctcctccttcccttcatagacacactccacggggggtgttgggtagtgaaaagaatactgtccttgaagtcagaagactgttgtttaagagcatctcttttaacagctccaaacctctgtttctatacctgtaaaatggaaataaaacaggctttgccagccttctctggggaaataagaggatcatttgtgataatgaaaactctttaattgtgccttataaaagtgacatgaggttccgtttaaattttgcttttgatgcactgggaagtcatcagtttgggggtcccacatccttagtatccctgtcatcctctgcagctgttatagagaacagactctcaaataaat

SEQ ID NO: 12436 - DNA, 662 bp, Macaca Fascicularis
  misc_feature (1)...(662): n = A,T,C or G
gaaaaannnnnnnnnnnnnnnnnnnnnnnnnnnnnnnnnnnnnnnnnnnnnnnnnnnnnnnnnnnnaatggagcagcaagaaatggcacagcaggagcgaaagcaacagcaagagctgcacctggccctgaagcaagaacgtcgggctcaggcccagcagggccatcggccatacttcctgaagaaatnnnnnnnnnnnnnnntggcactagctgagaagttcaaggagctgaaacgcagcaagaaattggagaacttcttgagtcgaaagaggcgacgaaaagcaggcaaggacaggnnnnnnnnnnntttgagcaaagagtaagaaggaactatcctctgctctgccactgccccagggagacatgaatctgtgaggtacagatttggccgtggtctggtttccattcaagggcagggatcatagctgcccttgaatctcattgcctcagagaagagtagagggctcttggactatccctagggctannnnnnnnnnnnnnnncagccttctgtcatgccacacagcctcagcttggatctggttcattgtgtccttgtgttcttttctcatccttgccttaaaccagggattnnnnnnnnnnnnnnnnggggtcagtgaagaccatggagtcagttcatgactcccagggctgggacat

SEQ ID NO: 12437 - DNA, 743 bp, Macaca Fascicularis
  misc_feature (1)...(743): n = A,T,C or G
cggtatgtacttttcccntaaatgctggggatttaaagaattgcactaattcatagaactctttacattgtagtgaccaatgcacatataatttaaatcttgtattctatgtgaaagtttatgtggaggattatcttctggtgttgtgtccatcataagatgtaaaaagagaaatcatagttttatattttagtttctcctacaatggggtatgttaaataactatatctatacttagatacagtgtattatctgtgtcccttaaagtgttacaaagagtttctctcaaaaggtccttaaggagagtgagagatgagagaggtgccttctctgtattagactcacacacatcagtcaagttgacgaattggtttaaacttttaaatgagaacagaaattataattagtacctgaccaattgtgcctagatattaaagtatgttctctttagtactttccgttcaattaaatgtcagtatattagagatttttttctacaggtatatattttgttaaagagtcactttcctcaaccatttttttgtactgggccttaaaaaaaatccatccaaccttaacacaacatttctcagtgtagaaatcatgtcttcttaattgctgaaccttactgcaaaaacttgtaatgtaagaaattttttgatgtggcagtggtctattcctgaggaactaaatatcatatagttaatgtttatttaactcagcttgagattgtactacagtta

SEQ ID NO: 12438 - DNA, 741 bp, Macaca Fascicularis
  misc_feature (1)...(741): n = A,T,C or G
caggtgccatggccataccagtgagatgcaannnnnnnnnnnnnnnnnnngcactatagcctgcagcccccgtctcccagcccccggtggactgcagtgatgggtgttttgggagaacaaagacagccaggctgagggccggggccgcagtgcccctcccactgacccagcctcagagttgatcccacggcaacaggcgtccaccccagcacctgggcacctgggagggagctgccatccaggctccattacnngttnnngaaggcgggtgccaggctggctaggtgccaaggagcaggctccagatcaaggtcctggcccagccacagccatggcaagggcttagcctggcaggctttgtgggggatgctgccctctctgctgcaggctgggtgcacagccgggcaccgcagtgggactcaggcccgggaaggtcatnnnnnnnnnnnnnnnnnnnnncccagcccaggtgcctcattcggaggcctcttgactgggaccacagaggtgtttctctgctctgacttgtggctcaggactccttcctgggtcatgctcctgccccactgtgcctgggcccgtcaacagcaggagccttttgtttggggccccctggggtgagactgcccctgactcgcccatcccagcagacccacctccccgcctgctgccttccctggagggaaacgggccaggggccatcacctcccctccgcctcctgctttgctgtgccgagcgcg

SEQ ID NO: 12439 - DNA, 761 bp, Macaca Fascicularis
  misc_feature (1)...(761): n = A,T,C or G
gagctgctcggctnnntgcaggttttccctggcttgctggaaagagtgattgatcttttacgggtgattcatgtaactggaaaggaaaccacaaacatcttcagtaattgtggttgtgtgagagcagaaggtgatatctccaatgtggccgaggggtttaagtctcatcttattcgtctgattggaaatctgtgttacaagaataaagataaccaagacaaggtaaatgannnnnnnngtatcccgttgatcctggacaactgcaacatcagtgacagtaacccctttctgacccagtgggtgatatacgccatccgaaaccttactgaagacaacagccaaaaccaagatttgattgcaaagatggaggaacaggggctggcagatgcatccctacttaaaaaagtgggttttgaagttgaaaagaagggcgaaaagctgatcctgaaatctactagagatacccctaagccatgaatgaactgcatccaaatacctgaatatttggaatatgtttcatggatttttcatcttctgcagtatgtgaaatnnnnnnnnnnnnnnnnnnnnnnagtacaaattcgggaacttaggaattttttaggtggtggagtttaatgtgtataagctagaagtggaagtaactgagcgttctcttgtttctttgcattattgtaactttgtggtttgcctttgtccccctggnnnnnnnngtnnnataaagaatatattgtacttactgtgacagcagataataaacc

SEQ ID NO: 12440 - DNA, 751 bp, Macaca Fascicularis
  misc_feature (1)...(751): n = A,T,C or G
acgactggaaaaatgtacagcctccacttccannnnnnnnnnnnnnnnnnncnnnnnnnnnnnnnnnggtggaaaccaactnnnnnnnnnnnnnnnnggatcatcaacaagtgagaaaannnnnnnnnnnnnnnnngtgggagctataannnnnnnnnnnnnnaaggtggaaatactgcatcctggaaggtgtttggcctagcacaatnnnnnnnnnnnnnnnnnnnattaacagatttaccatccagaagaaccagctcctacaaatgagaattcttgtnnnnnnnnnnnnnnnnnnnnnnnnnnnntactgacaaaaattattttatgttagtttgagatcattattctcccctgactctcctgtttnnnnnnnnnnnnnnnnnnnnnnnnnnntgaggccctgtagcatacccctaggtaccaacttctacagcagtctggtaaattctccnnnnnnnnnnnnnnnnnnnnnatgtgacttctgagacccttatgtagcctgtgacattaaacattctcacaattagaaataagaataaaacccataattttcttcaatgagttaataaacagaaatctccagaacctctaaaacacattcttgaagcccaactttcatgtcttcattcaacaaataatttctgagtgtacacacaggatgtcaagtactgacnnnnnnnnnnagaactcggcagataataaaacagacaaaagcctttgccttcatgaagcannnattcattcaggg

SEQ ID NO: 12441 - DNA, 714 bp, Macaca Fascicularis
  misc_feature (1)...(714): n = A,T,C or G
ttgggagctgagcaaacaggagctgatagggacagaggacaccacttccaccagccaaagcctaggagctgctgacctggtcagctgtcaccccagccaggcagaggggcaaaacctgggggtccctggcagctgcgagattggaaaggttcctcagcactccatctgccccaggcattnnnnnnnnnnnngtgggctcagaactggcaggcggtgcaagctctgcttcgctgggccacactgagggctggggccagctccctggatgggggtggagtctaccagcagcctcgggacagcatgtgtcctttttaggaaatgtccttagaggaagtgtccatgtgtggcgctggtcagcagctagccccgcttccaggacactagtcagagttaccgatggggccggggggctcctgcttggaaacccctccannnnnnnnnnnnnnnnnnnnnnnnnnnnnnnnnnnnnnnnntgctggctccctcattcctgcccaggggctgtggcttacagccagcaccctgtacctgggactcagtccttatcccccctctgctatctgtgctgggagaggggcttcggagggaaacagatatgagnnnnnnnnnnnnnnnnnggcctggtggcagggccatgggaggttggaatgcacccacgtccttaaagccatcagtagctacagtgggtgcccacctgcatgcgaaggggaggca

SEQ ID NO: 12442 - DNA, 758 bp, Macaca Fascicularis
  misc_feature (1)...(758): n = A,T,C or G
agcaaactttgtaggaagccactcttctcccttaaacttctgccaaacaataataaagtcaactggaaactaattggagccgttttaactggggcctgacatgctttaaattatctggctctattctaaatcaacacctaaacccccaaggaaactgcagaatcaatatacagggtaatagctttggttcagagctccaataatgtgcttcagatctgtccatgnnnnnnnnnnnnnnnccaaattttttaatnnnnnnnnnnnnnnnnnnnnnnaaaacaggtttgtatgtagcacctttcatgcaaggcatgctaaaagcctatttnnnnnnnnnnnnnnnnnnnagaattgtagccacctcccaatgaagtactacagcctgtgctgtcttaatggtttatgtcaggaaatgaaaaagatactgtaccaaatctggaattacaatggggagtaataatgtatgctaaatgacttttgtattttaagttactttttgtgagtggtgaatttttgtgtttttcttttcagctacacttagtcctgagatgtattttttctttaagtcttgaatgaatacaaaaggagcccattttataatataaaccttgatgtacatgttgagatatttggacaatgaannnnnnnnnnaaggaatgcatatggataaagttgcacttataacacccttcaacaaaatctgattttaaattgtctttttcttttctattaagggttttctttttcagtgtctacca

SEQ ID NO: 12443 - DNA, 699 bp, Macaca Fascicularis
  misc_feature (1)...(699): n = A,T,C or G
tcccgggatgacttcctcggcagcttctgtcgctaccacctcacagaacccgggctggctagcaggcacctgctgagccccgtggtgcggaggcaggtggctggctacacccgtggccccaggctcagcctgcgcttcctgggcagttaccggacgctggtnnnnnnnnnnnnnnnnnnnnnnnnnnnnnnnnnnnnnnnnnnnnnncccctcccatgcacgctgctgctcaccctgggctatgtcctctacgcctctgccatgaccctgctgaccgagcgggggaagctgcaccagccctgagggtgtcagctgccttcagagcaggctggggggatttgccacacagccccaccttgggcctgagaggacctgggaagcccctccaggagggaccacggtcatcctcgggcttctggagcagggttcctgcagccgcagaggcatctggaggaaacgcaaccaagaagggaaggcaggggaggccgagacgggcggatcacgaggtcagnnnnnnnnnnnnnnnnnnnnnnnnnnnnnnnnnnnnnnnnnnnnnnnnnnnnnnnnnnnnnnnnnnnnnnnnnnnnnnnnnnnnnnnnnnnnnnnnnnnnnnnnnnnnnnnnnnnnnnnnnnnnnnnnggaggagaatggcgggaacccgggaggcggagcttgcagtgagctgnnnnccggccacag

SEQ ID NO: 12444 - DNA, 623 bp, Macaca Fascicularis
  misc_feature (1)...(623): n = A,T,C or G
taacagagacatnnntgaggttggacntncttgcttttctgtacttccaaatcacaatttcttacaaccaagctttgtactcccgagtaagcagggatgtgctaggggaatgtaaaactgcaaacttaaaaacctgcatcttcttgaagcatcagttttacttaccaaatggtttggagtcaggagatgacctatttttatataaaagttatattatagaataaaatgttcatacacatagactgttaagataaaaaataggaatcttaaaaggtaattatttgcaagtgggttatatgttcactctcctctgcctttatggtattttggtgttcaatcccctcncnncccatacacacacatacactcacagcctctctggcctcttcccttggggaggggccacctgtagtatttgccttggtttggtggggtacagtggatgtgaatactgtaaatagcttgtgctcagactcctctgcgtggagagggtgggtgcaggaggcagaccctccccgcaaagccccctggggagatcttcctctctctatttaactataactgagggggatcccnnngtctggggatgggggacaccttgggccacaggatactggttgctt

SEQ ID NO: 12445 - DNA, 315 bp, Macaca Fascicularis
tttttccccaaacccggacccggaggggtaagggggtaggacccctgcccggaactcccttccggttcacccatcacggggtgttggttcccaacttggaaggggtaaaacttaagtgggtccggtccattcgggctttcactatttcctttaaaaggaggatgtttattttcagggccttcagcatattggtatagtggcttgcctgatataaatgcaatattaatgcctttaaagtaggaatttatgccaaagatcacttgttgttttactaaagatttacttagaggaaataagaaaaatcatgtttgctct

SEQ ID NO: 12446 - DNA, 788 bp, Macaca Fascicularis
  misc_feature (1)...(788): n = A,T,C or G
ctggcagcgccgggcggagcgcgactgccgagtgagcagcttccgagtcaaggagaacttcgacaaggctcgcttctccgggacctggtacgccatggccaagaaggaccccgagggcctctttctgcaggannnnnnnnnnnnnnnnnnnnnnnnnnacgagaccggccagatgagcgccacggccaagggccgagtccgtcttttgaataactgggacgtgtgcgcagacatggtgggcaccttcacagacaccgaggaccctgccaagttcaagatgaagtactggggcgtagcctcctttctccagaaaggaaatgatgaccactggatcatcgacacggactacgacacgtatgccgtgnnnnnnnnnnnnnnnntcctgaaccttgacggcacctgtgctgacagctactccttcgtgttttcccgggaccccaacggcctgcccccagaagcgcaaaggattgtaaggcagcggcaggaggagctgtgcctggccaggcagtacagnnnnnnnnnnnnnnnnnnttactgtgatggcagatcagaaagaaaccttttgtagcaagatcaataatctagtttcatctgagaacttctgattatttctcagtcttcaactctatttatcttaggagtttaatttgcccttctcttcccatcttccgtcatttcccagaaaaccttcattacacataaggatacacgtgggggtcagtgaatctgcttgcaggtaaatgtctttcctgaaagtttctgaggcttaagattccagactctgatca

SEQ ID NO: 12447 - DNA, 806 bp, Macaca Fascicularis
  misc_feature (1)...(806): n = A,T,C or G
agagannnnnnnnnnnnnnnnnnatgntttcctgtaattatgatgtgaagtacctcatgaagagctgcaaannntcaaaggtnnnnnnnnnnnnnnnnnnnnnnnnnnnnnnnnnnnnnnnnnaggaccacaacatcaggcaggatctgattcattgctnnnnnnnnnnnnntttttcaaaatgagagaaatgttctttgaannnnnnnnnnnnnnnnnnnnnnnntgtggtcatttgtatggccttgnnnnnnnnnnnnnnnnnnnnnnnnnnnnnnnnnnnnnnnnnnnnnaagaggaagccaacaagcagtcatgacatgaaatagtctttttattttattttgagctacacacatgcttgtatataggttttatctctggttgaatcccttgaacaatagacagtacctttccccccccctttcatggcccattttattgtctacctttcactactaagtatgaccgttcctatctcagatcttaataaaaaacaaaacaaaaaaccaaaacaaaaactcattcaggttaaatttggccttaatttaatatacttgttagcaagcgtgtgtgacagagagtggggaaagctacatcactgaatattttgataaactttacctacttgagtttggtttatttttcccttttcctaaattgactagcactgactgtaatttatttccctgtttcatgtctctctcttccattctgcaggagttttagctatttgagattgtggaccatcagttttgcactttagagagcgtttctgactcaaaacctctgttttatcaaaaatt

SEQ ID NO: 12448 - DNA, 791 bp, Macaca Fascicularis
  misc_feature (1)...(791): n = A,T,C or G
aggcagcaggagnnnnnnnnnnnnnnnnnnnnnnnnnnnnnnnnnnnnnnnnnnnnnnctggtgtaaatacagtgagaatttgctggtgacaggtgcggttgactgtagtttgagaggctgggacttaaggaatgtacgacaaccagtgtttgaacttcttggtcatacctatgctattaggagggtgaaattttcgccgtttcatgcttctgtgctggcctcttgctcgtatgattttactgtaagattctggaacnnnnnnnnnnnnnnnnnnctccnnnnnnnnnnggagcatcatacagagtttacttgtggtttagacttcagtcttcagagccccactcaggtggctgactgttcttgggatgaaacaataaagatctatgaccctgcttgtcttactattcctgcttgagatacactactctggtcagaaacagaggatnnnnnnnnnnnnnnnnnntaacagcaaataaattaactatggaaaacatagacattatgcttttatatgctattcagatttcaactctttccagtttatcagttttgagggnnnnnnnnnnnnnnnnnnnnnnnnnnnnnagcctgacacataagccatatttcttaaaattctaagaaataattaatattatggtgtatcttataatatctattaaaatgtagtctctgggtcataaaatggattaaaatatgggatctcagtaggttatacttgtatagatagtgatatatttcatttttaatttgtcatttttgatgtaaaatacaatcactgttgtgataa

SEQ ID NO: 12449 - DNA, 744 bp, Macaca Fascicularis
  misc_feature (1)...(744): n = A,T,C or G
gacaagaactctnggaatcctnnnnnnnnnnnnnnncctctcttcgtggtttgtcctccctcttttattctcgtgtgatgatgagacataatgaagggtcgtctacaatggacannnnnnnnnnnnnnnnnnnnnnnnnnnnnnnnnnnnnnnntccggagtaggtcagtgtccccgccagcagatgaggctgggtctttcctcatttctgcttctgggatgacatcagcaggagagttgaagatctgagaattctaaaggaaatgttctctgatgggaggagagagggaacttatttcccttcaaagtagtttgcttcttaagaccactccttcctnnnnnnnnnnnnnnnnnnaatgtctttaaccagacatcatctcagaaggcagggcggctgcttccttannnnnnnnnnnnnnnnnnnnnnnnnnnnnnnnnnnnnnntataaactcacagaaggcgagaacccctttttttagactttccaaatgcatcttgcaaagagagagatagctgatagggactgacaagcacactgtttggataagaagcaattagccttttatatctgtgctctatacattttctatgtgcagcatctttcctaacttgttgtggttcccgggtggcaggtgcacagctgggagggactgccggctgtttcgtacaacgttcttgccaattcccttgaggagaaaattcttcacatggcttctgcatgtacagtattgggcagcaaaaca

SEQ ID NO: 12450 - DNA, 788 bp, Macaca Fascicularis
  misc_feature (1)...(788): n = A,T,C or G
accagtgcngggagccccgaatgatnnntngtgcaggaaacaagnnnnnnnnggtaaaggctgcagtgcagaaggcaatccctatgtacaaaattgccaccaaaaatgatgttgatgtccaaattgaccaggagtcctacctgcctgaagacatagctggtggagttgagatctataatggggatcgtaaaataaaggtttccaacaccctggaaagccggctggatctcatagcccagcagatgatgccagaggtccggggagccttgtttggtgcaaatgccaacaggaagtttttggactaagccttcaggaggtggagctcatcctcagctctcccgctgtgatgtagaagcttctgatatttgaagaaacacgaatgtctctgtagcttcctctttactgccccagtattgctctgtatttatcagtgatgcccctcctgtcactcatgccttgcctaattgttcacagtggtggaaagcttcatgtaatatgatcaggacccacctccagttcatctgaaagtaacacagtgtccagctggttctccagcactaggggagggggcggatggtggtcgcgtgggcttcctgggtctccactctccgtctggcctagaggtgatgtttggtgtttggccctgcagtccccactcttgaggcttattaaggtgcnnnnnnnnnnnnnnnccttccagcagtagtcgcttgactgttacctgtttaggcctagaagttttccctnnnnnnnnnnnnnnnnttaaaatctaagccacgaatatgctt

SEQ ID NO: 12451 - DNA, 715 bp, Macaca Fascicularis
  misc_feature (1)...(715): n = A,T,C or G
gcaggaaaggcnnnnnntatannnnncagcagttggnnnnnnnnnnnnnnnaagaacctcactacccattgcccattctgactctcctacctttcttttactctcctgttcctttgcacatgatttgggcctgggtgggatgactaatagttattctgtgggaccctaggtgaattccaaggacctttgtggtgggcatgaacaagatactccatcccacatttcctctcataaacnnnnnnnnnnnntttagccactctgtgggaagacagaaatatgcccctcatccttctggatttttctgctgattctcttctcccctctcccccaagaaaccaaatccccaacttttnnnnnnnnnnnnnnnnnnnnnnnnnnnnnnnnnatgctccctttctttctctgcctgtcatctaggatggaggaaccaggggacgccgctgtgccattgaagcagatatgaagatgaaaaagtgaagcctcagagtaccctctttgagctgaacctaaaataaaagtaaacaagatagagcttgggcttgtgnnnnnnnnnnnnnnngcggaagttacagaagaggaggtacctgggccacacaacnnnnnnnnnnnnnnnnnnnnnnnnnnnnnnnnnnnnnnnnnnnnnnngttttagggcagnnnnnnnnnnnnnnnnnnnnnnnnnnnnntgtagctagcagattatagctagtttgta

SEQ ID NO: 12452 - DNA, 744 bp, Macaca Fascicularis
  misc_feature (1)...(744): n = A,T,C or G
cagctgtaaaggccgttaactgnnnnnctgacngggnnnnnnannnncaccacttgnnntaagagctgctctgactatagggcccccctatttgttgtcctaactcagaagcatctctgggctgccagggtggtggannnnnnnnnnnnnnnnnnnnnnnaaggaggaagnnnnnnnnnnccgctggagtctcctaaggggcagcagttcaaannnnnnnnnnnnnnnnnnnnnnnnnngctgacatgggtgtttatggtgagttcaggcctgaggacaggggtgtctgcaaaaccacatggcccttgagaaatgtccttgcacattgggcttcaaactcctctnnnnnnnnnnnnnnnnnnnnnnnnnncagaggtacacagcagccccaaagccaaagtgttttcagatnnnnnnnnnnnnnnnggaaggctggggtgagggggcattttacctgcacagaggcagaccctgcctcccctcatcactgaccccaactccaaagtagaccnnnnnnnnntcattccctgttctggaaggtgctgggctgggccacagccagggttatgtaggtaattaacctgtccaaccctgagcctcgcctccctataccagcgacactggtctgtctgtggtgaccgttcacagcataacattctgcttagcctcaaactgaaagcattgcaannnnnnnnnnnnnnnnnnnngatcttacagggagagagagtgggtgcaatttgcctc

SEQ ID NO: 12453 - DNA, 735 bp, Macaca Fascicularis
  misc_feature (1)...(735): n = A,T,C or G
aaggggaaatgtaaaacagnnaagacttgaaattgaaaactcttttaatatttaaaatgacttgtttattcaatgtctaaacacacgtcagttttccactggatttttattttcacaggtaaatacactagagtgctagatgcctttttcccctctcagtttgactttcatttaaatccttcattctgatatcattactgttaggtgaggtggataactgtaatgagaatctcttattcttcctattccgttgatgaccaaagaggtaaagtgaagtcctccttaaaattaaaatgcagcctccaaacaaatttctcaagattccttttcctttccttctatccatttattgcccataatttccaagaaaaggtgggtatagaaacacatgagaaaatgtgatagtgaagtcatatttacaaaaatgagaacatgtccaaaatggattcttgtctcctcttcagaattagctgtttaaaatattttctgtgaattcaaattgtaatttttatttgcagttttaccagtcttcatgtagagtgacgaaactatgtagaaactaaatcatcgctttagtgagaaaggataaaaaggtgtggaaatgactataaaatgcatataaatatgacatttaatttgtttataaaaataagacttaataaatatagagtaattcattttgaataggaggctattgttttttatattgtgtaataactcatactctgaagagag

SEQ ID NO: 12454 - DNA, 732 bp, Macaca Fascicularis
  misc_feature (1)...(732): n = A,T,C or G
gagcgaggtgatannnnnnnnnnnnnnnnnnnnctatggaatgcgncnnnttttcttcttgtatgggatcattctgttggcagaaggcttnnnnnnnnnaagtgcnnnnnnnnnnnnnnnnnnnnnnnnnnnnnnnnnnnnnnnnnnnnnnnnnnnnngtggaatgttcgttttcctcacctatgtgctcggagtggcctggctgggcgtgtttggtttcnnnnnnnnnnnnnnnnttatgttctacaatatatggtcaacttgtgaagtcatcaagtcaccacagaccaacgggaccacgggtgtggagcagatctgtgtggatatccgacaatacggtatcattccttggaatgctttnnnnnnnnnnnnnnnnnnnnnnnnnnnnnnnnncatnnnnnnnnnnnnnnnnnnctacatgtcctatcacctgttcattgtggcctgtgcaggagctggtgccaccgtcattgccctgctgatctacatgatggctactacatataactatgcggttttgaagtttaagagtcgggaagattgctgcactaaattctaaattgcataaggagttttagnnnnnnnnnnnnnnnnncatgaaatattactgacactccagactaaagcannnnnnnnnnnnnnnnnnnnnnnnnnnnntaatttgtaaatagctttagtaaactcatcttgcatggcagattaataagatgacttactgtacatgaatacaca

SEQ ID NO: 12455 - DNA, 605 bp, Macaca Fascicularis
  misc_feature (1)...(605): n = A,T,C or G
agacagcaaagcagattacgagacttagactgactgnnnnagaggaaagggnnnnnnnnnnnnnnngagtaacagagaataatgacttaagagnnnaatctgcctgccatctccctgagctgtcacccgtcactgaagatagcgtgagggtgatgcttcaactcaccatcctaagggtttgtgtacaaacacactcgnnnnnnnnnnnnnnnnnnnnagaacaaatggcatttgtaccaaatggcaatggattttcagcacaaacttaatactttcctaacactacagcaatagtaatcatgtactttcagcaagagggactccttttaacaaggaaaaagactcacattaattagcctatgtacccaatggatcaatctgtgtagcaacaaagtctagtgctagcagacacagggacagagggaccagctaccctcaacacagggccaggagagccggggcctagactgaaccctctaagaaggcccatgtgtccaaagagaagaactgtcaagaaaaagaaactagtcaaaaactctttaaaggacaacctaaaaaggattaaagatgtatattgatttttcagtaccatacatatgcaaaga

SEQ ID NO: 12456 - DNA, 687 bp, Macaca Fascicularis
  misc_feature (1)...(687): n = A,T,C or G
gagccccgaggctgacaaggagaacgtggattccccactcctcaagttctaagcagaaccaaatcctttgccttgaaagaacagccctaaagtggttttcaaccctcagaaacaagctgttaggctgggcacagtggcttacacttgnnnnnnnnnnnnnnnnnnnnnnnnnnnnnnnnnnnnnnnnnnnnnnnnnnnnnnnnnnnnnnnnnnnnnnnnnnnnnnnnnnnnnnnnnnnnnnnnnnnnnnnnnnnnnnnnnnnnnnnnnnnnnnnnnnnnnnnnnnnnnnnnnnnnnnnnnnnnnnnnnnnnnnnnnnnnnnnnnnntcaaggaggtggaggctgcagtgagctctgattgtgccactgtactctagcctgggcaacaatgtgagagcctatcttgggggaaaaaaaaaaaagaaacatgttttagtagaaattgtattcgaaaaagaaaaataagccgaaagatattcccagtgctggagagggtgggctgaggaactggggccagcgctaaccacccaaggcctctgctgccgcctctgcccttcttgctgccactctctgggctggaatgtgaagcctcagtcactctaaatgaagaattttcttttgaatgttttgtatgtaaaatagcaagtagctatttttaaagttaagtttgtgtaaaaagttaaatatt

SEQ ID NO: 12457 - DNA, 754 bp, Macaca Fascicularis
  misc_feature (1)...(754): n = A,T,C or G
atgannnncaaaagggtagcatnnnnnntgctggtcaaaatatacaagatgtgagcctggaaagccttcggagggcagtgggagtggtacctcaggatgctgtcctcttccataatactatttattacaacctcttatatggaaacatcagtgcttcacctgaggaagtgtatgcggtggcaaaattagctggacttcatgatgcaattcttcgaatgccacatggatacaacacccaagtaggggaacgaggactcaagctttcaggaggagaaaagcaaagagtagcaattgcaagagccattttgaaggaccccccagtcatactctatgatgaagctacttcatcgttagattcgattactgaagaaactattcttggtgccatgaaggatgtggtcaaacacagaacttctattttcattgcacacagattgtcaacagtggttgatgcagatgaaatcattgtcttggaccagggtaaggtagccgaacgtggtacccaccatggtttgcttgctaaccctcatagtatctattcagaaatgtggcatacacagagcagccgtgtgcagaaccatgataaccccaaatgggaagcaaagaaagaaaatatatccaaagaggaggaaagaaagaaactacaagaagaaattgnnnnnnnnnnnnnnnnnctgtggaaactgttcgtgctaagtcacataagacattttctttttttgttgttttggactacatatttgcacgaagcaga

SEQ ID NO: 12458 - DNA, 671 bp, Macaca Fascicularis
tgcttccccagggccgccgccgggcttggcggcctacactgccaagatggcagcggctaatgggagcaagaaggctgagcggcagaaattctccccctactgaggccagctgaggtacaggcaggggcaggcaggaccaccagcagggggctgcctgcgcaccctgcccgcccaaggagactccaccctggggtcctaaacgccgctaacgcccagacgcatggatgcaccccctaccctgcctccgtctatgggagttccttctctcagagtaggggcagtttctggcccaggggtctgagctgcggcagccccagagcagggggcgtacctcttcagctctgtgcttggatacagggagcagccaggagactccctagtgcccccaccatggggggtgtcactcacacactccccatcccttagggcttcctggcctactgcatccttttgggagtcagggaggagggcccaggggggtagctggggccaggcttctctccccaccacctgcagatttcttgctgcttccactgatacccttttgactggaatgaactggctgggcttgtcagggggcaccctaaagagggggcactgccaggtagctgggggagtggcatggggcaggggcccagttctcagcagcagacactctgtacagttttcaa

SEQ ID NO: 12459 - DNA, 590 bp, Macaca Fascicularis
  misc_feature (1)...(590): n = A,T,C or G
acgaaacgatggcagatgnnncnaccgagcttcagcaagtcatcatgatctccgtgggaacattttcgttgctgtcggtgctggcaggggcatgtttcttcctggtcctgaaatacagaggcctgattaaatactggtttcacactccaccaagcattccgttacagatagaagagtatttaaaggacccaacccagcccatcttagaggtcttggacaaggacagctcaccaaaggatgacgtctgggactctgtgtccatcatttcctttccagaaaaggagcaagaagatgttctccaaacactttgaaccaaagcatgggtctagcccactggcccccnnnnnnnnnnnnnnnnnnnngtggagctgctggagttctgtctggacttcccagagaccagtattcccttttcctgcctctaaaaggcctgtccctgccttgtgagagacagtgggtctcatgggggtgacaagcttttttttttttcttgaagaattttcgggccgggcgcggtggctcacgcctgtaatcccagcactttgggaggccgaggcgggcggatcacaaggtcaggagatcgagaccat

SEQ ID NO: 12460 - DNA, 709 bp, Macaca Fascicularis
  misc_feature (1)...(709): n = A,T,C or G
gaccagagacagcagctcaagcnnncagcgagnnncagcccaggcagcaggcagcaggcctgccacgtgcagaggtgccacaagggaaaggaaacgtgcccggtaacagcaagttccagactccagcccccagttccgaagtggttttggattcgaagagacaagttgagaaagaggaaatcaatgaaatccaggtggtgagtgaggaggagcctcagagggacaggctggggctgccacaggagccaggccgggagcaggtggcggaagacaggcctgtggacggaagaggcttcgggggagccagagaactgggccggaccccacaggtgccagctgccctgtcagtgagccaggaaaatccggagatggagggccccgagcgagaccagcttgtcatccccgatggacaggaggaggagcaggaagctgccagggaagggagaaaccagcagaaactgagaggagaagatgactacaacatggatgaaaatgaggcggaatctgagacagacaagcaggcagccctggcagggaatgacagaaacatagatgtttttaatgttgaagatcagaaaagagacaccataaatttacttgatcagcatgaaaagcggaatcatacagtctgaattgaactggaatcacatttcacatcaggactgaagagatgagtataaatgttcatgagggactgaatactgacaac

SEQ ID NO: 12461 - DNA, 499 bp, Macaca Fascicularis
aacaacagcacacggagcgtggcaggaaccatgggaagccacggcggcgagtacgagtgcgcagccaccaacgcgcacgggcgccacgcgaggcgcatcacggtgcgcgtagcaggtccgtgactgtgggtcgccgtgggaggcgcggcggggggagcggcgctgctggccgcgggggccggcctggccttctacgtgcagtccaccgcctgcaagaagggcgagtacaacgtgcaggaggccgagagctcgggcgaggccgtgtgtctcaacggcgcaggcggcggcgctggcggggcggcgggcgcggagggcggacccgaggcggcggggggcgcggccgagtcgccggcggagggcgaggtcttcgccattcagctgacctcggcgtgagccggatcccctctccccgcgggccgggggatgccccccagacgcacacgggggcttatttattgctttatttatttacttattcatttatttatgtatttcaact

SEQ ID NO: 12462 - DNA, 947 bp, Macaca Fascicularis
  misc_feature (1)...(947): n = A,T,C or G
catgctggcctgtgtcttcctggcaactgctgcctttgttgcctatactgcccggctggactggaagcttgccgcagaggaggcgaagaaacactcaggccagcagcagcagcagagagcagacagcactgcacccagacctgggcctgagaaagcagtcctatcttcagtggctacagggagttcccctggcattaccttgacaacgtattcaaggtctgattgccacgtggacctcttcaggactccagaggaggcccacaccctttcagctcctgccagcagactgtcagtgaaacagctggtcatccgccgcggggctgctctgggggcggcgtcagccacactgctggtggggctcgcggtcaggatcctagccaccaggcactagcaaagcagcttggaaacagaaagccaggagtggctgtccccggtacccaaacacaccacggtctcccctgcaaaagcgccaatggggtccagtgcaggaggacactttgaacgactcctcaaaaaaagaactttggctgattccttgtggtgacactcagaggggtctgaacagagcggacttcacagttctgttctggnnnnnnnnnnnnnnnnnnntctggcctggattgctctgtagaagacatcagccaactgcacgagtcagagtccggggactgccaccataattaataatgtaaatggcttcaaatgggagactgcagatacaatcaccaaaaccactgttacattaaagattacacgtttcctaggcacagcctgaggctcaagtctgtcatgaagcctctgtgaagctctgagaacggggccagtgggttctgtccaggcaactcctgtgtgcnnnnnnnnnnnnnnnntgctgtgagaccctgaccagggcggtggctgtccatatacccttcttccccttttctccagttctttcattccatcag

SEQ ID NO: 12463 - DNA, 752 bp, Macaca Fascicularis
tactgctgttccttggtctcccagaatcctcagggcactgagggtaggtctgacaaataaggcctgctgtgtgaatgtagcctttgtaaaatgtactgggatggtttctgcttagagatacttaggtccagcctgttcacactgcacctcaggtatcaattcatctattcaacaggtatttatttgtgttattactatgactcaggctctttttattgtttcaattctttacaccaaagtatgaactggagagggtacctcaattataaggagtctgagaatattggccctttctaagctatgtgcataattaaaaccagcttcatttgttgctctgagaatgtttctccaaggttttctacctttgaaaccaactaaattatgaaagtggagagatctgccctgtgttatccagttttgagataaaaaattagtataagagtgcctgtcattataagagctgccttctttattcttctctcaagccaccagctgccagccaccagcagccagctgccagcccagctgtttttttttttagcacttagtatttagcatttattaacaggtactgtaagaataatgaagcattgtttttaatcttgagactatgaaagcttttcttagttcttctgcttttgcaattgtatttgtgaaatttgaatacttgcaggctttgtatgtgaataattctagggggggacctgggagataattcctacagggaattctcaaaactgtgctcaactata

SEQ ID NO: 12464 - DNA, 713 bp, Macaca Fascicularis
  misc_feature (1)...(713): n = A,T,C or G
aaagaagggcagccccctttattcagtgcgtctttctnnccannnnnnnnnnnnnnnnnnngaaggcaggaccaaaacaagcccagtcaacaacagaaggcaggaccaaaacaagcccagtcaacaacagatgggcatgtgctgggcctgctgggcatagtcacctgttggccatccttatgccagagcctttgacctctgaaacctgacagacgagtgtaagagtgttttcctcctggtagtgtnnnnnnnnnnnnnnnnnnnnnnnnnncgggtttgacnnnnnnnnnnggtctctattagcagagagtaacagggatttcagacccggaggcctgccctcacccttggccgagnnnnnnnnnnnnnngtgcttgatggtgtccctcnnnnnnnnnnnnnaatccaccannnnnnnnnnnnnnnnnnnnnnnnnnnnnnnnnnnnnnnnnnnnttgcacaccgtctctgaaagggagtggggagagttagcagccaagtgccagcaaagggaagctcatattcccagacctctcacagcgtggacaaagaagacacacaaggggccttatgaggaatggattccagaaggaaaatagaaatgtcaataaaaagaaaaaatcctagctccaagcactgnnnnnnnnnnnnnnnnnnnnnngaaagagtcagttgtaagtggtgatcctggacaacttattaacccctctaag

SEQ ID NO: 12465 - DNA, 732 bp, Macaca Fascicularis
  misc_feature (1)...(732): n = A,T,C or G
gagtgcagtggcgcgatctcagctcactgcaaccnnnnnnncccgggttcaagtgattctcctgnnncagcctcccaagtagctgggattgcaggtgcccaccaccatgcccagctaatttttatatttttagtagagacggnnnnnnnnnnnnnnnnnnnngctggtcttgaactcccgatctcaagtgatctgcccgccttggcctcccaacatgctgggattgcaggtgtgagccaccacgccctggcccgactggatggtttttgattgaagcctagaatatctgtagagacacactctacccagtcttttctagacctcaactatctccagtgttgtagtttaattgtagttggatcagggagtgagacttttaggcaaatgttggattatatatcaaaggaaaagcttagtttcagagagcaggaaggtaaagagatgtgggggaagcgtttcatgaaccagctacatccgcttagaaggatcattgcagcagnnnnnnnnnnngggtcccttctatctcgttctgccccannnnnnnnnnnnnnnnnnnnnnacagtgcagcatgagccttgaatctggaggcagccacttggcaccctggttttgctgagaactaactctgagatcttgggtgacttcttatcactctggacctcagttcctgtgaagcgacaggtgtggnnnnnnnnnnnnnnnnnnnnnncacgctgtctcccgctggcgtt

SEQ ID NO: 12466 - DNA, 733 bp, Macaca Fascicularis
agcaggagcaagaccagcagtcagcagataaggtgccagtgccatggacagggcaatctgtgggtgggggacatccagggcttccgtggtttaacttcttgggatgggaatccatcttctccattgaagacaaaaaggtgtgaaaagtatagaaaatccaaagttcaaatggaaccttgagtcttttaaatattctactcttttgacaaaaactcactagcttttttgcttaaggtaaaagatttaagaggttttaaaagttggggtggctcattaagaacaaggaagaaaagatctatcatataacaaatgcattagtactgacattaatattttatgtaagtctgtagtaatatgggtgttaaatgcataccctatagtttattttgatgtgcttgctaaatttcatgtttaaaagtcacctcttttttagacttttaaattacatatatatttcaaaaatggttcttaaagtatttcataaaattaatgcatatctaatttcaaaattttccaccccctccatgtaatcagagctcaaaaaagatggtccaagaaggctccctagtggacacgctgcaatctagtgacaaagttgaaagtttaacaggcttttctcatgaagaaccagatgactcttggtaaccatgtttgctgcccagcttctaacttacataccatgagaagttacataacatttactcctttgtaaatgttctctatcatcagacaa

SEQ ID NO: 12467 - DNA, 741 bp, Macaca Fascicularis
  misc_feature (1)...(741): n = A,T,C or G
caggacangnnnnnttctaagttatttgcagattgaatttctgggtggctatcagcagaagtgcagagtagggaaccagagctggttaagggcctagtggagggtttgtgtgcnnnnnnnnnnnnnntcatctgtggctgcaggggtcagacagacaaggatgggggctgccaggacaccacctcctcatgaatgctggttttcaccccttttccttattttattgccaatcaggannnnnnnnnnnnnnnnnnnnnnnnnnnccatcagttgagggtgagggaggtagacaggcgnnnnnnnnnnnnnnnnnnnnnnnnnnnnnnnnttggggtttggtggccatgttttctccccaggcaggccctgcttttctaggatgtggccttaggcaagaacagacccaacagccagcccttcatcctccagtgtctgccataggaacgtgagggggctgtttgctgagcgctcggggtacggccagagggcaagtgagcatgcacagacctctttcccctgtcctgtttctcacccagcacctggggagattggtgctaccaaggaagagagcacacagataaggcagaggggnnnnnnnnnnnnnnnnnnnnnnnnnnnnnnnnnnnnnnnnnnnnnnnnnnnnnnnnnnnnnnnnatgtaaatgtatcctgaaggtggggaggaatgtttaatccaccatgtccatgtgtcgtcttggtttgtgtttttccctgttgggca

SEQ ID NO: 12468 - DNA, 695 bp, Macaca Fascicularis
  misc_feature (1)...(695): n = A,T,C or G
atatggcgnnnnnnnnnnnnnnnnnnnnnngaaaggagatccgggatttgtatgttaacatccannnnnnnnnnnnncctaaagannnnnnnnnnnnnnnnngaaatggaataataattatnnnnnnnnnnnnnnntggctgtttgtttgnnnnnnnnnnnnnnnnnnnncgaggtgtaaatgcagacaaannnnnnnnnnnnnnnnnnnnnnnnnnnnnnnnnnnnnnnnnnnnnnnnnnnnnnnnnnnnnnnnnnnnnnnnnnnnnnnnnnnnnnnnnnnnnnnnnnnnnnnnnnnnnnttccagaataaaaacaggaccagttacactccnnnnnnnnnnnnnnnnnnnnnttgctgaacaaatagcaaaggctaaatttattgtgaagaaatcagaannnnnnnnnnnnnnnnnnaaagatacttatattattgaatgccaaggaattgggatgacaaatccaaatctatagagtatttgcctcttaaatgatacctnnnnnnnnnnnnnnactatttcataaatactataaaataatgactaggaagtaacttattaaaggatctgacttaaatnnnnnnnnnnnnnnnnnnnnnntggtnnnnnnnnnnnnnttcatcaaactaatctcactttgagtatatcctgagagatggacaatgaagtnnnnnnnnngtggtggatatgtgtg

SEQ ID NO: 12469 - DNA, 773 bp, Macaca Fascicularis
  misc_feature (1)...(773): n = A,T,C or G
gagacagcccatgaggcgtgaccggggcccacatctgtgcgttgtgacttctgaagagtttggcctaggcctaaagagaggtcctggtgttggatagatgccagggcccctnnnctgnnnnaggacacctgctgcaaggcccacccgaatggggccagagtctgtgtggacaaccgaccctagccagtcagctcctagtggcactggctccgtcctcgcagagcccagagtgttccccatgctccacctggtggctgaggccacagctgctgcttgtattccagtacagaacaggtttatgcgccaggaggaggcgtgcacaagtgtcggtacgagatctagcctgccctgcttgcctgtcctggacagtggggtatggtggcgtaggtgcctattccctggacagtggggtgtggtgacgtaggnnnnnnnnccctggacagtggggtatggtggtgcaggcgcctattccccggatggtggggtgcggtgacgtaggtgcctattccctggatggtggggtatggtgacataggcgcctgttccctggacggtggggtatggtgacataggcgcctgttcctggacggtggggtatggtggtgcaggtgcctattccctggacagtggggtnnnnnnnnnnnnnnnnctattccctggacggtggggtatggtgacataggcgcctgttcctggacggtggggtatggtggtgcaggtgcctattccctggacggtggggtatggtggcgcaggcgcctattttagagaac

SEQ ID NO: 12470 - DNA, 742 bp, Macaca Fascicularis
  misc_feature (1)...(742): n = A,T,C or G
catagtagantggagaagtaatnnnactaaagtggcaaatctggttnnngcctatgtagacaaatacaaatattcacggaaggggagccaaaagaaaactctggaagaacctgtgtctactgaaaaaaacataggctagaaatggggaacgctgtcaaagacattatcaggatatctgcaaagtgcaatttcaacatgtaccattaactgaaaatcatacataactgtgattgaaatttggttttgataaaattatttttttaacataggatatgatgttttgttctaaataaatataggtctgcactgcaacttctgtatccttccttcccctccaacctcccccacaaaattcaagggaaagtaaagtgttgaaaggaatgtgcatctttactaggactgtgttatagtgtggatactgaaagatgtatagctttttgattagagcaatggagtgcataaattagaaacttctaagtgcactggttttcaaagagatatatatataaaatgcatttattctgtcaggttaaaatataaagtatgatctttatgattgattttttccctctaattatagaaagttaaataatgtattaccatgaaaaatgtttctaatattaaatagaacatatcagttgcagagttcctaatgtgtatttttaaagcacatatctgaataaattgcctagatagaaaaaaattatcacatgagtaaaatttagtgttcaaaacattgaga

SEQ ID NO: 12471 - DNA, 680 bp, Macaca Fascicularis
  misc_feature (1)...(680): n = A,T,C or G
tgtggtggcttgtgccgagactgagcctggaatgatgcagctcagtcaaggagcannnnnnnnnnnnnnnnngggttgaaaacccagggtttttacttggagannnnnnnnnnnnnnnnnnnnnnnnnnnnnnnnnaatttcatttacagatctggaacactttggggctgatttgtctctttaggggacatccccaatatggttaattccaactctcagaccttgtgctttagttagtacatgtgactcaccagatggggtccttagatcctgttcctgctcccaatgggaatttgcttttctttgtcattttgggaaaggggcttggtttctgagtgtcttgtcttctcattctttttttttcatatcctttttctcaaaaaagccatcagctctgactttcatggaagtgttgccaaggtcagcctggtgcaagttgggatataaatgaaacttatgcaggatgtatgagaggaagcagttaattgtttctaaatatnncagggnnnnnnnnnnnnnnnnnnnnnnattccctgaccacagggaagcacatggatcagtcacgtnnnnnnnnnnnnnnnagaatatggattcttaagtcacacctaacactgagcagctgtatgactttggagaagttgtttaacatttccaagcctcagtttttgcttttttaaag

SEQ ID NO: 12472 - DNA, 647 bp, Macaca Fascicularis
  misc_feature (1)...(647): n = A,T,C or G
aaaagtaatatcctcacttggagagtgtcaaatacatactttgaggattgacttatataaggtgccctgtagaactctgttacacatattttcgacccatattatttacaatgtcttgataattctacctttttagagcaagaatagtatctgctaatgtaagggacatctgtatttaactcctttgtagacatgaatttctatcnnnnnnnnnnnnnnnnnntaacagagattctttttttcaacaatcttaattcaaaagcattagtagacttgaaagggtttgataatctcccagtccttagtaagattgagaggctggagcagttttcagttttaaatgagtctgcggttaatatcaaatgtgagtttgggactgcctggcaacacttatatttcttattcagaacccttgatgagactatttttaaacatactagtcttctgatagaaagcactatacatcctattgtttctttctttccaaaatcagccttctgtctgtaacaaaaatgtactttatagagatggaggaaaaggtctaatactacatagccttaagtgtttcatgtcattgttaagtgtattttctgtaacagaaacatatttggaatgtttttcttttccccttataaattgtaattcct

SEQ ID NO: 12473 - DNA, 679 bp, Macaca Fascicularis
  misc_feature (1)...(679): n = A,T,C or G
gacagagggagaggaacttccagccagagcaggacgccggaaggnnttcaaagggcacaggaaccaggtgacctgcctgtcggtgtctactgacggcagcgtgctgctctcgggctcccacgacgagaccgtgcgnnnctgggatgtgcagagcaagcagtgcatcnnnnnnnnnnnnnnnnnnnnnnnnnnnnccaacgccaccatcctactggcgcccgtcagcatgctgagctcagacttcaggcccagcctgccgctgccccacttcaacaagcacctgctgggcgccgagcacggggacgagccgcgccacgggggcctcaccctgcgcctgggcctccaccagcagggttcagagcccagctacctggaccgcacggagcagctgcaggccgtcctgtgcagcaccatggagaagagcgtgcttggtggccaggaccagctgcgggtccgtgtcacggagctggaggacgaggtgcgcaacctgcgcaagatcaaccgggacctgttcgacttctccacgcgcttcatcacgcggccggccaagtgaggcccagagacccggacccaaggcgcccaggcctgagccccacgcctcccagcgaccggagcccacgggtgtggcccccaccagcccaggcctggactctccccagttctgcgtcgtgtttgggct

SEQ ID NO: 12474 - DNA, 662 bp, Macaca Fascicularis
  misc_feature (1)...(662): n = A,T,C or G
cggaggcatcaatggctacctgttcacctactnnnnnnnnnnnnnnnnnnnnnnnnnnnnnnnnnncctgcccagcctgctggccatgatccacgtcagacactgcacccccatccctgccctcctcgtctgttgtgcggccacnnnnnnnnnnnnnnncgtgggcgacacgtacacgctcatcaactacgtgtccttcatcaactacctctgctacggcgtcaccatcctgggcctgctgctgctgcgctggaggcggcctgcgctccacaagcccatcaaggtgaaccttctcatccccgtggcatacttggtcttctgggccttcctgctggtcttcagcttcatctccgagcctatggtctgtggggtcggcatnnnnnnnnnnnnnnnnnnnnnnnnnattttctnnnnnnnnnnnnnnnnnnnnnnnnnnnnnnnnnnnnnnnncagactcacagagtccatgacacgctggggccaggagctgtgtttcgtggtctacccccaggatgcccctgaagaggaggagaatagcccctgcccaccctccctgctggccgccacagacaagcccttgaagccacaatgagatgtgtgtaaagactnnnnnnnnnnnnnnnntttacatgttgtttattgaggaggcgtttggcaaaaaa

SEQ ID NO: 12475 - DNA, 733 bp, Macaca Fascicularis
  misc_feature (1)...(733): n = A,T,C or G
gtgaactaccattaccagcagatggacaggcaggagcccagcagcatccccggtgctgccttgcccctgnnnctgcagccaagttcccggaagctgtcnnnnnnnnnnnnnnnncccctgagactcctgcagagatcgtagccctggagcacaaggagacacgctgcaccccgatgcggagaggtgacaactggaccctgatacttcaggacaccattgaggaccttagccgacggtggaggggtcatgccctcaacgcctcccagtagcctggctggaggtggctttctttaggcttcagatcccagggaggtgcaccctctgagctgccttgtgaccctccccattaagcataggttaggaggttcccaggaggctgctcagctgggtctggagccagctggctttgctccgttccctggctactctgtgcctggtcacagggaggctgagtgaggggctgtgaacagttgccagaagcaccccctccgtccctggcccacgcggcagtgtctgagctgtagtgaaagtttcagggcctgcagaagaagagccttgggcacaggattgaccatggctccaggggtttaggaccccagacctgtgaaggtgggggcagctcaccaccttcatgcagcctttatatgctctctgagccttagctgatttggcccccaaaacacatccaaaggttctagcccgccttgtcagagacttccaccctgctcacatg

SEQ ID NO: 12476 - DNA, 694 bp, Macaca Fascicularis
  misc_feature (1)...(694): n = A,T,C or G
tcaccgannnnnnnnnnnacgcctgtgtgcaagatgctgtccagcagcaccagcagaagnnnnnnnnnnnnnnnnnnnnnnnnnnnnggcacggggacgagccctccccatcctgagtccacagcgagacccacacctcacggagccgtcagcggacccctcccacccccaacttccggcccctgcacatttaggaaatattcctggatggggaagggctgtgcccagggcctctgtgcaccaggttagcttgtggtgggggtcggccgttctgccccccaggacaccccctgttgtgggcactggctagggaggggcaggcctccttcctgccccttaagacacttgggnnnnnnnnnnnnnnngtgacccagagcgggaggggaggcctcgcaccccagcccctgcccaggccacggggagggtgggtgccggctgagcccccagggcagcaggagaggggcgggtggtgtctcttctcggctcccacagcagagccgggtgttgggggcctgccgggaccagaccgaggtggggcggcctgaagcctgcttcccactgcaggcggcacaccccggccctgtgcgcactggtggccccgagaaagcccaggctgtggccgggaggagggaacctggccgggcgtctgaggccactctcagctggccggtccaagcctgtggctggagctggg

SEQ ID NO: 12477 - DNA, 733 bp, Macaca Fascicularis
  misc_feature (1)...(733): n = A,T,C or G
catcagtctttnnnnnnnnnnannnncacccatnntggagcctgcaagtgctcccatnnnnnnnnnnnnnnnnnnnnnnnnnnnnnnnnnnnnnnnnnnnnnnnnnnnnnnnnnnngtgggagnnnnnnnnnnnncaggaagtttagtggaannnnnnnnnnnnnnnnnnnnnnnttctgtgctacactttggccttacaggaccagtgtgtggagatcactgaggagtccaaggctctcctggaggaatacaacaagactgtatcctttatgctcaactaggaccctaatgggtgttgtccctaagccctgtccttttgttccacctctagcgttctctcatcctatcccacccacctatgtttgcctgttccccactttccatgcacttcctcactcagactcctattctcaccttgacctacaaccagacaatgcttctatccaagcaatttgtgcagtgggatgagctactttgccagctagaggccgccaagcaagtgaagccagcagaggnnnnnnnnnnnnnnnnnnnnnnnnnnnnnnnnnnnnnnnnnnnnnnnnnnngccctatgccaacctgtctttgttacaaggcagaggaagctttgtatttattggattcaaggcccacctctctactcaggtggagctctaaagttggaggtcaggtgnnnnnnnnnnnnnnnnnagcaacacccaccctcccccccatcagnnncttatccaggac

SEQ ID NO: 12478 - DNA, 736 bp, Macaca Fascicularis
  misc_feature (1)...(736): n = A,T,C or G
ctatagctaggnnncntactctgtccactctnnntcaagtatctaactnntctggagaccaaataggctttagaagagattatcctaaattcctatcagtgtaatactaaaatataacnnnnnnnnnnnnnnnnnnnnnnnnnnnaaacaatttagcccatctctccagagagcaaacataggaatatgcctcaggagcctttactccctgggtttatcatcagccctcatacccgtttccccctccaacccacagcctttgcttccaggtggggggattacttctttgcctcttcagcagcatctactctaggcgtattgatcactttggacactgggagaagaacctcaaactaggaagaaaagacagagcctacatttagttttgggaggggatggcagacagcaaggagatgagcatcctaaggcatgctgggatggggtcagaggcaccacccatggagaggtttgtcagcacaaagacgtggaaggttagaggtttgtcaacacaaagacacaggaagaatgggcagcagaagatttagatgttttccatttgggcacatttaacttagctggataacttggtttaaaacagcctgggtaggaaaattagaagcaagctgggtgcagtggctcatgcctgtaatcccaacacttttgggaggtccaggcaggaggatcgcttgggcccaggaggtcaagcctgcagtgagctgagatcaccactgcactc

SEQ ID NO: 12479 - DNA, 218 bp, Macaca Fascicularis
  misc_feature (1)...(218): n = A,T,C or G
ggcaacccttcagtacagagnttcgtggccccctcccccccgcccctctgcttccctccccacccactaccttaagggtagggagatgctcttcctacctgttttattttgttttctcgttctccctccccaccccactcccagccttatctatccccccctcgctgtccccttttctccactcccagccccatttcctttttttctggagtgtgtgg

SEQ ID NO: 12480 - DNA, 710 bp, Macaca Fascicularis
  misc_feature (1)...(710): n = A,T,C or G
caactgnnnnnnnnnnnnnnnnaaagccannnttgctgnnnnctgaatgaggactgcctggagagggacacgcgagaggcaggccaggctgcaccactccaagagccaagcccctcgctggcaccccagagccgcggtgcttgccaagggctgtgcggagctggtgctgcctgaaaccccagaccgagaagttgatgctcggcccacgctgttagctcgtgtgcgtgtagtctgtgcgtgagactccttcgattgtagctctgtgctgtcggattggaacagtagttcccgccaagttctcccactaccacggccttggaggcctgggccgtggccagataggagtttgcatcatccacgtggctccgttgcctttgcattgcgccctgtcctgtcatctgtcctcaccggggtatcggccatcactcagctctcctgtgcccctgcgtcccaccctcggcgggctgggcggggcaggcctcctttgttctccacaatctactgtctccgagtgtacacgttgcgctgtttgtgtttgatcccccctgacttgtagccagcttgtgtaagatcccttgcagaacgagaaagttaaaaacaagcccacccagtactcacaccatcaagtctgttatagagtgtacgactgtattaacacggaggcctgcctggctactttttttaacatattgttaagtaatataaaaatc

SEQ ID NO: 12481 - DNA, 709 bp, Macaca Fascicularis
  misc_feature (1)...(709): n = A,T,C or G
tcccccacaagtccgcncngatgcacccagggccgagcaggccccggggcggccgaggcaccttgtctgccgggggcggggctgcttttgcttccttagaggggcgggcagggagaggaagctctagctccgggcctcagtttccccgannnnnnnnnnnnnnnnnnncagggcgagcctggatggctgccgtcgccgccagaagccaccctggcccggcctccagggcgcagaggcgcccccattcttccccccatcccgggggccacggcagggcggtcgcgcagcgcggctgggaccgattcgatgacggcccaaggaagctgggcgcagggctcgcctcccccgcctcgatcctgcaccttcctctcccannnnnnnnnnnnnnnnnnnncagtagcccccttagcgcccccgcgggccccgcggctccaggctccgctttggcacctctgctccggctggcatggctgcacgctccggctgctagtaggagccgttaggggaggagtttggggtctccacacgatgcctnnnnnnnnnnnnnnnnngcacattagacgctttttagaagttttgaaattaccttgatttttttaattgttatgaaaatggatcttttcttgactctcccacatgctctgttatgggagagaatcccctaccccactctgatgtatagaccattctccctacaccagccgaacca

SEQ ID NO: 12482 - DNA, 647 bp, Macaca Fascicularis
  misc_feature (1)...(647): n = A,T,C or G
ggcacaagtgctcacactgggaagcaggnnnctgaggcnnnacatcttctcccgtggtggagtcggagtgtgggcagggcagggaggccagcaacgagcaggctctgtgggcttgcaggaggcaggtctgtggcccctccctggaccctagcctaatgccccctgcaccccatgcctatgttccagcttcctgggtatgcacgtccagacaggcgacaccctccatgtacccaggggagatcccagccagacacctgcacccccgccctggctaagaagttgcttcctgttgccagcatgacctaccctcgcctctttgacgccccccgctgccacctccttttgctcctggaccctttagcctctctgcccttcctctctctgaccccaaccaccccccgccagctctgcttctcactacctgggggaggaaagaaactcctgatcgttggccagaggaacttacccctggagaggccaagtaccttctaggaagttaggaggttgaggcacagccctgtgcagagagggcgggtcaccccccagatccaaggggaaactgcaggtcaagggctggtaacggccacgcaggaagcttgatgctgcatcccccccgcactctgcttgccaccccccaccccgccatt

SEQ ID NO: 12483 - DNA, 741 bp, Macaca Fascicularis
  misc_feature (1)...(741): n = A,T,C or G
agagcgcagtgcactcccgtgctccgggacacccctgnntcctgtggctgtgacgtggggttaggtgaggaagggaccaaaggaaacagagccagagcagccacagnnnnnnnnnnnnnnnggtgagcatggagcttgcccctctggctcacagccccggcagcccctggctccttggaatctcgggttggtgttaaggggccccccactgccacctctcatgggatggaccctgccgacctggcctgggtgtgcaggtaggggtccctttggtannnnnnnnnnnnnntgcttaaggtctggggctcaaggagctgtaggtgccagcaaaggggcagagctgggtttggaggagcccagggcctgcactgcccccttnnnnnnnnnnnnnnnnnnnnnnnnnnnnnnnnnnnnnnnnnnnnnnnnnnnnnnnnnnngacccgtatggtcaagaccaggcagaagctcccagagcccctgtcttgggctcccacccnnnnnnnnnnnnnnnnnnnnnnnnnnnnnnnnnnnnnnnccaaggatggtctgtgatacattcctcagtgtcacctctgagcccaggcctcctgcaacagagaccaggccgagggatgaggctgggcgagcgggtgcgcctcctgtttgggtttctttggggtttctctgtagtgtctgctgccctcctcctggcctcccaggtttcagttgtgtctgacagagccnnttagttttnnnnnnnng

SEQ ID NO: 12484 - DNA, 716 bp, Macaca Fascicularis
  misc_feature (1)...(716): n = A,T,C or G
tgaatacatgagggaaccagagttcaaagtcctatgcaaccttaggagggggttagagattctgttttgatcgatgttttcagaggccctagagtttgtaccagtttgagagtattaatgtcagtannnnnnnnnnnnnnnnnnnnnnnnnnnnnnnnnnnnnnngtttctagagtgagtcccagttacatcaaagagtgacttccagttattccccagttaagtctgagtgggtccttcaagctgggtgtctttccagtctttgccagtctagtcctagtagggcaccgtgtgtgtatgaatgcagtttggtgctgttttagagtatgcctgctccccagccccctgcctggaaccctctaatcaacttgctctgacctataatgtcttaggtgcaacaaggaccccatcagagctcttggatacccccctagatccatgtggctttacatgaggggactgaatgcagacataccatagcccccttctactactttccctctcgccctgccacctagttccacatggaaccaacaagttgagtgcatccctgttgggtgttttgagactggctgaaatgaggagattttgaccatgtgacgtgtcaacagactcaaggaaacaaccnnnnnnnnnnnnnnatgtggcatgcctgtgtatgtgtgtannnnnnnnnnnnnnnttagactgtaatgctattcctctatgggagaaaa

SEQ ID NO: 12485 - DNA, 738 bp, Macaca Fascicularis
  misc_feature (1)...(738): n = A,T,C or G
cacatcacnncnggcattctgggggttactaaaacaccnnnnctggagtggaagctgctggaagnnnnnnnnnnnnnnnnnnnnnnnnnnnnnnngagcagcccnnnnnnnnnnnnnnnnntctggggtcttcatatattgccannnnnnnnnnnnnnnnnnnnnnnntacccagggtcctcatgtccttccttagagcctgagtggtgtgaggtgacaggtctctctctccactgcccctttctggcttaaaaaaatggtgcttgatgagggaaggtagactcttccctaggactgacgagttatggctnnnnnnnnnnnnnnngggaagaggtgnnnnnnnnnnnnttccattggcggccaaggatgggtgtgggtgaaccacacctagcacaagcnnnnnnnnnnnnnnntatttgttgaaatgagtannnnnnnnnntccccaagccagagcgccagaagccatcacccaatgaccgccccttccttccggtctacaagagctctcaagnnngggtctgccaccactctgctttgcccaagtgtggcagcactggggaggagagacaggataaagggcagatgtcagcaatactaagggcttcctcatgggagggcatgaggctccactcattgtcttgtgacttccatccctgctgaatggggctgcaaggccaaagctccttaggggagaggtccttacnnnnnnnnnncttagagcaataaccacttttaa

SEQ ID NO: 12486 - DNA, 699 bp, Macaca Fascicularis
  misc_feature (1)...(699): n = A,T,C or G
ggaatgggctacaccccggattacatagtgtatcacgagttggtcatgaccaccaaggagtacatgcagtgcgtgaccgctgtggatggggagtggctggcggagctgggccccatgttctacagcgtgaaacaggcgggcaagtcacggcaggagaaccgtcgtcgggccaaagaggaagcctctgccatggaggaggagatggcgctggccgaggaacagctgcgagcacggcggcaggagcaggagaagcgcagccccctgggcagtgtcaggtctacgaagatctacactccaggccggaaagagcaaggggagcctatgacccctcgccgcacgccagcccgctttggtctgtgagctgaggctgtccccagagaggatggcagcaggtattgggtcctgagccctctggcgggagccctgaggctgcggacaaagccctttcatctgaggactttcatctgtgcacatcacggccccctagggcagttcctnnnnnnnnnnnnnnnnnnnnnnnnngtggagttcttccatgcaggagtgtgatatggcaggagccgggctgcagagcatccgagatgctgccgggaggtggctggacccattgcatccaaataaactgacccaggacgcttggcgtatgtgtgacttggttgtggctgtgtcttttttaatccttgtgtaaagcagcaaaaa

SEQ ID NO: 12487 - DNA, 592 bp, Macaca Fascicularis
  misc_feature (1)...(592): n = A,T,C or G
cgggctgaaccnnnnntcgtgggccttgcccttgctcacagctgcctcaatcccatgcnnnnnntgtatttcgggagggctcaactccgccggtcactgccagctgcctgtcactgggccctgagggagtcccagggcagggaagaaagtgtggacagcaagaaatccaccagccatgaactggtctcggagatggaggtgtaggctggagagacactgtggatgtgtatcttcctatcccatttcacaaggctggcttcnnnnnnnnnnnnnnnnnnnnnnnnnnnnnnnnnnnnnnnnnnnnnnnnnnnnnnnnnnnnnnnnnnnnnnnnnnnnnnatgtgcaaggcctttttaggcactggagatatagtagtgaccaaaacagacacaaatcctgccctcagggagctgatattctagtggaggaagacagactttaaacaaagatatacagggccatttgcggtggctcatgcctgtaatcccagcgctttgagaggctgaggcaggtggatcacttgaggtcaggagttcaagaccagcctgggcaatattgtgaatccccatctctactaaaaatacaagggttg

SEQ ID NO: 12488 - DNA, 687 bp, Macaca Fascicularis
  misc_feature (1)...(687): n = A,T,C or G
cagannngntgtttnnnnncgccattaccccctcactacnnnccgcttctgtggtatggaccctgagcaacggaagtggcagaagtactgcaagccctcctggatctttgggtttgtggccaagagccagacagagcctcaggagaacgtgtgccacctatttgcggagtatgacacggtccagccagcctcgcaggtcatcagcctggtgactgctctgctgcaggatgcagaaaggatgtaggggagagactgcctgtgcaccttcccaacacctccagggactcaccaaggagcccccctccaccccctgaatgggtgtggcttgtgnnnnnnnnnnnnnnnnnnnnnnnnnnnnnnnggggattggtataaagtnnnnnnnnnnnnnnnnnnnnnnnnnnnnnnnnnnnnnnnnnnnnnnnnnnnnnnnnnnntcagtttcctcaaccacagaaggagaccaatagacaagatcagnnnnnnnnnnnngctggnnnnnnnnnnnnnnnnnnnnnnnnnnnnnctgaagcatgcccacatctgaagacccctgcataaaaataacctccaagaaccctttgaccccatcgacctgggctctgccaacacaatatctgagcgagagacctgcagcccctgtttcaggtgcctggcgttgacccannnnnnnnnnggcttgcagcc

SEQ ID NO: 12489 - DNA, 550 bp, Macaca Fascicularis
  misc_feature (1)...(550): n = A,T,C or G
agagagcaataccatcatcgatcatgtctattgctccccgtcctttcgctgcgttcagactgcacacaatattttgaaaggtttacaacaagaaaatcactagaagatcagtgtagagcccggcttattagagtggacaaaatgggttgctgggagcacgttaccagcatggatacctccatcggagttagcagcagccaacatgagtgttgatacaacatacagacctcacattccagtcagcaaataagttgtttcagaatcatatgataattatatcagtagaagtttccaagtaacaaaagaaataataagtgaatgtaaaagtaaaggaaataacatcctgattgtggcccacgcatcttccctcgaagattgtacctcccaacttcagggcctgtcacctcagaactccaaggacttcgtacaaatggtccgaaagatcccatatctgggattttgttcctgtgaagaattaggagaaactggaatatggcagctgacagatccacccatcnnnnnncttacccatggaccaactgggggcttc

SEQ ID NO: 12490 - DNA, 774 bp, Macaca Fascicularis
  misc_feature (1)...(774): n = A,T,C or G
ctgcagctggaggtggcacgccagggccagcaggagagcacagaggaggctgccagtctgcggcaggagctgacccagcagcaggacctctacaggcaagccctgcaagagaaggtggctgaagtggnnnnnnnnnnnnnnnnnnnnnnnnnnnnnnnnnngaggaggctgaacgaggctcggagggagcatgccaaggccgtggnnnnnnnnnnnnnnnnnnnnnnnngagccgcccaggaaaaggagcggagccaggaactcaggcgtctgcaggaggaggcccggaaggaggaggggcagcgactnnnnnnnnnnnnnnnnnnnnnnnnnnnnnnnnnnnnnnnnnnnnnnnnnnnnnnnnnnnnnnnnnnnnnnnnnnnnngttacaagcagcagcgactgttggcagttcttccttccctactggataagaagaaatctgtggtgtccagccccaggtctccagagtgttcagcatccgtacctgtagcagcagcagtacccaccagnnnnnnnnnnnnnnnntccctctctgtcctgctcgatgacctgcagggcttgagtgaagccatttccaaagaggaagctgtttgtcaaggagacaatcttgacagatgctccagctccaatccccagatgagcagctaagcagctaagagcccagggaaagccagcctgggggctgggaggatcctggagaagtgggtggggacagacgagcccttccccctcccggggtcaccctggggaacaccggctgagtctaaatct

SEQ ID NO: 12491 - DNA, 678 bp, Macaca Fascicularis
  misc_feature (1)...(678): n = A,T,C or G
cttttttgtgaatgtttagagggctgaactgaaaagaattatgaggtaatagttgggctacgtgaaaaagaaagctgtactagatttgtgatgtcttccatgcctgtaggaaagagcagtgaatttattcaccctgtcctagcaccttccctaacctcactcaaatgcctttcccattactctctctttctagcactctccgaatcagagcagtgcctctctcagatacaagaattaataggctcaatgccaaagcccaaccgtgacactctacggtacctcctggagcatttgtgcagggtgatagcacactcagataagaatcgcatgactccccacaacctgggaattgtgtttggaccaaccctgtttcggccagagcaggagacatctgacccagcagcccatgctctctacccggggcagctggtccagctgatgctcaccaacttcaccagcctcttcccctgacccagggaaggaagagaaaacctatttccagtcatctctggtggtgagaggctggtgttctgttttgaggacatccctttaaatctccnnnnnnnnnnnnnnnntcttcatgagtgtgacttgaggggttgggatgggtgagggagcttctctaaagaggaaagtgagtggattaacccctgcttctcttcttgttccctgttatca

SEQ ID NO: 12492 - DNA, 735 bp, Macaca Fascicularis
  misc_feature (1)...(735): n = A,T,C or G
tgcactctgacnnggagggagnnnaccatttgcacccacctacccaccctcacccctgttcagatgcatttccagaaagagctaaggctcataaggttcccttttaagtattatttaatagttgaggccagatacttacatgcaagtctgggttatggttgttttgcctttctcagctggtgaagtcattctaaagccagaggaagtatgtgatatacacatggactaaggcccagatgacactggctagattagcatctgggattaggactggaaacacatgtcatatggaactaaggggaactctttgtcgtcctaatttggaagttggtccctggatggnnnnnnnnnnnnnnnccacgcaggtaccttttttggttttgtttttgttttgtttcttttcagtttgaattaagatggggcttgcaacattaaacatgagctgagcatctataagcattgagttgggatcaaacaaacatgttgggcaggaattgaacaccgctaatatgataaatatgcctgactaaagccactacaaaaattcagagattggctgttcagataagagttgagatttgttttgtggaaagactatttctctttgatactgcaaaggcagtggccatggatctgttcctctgtgctaaatgtcttgtggcagggtgtgtttgtgggggagtgttcgctggtactcttgagtagcctgaagtgacccattctatgaattgttaa

SEQ ID NO: 12493 - DNA, 821 bp, Macaca Fascicularis
  misc_feature (1)...(821): n = A,T,C or G
acttaannnnnnnnnnnnnnnnatncntagtgcnnnnnaccacagaaaagccttttagaataaacgagactacaagcaaaccagtgcaaatgatgtttatgaaaaaaaagcttcaaatttttcacatagaaaagccacaagcagtgggccttcaactctactacaaaagccgtgaccnnnnnnnnnnnnnnnnnnnnncagaagacattnnnnnnnnnnnnnnnnnnnnnnnnnnnnnnnnnnnnnngaagctgaatgagtggaccagtgcagacatgatggagtnnnnnnnnnnnnnnnnnnnnnnnnnnnngnnnnnnnnnnnnnnnnnnnatgatctcaagtcaacccnnnnnnnnnnnnnnnnnnnnnnnnnnnnnnnnnnnnnnnnnnnnnnnnnnnnnnnnnnnnnnnnnnnnngaaacctatttttatccaatgttttccacaaggcttttgtggaaataaatgaacaaggtactgaagccgcagctggcactgggagtgagatagattcacgaattagagtcccatccattgaattcaatgcaaatcacccattcctnnnnnnnnnnnnnnncaataaaaccaacaacattcttttttatggaagattatgctccccctaaatcccacatctctctnnnnnnnnnnnnnnnnnnnnnngtgtgaaaaatgtaccatgagatggaaaagcacaattttcacaaaaatgagtttgtagtctaaacttttttcatatttggatataagtaaatagatcttgaaataatgcattctaatgatcctgtcatatctgcacagctggagagaataacaaa

SEQ ID NO: 12494 - DNA, 736 bp, Macaca Fascicularis
  misc_feature (1)...(736): n = A,T,C or G
tcgttcacgaaaaacatggnntnnncntgngtctggacatgagatgttagaaaagattttcactgggagcggctctcttaaagggaaacaaatctattcagagnnnnnnnnnnnnnnnnnnnnnnnnnnnnnnnnnnaattcttcctatttatataagaaatctcacactgagatagaattatgatttcataatgatacttgaaaagtgctggagtaacaaaatatctcagctggaccattcttaacttgattgaactgtctaggaactttacagattgttctgcagttctctcttttcctcaggtgggacagctagcgttttcttaatcaggaatattgtggtaagttgggagtatcactttggaagaaagtaacatctctagatgagaatttgaaacaagaaacagtgttgtaaaaggacaccttcactgaagcaagtcagaaagtacaatgaaaataaatatttttggtatttggtatttataaaatatttgaacattttttcaataattcctttttacttctaggaagtctcacaagaccatcttaaattattatctgtttggacaattagcaacaagtnnnnnnnnnnnnnnnnaagtttttcaaatccattgcttagctaactttttcattctgtcacttggcttctatttttatattttcctattatatgaaatgtatcttttagttgtttgatttttctttctttctttataaatagttctgagttct

SEQ ID NO: 12495 - DNA, 1285 bp, Macaca Fascicularis
acgcactccatgagcaccccaaggctggggtttgttggattttcaatggctttctaaagattttatttcctggacattctcttctgcttaggagagaccgagtgaacctaccttcatttcaggagggattggccacttggcatatgacaactttgctagcttttcctcccttgggttctaatattgccacattaggggatataggagaggaaaagtaaggtgcagttcccccaacctcagatttaacaggaagcagatgcacatatgagtgtggaaggcagagggggtttatgtaagagcaccttcctcacttccacacagctctacacggcaagtaaacttgagttttatttattttatcctctggtttaattacataatttttttttacattaagctccaggatacatgtgcagaatgtgcaggtttgttacataggtatatatgtgccatggtggaaatatttatttttttaagcataattttaccaaataattaaaacagaaggaaattgagattagagggaggtgtttaaagagaggttatagagtaaaagatttgatgctggagaggttcaggtgcaataagaagaatttagggagaaatgtagttcattattggagggtaaatgatgtggtgcctgagggctgtactttacctcttaacaatttttgtccttcagatggaaactcttgaagtttaatttttcataaaagtcataggcttatataataaagctactgatttcctttagaatttttttctttaagataatagtttacatgtagtagtacttgaagtctaggattattaactaatatgggcattgtagttaatggcagttgatgggttctaattttggatggagttgagggaagggaaagtgatttctagaaaggctgttcccctcactggacgaaataactccttcttgtagtagtctcatgacttttttgaagtaatcctgccacctatcttgtgggagagccatccaaatgagaaaccacaaataattggttcttggtagagattcattgtttctccactttgttctttaggagattttaggtgttgattttctgttttattttaactcatacctttaaaggaattccccaaagaatatttatagcaaacttggaatgtgtaacctcagctctgggagaggatttttttctgagcgattattatctaaagtgtgttgttgctttagggtcacggcacgcttgcgtatgtctgttaccatgtcactgtggtccgatgccgagtgcccttagggggcctg

SEQ ID NO: 12496 - DNA, 626 bp, Macaca Fascicularis
caaggccagcagagtctgaggttggaaaatggcattaaagctgtggaaagatctcttggacaagccaccaaacgcttacaggacaaagaacaggaactggagcagttgactaaggagttgcggcaagtcaatctccagcagtttatccagcagacggggacaaaagttaccgttttgccagcggagcccattgaaatagaggcctcacatgcagacattgaaagagaggcaccattccagtctgggtccctgaagcgacctggttcatctcggcagctccccagtaatctccgcattctgcagaatcctatctcatctggttttaatcctgaaggcatatatgtatgacattatctgtctttaggggggagacacaaaagaggtaccaaggacagcaaacttcctttttgatttgtgccaatgatgaacagaggatctattccacaagccgctgtatgctttttctctcctaaattgcataccacttggagccataccctgtgcactgatgctaaagaacaaagaaactgtgttttcacacatcaacagtgttgatatttttgtccacgcagcatgtaatgcaaagtcttcgtttttatttgtagtattttgagagctttaggaaa

SEQ ID NO: 12497 - DNA, 748 bp, Macaca Fascicularis
  misc_feature (1)...(748): n = A,T,C or G
atgaatgccagtgcgcagggtcacagcccggaggaaccacccccgccctcctcagcctgatcctggaagagactcagggcaccccagcctccgccaacccaggatctggnnnnnnnnnnnnnnnnnnnnnnnnnnnnnnnnnnnnnnnnnnnnnnnnnnnnnnnnnnnnnnnnnnnnnnnnnnnnnnnnnnnnnnnnnnnnnnnnnnnnnnnnnnnnnnnnnnnnnnnnnnnnnnnnnnnnnnnnnnnnnnnnnnnnnnnnnnnnnnnnnnnnnnnnnnnnnnnnnnnnnnnnnnnnnnnnnnnnnnnnnnnnnnnnnnnnnnnnnnnnnnnnnnnnnnnnnnnnnnnnnnnnnnnnnnnnnnnnnnnnnngccttggttctccctttcttcatctggataaggaaggctggactgtaccttctctacaggctaagctggacactcgcatatctgccctcccaacctgcattctgcctcaagcagcgatgcccaccccaggttcaggccacatggagaggccacccctaattccaggggtggatgttgcacctcggcctggccaatcagagctgctgtgtcctaggttcccagtgattggttcgagatggacacgtgacccaatgagaggccttcctgggagttctaccgggagcatcaggaaggttgagctgggtggatgggaacgggcagggacgagggggttccaggggggacctgagaacattgcctggggctgtggatccaac

SEQ ID NO: 12498 - DNA, 780 bp, Macaca Fascicularis
  misc_feature (1)...(780): n = A,T,C or G
ccaacccagcannnnnnnnntcacccgaaagaatcgccaagtgtgtgccaacccagagaagaaatgggttcgggagtacatcaactctttggagatgagctaggatggagagcccttgaacctgaacttacacaaattagcctgcttctgcttgctcttgtcctagcttgggaggcttcccctcactatcctaccccacccgctccttgaagggcccagattctaccacacagcagcagttataaaaaccttccccaggctggatgtgnnnnnnnnnnnnnnnnnnnnnnnnnnnnnnnnnnnnnnnnnnnnnnnnnnnnnnnnnnnnnnnnnnnnnnnnnnnnnnnnnnnnnnnnnnnnnnnnnnnnnnnnnnnnnnnnnnnnnnnnnnnnnnnnnnnnnnnnnnnnnnnnnnnnnnnnnnnnnnnnnnnnnnnnnnnnnnnnnnnnnnnnnnnnnnnnnnnnnnnnnnnnnnnnnnnnnnnnnnnnnnnnnnnnnnnnnnnnnnnnnnnnnnnnnnnnnnnnnnnnnnnnnnnnnacaacaacaacaaaaaaagaagcctccccatctaaagcctagaagagcttctgaggcgctgctttgtcaaaaggaagtctctagcttctgagctctgaagccccttggctttgccagggctctgtgaccaggaaggaagtcaatgtgcctctagaggcaaggaggggaggaacactgagctcctaagcttccatcttaacccctcagaggagcttatcggcaaacatgaaaaatcggcttcca

SEQ ID NO: 12499 - DNA, 755 bp, Macaca Fascicularis
  misc_feature (1)...(755): n = A,T,C or G
tacactgcctggccgggtctccaggnnnnnnnnnnnnntgatcgcgtannnnnnnnnnnnnnnnnnctttggctgggaggacgccctgcacaccgtgcgtgctgggagatcctnnnnnnnnnnnnnnnnnnnnttccagagacagctccaggagtttgagaagcatgaggtccatcagtatcggcagtggctgagggaagagtacggggagagccctttgcaggacgcagaagaagccaaaagcattctcgccgctccgggaattctgaagtactgggcctttctcagaagactgtaatgtacctgaagtgnnnnnnnnnnnnnnnnnnnnnnnnnnnnnnnnnnnnnnnnnnnnnaagaaaagcaaagtagagtttgtatttttaagtatccagtagtgatttgtaaacttgtttttcatttgaagctgaatatatatgtagtcatgtttatgctgagaactaagcatattctttagcaagagaaaatattttccccttatccccactgctgtggaggtttctgtacctggcctggatgcctgtgaggaccccgggagccttgctgcactgctgtgtggatggctgcgcgctcgtggttccttcctgtgaacgccccccaaggacagccgagtgtgcttgtgtggcgtgaactctgcccgtgtgttctcaaatgccccggcttgggaagtagcccttggtgtgggttttatctctggtttgtgttctccatggtggaattaannngaaagctca

SEQ ID NO: 12500 - DNA, 750 bp, Macaca Fascicularis
  misc_feature (1)...(750): n = A,T,C or G
tcagagggtcttggaatnnctgatggcatgcaggagcaaacccccggaagaagaagaacgaaagaaacgaggaagaaagagggaagacaaagaggacaagtcggagaaagcagtgaaagattatgaacaggaaaagtcttggcaagactcagagagattaaaaggaatcttagagcgtggaaaagaagacttggctgaagctgagattataaaagatnnnnnnnnnnncccagaacctccaaacaaaaaaccccttgttgaaatggatgaaactccacaagtggaaaaatcgaaagggccagtgtccttattatccttgtggagtaatagaatcaatactgccaattccagaaaacatcaggaatttgctggacgtttgaactctgttaataacagagctgaactgtatcaacatcttaaagaggaaaatgggatggagacaacagaaaatggaaaagccagccggcagtgaagagtgacttgaagaactaaatttagtatattgcaaaaatattttgggtggaattcgatataagtacttttacagcgagattgtatagttatgttgcctggactggtttttacatttttaaaatatttcaactatcgtttttgtactaattataaaattggcacataattcaaaaatatacannnnnnnnnnnnnnnnnnnnnnnnntatacaagtttattttatggtataaagtgttctctctggaaatgtttttaaaaaaatcttaggctctcttg

SEQ ID NO: 12501 - DNA, 171 bp, Macaca Fascicularis
gggtacagtcctttaacatgccacgagagggggcccccaaaattttttcctcccacacttgaggttttttgtgtggaggaggagcagggatatttaagaagtggtgtgaaagggtaggagagatgatgggggggggggtggtgtgttctagacccccccatattatcacag

SEQ ID NO: 12502 - DNA, 1328 bp, Macaca Fascicularis
  misc_feature (1)...(1328): n = A,T,C or G
agattcagttcagcggaagaaattataaaatgcctctcgggaacttcaccacngcggtctcaggagataaaatcnnnnnnnnnnnnnnnctgaactcgtaccctctctacgccatctacctcgtcgtcattggcctcagcggtggcttcatggtcctgtactacgtgtccttannnnnnnnnnnnnnnnnnnnnnnnnnnnnnnnnnnnnnnnnnnnnnnnnnnnnnnnnnnnntgagggacctgagcagacccttcaactgcactccctcctcaagacccccttcctggggaccgtgaagacaatgaccctacagatgctcagctacatccggcccacagtgctgcagtggcacagaccagccacaggatggcagtagaataannnnnnnnnnnngggatttcnnnnnnnnnnnnnnngactgcgatgactgggagtgagaaaacctgcannnnnnnnnnnnnnnnnnnnnnnnnnnnnttccttttgatatgcatttatataggnnnnnnnnnnnnnnnnnnnnncaaactaggaatgaattgagtagctagactgtgcaggaattgttggaacctggagggaacagtaacagtagctagcagatatggcttcatcttccaggggccccacactccgtggtgagccaccatcaatacagaaagtgacctaagatgtaccagcaagattccatcccttctttttgtgtggggtcatgggctccaaaagccaacgtgaacaattaaaaatttattgagcatctactctgtggcaggtcctgtgcaaaaannnnnnnnnnnnnnnnnnnnnnnnnnnnnnnnnnnnnncattttataggtgtgaaaactgaagcaaaaattcattttcctaagggcacatggatactttgtggtggagtcacgtaggggtcagaaaagccttggaagcctttggagttagagggcagaaggcaaggcctgagctgctgtaaggcttaggagttcaggaaggctccagaagataaatggggtctgcagaggctgtgttaactcagccaggcttgttagagttacatttcgctgactgatatggtttggctctgcgtcctcacccaaatctcaccttgaattgtaataatccccacgtgtcaagggcgggaccagatggagataattgaatcacaggggtgatttctccaatgctgttctcctgagagtgagttcggccgagatctgatggttttataaggggcttccctcttcgctcagctctcattctctctcctgctaccctgtgaggaggtgcctcccaccatgactgttaagtttcctgagaccgccccagccatg

SEQ ID NO: 12503 - DNA, 732 bp, Macaca Fascicularis
  misc_feature (1)...(732): n = A,T,C or G
gaaactggaacgnnnagagcaaaggaggaaagcagaaaaggactcagagagagatgagctgtatgcccagtggggaaaagggcttgcccagagccggcaacagcaacaaaatgtggaggatgcagtgaaagagatgcaaaagcctctggcccgctatattgatgacgaagatctggataggatgctaagagaacaagaaagagagggggaccccatggnnnnnnnnnnnnnnnnnnataaggccaaggagaacaagaataaaaaagtgagacctcgctacagcggtccagcacctcctcccaacagatttaatatctggcccggatatcgctgggatggagtggacagatccaatggatttgaacagaagcnnnnnnnnnnnnnnnnnnnnnnnaaggcagtggaggaacttgcctacaaatggagtgttgaggatatgtaactttcctgaggctgtgggggtggctgggctgtggtagtgggcatnnnnnnnnnnnnnnnnnnnnnnnnnnnnttgtcatgtnnnaataattggagcccacaaagaccagcaacttgnnnnnnnnnnnnnnntgaccacagaagaatatttgagannnnnnnntttggactgaggtnnnctgtacnnnnnnnnnnnnnnnnnnnccggctgttgctggctttcagagagaannnattgatttcnncagtgtanncagnnngttgttcttggttagggtttttcttttcctt

SEQ ID NO: 12504 - DNA, 742 bp, Macaca Fascicularis
  misc_feature (1)...(742): n = A,T,C or G
tccaatcagtgatnnnagccaaaggaaagaaggtcagaggccgcctctacccctggggtgttgtggaggtggagaacccagagcacaacgactttctgaagctgagaannannnnnnnnnnnnnnnnnnnnnnnnnnnaggaggtgacccaggaccttcattatgaaaacttccgttctgagagacttaagagaggcggcaggaaagtggagaatgaggacatgaataaagaccagatcttgctggaaaaagaagctgagctccgccgcatnnnnnnnnnnnnnnnaaggatgcaggcgcagatgcagatgcagatgcagggcggggatggcgatggtggggctctcgggcaccacgtgtaaggccatgtgcacgtaccaagaagtcacaggtaggccctgttgtcccnnnnnnnnnnnnnnnggcagtcgttactaacattgttgtagcagcttaaatatgacaggttcctccttaagcctcattaatattttnnnnnnnnnnnnnnntccatcactaatctcaaacgagaagagattgctcctgaaaaacagaagccactactttgccacctactttctagtaaagatttctcacatttttgtctctttttttttaataattataacttttattttatnnnnnnnnnnnnnnnnnnnattttctaagcttgcaaatatcaacattagaaggaaattatgtattaaagcacctttattagttgtattattggaaatttgtt

SEQ ID NO: 12505 - DNA, 736 bp, Macaca Fascicularis
  misc_feature (1)...(736): n = A,T,C or G
agatgatcgagatnnnngtacggacaaaacacaagatcgacaaaagccacgagtttgcactggtggtnnnnnnnnnnnnnnnnncctggctgtccggcctgannnccgacccccgtgagctctgcagctgcctctatgatctggagacggcctcctgttccaccttnnnnnnngaaggacttttcagcctcatccagcagaaaactgagcttccggtcacagagaacgtgcagacgattcccccaccatatgtggtccgcaccatccttgtctacagccgtccaccctgccagccccagttctccttgacggagcccatgaagaaaatgttccagtgcccatatttcttctttgacgttgtttacatccacaatggcaccgaggagaaggaggaggagatgagctggaagcggccctgccagagccacgcttcctacagcctgctggaggaggaggatgaagccactgaggttgaggccactgtctgaatcatccctgtacatctgcatcttcttgtgcaaggaagtccttggcctaaagccttggttctcatactgggttccttgggacctctggggtcagggggttccaggaggcacctagggtaccttgtggggtcctaggagggaaacccaggattccaggagggatcccaggaactgtgggcacccatcttccgtgtttcccagcccatttccactcctagtttgtcatggataattttnntcttccctgt

SEQ ID NO: 12506 - DNA, 603 bp, Macaca Fascicularis
gaaacctgctctgtaggagccacccttttcctttgtggttttatggagacctctccttcctaccctcctgcactgtttaagtactgtttaccatttttcattcacttctcttaaacttgtgaatgcttcttttttttgtttgatgcaggcacttattgtaaattttaggaacccctgtgtagctattaatgagtaattatgcactaaatatgaaccctttgtttcttgtttattgagtttgtaggtaaaatgtatttttctacattattgcttattgcttagtaaaatttatttcataaaaccaacctttgtcatattagaatgtgtagtgtttacatgttgctcagttttgctaactgataaatcatttaatcctcttcttcatatgtatgagtactatcttatatctgtggtcaagagtgaggtaagcaagctccaaaagaccctgagaacctacccttgtatcctttctttggctaaagaaagcatgtctgtttcctgtcaattctttcaacatatagagtaatctttataaacaaaagaaccttcacccagcaaccagatcgagcagcaacagacaaaccagccagccactctcccaaa

SEQ ID NO: 12507 - DNA, 631 bp, Macaca Fascicularis
gccagccccagagggtgcttgcacggagccgcgggagccgccggggctgatcttcaataaggtggaggtgagcgaagatgagccggccagcaaggctcagcgcagaaaggagaagaggcagagggtgaaggggaacctcacgccgctgaccgggaggaactaccggcagctgctggagcgcctgcaggcacggcagagccggctggacgagctgcgcgaccgggatgaggggaaggcgcaggagctggaggccaagatgaagtggaccaacctcctgtacaaggcggagggcgtgaagatccgcgatgacgaacgcctgctgcaggaggccctgaggcgtaaggagaagcggagggcgcagcggcagcgccggtgggagaaacgcacggccggcgtggtggagaagatgcagcagcgccaggaccggcgtcggcagaacctgcgcaggaagaaggcggcccgcgccgagcgccgcctgctcagggcccgcaagaagggccgcatcctgccgcaggacctggagcgcgcaggcctggtctgagtctttcccacctggggctgccgtctctgtcctgggaggctccaggggaccctctgagtccttgatgctggctctgtcccaggatctcca

SEQ ID NO: 12508 - DNA, 691 bp, Macaca Fascicularis
  misc_feature (1)...(691): n = A,T,C or G
taaactaataagaaaacaagccagggtaacaagatccnnnctttttaaaaaaaacttcttgaaagttcatgagtactaaannnnnnnnnnnnnnnnnnnnnnnnnnnnnnnnnnngcctgtttgaatatggannnnnnnnnnnnnnnnnnnttgtattgtgaagacagtttgaaggatgaccacacatttcctcccctgaagcagctgcatnnnnnnnnnnnnnnnnnnnnntcttaacagcttgtgtgcaaggggatggcgtgggaggagtagctgtaactttcagtcctcaggcagcttgagcagtgctctcggtgcggggtgcagggtgtagagggctgccagaaggaaagccattaggnnnnnnnnnnnnnnngcgttggcagtgccacaggaattacacatcaacctttaatgtcatgatnnnnnnnnnnnnnnnnnnnnnnngtgctttcgtgtgatccttgtaaaatgcaaaatgccatccgttcttgtgaagtnnnnnnnnnnnnnnnnnnnnnnnnnnnnnnnnnnnnnnnnnnnnnnnnnnnnnnnnnnnnnnnnnnnatgatttccccatctgtgaagcaagatgctctctgaaccaggttccttctggtttgaaggttctgtgaaagtcaggttgtgaaagaatgtgactgtgggagggaggatgtcnnngnnatgccg

SEQ ID NO: 12509 - DNA, 749 bp, Macaca Fascicularis
  misc_feature (1)...(749): n = A,T,C or G
attgactacgnnggaaagtgtanctnnnnnngcnnctgatgagggcgttttaagtgacagtgtacacagatcccatcctctggctgctaggagaaaagtgctgaacgttccgtgtggagacactcaggaaagttatttgagttaaattgctggctcagagagcttggaagtccttttcataaaaggtacctatttccttttcttattgaattcttagaacttagttaacccnnnnnnnnnnnnnnnnnnnnnnnnnnnnnnnnnnnnnnnnnnnnnnnnnnnnnnnnctaaaagcttcttccaccaagagcccattggagaagcccagcgatgagacggtgagatggtttgagccctcggtgcctgggtcccaggacgacctgcatctgtacttggggaagccagcgggagaggatggggaggttacttctctaagtccctgcagaaatattgaaggctggagtttggaatccttaaacttggccttctcaaactcaacagcagatctccgggattctcctgttattatnnnnnnnnnnnnnnnggaaagatggatcttcttacatgcgaggagttttaaacagtccttaacatacctttgttgaagcacctctaaggtacagcagctctggtttctattacagtgacttgaatgtcagattcaagggcctggcgtcaaagtgaatcggttttgactttttgcagtctaggagcgacggtttgtgagatgtttattcagtgtaaagagc

SEQ ID NO: 12510 - DNA, 758 bp, Macaca Fascicularis
  misc_feature (1)...(758): n = A,T,C or G
agtgcagnnnnnnnnnnnacgnnnnnaagactgagcgtggccagaaacannnnntgtgnnnggcacgtgcnnnnnnccggaagacccagatcctcatcctggacgaggctacggccgccgtggannnnnnnnnnnnnnnnnnnnnnnnnnccacgctcgggagctggtttgcacagtgcactgtgctgctcatcgcgcaccgcctgcgctccgtgatggactgtgcccgggttctggtcatggacaaggggcaggtggcagagagcggcagtccggcccagctgctggcccagaagggcnnnnnnnnnnnnnnnncccaggagtcaggcctggtctgacccaagaccctcacctgtaccccnnnnnnnnnnnnnnnnnnnnnnnnnnnnnnnnnnnnnnnnnnnnnnnnnngtcattgatagnnnnnnnnnnnnnnnnnnnnnnnnccgtgtttgctctctgggaggaaannnnnnnnnnnnnnnnnnnnnnnnnnnnnnnnnnnnnnnnnnnnnnnnnnnnnnnnnnnnnnnnnnnnnnnnnnnnnnnnnnnnnnnnnnnnnnnnccctgcagcccatgtcaacagtgactctcagccccgctgtaccctggactcacgtcggggannnnnnnnnnnncccaggctccccgctagacccttaactcaggatctctgggagggggnnnnnnnnnnntgtgtgtactttttagaaattaacacttttattttgggataatcccagactcacatgcagta

SEQ ID NO: 12511 - DNA, 733 bp, Macaca Fascicularis
  misc_feature (1)...(733): n = A,T,C or G
gcagagggcacaggtannngctnnnacaagaacatttcagatttttctaacatcttatatgaagagggtatccaagggttgtatcgaggctataaaagcacagttttaagagagattcctttttctctggtccagtttcccttatgggagtccttaaaagccctctggtcctggaggcaggatcatgtggtggattcttggcagtcagcagtctgtggagcttttgcaggtggaatttgcnnnnncagtcaccacacanctagatgtggcaagacaagaattatgctggcaaaggctggctccagcactgctaatgggaacgtgctctctgccctgcatggggtctggcagtcacaggggctggcaggattatttgcaggtgtcttccctcgaatggcagccatcagtctgggaggtttcatctttctgggggcttatgaccacacgcaccgcttgctgttggaagttggcagaaagagtccttgaagcagagacagcctcacctccacttctgtcaagagaggggcctgcagtgtaaaccctcttccgctgagcagctgtctgaactataggccccagtgctgaagaccagttctgccaagatgccgnnnnnnnnnnnnnnnnnnncgtggtgtaggctggctggtatgaagtcnnnnnnntgtatgccagagagctaagagatgaaaacggggtgtgtggcggtactctgaacaattcctcagaacctctt

SEQ ID NO: 12512 - DNA, 737 bp, Macaca Fascicularis
  misc_feature (1)...(737): n = A,T,C or G
acaaaccagatgaaaatgaagttcgaactnncttnnnnnnnnnnnnnngccagaagagaaataatggtgnnnncgacaagtcattatttagcaatgttgttaccaagaataaagatttgccagagtcagccgtccgagaccnnnnnnnnnnnnnnnnnnnnnnnnnntacactcagtctaactccgtgtgctacgccaagaatgggcaggttatcggcattggagcaggacagcagtctcgtatacactgcactcgacttnnnnnnnnnnnnnnnnnntattggtggcttagacaccatccacaagtgctttcgatgaagtttaaaacaggagtgaagagagcagaaatctccaatgccatcgatcaatacgtgactggaaccattggcgaggatgaagatttgatcaagtggaaggcattgtttgaggaagtccctgagttactcactgaggcagagaagaaggaatgggttgagaaactgactgaagtnnnnnnnnnnnnnnnnnnnttcttccctttcagagataacgtagacagagctaaaaggagtggtgtggcgtacattgcggctcccgccggttctgctgctgacaaagttgtgattgaagnnnnnnnnnnnnnnnnnnnnnnnnnnnnnnnnnnnnnnnnnnnnnnnnnnnnnnnnngattcacacgctgctttttggcttgcttatgtgtaggtgaacagtcacgcctgaaactttnnnnnnnnnac

SEQ ID NO: 12513 - DNA, 682 bp, Macaca Fascicularis
cagatatgttgatgaggcgtgaataccgcagcaaaatagatgccaaatacaaaaagaagatcgagggaatggtcaggagacctgatacatctgagatagaagaggccacgactctgtgtccattctgcaaatttcttctcccagagtgtgaactcttctgtcctggatgtaaaaacagtatcccatattgcattgcaacaggtcgacacatgttgaaagatgactggacagtgtgtccacattgtgacttccctgctctgtactcagaattgaagatcatgctaaacactgaaagcacatgtcttatgtgttcagaaagattaaacgctgctcaactgaaaaagatttcagactgtacccagtacctgcgaacggaggaggaactgtgagcggcatgtgcagatacaatgctcttgagaagacagcattttccacaggaggctgtttccttccctggtgcatttatttaagagacggtcctttctggatacagagaaatgaaccaacagtgacctctccaggttggcacttcccacttctgtacagtggcaaaacgatgatgtgtaagcttgctgtttattgtactttgtatatttcctcttcaaagtcttacacactctatcctctgcactgttaatagtaacctatgacataattgtaaatattcagctttttgataact

SEQ ID NO: 12514 - DNA, 768 bp, Macaca Fascicularis
  misc_feature (1)...(768): n = A,T,C or G
tgtcctagagccccannnnntngtcgtcgtatggcaagagaaagacccttacggaaacaatctacaagaactactannnnntccaactgaagccnnngcagttcagttcctnnntgacatccccagacgtgggcttctccagctatgagcttgtggccacaccccacaacacctctannnnnnnnnnnnnnncnnnnnnnnnnnnnnncaaggcccgatcccccagccnnnaagtgnnnnnnnnnnnnnnnnnnnngaagaggatgcccttgctgctcctaaggacctgggggaagaggaaagtgtcccagggtctttcctgactccaaaaatagtttcctttcttggatctgnnnnnnnnnnnnnnnnnccatcgctgcctcagcctcctccctacgcctctggcacctgnnnnncaaggtggctgtggtggagtcaccatcatcttcctctcccccagcctcccaggctggatggcatggactgtttgctgacctctgttctcttagggcatgggaggtgggaggatatcaaattctctagccctttcctcctattctcccaaggagagagattcccatttctcctcggctgttgtccctagctcttgtccnnnnnnnnnnnnnnnnnnnnnnnnnnnnnnnnnnctgagggttcgagggggaagcctggcagggaggcacgcaggtactgtgaaaatccttccctctgtcctcccccagtgggagagggggttgggttttgaatgtgagaacagcacaataaact

SEQ ID NO: 12515 - DNA, 756 bp, Macaca Fascicularis
  misc_feature (1)...(756): n = A,T,C or G
caagcagcaccccaaannnnntacagtcctaatctttagttatccacttctaaaatttaatgtgaatttcatacgtgttattagtttgttttctttataattttataaaaattatccattaggagtttaacttccacttcccatgctattggatgtgttgggctccatccaacaacttggaagaaaaatgggcaggaatacatttgcataatgacccagatcnnnnnnnnnnnnnnnnnnnnnnnnnnnnnnnnnnnnnnnnnnngtctgcaattctttacttttccttggtggattattatctagctgccatcactggataatgtggagtgactagagaagtcacattcactgcaaggtacagttagggtaacacttaggaggtttattatttttaaaaaacttttcttgaactcctggccaacatggtgaaaccctgtctgtacgaaaaatacaaaaatcagtgtattttttgtacactaatttttgtacataccagatnnnnnnnnnnnnnnnnnnnnnnnnnnnnnnnnnnnnnnnnnnnnnnnnnnnnnnnnnnnnnnnnnnnnnnnnnnnnnnnnnnnnnnnnnnnnnnnnnnnnnnnnnnnnnnnnnnnnnnnnnnnnnnnnnnnnnnnnncaaaaaagaagcaaaaaaaacccaaaaacttttctttactgttgattaaaaaaaaaaaaaaaaaaaacgnnnnnnnnnnnnnnnnnnctggtggcnnnnnnnnnnnatcaaaaaagca

SEQ ID NO: 12516 - DNA, 101 bp, Macaca Fascicularis
gatccctccaaagaacctgagccggtggttcactatgagatctgaggaggcttcgtgggcttttgtgtcctcttaactaggactcccttattcctagaaat

SEQ ID NO: 12517 - DNA, 744 bp, Macaca Fascicularis
  misc_feature (1)...(744): n = A,T,C or G
ttccacctatgcagaggtggagccctcgggccatgagaaggagggcttcatggaggctgagcagtgctgagaacaccaggtctcccttgtgaagactttgagaccacagaaaagacagttaaagcaaagaagagaagtgacttttcctggcctttcccagcatgccctgggctgagatgagatggtggtttatggctccagagctgctgctcgcttcgtcagcacgccccggatgttgaagagggggccaaaannnnnnnnnnnnnnnnnnnnnnnnnnnnnntaatctaatctcnnnnnnnnnnnnnnnnnnnnnnctcttctggnnnnnnnnnnnnnnaaacagcagaagaactaacataactaactccatttttgtttaaggggcctttacctattcctgcacctaggctaggataactttagagcactgagataaaacgcaaaaacagcaaccatgccatttgcaaaactannnnnnnnnnnnnnnnnnnnnnnnnnnnnnnnnnnnnnnnnnnnnnnnnagatttataggaacgaggaggaggtttggctgttgtcacatgagagactgttagccaacgacaaggaagttccgcaaacctcccctggacnnnnnnnnnnnnnnnnntgtctgcggttgtcagccccttcctttccccctgacctaaacagaaaagacaaggcaaaacccacataattttaagacagttctttaggacattagtccaccatcttcttggt

SEQ ID NO: 12518 - DNA, 767 bp, Macaca Fascicularis
  misc_feature (1)...(767): n = A,T,C or G
tcaatatgcaagcaaatgtaaaagctcncgactgtggactttggtccgcacgaagcccattcacgtgtgatctgtgtcgcccctctcggtggtcccaggcgatccagccatgccccctgcccctctgcccagatgcttcaggggcccggcttttcaggcttgccctcaccagcggccgtcagccgacactcagggatgtagcaaacaccactccgccagtgcttttggtaggaagagctgaggctgcctgggaggcccggggcgacaggaaaagggctctctccagttctgaaaagagaatctgccaccagatcgaatttcgacccctgagcttgttcagacatacggtccgaattcagattaaggtggtcacccagtccgagatgtcaggaaaggccttctgcagagaaaatgtccccctacccgccatctgcagccaggtgtgtgccgcacggcagccttcccgaaacatagtatggattttaaaaatgtgtttatttttgtttctcaaccactttataatgtattttttaatttattttgtaatgtcttgtttttaagtattgctgctatccttgttatccttcccacggtttttatcgctgatttattttgtgaaagttgtacactaatgttctgttttatgtcaaaatcaaaagtatttaatgaaatactagttctatttaatgtggttatggaaccagctggaaacacaaaacaaacagtgattgtacagcagnnnngcccaggaggtcaggttcattttg

SEQ ID NO: 12519 - DNA, 752 bp, Macaca Fascicularis
  misc_feature (1)...(752): n = A,T,C or G
gtgacgtagagattccagggcaggggcctatgtgtgaaagcaattccaccatgnnnnnnnnnnnnnnnnnnnnnnnngtcagcacaccagcaggcaaggttggtctagctgtctgctatgacatgcggttccctgaactctctctggcattggctcaagctggagcagaaatacttacctatccttcagcttttggatcggttacaggcccagcccactgggaggtgttgctgcgggcccgtgctatcgaaacccagtgctatgtcgtggcagcggcacagtgtggacgccaccacgagaagagagcaagttatggccacagcatggtggtagacccctggggaacagtggtggcccgctgctctgaggggccaggcctctgccttgcccgaatagacctcagctatctgcgacagttgcgtcaacacctgcctgtgnnnnnnnnnnnnnnnnnngacctctatggcaatctgggtcacccactgtcttaagacgacttctgtgaattcagacccgcccccaccccgccattgtgagctggtgctcatgtgacttggaggcaggacccaggcacagctcccctcacttggagaaccttgactctcttgatggaacacaggcaggcttggcttcttaggcaagaaactttcacctgagcttcacctgaggtcagattacagtttcagaaaggtggcattttatatagtcattgtttatttcatgaaaactgaagttctgctgagggctgagca

SEQ ID NO: 12520 - DNA, 776 bp, Macaca Fascicularis
  misc_feature (1)...(776): n = A,T,C or G
gatgatccattagcaaatnnnnnnnnnnnnnnntggaagaccaacgaagnnnnngccatagaaacagctagagcatggactaggctatatgccatgaataatattaaaattgatccgatcatcaagtgtgcatcacttctcctgttctgccaagacttcctcctttttgtttgnnnnnnnnnnnnnnngtcttagaaacattacagaataaaaaagcccagacatcttnnnnnnnnnnnnnnntaaatgcacattagcaaatctatgtcttgtcctgattcactgtcataaagcatgaacagaggctagaagtatcatctggattgttgtgaaacnnnnnnnnnnnnnnnnnnnnnnctgcttttattcatttcccccatcctggtttaagtataaagcacnnnnnnnnnnnnnnnnnnnnnnnnnnnnnnnnnnnnnnnnnnnnnnnnnnnnnnnnnnnnnntattttttttgaggggggaggtagttttatttttaattttatgggcccctttcccccttttttggnnnnnnnnnnnnnnnnnnnnnnnnnnnnnnnnnnnnnnnnnnnnntatgctctctagccaagtctaactttatttagacgctgtagatggacaagcttgattgtttgaaccaaaatgggaacattaaacaaacatcacagccctcactaataacattgctgtcaagtgtagattccccccttcaaaaaaagcttgtgaccattttgtatggcttgtctggaaacttctgtaaatcttatgttttagta

SEQ ID NO: 12521 - DNA, 679 bp, Macaca Fascicularis
  misc_feature (1)...(679): n = A,T,C or G
agcaaagctttaaaattgggggttggtgctcaagggaaggatttgctatgacctcatagaaacttgtccagtgtggtcacttaccctatccttaccctccttatcctcaaagtttgggttgatagaagactagaggctggccctcccagataacagagaaaagggagccccaaatgcaaccagcctcttgttctattcttgcctgcaannnnnnnnnnnnnnnnnnnnnnnnnnagtccctgagagccatttcttcccctgcatcgtctcacttcacttcctgttgactgctggtagaagatttggggtaggggacagacctccttttatttgaagggggcaagggctgagatgtggtccccaaggggccagaaatttccaagttggtcacaggtggcttagaagtgtgggttatggttttagggatttccttggagcctctctccttctctgcctacacagaccctatactctcagtctccccaacccaccccccaaggagctgtgggaggctttgtgttatctgtgaaactccaaaaccggggtgttgcggagaagggagagttcaaggcaaacacaaggactggacttagctccctaggtgccacggtcagatgccggacacggatttatatataaatatatatatataaatatattatacccactcatcacggcc

SEQ ID NO: 12522 - DNA, 937 bp, Macaca Fascicularis
  misc_feature (1)...(937): n = A,T,C or G
tagcaggtagcccctggcgcctgctgnnncagggatgctccaaccacnnncgttctcccggcagcggccctggctcccagctcccgccccagcctgccgcggggcccgtcagcctggtcccacccccatggagaacccaaagtcttactgtatataactccaggtgacgtttctatatttatagcagtgttgaaaacccacgtgttttacacagaaccaccctctccaacccctcccttcccgaccccaacaaaaggttttcaaaccccttacggttcctggggcaggcggaaacaggctcgcaggccgtgtgtcggctgcagcagtgattccaacaagcagctgttgggggggaacacannnnnnnnnnnnnnnnnnaaaccaagatttatacaacaattacttaggatgtttgtgatttgccgaccttgctgtagatgccatgttaccaatgatttcctgtggtgggggcttgccattgtttactcttttatttaccaacttctggcctaggcatgacagtgggcaccttcccccagccccggctgggcccagcgcctgtgttctgtgttagaaaggttttatatatatataaaattacatatatatatagaaatatatgtaattttgggggccctgttccttgcacattttacagttacctcatttttcccatgtatgtatttgagaaaatgctaatatatagagaaaaaaatggttcttaaagcttaaatgtgtggttttttccattccatgggattcacattggtttgtagcatttaacataactagtatgttgtattatatatatgtgtatactgattgaaatttttaacagatttgtactttttttaaaatgaaagttgctagttctgcttgaccaagtagtgcaatcattattttttttaatattgttgctgattnnagagggatanca

SEQ ID NO: 12523 - DNA, 758 bp, Macaca Fascicularis
  misc_feature (1)...(758): n = A,T,C or G
atccaaagacttggatggaggnnngaatgtcattcagttagaaactgcagtaggggctgccatcaaaagtttcgagaattctctaggtattaatgtgccaaggagccgttttctgcctgtcaaaaccacatcagatctcttactggtgatgtcaaacctctatagtcttaatgcaggatctctgacaatgagtgaaaagcgggaatttcctacagtgcccttggttaaattaggcagttcttttacaaaggttcaagattatctaagaagatttgaaannnnnnnnnnnnnnnttgaattggatcacctcacagtttcaggagatgtgacatttggaaaaaatgtttcattaaagggaacggttatcatcattgcaaatcatggtgacagaattgacatcccacctggagcagtattagagaacaagattgtatctggaaaccttcgcatcttggaccactgaaatgaaaaatactgtggacgctttgataatgggctagtttcttacaatgaaatgttctctaggattctaaaataggcaggtactttactatgttactgtaccctgcagtgttgatttttaaagtagagttttctgcagtatgcttttagtctaagaaaagcacagatggagcaatactttccttctttgaagaggatcccaaaagttagttcatcttaaagtgcaatattgtttaatcttaaaactggggcaactctggaagatcttttaacagaagcctcagtgatggtcacac

SEQ ID NO: 12524 - DNA, 736 bp, Macaca Fascicularis
  misc_feature (1)...(736): n = A,T,C or G
tgcctcacggaggccattgcannnaagatgnntttcacagccagnnnnnnaccaggactggccacaccctaccnttgctgtgatggcacaccagaatnnnnnnnnnnnnctgaggtcaaaaccctgggcgccctctcttttctcctgcacgcttcccttgattctgctcctgagcctatggtagctggacttccctagggccctcttcccctccaccacatccagccagacttgcagcccacaaggtgttaggaaaggacagcagcagaaagaggtgcagtgcacagatgagggcacaggagaagctaacggttatgacctccagatccttgtcggtctggtcctcattccctccaccccgtctccacttctgattcatgctgcccctccttggtgaccacaatttagccatatcannnnnnnnnnnnnnnctccaccaagcccctttctaagcccttcctcttgactaccaggnnnnnnnnnnnctaataagttagccattctctattgcannnnnnnnnnnggttnnnnnnnnnnnnnnnnnnnnnnnnnnnnnnnnctagaaagacattatcctttgtgaggaaggttcctgcccactcatctcctcctctgaatggtggatggaaacctactgcctgcactgccctgtccccggatcctgcagaacatctgggcatctgaagctggagcctatgggccttgctttattcctattattgtcctaaagtccctc

SEQ ID NO: 12525 - DNA, 753 bp, Macaca Fascicularis
  misc_feature (1)...(753): n = A,T,C or G
gctgatcatnnnaagacagacaggaagaaatnnnnntnntggagacagtcnctttgaatgaagacaannnnnnnnnnnnnnnnnnacagnnngcagcatgtctgcacatgtgcatacacaccgggttgacagattgagaaaactgggtttgaaccaaatgccgtagcaacttgctgtggaccaagtccttccatttaatagaagctctaggggctccttcccattcagacctctctagagtatagtctgtgcttagagatcttgtctggttatagccattgttttttactcctttgatcacttaatttatagannnnnnnnnnnnnnnncagtctcacttgtggcctatttctctgctgcttccaggaatttgcttttattagtcaagtataggggctgccaggttctgtgtctccatagtatatttgcttcttttcctatagctaaaatgtataataaacaggaacctgacctttacctnnnnnnnnnnnnnnnnnnnnnnnnnnnnnnnnnnnnnnnnntggaattagagtttcttcaaattgattaattgatttttcaagtatggattatgtgaaannnnnnnnnnnnnnnnnnnnnnacagtttaactctttcatttaaaggtcnnnnnnnnnnnnnnnnnnnnnnnnnnnnnnntattaggtcagtgactgaagggactgagaatgcagacctgatttccaagccaggactcccatgctgcctcatttgtattcaagccttaacagga

SEQ ID NO: 12526 - DNA, 753 bp, Macaca Fascicularis
  misc_feature (1)...(753): n = A,T,C or G
cagctcattccaatnnnngccatannnaccaacgggagcgagttggtcactgctgttttcattgaagagttgagggatgtggcagaaagnnntgccaagcttcttgaataaaaggtgtttgatggataagtattatacctaaaatattttcttccttctcagcactttcccatgtattgatactggtcccacttcacagctggagacactggggtatatgcagtgtgggatttgactcctccaagattttgtgaaaagttagtgtcaaggaaaggacnnnnnnnnnnnnnnnnnttttaatcctggagtctcactgtnnnnnnnnnnnnnnnnnnnnntgccctcttagctcttagctggtctaagaagnnnnnnnnnnnnnnnnaaatgctgcttccactcagggcttctctgctaggcgacccnnnnnnnnnnngctgnnnnnnntgggctacagtgtctggcctcgggaagaattgattctgtccccacaaagannnnnnnnnnnnnnnnnnnnnnnnnnnnnggcatccaaatggctgcttttgtctcccttacctcgtgaagagaggaagtctcatcctgcctcccgagcagttgaagggcgactaaactggnnnnnnnnnnnnnnnnnnnnnnnnngaactgggccagcagagtatgttggacacctcccaccatggtgggcttgtggtggctgctcatgagggtgggggtgatattactagatcacttgtccnnnnnnnnnnnnnt

SEQ ID NO: 12527 - DNA, 706 bp, Macaca Fascicularis
  misc_feature (1)...(706): n = A,T,C or G
gagtgagctgaggttctgggtgggcctccagccccatggctagtgctcctgccctcagagcagaccccagcctctgccaggcacatttggctcttcctccctaggggcaggatgaggggctggggnnnnnnnnnnnnnnnnnnnnnnnnnnnnnnnnnnnnnnnnnnnnnnnnntgtaattatttttgtaaacgttgtattctctgtggttgccacctccgcacccccagccttgggtccagtctgtcttccaggcctgcttgcacctcactgggctgctctggggtctctgcccctcattccagccctggctgtcaggcccagccagcagaggannnnnnnnnnnnnnnnnnnnnnnnnnnnnnnnnnnnnggggatggggtagggnnnnnnnnnnnnnnnnnnnnnnnnnnnnnnnnnnnnnnaggggaccctgcacgacacccccttgcccttcctccnnnnnnnnnnnnnnnnnnnnnnnnnnnnnnnnnnnnnnnnnnnnnnnnnnnnnnnnnnnnnnnnccacatgcccctcccctctccggagcggaagcccccaagtgtctgaatccctgaagtgtccatttgtccgtcctctgtgcagtgacagccccggccaagccacctctaatcctnnnnnnnnnnnnnnnnnnnnnnnccatccctgcccatcgtgcaccactaagattttaaagtccataga

SEQ ID NO: 12528 - DNA, 730 bp, Macaca Fascicularis
  misc_feature (1)...(730): n = A,T,C or G
caaggctgctgtggacgcgatgacacggcacttggctgtggagtggggtccccagaanancnnnnnnnacagcctcgcccctggccccatcagtggcacggaggggctccggcgactgggtggccnnnnngccagcctgagcaccaaggtcactgtgagcccgctgcagaggctggggaacaagaccgagattgcccacagcgtgctctacctggccagccctctggcttcctatgtgacgggggctgtgctggtggccgatggcggggcatggttgacgttcccaaacgatgtcaaagggctggcggatttcgcatccttctcttctaagctctaggattcttccggtcactgctcccctctgcctcacagccaggtggagagcaccagtctgaaccagcaatgcccacagcccagcccctcctccggacactcagctatttctgcactctccctccccgtggagctgccatgccggtgtctgagggccaggtgccacgnnnnnnnnnnnnnnnnnnnnnagatactgagatgtcccctgagggagccacatggatcctgagacttgtgttctcttggctgaaaacactgaggtgctcctgtctgtgcgtggcccatgagctgggacgggcctctgtctctgcaccacctgtttgcataaacacactttgctacaatcttgctagatggtacattttcttaaaagataatctactgtaaaaataaactg

SEQ ID NO: 12529 - DNA, 730 bp, Macaca Fascicularis
  misc_feature (1)...(730): n = A,T,C or G
ccagcctgggcaaggcggagcccctcaccatnnngagccgaaacgccacgcacccgctgctacacatcaacacgctgtacgaggcccgggaggaggaggaagggggcccccgcctgccgcaggacgtgggggacctcatcgcnatccctgccccgcagcagatcctcatcgccaccttcgacgagccgagaacggtcgtgagcactgtggagttttgagggatggcaccgcccaggccgtcagagcccctccagatgcctcccggcggacaccagccctgcgtggacgtggcctctacttcgaccgcactgcccacatccccaacctccgtcagcatgcctggggcccccaccccacccgctccacaggggaacccgccccgacagcatctccaggcactggctggggcgggaaaaggtggccccgtggagccggtggccaggaaggctgaagccggcttcccatgctcctgcatcaggcgcccagccgtgggtgggggcctccagatgaagagtttatttttgtagtccgtttcgtcctggccccgggctgtggcgggacagcccagctcccccagcccagagccagggaagaggaaggtggagccggtcccaccagtggggtggccacgcccatggggtcacgtgctcaggggtcaccccctgcagggacctgatgccctcgggtgggagggaccgaggtccaccctcgggtcaaagatcaacatgca

SEQ ID NO: 12530 - DNA, 701 bp, Macaca Fascicularis
  misc_feature (1)...(701): n = A,T,C or G
gtgctgtcactaatgggatcccanntgnttcggannngaagatacaggccgccctgaaactggaacacattgatggggtcaatcttacagttccnnnnnnnnnnnnntcccgaaaggacatcttgcaaggtgtcaagnnnnnnnnnnnnnnnnnnnnnnnnnnnnnnnnaggctctggctgtgccctggtccagctgcagccactgacagtgttctccagtcaactacaggtacacatggtactacagctctgccctgtgcttggggaccacacatactctgcccgtgtggggactgtcctgggccagnnnnnnnnnnnnnnngctgagagcaccaagccccaaagacaggtcctggatgaagccctcttcagacgcctccacctgacccccnnnnnnnnnnnnnnnnnnnnnnnnnnnctccacatacatcggctcctcctcccaggcaccagggccagggacacccccatcgagctcctggcaccactgcccccttatttctccaggaccctacagtgcctggggctccgcttacaatagtcctccctctgttcctgaccccctcacacacactggaaagtgagggtgggggctctgcagtcggacaaacctaagatcacatcctggacaggccacttgcttgctgtgtggcattgagcaagtaagtttacctctctggacttgtgataataaaagttc

SEQ ID NO: 12531 - DNA, 739 bp, Macaca Fascicularis
  misc_feature (1)...(739): n = A,T,C or G
gcagggtaccgggctggttacagcagctctacccctcacgacgcagacatggcagcccagaaggaccagcagaaagatgtcgaggcggaagggctgagcgccacgaccctgctgccgaagctgattccctccggtgcaggccgggagtggctggagcggcgccgcgcgactatccggccgtggggcaccttcgtggaccagcagcgtttctcacggccccgcaacctgggcgagctgtgccagcgcctcgtacgcaacgtggagtactaccagagcaactatgtgttcgtgttcctgggcctcatcctnnnnnnnnnnnnnnnnnnnnnnnnnnnnnnnnnnnnnnnnnnnnnnnnnnnnnnnnnntgttacattctctatctgcgcaccttgcagtccaagcttgtgctttttggccgagaggtgagcccannnnnnnnnnnnnnnnnnnnnnnnnnnnnnnnnnnnnnnnnnnnntggctggctggtgcgggctcggccgtcttctgggtgctgggagccaccctggtggtcatcnnnnnnnnnnnnnnnnnnnnnnnnnntgaggctgtggacggggaggnnnnnnnnnnnnnnnnnnnntgaggtgtcttctgggacctgccagcctcccgggccagctgccccgcccctgcctactcctgtcctgcacagctctgctgctcgggcccatagcgccgtcccatcacaagcccggggagggatcccgccttgaaaa

SEQ ID NO: 12532 - DNA, 758 bp, Macaca Fascicularis
  misc_feature (1)...(758): n = A,T,C or G
ttccatattgcatacaaagaggaatcnnnaggttcccacatacatcaggtctttctgtgtgcgctccatcctgaatgaatatgaaggccatgagagccagtgagctttcctctagaccataacaggtctgcagacacagcagtgcaagtgcccttcctgcaaaatgctcccctccctgcnnnnnnnnnnnnnnnncagatagagaatcatagcatgnnnnnnnnnnnnnnnnnnnnnnnnnnnaagaggttaagtggcttgcctaaaaccacacagcgattaataccagtgccctaattagagctctcacgtgttttccctnnnnnnnnnnnnnnnnnnnnnnnnnnnnnnncttcctaaccctcttcctctcccactaagagggttatggctacaaggaggagagggagtggaggttggaagggataacactgaacattctctctcttgtcctctctggcccacaggcaacaaaatgaagttcctccacaagaagaattaagcccccttctcagtagcagagtccagtgccttgcagagccnnnnnnnnnnnnnnnnnnnccagcctgggaccctctgggctgctgtggctcctctgcccccacagatcccatcctctaagccagcccacctctgccttcatcatatcccgggatactgtttgtaaataatctgctgtaagctttcttaactgtttttgtacaagcaaagagntatgntnntatttgtatattccnnnggcnggtgcttcctgtctg

SEQ ID NO: 12533 - DNA, 487 bp, Macaca Fascicularis
ataggcgtgagccctcgcgcccggccctgaagtttttactttcaatcaagggtttatcaagatgattttacagggcacatctgggaatgacccttcctgggagtttatggtgttggttgagaatgaggcctaatatatttaaacatttgcagggagaaagaactggcaaaagtcactatcaagaaggaagatctggagctgatagtgagtagtagtgcctaactactgtatggggagaggaggctattctgcttaatttgggttgtttcctgaaacaagcggagtcagaatatttggtggcacattaatgcctgggaatctatgtaacatggtttttttctgcagatgaccgagatggagatatctcgagcagcagcagaacgcagcttacgggaacacatgggcaacgtggtagaggcgcttattgccctaaccaactgactcgtgcttccacaaatatacctactggattaatttatggcaataa

SEQ ID NO: 12534 - DNA, 718 bp, Macaca Fascicularis
  misc_feature (1)...(718): n = A,T,C or G
gtagctttttaaagtttctnnnnnnnnnnnnnnnnnnnnnnnnnnnnnnnnnnnnnnnnnnnnnnnnacaaaggggttttagtgccttagaagtcctgagaaacccaatctgtatcaaagcagatccattttgcaaggatctttctcttagtaagaactttagaagtaatcttgataagaagcacagacagcctaacagttggcgctagaacagaatacttggaatgacaccagagttaaccaagtccagcatatgtccaaagagttaagtgtttcagttactgtagcattatgggtgagaaattggttgctgaaatcttaagacagtggctctcaacnnnnnnnnnnnnnnnnnnnnnnnnnnnnggttttaaagcctccaaatggtaactaacatgcagccaaacttgagaactagttctgcatctactgtgcaaagatcatgattaactgtcaagacactggtagaacagaacaagcaaaagattaagaattcaaaagtaaatgcaaccaatttaacatgtaatgttattaaaaaaaaataaaacgcttagatcagcctgggcaacatggtgaaaccccatctctacaaaaaattttcaaaaagttagccaggcatggtaatgcacgcctgtggtcccggctgctcaggaggctgaggtggcaggatcacttgagccttggaggtcgaggctgcagtgagtcatgatcatgccac

SEQ ID NO: 12535 - DNA, 694 bp, Macaca Fascicularis
  misc_feature (1)...(694): n = A,T,C or G
gtacaaattgttttaaaaaaaattgctgccactttttttttcctgtttttgtttcgtttttgtagccttgacattcacctcccttatgtagttgaaatatctnnnnnnnnnnnnnnnnttcgttgtttgtttttactcctttccctcactttctccagtgctcaactgttagatattaatcttggcaaactgcttaatcttgtggatttnnnnnnnnnnnnnnnnnnnnnnnnnngcattcagatttaagagtgaaaggaaaaattgcattagttggttgcatgaactttgaagggcagatattactgcacaaactctgccatctcgcttcatttttttaactatgcatttgagtacagactaatttttaaaatatgataaactggaagattaaacagatgtgggccaaactgttctggatcaggaaaagtcatactgttcactttcaagttggctgtcccccctgcccaccccccacccccatatgtacagatgataatagggtgtggaatgtcgtcagtggcaaacatttcacagatttttattttgtttctgtcttcaacattttgacactgtgctaatagttatattcagtacatgaaaagatactactgtgttgaaagctttttaggaaattttgacagtatttttgtacaaaacatttttttgaaaaaatacttgttaatttattcta

SEQ ID NO: 12536 - DNA, 742 bp, Macaca Fascicularis
  misc_feature (1)...(742): n = A,T,C or G
taaaccagaatgattccgttttgcnnnnnnaatttggggaatcttaacatttagtatttttggtctgtttttctccttgtatagttatggtctgtttttagaattaattttccaaaccactatgcttaatgttaacatgattctgtttgttaatattttgacagattaaggtattgtataaataatattcttttggggggaggggaactatattgaattttatatttctgaacaaagcgttgacaaatcagatgatcagctttatccaagaaagaagactagtaaattctctgcttcctatagcagaaaggtgaatgtacaaactattcgtggccctgaatcnnnnnnnnnnnnnnnnnnnnnnnnnnnnnnnnnnnnnttctgatttagttaggagagagccgctgataggttaggtctcatttggagtgttggtggaaaggaaactgaaggtaattgaatagaatacgcctgcatttaccagccccagcaatgcaatgaatttttaatcacacggatctcaaattcacaaatgttaacatggataagtgatcatggtgtgcaagtggtcaattgagtagtacagtggaacctgttaaatgcataacctaattttcctggaactgccatgttttcttttaactggaaatttttatgtgagttttccttttggtgcatggaactgtggttgccaaggtatttaaaagggctttcctgcctccttctctttgatttatttaat

SEQ ID NO: 12537 - DNA, 766 bp, Macaca Fascicularis
  misc_feature (1)...(766): n = A,T,C or G
ggcatcagcctgcaggccatgtcctgnncngaggagctgcagtgctgccagtcggagatcctggagctgagatgcacggtgaatgccctggaggtggagcgccaagcccagcacaccttgaaggactgtctgcagaactccctgtgtgaagctgaggaccgcttcggcacggagctggcccagatgcagagcctcatcagcaacgtggaggagcagctgtccgagatccgggctgacctggagcggcagaaccaggagtaccaggnnnnnnnnnnnnnnnnggctcggctggagaatgagattgccacgtatcggaaccttctggagagcgaggactgcaaactcccctgcaatccctgctccacgcctgcctcctgtacttcttgtccaagctgtggccctgtcacgggtgggtctgcctctggccatggagccagcatggggagatgattctgaaggcccgaagttcctgtgcaggaggttgaggctggttgcactggggtcaggagtgccttcaccttgctcagtctgccttccagaaagaccagactcactgaggcattttccctaaatcaacgggtagcggacacttccaaggagtgtctccctgcctatgcctctaagctgtattttttgttgttgctgaaatgttataattnnnnnnnnnnnnnnnnnnnnnnnnnnnnnntgcctcttcttggttcttttggttctattccagtgtttcagaatctcctaaaatgtcactggtnnnnncctgcattaa

SEQ ID NO: 12538 - DNA, 805 bp, Macaca Fascicularis
  misc_feature (1)...(805): n = A,T,C or G
cggggatggcagatcatgagcagtggagaagctgcggnnnnnngagggtgccagcaacgagagtgagcgggactagggccgcgcccactgcctccagccctgaggacggcgtcnngtatgccggtgcgtggccataccctgcctccctctctggccctgggagggcagcttggagcccaggtagggggcagannnnnnnnnnnnnnnnctgcggcctggtggcagcgtggggagtcgcacttctgtccacctggcctcctctcacctggccgccagcctcagccccaggcccnnnnnnnnnnngctttgatctcaagtcaggctgaaggcagcgaagcctcggggctcaagcccctgcccagccccctctcccggacagacgccttgcccagcgtgtgtttgccgagtgnnnnnnnnnnnntgacaccacgcatggccagagctagcgtccctactgcctcccgactcctcagtggaggaggagctgcggtccctctggtgtctgccgtccccctccctccctggacccggccctggaccccgcaggtgcctgtccccagcaccaacccactcgtgccccgtcgtcctccnnnnnnnnnnnnnnnnnnnnnnnnttctgatgccctcgcttgccgtgtcatggttcagctaatcccatggcgagatgggggctcactccctcggaggagccaggcaccagggctttcctgaccaacagccagctctgtccttccccccaagaaacacatgttcatttgtgtgatcatgtatagacctcagaatggaagataggactgtatataat

SEQ ID NO: 12539 - DNA, 760 bp, Macaca Fascicularis
  misc_feature (1)...(760): n = A,T,C or G
ttctcacagtatatannnnnnnnagtttcaaattgcagtaaatatactgtatgagaaaatattaatacagataaaaagcattcttacatcctgaaaattttctaatacttgagaatttcacagggatgttttttatattggacccttttgactttccagtcctgtgactttctacttttagtagagagtcagaatctctggactggagaattatgaagaagttcactgactgtgcactgtgcttagagaccctgccgcaccacagtgccaatgcttgtcagacacatgcccttcggcaacattccagaacaggagggaagagaaagagaaaactctttcttcccttctactaaaagattcaggcagcttaaaaccttagtgctttctttcttaacaaacccaaatttcaattctttccattgtttgaacacttgggtagaactctcgctttgtattaaacctccttgtctacacgtgtaaaactgaccttttgttattgagcaggcctatctctttcagctagtttgatgattcacacaggtttgaggacgctggggagaaggggaggggctgtggtggtgttctgttggttacaagaaagttataccatttaaagctggtaccagagacctgatagggacttattaactatattgaacattttttcctttgcctttgaccctatgtatagttatgatgccagattagatttatagcagcttcaagttgtattaaatgatattttgcttcctgtaatact

SEQ ID NO: 12540 - DNA, 739 bp, Macaca Fascicularis
  misc_feature (1)...(739): n = A,T,C or G
gtcccaagaccatgaaaaagctgctgcccaagcgcaaacnnnnnnnnaagccttccgatgaggagttcgcgtcccggaaaagcacagctgctttggaagaannnnnnnagattctgaaagtcatcgaagcttactgcaccagcgccaaaacaaggcaaacactcaattcaagttcacgcaaagaatctgctccacaagttttgcttccagaagaagagaaaattatagtggaagaaactaaaagtaatnnnnnnnnnnnnntagaagaaaagagtcttgtggataccgtatatgcattaaaggatgaagttcaagaattaagacaggataacaaaaagatgnnnnnnnnnntagaggaagaacagagagcccgcaaagacctagagaagctggtgaggaaagtcctgaagaacatgaacgatcctgnnnnnnnnnnnnnnaatctataagggacgtccttagttctnnnnnnnnnnnnnnnnntctgaggtgaagctgggcacccctgacccacgtcggggtgcactcaggaccgcagggcagggctgggtgggcaccacctcgctctctgtacatnnnnnnnnnnnnnnngattctgcgaatggagacgatcaaaccatgnnnnnnnnnnnnnnncaggagggattgactctgaggacctgagctgcatcagtcccactctgtgaacatctcagttacctcattctgcaataagnnnnnnnnnnnnnnnnaagtcttt

SEQ ID NO: 12541 - DNA, 676 bp, Macaca Fascicularis
  misc_feature (1)...(676): n = A,T,C or G
gaaccatcttggctcactgcagcctccgcctcccgtattcaagtgattctcctgtctcannnnnnnnnnnnnnnnnnnnnnnnnnnnnnnnnnnnnnnnnnnngataatttttgtatttttagtagagatggagtttcaccatttggccaggatggtctcgatctcttgaccttgtgatctgcccacctcagcctctcaaagtactgggattacaggcgtgaaccaccgtgcccagccacttagctttttcttattcccacctnnnnnnnnnnnnnnncacccttttttatcctccctgaaccatattgataagataaatagggctgggggcggggccccgctggtcactcaacagagtatttcccttggccgagatggaagtttcgtcccaatagatgagctgctgagnnnnnnnnnnnnnnnnnnnnnnnnnnnnnnntttgtgtcctggagagggtggtaccctgaaggcagaggccagctgctataagacagcaatgacagtccacctgccggnnnnnnnnnnnnnncatggaataaccacgtggctaccttctatcctctgttcccaaatggtggnnnnnnnnnnnnnnnnnnnnnnnnnnnnnnnnctttgaaactactttattttactaatttaaactatnnnnnnnnnnnnnnnnnctgaggtagttc

SEQ ID NO: 12542 - DNA, 817 bp, Macaca Fascicularis
  misc_feature (1)...(817): n = A,T,C or G
taatttctgagaagccccaaataagtttacaactgtgttttcttggtatgactgacagagatataacatagattacaacaaacattcccacgaagatttcttttacatctctttctcatacaatgtcaaggatccagattagatgatcaaagatgtgctccaccacctgctaccacaaagggtccnnnnnnnnnnnnnnnnnnnnnnnnnnnccttattttacggtcccaggcaaagagaannnnnnnnnnnnnnnntcttttacaaagagatcaaaacagagacactgactttgggctaaaggactttttgcaaagtaatgctttgttggagtttaaaaattcagggaaaaaatcagcagaccactagttactatagatgtattttttttttcctttcagaacacggtaaggaaacaatctattaattttttccttaaaaggagaatttatagcactgtaatacagcttaaaatatttttagaataatgtaaatagttaaccttcagtagtctattaaggcattactacttctctggacacgcgcatgtttgagggtggaggtgtcctgtaaaggtgcctcatcatctgtgattacttgggatgtgttctttggcagcttgttaggttactttacctagtgtttgtaaagtaggaagttaagtgaatcatagattagaatttaatcctcttatggaaataattttttaaaatcttgacaatggcatttttttttacacataaccatggatgtagtgggaaaccaatgctgtttagtaaaaataatgtacttgatcaatgtaaaaaagcatataaaa

SEQ ID NO: 12543 - DNA, 738 bp, Macaca Fascicularis
  misc_feature (1)...(738): n = A,T,C or G
ccttgccatnnnnnaaaaagtaaaaaggtnnncacaggtgtnnccgtacttcgccaaggttgtagcatgggcagtttcagtttcagcctaagagactggtgacatccacaaatgcagttttagaaggagaaaaggtcttggtgcctctgcagtacttgatgtattggggtcaaatctctacaaatttttccgtggtgatagcaaaatcaagaggtggcttgcgaaaagaaatactgaatttttatttttgaagtttttgttttttaaaaggttgggggtgttcagtcactgagggacaaaacttagcatctaatttcaattatagtgtcatgaagagtatttctaaagtaattggttatcatgggaaagtattctcttttcaagaagttctttgattctgtaataactagaacaaataaagtagtaaaagaagaaatagttctgtgactaggaaaaaattgcttctgagagaacgtagatcaattatactacttttaaggtagctgcagataagtggccttgacacattacaagcccagaaaaagtgtcagaaataataaaaaatttcagagagaatcaagataccttaaagataagttttcaataaagaaaagccttcattttcctgggggaaatgaagcacttgatgccaagggcattagtagagggctagaaagagtgtctgtgtgaaagacatatgctatatcaaaataataaaacaaatgagatcctggggct

SEQ ID NO: 12544 - DNA, 732 bp, Macaca Fascicularis
  misc_feature (1)...(732): n = A,T,C or G
cacgagacatccatgtgacagtggagcagaggggttannnnnnnnnnnnnnnnnnnnnnnnnnnnnnnnnnnccataaggaaagttaaagagaaaatccggaggacgaggggctactctggcctgcagcgtctgtccttccaggnnnnnnnnnnnnnnnnnnnnnnnntcagcagcagatgctccttagcccaacatgggatcttctcccacactcacatctatctgctggagaccatcccccccgagatccaggtcttcgtgaagaatcctgatggtgggagccacgcctatgccatcgatcccaacagcttcgtcctgggtctnnnnnnnnnnnnnnnnnnnnnnnnnnnnnnnnnnnnnnnnnagcagcagctagaattccaaggccaagtcctgcaggactggttgggtctggggagctacggcatccaagacagtgacactctcatcctctctaagaagaaagagggagaggctctgtttccatccagttagttttctctgggaaacttctgtgtacatttctgccatctactccagaactcatcctgtcagtcactctgtcccattgtctactgggaaggtcccaggtctcaccagctttataatgagttatcccagnnnnnnnnnnnnnnnncacacttgtactcccagaactttggggggctaaggtgggaggagcgcttgagccagggaattcnnnnnnnnnnnnnnnnnnnnnngcagaccc

SEQ ID NO: 12545 - DNA, 770 bp, Macaca Fascicularis
  misc_feature (1)...(770): n = A,T,C or G
ctgggggcttnnnccngtnnnnnnngatggctttggtgnnnnnnnnnnnnnnnnnnnnnnnnnnnnnnnnnnnnnnnnnnnnnnnnnnnnaggccgcaatgcccgggagtttctccaatgtgtggagaaggccttagaagacatgtttgatgccttagaaggcaaatccatcaaaagttaacttcttggaagatgaaaagctaccatcacttcctcatcatgaaaactgggaggctgggcatgnnnnnnnnnnnnnnnnnnnnnnnnnnnnnnnnnnnnnnnnnnnnnnnnnnnnnnnnnnnnnnnnnnnntgnnnnnnnnnnnnnnnnnnnnnnnnnnnnnnnnnnnnnnnnnnnnnnnnnnnnnnnnntgggcatggtggcatgtgcctataatcccagctacttgggaggccgaagcagaattgcttgaacccaggaagtggaggttgcagtgagctgagattgcaccactgcactccggcctgggcaacagagcgagactctgtctcaaaaaaacaaaaaagaaaaaaaaattggggcctgtgtagccagtgggtgctattttgtgaaactaatcataagctgcctaggcagccagctacaggcttgagctttaaaatcatggttttaaagctaaacgtgtaatttccatgtgggactagatcacaactaaagataacacgagatttcagttttaagggcatttaatcaggaggaaaggttggaaaactaactcaggtgttatttattgttaagccagaaataaag

SEQ ID NO: 12546 - DNA, 737 bp, Macaca Fascicularis
  misc_feature (1)...(737): n = A,T,C or G
agttgaaaacccatcattaangtnnnnnnnnnnnnnnnnnnngatatcggagtttgtaattccaagtgtgtattgggtggaagatcagaataaaaagaacgagttgattgnnnnnnnnnnnnnnnggatggggaaaaaagcctgtaaatactttgagcaaggcaaggggacctgcccatttggaagcaaatgtctttatcgccatgcttaccctgatgggcggctagcagagnnnnnnnnnnnnnnnaaacagctcagttctcaaggcactgtgaggttctttaattcagtgcggctctgggatttcattgagaaccgagaaagccggcatgtccccaacaatgaagatgtcgacatgacagagctcggggacctcttcatgcacctttctggagtggagtcatcagaaccctaaagagtagatggttgccctgcatcttgggctccatcggccaaaactttcccaagccagggtgtgcagagcttccctgtactgtagccaaggtggtgtgtggcttggatttgagtggagttggggttagccttagtctcattcactctccattattacagccatggggaagagtgaaggatataaagtaacctaataagtgtatggaattactatttttatagctgatatagttacacctcaagcccctcaggggtaacaactaaccaccnnnnnnnnnnnnnnnnnnnnnnnnnnnnnnnnnnnnaacttggctcttatcttt

SEQ ID NO: 12547 - DNA, 762 bp, Macaca Fascicularis
  misc_feature (1)...(762): n = A,T,C or G
attatataatctgttcctgtttctagcaagatgaaaataaggagtaaaagatgaacaccannnaatttaaagttttgaggccaaaggacacaaaaagcaatttggtcagtcatggtacaaacaggaaaaatacaggacatcactaagcagcaagaaaatgtaaattcacataatataccagctttcaattatcaacttttaaaaatactaatacccaatattgataagaacacagcaaaataagtattcatattctctttacagcataaaaccggaaaatctttctgaagaacattttggtaacatgcattagaagcccccaaaatgggcctacccttttgatctaagtaattccacttgaaatttttccttaggaaacaaccaaagatgcacataaatatttagtgcaaaggaggtcataatggtattatttatcacatcaaaatctagaaacaatatagatgtctgaaaatagaagaatctaatacaatcattaaaatgatgtggttaagccgggcgcggtggctcacgcctgtaatcccagcactttgggaggccgaggcgggcggatcacaaggccaggagattgagaccacnnnnnnnnnnnnnnnnnnnnnnnnnnnnnnnnnnnnnnnnnnnnnnnnnnnnnnnnnnnnnnnnnnnnnnnnnnnnnnnnnnnnnnnnnnnnnnnnnnnnnnnnnnnnnnnnnnnnnnnnnnnnnnnnnannnnnnnnnnnnnnnnnnnnnnnnnnnnnnnnnnag

SEQ ID NO: 12548 - DNA, 691 bp, Macaca Fascicularis
  misc_feature (1)...(691): n = A,T,C or G
gtaattaaaatccaaacagagcttatttcactagtcaagttacctgacgtgataattatttctgcaggataattgatgttttatgttcttttttggactttatcttcttgcatatgtttctacaaaaattgttttcttcatccttgtggtgcttattcatctgagccgtctccacagtcccaatgcctctgctttttgttttacttttgtagcataagggttttgcttttgctttgccttaagatttccctagggagttatcagggcttttcgttttgtatagcttttgcagcatggatcaaacattggcttactgtgctaatgtgtgaagagaaaaaattatctaaagcaggtgagctttaatgaacaaatgtgtattttatctgagtttgagtagggtgcgtgtggtttttgttttttgtttttgtttttgtttttttgtaatatgaagaaagtccagttctcataaatattaatcacttaaaaaactgccactctttcttgaaaaggtacacatgtaaaatttaggaaaataactaaggtaggggcaggaaccataagaagaatgtnnnnnnnnnnnnnnntgtattattttggatttggaacttggctttgtttttcaaaagtgacaagaatggttcagttctaggaatgttctggaagatgctgttaattttactacaaaatgaga

SEQ ID NO: 12549 - DNA, 726 bp, Macaca Fascicularis
  misc_feature (1)...(726): n = A,T,C or G
cgcaccctgcccggnnnnntcatngtggccgagatcgttctggggctgctggtatggacgcttatcgctggaactgagtacttccgggtccccgcatttggctgggtcatgtttgtagctgtattttactgggtcctcaccgtcttcttcctcattgtctacataacaatgacctacaccaggattccccaggtgccctggacaacagtgggcctgtgctttaacggcagtgccttcgtcttgtacctctctgccgctgttgtagatgcatcttccgtctcccctgagagggacagtcacaacttcaacagctgggcggcctcatcgttctttgccttcctggtcaccatctgctacgctggaaatacatatttcagttttatagcatggagatccaggaccatacagtgatttaccattttgataattaaaagggaaaaaaaaggaagactgtcactgtaaaaacagctgtaggtataatgtatattcccagagaattgtatttaactaattaatgttttttatattcttaaatttgctcacaaattgtggtttgttacaattaaacatggatannntatttgcacnnntgttgtagcttataatgaactcttaagtatcttattaatgtattaatgtcttcatagatggtattttcttagacaatgtttaaatagatnnnnnnnnnnnnnnnnnnnnnnatcaagtttgtaaacctaactttaa

SEQ ID NO: 12550 - DNA, 736 bp, Macaca Fascicularis
  misc_feature (1)...(736): n = A,T,C or G
ctgaacnnnnnnnnnnnnnnnnnggcagcagagagtacccnnnnnnnnnnnnnnnnnnnnngatgagcnncaggcnggaggtgccctgttcacnnnnnnnnnnnnnnnnnnnnnnnnnnnnnnnnnnnnnnnnnnnnnnnnnnnnnnnnnnnnnnnnncccannnnnnnnnnnnnnnnnnnnngggaccaggcttcccgtgctcctgtgacactcagggcttcnnnnnnnnnnnnnnnnnnnncctggatatccccctgggggcagaagaagctgatctcagcccccttcctcttttacccccggagattctttgaggtgctgctcctgtgccaggagggagggcnnnnnnnnnnnnnnnatgggcagggacnnnnnnnnnnnnnnnnnnnnnnnnnnnnnnnnnnnnnnnnnnnnnnnctccggatcagtggaagtgtccggctctactgtgtccactcctgaggagggttccagggaaaccctgacagaaaacaggaaggtcagcccacacccagggcccagctctcctcccctcattaaaccgtccacctgacacccccacatcaggcctggttcacttctgggctcacgggcctgagtctgcaggagcttnnnnnnnnnnnnnnnnnnnaagggtgcaaaggttcctcggactctgcaccttcctccaccacgagcctgggatttggctccatctgccttcagggcctgaactgcactcacagaggcaggtt

SEQ ID NO: 12551 - DNA, 725 bp, Macaca Fascicularis
ttccagcagatgaaacaggcccaaagaggttaaatgactgggtgaaaatcacatagctgtctggtgccagagccagcctatagtagagtcccctgaccccaagcccggtgctcattccactacctctcacacttcacaacaatttcctcaacacttgagggcccagaaagtctgatctctccagaatgttgagcccagaggaatgctgagaaatcatctggaggagggagcagaaagagaaggttttaaggaggggttttctgaatacttgggagatacggaaaggaccaaggaacacactccagggtgcatgcgttgctccctggggcaccacttctagattaaagtgtgccaggtcctttggaggccctaccccttccccattcattgtcaccagtgagaaatgggggtgaccctgtgtaaagaaacctaccaaaggtttacatttgcaccttagcctcaataagtaggaaccctagagaagcagctagctggagctcatctgcaactcctgactcaggagaaagatggattttaacccaaaattatgagtgagctgttaactctaaaatgtacttgggagataggccaagcgagaggtcatgggccaactaagtgttatcaagtagaaaagacagtacactgcttttcttttagtgtttgcttttcctttgctatatgttttgctatttccttgtggcttagaatgtaaaattgattgttaa

SEQ ID NO: 12552 - DNA, 778 bp, Macaca Fascicularis
  misc_feature (1)...(778): n = A,T,C or G
ccatgatgctgnnctgggcctctagcccctagctgaggcaaaaggcaagtactgtgaaacgagtaccgacctggaaaggccatcggctttgtcaagtctcggtcctgtttctaaatctatgatgaagaagcgatggtagaggctgtggccctctacaaccctgtgnnnnnnnnnnnnnnngtgactcaggacttcatgatgtataaaacgggcatctactccagtacttcctgccataaaactccagataaagtaaaccatgcagtactggctgttgggtatggagaagaaaatgggatcccttatnnnnnnnnnnnnnnnncttggggtccccagtggggaannnnnnnnnnnnnnntcatcgagcgcggaaagaacatgtgtggcctggctgcctgcgcctcctaccccatccctctggtgtgagccgtggctgccgcagtgcagactnnnnnnnnnnnnnnnnnnnnnnnnnnnnnnnnnnnnnnnnnnnnnnnnnnntggaggaagttgtggggagatccactgggacccccagcgttctgccctcacctctgtgcccagcctagaaacctacagagaaggaggagttccaccacgagctcacctacgtctgtgacgcaaagatcaccagccatgtgccttagcgtccttcttaacagactcaaaccgcatggaccacgaacattctttctgtccagaagggctactttccacacatagagctccagggactctcttttctgtattcgnnnnnnnataaacattgagtgagcac

SEQ ID NO: 12553 - DNA, 721 bp, Macaca Fascicularis
  misc_feature (1)...(721): n = A,T,C or G
gtgccagccaggacgcagctacgcggtgctgttgggcatcatctttgggggcctctcggtggtggcggcggttgcgcnnnnnnnnnnnnnnnnnnnnnnnnnnnnnnnnnnnnnnnnnntctggggcacacagccctgatgggagcatctcgtctgtgagcaccaggccaagactcctgagaacaggcaccctagtcctgctactcccgcatccccaggaccagacacctgggacccagacacttgatacctgggcctttaaccccctacnnnnnnnnnnnnnnnnnnnnnnnggaggcccagatttccaacacccaagccccgtgctagcagcgctccgtgctgttccccaaatactcacggctctaatcccctgaaacttcataccctgggattctaatnnnnnnnnnnnnnnnnnnnnnnnnnnnnnnnntgagcctcagattccaatacctcactccccacagcctgacgccagggcccctgaccgctgatctgtggaggcctgctccctgaccgtgcnnnnnnnnnnnnnnnnnngccttgattcctggacccctgggcccagcctgggactccagatggggtgagaacgggcctcagaaccccagggcagacagcaagacccccagcggcagagacctccctcaggactccaggcttgtaatttcgaactcttctggaaggtcactcaggaacaccctccctgcctgtgcaagag

SEQ ID NO: 12554 - DNA, 726 bp, Macaca Fascicularis
  misc_feature (1)...(726): n = A,T,C or G
aaggagcgcgccagcggccggggagggagcgccgaaaacgcaccctccaggcgcagacacgcggccaggcggagactgcggcggagggctcgcaggatggagcggggttccccgaggtcactccagagcaggtgcgaccaagcggtgccggagaagcggggccgccaggacccgacgcgcgcccgcagcctgggcgccctgttccaagaccaaggccccctcacctgcttgctgtggaggtggccaggaatcggctgccgccccgcaccaccagnnnnngcccgcacaacgccagtcccacagagcccgccatgtacccgcccgnnnnnccgccatacacatgnnnnnnnnnnnngcctcttcctgnnnnnnnnnnnnnnnnnnnnnnnnnnnnnnnnnnnnnnnnnnnnnnnnnnnnnnnnnnnnnnnnnnnnnnnnnnnnnnnnnnnnnnnnnnnnnnnnnnnnnnnnnnnnnnnnnnnnnnnnnnnnnnnnnnnnnnnnnnnnnntgtttcgggcttggcggttcactcaccaaggtgatctgatggcgtgcacttcgcacgattccaagtgcttgcctaatgttcgtcctttcctctagacggggtagggctggttctggatcttnnnnnnnnnnnnnnnnnnnnnnnnnnnnnntacttgatgcgtgcctcacatgaagtcagcagttcgaaactagccnnnnnnnnnnnnnnaaaccccg

SEQ ID NO: 12555 - DNA, 718 bp, Macaca Fascicularis
  misc_feature (1)...(718): n = A,T,C or G
aaatttgataaataccagattttagaattataatgggcttagttaatatctttattttatgttatgtgatatctttattctaatgttatgaaaaaatctgaaaaaaaaagaaaaaaaaaagaaaaaatctgatctttgttggtgacaaagttgtaaccatttataataatactgaagaataataataataattcctgaagaaagaattaatttcatttagagattaatgaaaataaaattgtaaatttttttcccgttaaaattcttctgaattctatccacagttccatgctctaaaggaacagtacatattaaaaaaagccttgactacaagtctttttcggtgactttttcggagtttttcaacaacttggcaagttctttacctcttggcctttgtccttcagttgtttgtctggaatattcttccccttgctcttaataagactgattccttctgatagttcagatttcagttcagcagccacttcttcaggaccctttttcttctagttatcttgttgttcatttgttttctttgattatctttctttatatgaatttgaaggtagaaactatgtctttcctgccttccactatatctccagtgctgagaacagagtattttgcatgtaagtgttgcttgaaaagtattttcaaatgaatctgaagcctatattacatatttttagttannnttcatactttcatatgggcg

SEQ ID NO: 12556 - DNA, 1282 bp, Macaca Fascicularis
  misc_feature (1)...(1282): n = A,T,C or G
gggtatctatnnntaggggtagggtattacagaagataattggcttgatgtcctagnnnnnnnnnnnnnnngaggtaggtgcagctgtagtcccttgaagtgtnnnnnnnnnnnnnnnnnctacaaccatctactccccttttaagaaaatcttctaaacccaaaggcattttcttccaaaaagatgttgactggtagtatcttgaatactttaaaaaaacagacacaccaaaaaactcccaagaaatggnnnnnnnnnnnnnnnnnnnnnnnnnnnnntaccaactgctggtcattggctggggttttgaacactgtatgacaatacttatactacaaaattttttttacaaatacagtttcatcaaaacttgggacatacatcaacttcttttcagtaccttaaaaaaaaaaaacatcagttctgggacataacaaagaaatactaggagaaacggtatctggacaggaacagaaatgtccacaactgcgagggattttcttttacactgnnnnnnnnnnnnnnattgacaccaccactcctgaaaattgggatttcttattaggttcccctaaaagttcccatgttggttacatgtaaatagtcacatatatacagtgaaggcagtttcttcagaggcaaccagggtttagagtgctaggtaaatgtcatctcttttgtgctactgactcattgtcgaatctgcactgttttcagcctctccacgttgcctctgtcttcttagttccttctttgtgacaaaccaaaagaataagaggattnnnnnnnnnnnnnnnnttcccctatgatttaaaaattccaatgactttcgcccttgggggaaatttccaaggaaatctcgctcgctctcttcgttttcctttgtgagcttctggggagggttagtggtgactttctgatacgaaaaaaatgcattttgtgcagctggtgaggtataatccaaagcaaaagcaggggcaaaaatggacttcttgaagttctctctgctcctgctggttatccnnnnnnnnnnnnnnnnnnnactgagagtgagtgcttgctttctcaggcctcctggccaatagcataggtctgcnnnnnnnnnnnnnnnnggtttttcgttgcctgtgcagtcnnnnnnnnnntctgtgtttttgaaggtccacctctgttgtttcttaaccttcccannnnnnnnnnnnnnntnnnnnnnntntnnnagnaggtctcttcatttctggccactttcgnngctgaaactgccctgtattgctcatagct

SEQ ID NO: 12557 - DNA, 156 bp, Macaca Fascicularis
ttcctttggttattgtaaatggaaacttttcagcttgtatttccttagatttttttttttccttccaatcatttgcttcagagattccttttctggcctaacagcgcattcctttgattctgtgaccagagacttagagcccttgtaagtctgtct

SEQ ID NO: 12558 - DNA, 876 bp, Macaca Fascicularis
  misc_feature (1)...(876): n = A,T,C or G
cagaccccaaaatgcttcagatggtactccagggatctgtaggcacaacannnnnnnnnnnnnnnnnnnnggttgcccaggtttttctatctgaaatacctagtgacccaaagctcttcagacatcataataaactgcgactctgctttaaagattttactaaaaggtgtgaagatgccttaagaaaaaataagagcttaattgggccggatcaaaaggagtatcaaagggaactggagagaaattatcatcgccttaaagaggccttacagccactgatcaacagaaagatccctcagttatacaaggcagtattgcctgtcacctgccacagagattccttcagtcgaatgagccnnnnnnnnnnggatctctaaactgaatgcacttgttttattcatctgcaaagagcnnnnnnnnnnnnnnnnnnnnnnnaaagatctattggaaaacaacatggaatggaattctggaaattattattcattgaagaatgcagtggccaagaaaatatcaaatgtagattgttaacgcttgagaatcatggctatagtttctaannnnnnnnnnnnnnnnnnnnnnnntttaagacattttaatgactcaaaggtacactatacatttaccattatttataccatagctaacgttaaatttatttactttaagttcgtattttttaatttatattaccatttatagattcattttggaaccattttaaatgtagtaatgcttatttaaaaggtactattaaatatgtgaatgtttacactagttttactgagtgggacttcaaaatttttatttattgacaattgcagagaacaactaaagggttgactcaagaactagttccaaacctagcaaaagaaa

SEQ ID NO: 12559 - DNA, 664 bp, Macaca Fascicularis
  misc_feature (1)...(664): n = A,T,C or G
caaacccatagggcagttcgggcnnnnngtgatcatannnnnnnnnnnnntgaccagttgagcttccggcgtggggaagtgctgcgtgnnnnnnnnnnnnnnnnnnnnnnnnggctccgctgtgggcgggatggcgtggagggtctggtgcctgtggggtatacctcccttgttctgtagccctgggaccnnnnnnnnnnnnnnnnnnnnnnnnnnnnnnnnnnnnnnnnnnnnnnnnnnnnnnnnnnatcccagaagcattttccctgtctgcaaaatgacatttcttcccacatttctgctaatgtttaaaataaactttccttcttccnnnnnnnnnnnnnnnnnnnnnnnnnatctgctcttcttccnnnnnnnnnnnnnnnnnnnnnnnnccaggaaatcttcctttcctttttcccatctgtataagggaatgtcttccttcctatctatctgcaaaatggaaatctagacctccttcttcatccataagtggactgtgccagtacaatacatgcctcagcccccaagcctagaaggacctctagtctccttcctgtgtatggaatcttcctcactccacccctcccacgttgtctgtattgataatgtactcatgctgtactnnnnnnnnnnnnnnngacacccctggtgggtgggc

SEQ ID NO: 12560 - DNA, 707 bp, Macaca Fascicularis
  misc_feature (1)...(707): n = A,T,C or G
ccgggaggcacacctggccnntgctgctggctgcactcgcctgccttgtcactctnnnnnnnnnnnnnnnnnnnagatagaagtttcagaaagttgtatttttcnnnnnnnnnnnnnnnnnnnnnnnnnnnnnnnnnnnnnnnnnnnnnnnngacatttattcttttgatgcacttgnnnnnnnnnnnnnnntccttctttttctcctctccctccctccccgcccctgagtcatgaacagcaaggagtgtttgaagtttctgctttgaactccgtccagcctgatccctggcctgagcaacttcnnnnnnnnnnnnnnnntttaagacagccgagagttttggacgagcgtgtttggtagcagggatgaaagctaaggccctcttatttttttctcttaattattattatatttctgacttaaacttagaagaaacaactatcaagctacagtttttcctgccattttcctgtggttgcagcctgtcttcctttgaaattgtttcactctctgagttttatatgctggaatccaatgcagagttggtttgggnnnnnnnnnnnnnnnncttttattaataaagaagagacacaggtgtagatatgtatatacaaaaagatgtacggtctggctaaaccaccttcctagcctttatgcaaaaaaaggggagaatcaaagcttccatttcagaaatgttgcgtggaaa

SEQ ID NO: 12561 - DNA, 583 bp, Macaca Fascicularis
  misc_feature (1)...(583): n = A,T,C or G
cagacannnnnnnnnnnnnnnatgcaggagctctagcnctcngggtcctcccctccctgtnnnattctcatctcacatgcccttcttccccacgtnnnnnnnnnnnnnnnnnnnggtgccctgtccttgcaaaagcagatggaacatgctaaccagcagactggcttctccgactcagtgagtatggcaccttgggaggtcagggttagggatatgttaaggggagcatcagtatgcctcaggccctgactctgttctctgcagtcctctctgcgccccatgcacccccaggctctgcatccagcccctggactccttgcttccccacagctccctgtgcagatgcaaccagcaggaaaggtaagaatgataataaagtttacctgtcagaatccttacactagggatccagaaaagcaggattaggtaggaccggtggcccacatcacctggtttttcttcctctctgggggtggttactagtagggcattaagtgggagagtacgcccagtgacaaagccctcttttcatcaccaccgccagtcgggctttgcagctaccagccaacctggccctcggctc

SEQ ID NO: 12562 - DNA, 666 bp, Macaca Fascicularis
caagacagccgagaagtgctccttggaccaggtggatgacactttccacccagaatggtttgtgtccctttttgagcagaaaacagtgaagggctggtggccttgtgtagcagaagagggtgagaagaagatactggcgggcaagctggaaatgaccttggagattgtaacagagagtgagcatgaggagcggcccgctggccagggcagggatgagcccaacatgaaccctaaacttgaggacccaaggcgccccgacacctccttcctgtggttcacctccccatacaagaccatgaagttcatcctgtggcggcgtttccggtgggccatcatcctcttcatcatcctcttcatcctgctgctgttcctggccatcttcatctacgccttcccgaactatgctgccatgaagctggtgaagcccttcagctgaggactcccctgccctgtaggagcgggcgtggggtcccctccagcatgggactggccggcctcctccactcagctcggcgagctcctccagacctccaaggcctgatcgtcctgccagggtgggcagacagacagatggaccggcccacactcccagagttgcttacatggagctctgagatcaccccacttccatcatttccttctcccccgacccaacgctttttggat

SEQ ID NO: 12563 - DNA, 671 bp, Macaca Fascicularis
  misc_feature (1)...(671): n = A,T,C or G
tcctgtgctggattccatgctgnnnatgtcgattccggatcagtctatgacatttatctaccaacacacatccagtgtagcatcaaaccccatgcaatcatcatcctccccaatacagatggaatggagcttttggtgtgctatgaagatgagggggtttatgtaaacacatatggaaggatcaccaaggatgtagttctacagtggggagagatgcctacgtcagtagcgtatattcgatccaatcagacaatgggctggggagagaaggccatagagatccgatctgtggaaactggtcacttggatggtgtgttcatgcacaaaagggctcaaagactaaaattcttgtgtgaacgcaatgacaaggtgttctttgcctctgttcggtctggtggcagcagtcaggtttatttcatgaccttaggcaggacttctcttctgagctggtagaagcagtgtgatccagggatnnnnnnnnnnnnnnntcttcaagatcctgagaacttggaattccttgtaactggagcttggagctgcaccgagggcaaccaggacagctgtgtgtgcagacctcacgtgttgggttctctcccctccttcctgttcctgttttaccagtttatccccattaatttttttttttttcttactccaaaataaatcaaggc

SEQ ID NO: 12564 - DNA, 671 bp, Macaca Fascicularis
  misc_feature (1)...(671): n = A,T,C or G
ggagcagaaggggcagtnnnngcatctggagcagcaggaggggcaactggagctcccagagcagcaggtggggcagccaaagcacctggagcagaaggagaagcagctggagctcccagagcagaaagaggggnnnnnnnnnnnnnnnnngaagcaggaggcnnnnnnngagctcccagagcagcaggtggcacagccaaagcacctggagcaacaggaaaagcatctagagcacccagagcagcaggagggacaactaaaacatctggagcagcaggaggggcagctggagcagcccatgtttgccccagctccaggccagatccaagacatccaaccagccctgcccacaaagggagaagtatttcttcctgtagagcagcaacagcagcagaagcaggaggtgcaatggccactcaaacataaataaccacctgcaatccagaggcccttagatcgtctcatacaagtgaagagagaaccactggccccacttatttcgggtcccctaggtggcccgtctcatctgtgaacttgactctgtccgtctacatgtctctttaatggggtgggggtggaagagaggtaattannnnnnnnnnnnnnnnccaatgagcccaatcccaacctcaggtgagcagagcctctacttgagggactattgtcactat

SEQ ID NO: 12565 - DNA, 773 bp, Macaca Fascicularis
  misc_feature (1)...(773): n = A,T,C or G
agcagatgnnnnnactgcagaggaggtggggccnnnatgtcaaagaggccaaggggcagcaagggcagccagggcacctgcggcttcttagtataggattgtctgtccttcacaacttccaaggctcccaaggactccctaaaaccacgcagctcattgtcataccaattcctgctttaattaatgggtctgagcaaatcttcctctagcttcaggagggtggggagggagtgattcctgtcatgaggtcagaattccaggctgattcaccaaatgccaaactgaaacctagcaaagacttacggaaacaaatgaggatattaaaagagcgagcacctcagtgcctctgggggcctgcttaaggagcttccgctcagcccacgatggtgagtgggccgccataagccgtcactgggattccaaccccagaggtccaggagtgatctctgagtgactcaacaaagacaggacacatggagcacaaagacaagccttggttgcttcaaagcttccctggacttgaagccagtcagggcagaggcatccgcaaaatcactcccatgatgagaccctggaggacaccaaatccttggtgtgatcaggactggacggttgcacacatacaaatgctgccaccctccacttctcaacccggaactgggaaagacattagcacaacttaagcactggggaattgtgtgtatnnnnnnnnnnnnnnnnnnnngaaaacctgtatggcaaatgattcactcatttattccnnccaaagccac

SEQ ID NO: 12566 - DNA, 721 bp, Macaca Fascicularis
  misc_feature (1)...(721): n = A,T,C or G
gttccacaggggacacagagaaggtttgggtgtcctcatggggttcctttggccaatttcccccacattaaaggtgaacattggttcttttatttgctttggaagttttaatctctaacagtggacaaagttaccagtgccttaaactctgttacactttttgtaagtgaaaactttatagtatgatagattattttgatgtaaagatgttctggataccattatatgctccccctgtttcagagacttagattgtgatatgtaaatggtatgtcattagctactatgatttaatttgaaatatgaccttttggttatgaatacttcgcagcacagctgagacgctgtctgttgtattnnnnnnnnnnnnnnnnnntaacaacattgcagcctcaatcgagtgagacagactagaagttcctagtgatggcttatgatagcaaatggcctcatgtcaaatatttagatgtaattttgtgtaagaaannnnnnnnnnnnnnnnnnccaactactacctgtaatgacagacctgtccaacacatctnnnnnnnnnnnnnnnnnnnnnnnnnnnnnnnagcatcagaaggaacgctgatttaaagaggtcgcttgagaattttattgacacagtaccatttaatggggaggacaaaatggggcaggggagggaggagtttctgttgttaaaaaacagattggaaagactggactctaaattctg

SEQ ID NO: 12567 - DNA, 719 bp, Macaca Fascicularis
  misc_feature (1)...(719): n = A,T,C or G
caagtgccagctgcagctgctagactctggannnnnnnnnnnnnnnnnnnnnnagacctacctagannnnnnnnnnnnnnnnnncaggtgccctactcttcaacatgtctggaaagtaaaccgagatggggaggaagacagattccaggcccactccaannnnnnnnnnnnnnnnnnnnnnnnnnnnnnnnnnncggccgtggtggccgccatcctcactagtgggctccgcatcatgccacattctggtgggcgtgttggcaaggnnnnnnnnnnnnnnnnnnnnnnnnnnnnnncagctggctatgttactggcatgaactgtggggcccaccatatcggctacatgttcctgggtgaggtggccctgggcagagagcaccatatcaccacggacaaccccagcttgaagagcccacctcccggctttgacagtgtcattgcccgaggccacaccgagcctgatccgacccaggacacagagctggagctggatggccagcgagtggtggtgccccagggccagcctgtgccctgcccagagttcagcagctccacattctcccagagcgagtacctcatctaccaggagagccagtgnnnnnnnnnnnnnnnnnnnnnggtccgcctctgagtgcccaccctgtcccccggggtccnnnnnnnnnnnnnnnnnnnnnnnnatcgtcctgcacatctctggtacccctatatcactc

SEQ ID NO: 12568 - DNA, 785 bp, Macaca Fascicularis
  misc_feature (1)...(785): n = A,T,C or G
gtcagcagccnngnnntgctccataagaatggggacagtgaactctgccagggctgctgcannngtccagacacgcatgttctgttcctcctcctcatgcatttccaacctttcaactctccccactgccgcagcctccctcagcccccttgcaagttcatggnnngtnnntcccagcccccttgctccactggcccttcgaccagtcctcccttctgttctttccccttccttctcnnnnnnnnnncnnnnnnnnnnnnnnnnnnnnnnnnnnnnnnnnnnnnnnnnnnnnnnnnnnnnnnnnnnnnnnnnnnnnnnngtcttgtgcttcctcagacctttctcgcttctgagcttagtggcctgtcccctccatctctccaaacctggctttgcctgtccctttctctccacaccctctggccttctgccttgagctgggtctgctttctgtctgtctggcctgcacccagcccctgcccacgaaaccccagggacagcggcctcctcagcctgccctgctcaggccttgcccccaaacctgtacagccccagaggaggctggaagttggaggcccagcatcctgcccagatgacaccatcaaggagggaagccttaggcctgtcaggccctggcccttctgccccaaagagaggagaggccccacattnnnnnnnnnnnnnnnnnnnnnnnnnnnnnnnaaccccctcaccgccactggcggctaggtctcccctttccttctggttcagcgcaaggaggggctgcttctgaggtcggtggc

SEQ ID NO: 12569 - DNA, 231 bp, Macaca Fascicularis
cattgaggaacacctggcaaccaaatttctgaagctggcaaaaggccctgggctatatgtctgaaatgtctttccttctgggacccaatattagacccagacagttgcagtcccaggaggaaaaatgcccaaaggaataccaaagcagattccctctgttagttttgctgtccctcgtagataacaatcatgcattatacccttgaaaatctgttgagagtgcagatttca

SEQ ID NO: 12570 - DNA, 667 bp, Macaca Fascicularis
acagaaccgcgctgcacccatatgttccacacgtcaccacaggtgcttattaactagagagcatggtgttcgtgcagtggaggttcagagaccacccccgtagccgtggtcagtgctgctgccacgaacatccccacccaactggggaggacacggcgtcccttggggtagaactcctgccccaaaactcaacctggacctacttggggggagcaatcaggcaaacccaaagtgaaggtgtcttccagaacgtcaatgtcatacaagacaaaaaggggcaggaatgttctcgaacaagagactgaagctatatgacaaccaaacactgtgtgattctggatacaatcttgtttgcgaaaacaacaaagcaacagctattaaaagaattattgggacaagtggcacatccgcactggcaccgagtgttagaagcacatggacaggaggcgcccctgcatcacgccccgcctgtgggggactggggaagacagctatgctctcaggtgtctatgggcgagtttaggggtccagtgccatgatgtttataagaaactctccaatggctcagttggaggggggcaatgtagcaaaatggtcacaattttggtatttttggcacaatggttgtaatttcggggagaaggtattgtttattctgatctctatg

SEQ ID NO: 12571 - DNA, 682 bp, Macaca Fascicularis
  misc_feature (1)...(682): n = A,T,C or G
gcannnntgannngccagagggttcgnnnagtcagacgaaactccagaacggtgcttgcggagggcctgactgtcctgctcacccacagccgatctgctgcaggccagcaaccatgccgtgagcacctgccaaccaccagcctttctggtactgttctgttnnnnnnnnnnnnnnngtgagggcagaggcagacctggtctgccccagcgcccatcctccctgagggagcacagcacagcctcacacttgaaaggcagtgtttggtttcccatctaatcaacttaagggaagccggcgtgtacccttcaagaccctgtcgccacctgtttcctcatcagtttggtataaactgagggtggcttttggagacccaaacttggtcagcagnnnnnnnnnnnnnnnncccagcaagcacctcccagcctgccttncggagtagcacccaggaggggatgttgcgcnnnnnnnnnnnnnnnnnaggcccgtgcagacccctgcccctgccgctgcagaaatccagaagcatgctgaacgcttctcagtcttcagccggagggagggctgtgatttccagaggtgtgctttttatgtacttttagctagatctggcatgcatctgnnnnnnnnnnnnnattaaatccaaactgtttgcctaagtgnnntgtatnnngttgttaactt

SEQ ID NO: 12572 - DNA, 729 bp, Macaca Fascicularis
  misc_feature (1)...(729): n = A,T,C or G
acaaatttcatgttnctgnnnntaccctgtacatcaattgtattatttaannntctttgtagtagattctacctgaccaagttcaacaaggaaaataagtgtgtctttcgtccttagagtttcatnnnnnnnnnntatattacaagttggcagtggagcagctgcagagccatcccgaggcacaggaagctctgggccctcctctcaacatccattatctcaagctcaccgatagggaaaacttcgnnnnnnnnnnnnnnnnnnngttgaagattcctgtctctggatcgaagnnnnnnnnnnnnctctacgtccactcctccagaggtggcccctttcagaggtggcaccttgacgaggtctttttagagctcaaggatggtcagcagattcctgtgttcaagctcagtggggaaaannnnnnnnnnnnnnnnnnggagtagagacgacccagaagacccagcagacccagcgtgcttctagtccatccttccctcatctctaccatatgcccactggggtggtggcccatctgagtggcagacactcctgcaacccagttttcnnnnnnnnnnnnnnnnnnnnnnnnnnnnnnnnnnnnnnnnnntttggtataattccaacttgggcacannnnnnnnnnnnnnnnnnnnnnnnnnnnnnnnnnnnnnnnnnnnnnnnnnnnnnnnnnnnntaattgatttgaaagtgctttgtataaaaaagcaa

SEQ ID NO: 12573 - DNA, 732 bp, Macaca Fascicularis
  misc_feature (1)...(732): n = A,T,C or G
caagcagtagagtnnnttcagggccaagactgggtgcccttccactcccagaggacaactatgaaaggnnnnnnnnnnnnnnnnntgttggtgannnnnnnnnnatggaaaatgactcaaggccncttccagatgtagcnnnnnnnnggaagtgcnnnnnngagtgnnnngagtatggccnnncagactcctgctggatgccagtccgcacgtctccagagaggaagaagagccagcctaaactctccactttcatgcctgttgatgaacgaggaagccaggaaaagttggccaatggggaggccgccatcatgggtgaccgcaacagaaacctcctgaacaaaaagttgacctcatcctatgagaccttcagtgcagctagtttcagcaaaaatgaggaagccaaccctgaggatattccccttacaaaaacaggggaatataagccatctcctgtcaatactctcactagaagagaagtttacctgtaggctataaaggagcaacagcaaagttctttacatgtatgaaaaggagaataaggggcaaaaaaaccttacaaagcaaaacgtttaatcacaaagagggggctaccaaagagacaaagctttgcctgccacttctgcctccagatcaggcctttagtgatactgttagcctgattctactgtacaatgtagaaaccatccttgttacttgcatgtctaaccccttcactgatcccaacactca

SEQ ID NO: 12574 - DNA, 1509 bp, Macaca Fascicularis
  misc_feature (1)...(1509): n = A,T,C or G
actgcagacacaactacggggttgttgagagcttcacagtgcagcggcgagtccaacctaaggtgactgtgtatcctgcaaagacccagcccctgcagcaccacaccctcctggtctgctctgtgaacggtttctatccaggcagcattgaagtcaggtggttccggaacggccaggaagagaaggctggggtggtgtccacaggcctgatccagaatggagactgaaccttccagaccatggtgatgctggaaacagttcctcggagtggagaggtttacacctgccaagtggagcacccaagcgtgacgagccctctcacagtggaatggagagcacggtctgaatctgcacagagcaagatgctgagtggagtcgggggctttgtgctgggcctgctcttccttggggccgggctgttcatctacttcaggaatcagaaaggacactctggacttcagccaacaggactcctgagctgaagtgcaggtgaccacattcaaggaaaaaccttctgccccagctttgcaggatggaaagctttcccgcctggctcttattctgccacgagagagggctttctcaggacctggtgctaatggctcagcaactgcagaaaatgtcctccctgagaaaatgtcctcctcagctcctgcccttggcctgaagtccccgcaatgatagcnnggcctcatcttcaacttttgtgctcccctttacctaaaccctatggcctcccgtgcatctgtactcaccctgtgaccacaaacacattacattattaaatgtttctcaaacatggagttaaatatcatctggtccatttggctccaaagacaaaaaaagaaaagaaaaagggaagattatttcccaatagaataacgattttcatgtatatgtcatgagtatgtgaagtaatgcacatgttaagtagtttgatttagacattccacactataggcatatatcaaaacttcatgctgtacaacataaatatactatacaatttttacttgtcaattaaaaaagtaaacctaacttttaaaaaggcaatgcataaaaactgagaacagactataacaactgaaacaaactcggccaacatgagatgagaaaccagccagcaaggcaatcagaactctttcttcaccccgtctacaatatgttgtatttgtaactgtaaataagtgtacagtgtttcacaccagagacttcaataatatagtctcatcaaaggacttgtacagatttcagagaaagacaaatttagaagacggagagttctccattatgttctatctgagagtcagtatgaaatgataaatctaaaagtacatatttcagaggtctatttcaaaataataatcatttgagcctaatttctccactatcagagatgactattattttcaatcaaatttgaagttgtttttatgcatatcttatttttagttatgtgttacttgtacatacatagcagtacaagtacatataagtcctgtaagagta

SEQ ID NO: 12575 - DNA, 749 bp, Macaca Fascicularis
  misc_feature (1)...(749): n = A,T,C or G
gtccagtaaatnnnnnnntgttttgnnnnntttatctttacccttttcannnnncacaaccagcatcacagcccagacccttaacacgtcatgattatatgatagttttataatcttatgaatgctgtttccatttcccttggtcctatcaaaactctgctcacnnnnnnnnnnnnnnnnnnnnnnnnnaacaggataaagtccaaactctcnnnnnnnnnnnnnnnaacccacctactgacctctagctcttctacctttctctttccaacctacctcccaaccatcacccaacacaaatgtttccctacagctcaactgggctatttgctgtttccagacatactaaactttgctgcctcatgtctttgcccaacctaatccctttgttcagatactcttctgttcctaccaaaaaatctccatcgcattcctcaaaactttattccaacgccatcttctccataaagccatttgtgagttccctccctactccaattcctctggagaacttttttttttttaaagacagggtctcggatgacgcagtggctcaggcctgtaatctcagcactttgggaggccatggcgggcagatcacgaggtcaagagatcaagaccatcctggccaaattgctaaaaccccgtctctactaaaaatacaaaaattagaggctgaggcaagagaattacttgaacccaggaagcagaggttnnnnnnnnnnnnnnnnacaccactgtactccagc

SEQ ID NO: 12576 - DNA, 776 bp, Macaca Fascicularis
  misc_feature (1)...(776): n = A,T,C or G
ttattggactggacaaaggctgaatacagagatccaagccatcaggagtacatgaggtgtggtgcctataagccatggtgggaaattttccagacaaacctagatagctctactgggagggagtcaacgacctattgtatcaattagatcccagcctggacaagggcatgactattgctgtttggggacacagaagtacatccattcaccccgtggctctgtgttgaaggcaatgactatgtggctgttgccatgtggcctgttctcccctaagccctgaaccaaaggtttcaggctgagatggagaaagccactgggaatgcatgccataggggctgatgctggacattccccagccttccattaaatgaaaacattttctataaacttactgctttaaaaaaatgttttaaccaacaaacctaagaactgcaaatgagtttggtatagtataaatactgtcaaatataaaattccaagaaacgaatctgagactgatctgatgatctgaagttccaactaatctatcaacctttctaagaaaaggcatagtcaagaaatctttttaaagcaacattattgcttctgctatagcagagtggagatttggctgagctggtaagaacgtcagtgaaaaggtgtcttagcaataaatgggctgaatccaagatttctctagatgaaaagtaaggggaatggtcaagtcaattcctggtactggttctttgctgccttctaatcaatatggcatctcacccccgncaccatgctagcca

SEQ ID NO: 12577 - DNA, 532 bp, Macaca Fascicularis
  misc_feature (1)...(532): n = A,T,C or G
cgcccctcaccaccccctcccaaggccaggcagccatcgtccnnnnnnnnnnnnnnnnnnnntcgaatttaaggtcttgtaaccaggattgccaagcgtagcggaagaccctnnnnnnnnnnnnnnnnnnnnnnnnnnnnnnnnnnnnnnnnnnnnnnnnnnnnnnntacctctacagagatttttttttctttttttccggtctttctgagcaggtacaaagaagaaaagagaagaaaaagatggggggaaagaatcaaaccacagtggatttttgtttcctagttgggagtggggtggggtggggggtttttgtggggtgcctctgtacagctacccaatccgcaacacccacgtcaaagcacagaatcaagttcgttcggacatccagcaaggcctcttaccaaatgaggcgccagatatcttaacaagctcaaaagaaaaaaacatttaaaaagaaaaaaaaaaaaagcaagcatttccttttctttctaccaaaatgtgttgactgacccggagggggggcggtggg

SEQ ID NO: 12578 - DNA, 755 bp, Macaca Fascicularis
  misc_feature (1)...(755): n = A,T,C or G
aagatgttctannnnnnactatgtaaattgactgagatataggagagctgataatatatnnnnnnnnnnnnnnnnnnnnnnnnnnnnnnnnnnnnnntatcaactcgtaaggcactagtagagttaaactgacatcttaaaggacaacttaaacctgagctttctattcaatcatttgagaaccaagataaacttacaccacatacttggtgggtgaatccaattttgtagaattccttcacaggcaaaatagcatgatnnnnnnnnnnnnnnnnnnnnngacctcaaggaagcatagccacaaaccagaatagcatctgtctgtacatatttacaaagctaaaataatggcttcactcttacatttgaggaagcaactgaacaggagtcaatgatttcatattactccttgtagaataacaacaaggtgttccgtgcgtgtgtgtgtgtgtgtgtgtgtgtgtgtgtgtggtgtgcacacatttgtttggggttgggggagaagaagctaaggggagaagttaacatttatgaactattgcctgactatttaaaaagaaaaaagtagctctccgttatcacctttatacaaaatgtgcatcctgtgaattctgttccagatttcacacctatcgtaattccaaaaggtttgcacattagagtttgtaacaaaatattttattatataaaacnnngattagaaggaatgcaggatatttttaacacagcaatctgtgcttatacacaaaattact

SEQ ID NO: 12579 - DNA, 713 bp, Macaca Fascicularis
  misc_feature (1)...(713): n = A,T,C or G
cannnccagccctgccacagggccaccctcaccnncattggnnnnnnngaggccaggacgctgctggcacccgatccgccactgtggaagagaccatctgtggacacccaaactctgcagggcccgtcccccaactcactgtgctggctgtggctccatttccccgcagcggggtggggagggtgcgtcctctcatggtcatgggaaccaaaagccactgagccgttctcccccagcctccgagcacagggcctggagggcaggggctccccaagcctgggggttggagaatggtgaggggcttcccccnnnnnnnnnnnnnnnnngcctgctcacagggccttggggcaggagaccagtgaccccgagttctgcccatgtcaggacagtagcttcttctcnnnnnnnnnnnnnnnnnnnngagggccgagggccacacggatgccacagcccaggttggagtggcccagccggcaggcttgttccttcagcatctgatgggaacatctccaaaggaagcaaaatggaatgtgcctcccggacccccaaagggccaccgaacctcaccagtcaccagccccagaccacccacagccccgcccagacgccctgcctcatctggaaatagtttcgtttgtttctctaaaaagacttttgtaggtgggaaaaaagatattttattctcatgaactggcctattgacaagatggcat

SEQ ID NO: 12580 - DNA, 719 bp, Macaca Fascicularis
  misc_feature (1)...(719): n = A,T,C or G
tcattcaggggtggcaccgttgtgnnnnnnttggtgactggtgccacagcagggccatcaagtcctaaaagatccacagtgggctccgcagcttttttagggctggtactttttttaggctccagttgctgttcttctttcttctgcagcttttcagttgtaagtggttttgccggcttttctggctccttttctctccttttctcttccttttttttttccttttctttctccaatttattnnnnnnnnnnnnnnnnnnnagagaaggagaggataccaaaggctgaagaggagcatcagaagaggaaatatttgtaatagctatggcatttttatcgtagtatttcttcttttcatatttatctctgatgaaaaattccactgcttgatctgtctgtggtctccgaaagttctctggaagatnnnnnnnntagagtagtcttgctttagtatttcccatatcttgnnnnnnnnnnnnnnnnnnnnnnnncactcttgactggcgagaccatgaacccaccagaacgaaaaagctcgagacacatctgaatgtctgaaggaacaaactccaggcacaccatctataagaaggttgagctgacgcctccggatcctgtccctccatggcctgtttctgannnnnnnnnnnnnnnnnnnnaacaccatggtcccaagagagcggcctaaaacctgctcatggcaagggaacaaaagggtc

SEQ ID NO: 12581 - DNA, 815 bp, Macaca Fascicularis
  misc_feature (1)...(815): n = A,T,C or G
atataagataaatacggnnnncatgtttatagtccaaatttgcagacnnnacannnctgggtgtcataggtctattttaaggggagagagagaaaaacacccttactatcttggaaggcaatattaacaaacagagcttttttcaaatagcaattgtacttttctacctgtacccttttacataaagtgtttaaatttcagaaagatcttttattaagcatactttcacagaataatttgtttaaactatattcatattaaaaagttaaacacgctttttttcctgcctaaaaacacaaatacaactgccagtatgtatttttaatggaaccctattttataatgttacgttactgaatgtgtttcatatgcgtgaccgttaagatattatttaggtgaaggtttcaactcaaaaccacccaacctggtggttaacgatttaatacacataaccaaaccggcagcatttagagttgggatatacatttaaacattttcctggttaaggttcccaagagagtgtaaaggttttagcagaaagcaaaatatcatgcagctttatggaagtttaaagcatgtttgcaaatattgcagcccattgaaagaatttgcatgtacaggaaagttgtggatggagatggtttgtggaattttaagtgctcattgtagtaaacttttgctttgtagatttgaaggtacagacttacacaagcaagttcacaaaatcatgattagttacaaacattaagtaaaatgaagttaaaataaattattattttctatttcatatgttttgatgtgattcctcatttgca

SEQ ID NO: 12582 - DNA, 711 bp, Macaca Fascicularis
  misc_feature (1)...(711): n = A,T,C or G
acaannnnnnnnncagcaannnnnnnnnnnnnnnnnnnnnacttcaacattttcgagggcatggttnnnnacggggtgccccttgtgactatttcaagaggcaaagtggtgtatgaagctggagtgttcagtgtcacagcaggagatgggaagtttattcctcgaaaaccatttgnnnnnnnnatttacaaacgaataaagcagcgagannnnnnnnnnnnnnnnnnnnnnnnnnnnnnnnnnnnnnnnnnnnnagaagtcgccacactgaaatccagagtgacaaaagaagatgccacagtggggaccaggaaacaggcccacccctgaagtgcgtgctgtcggtaaaatcagaggaaaggaggctgccattcctttcacagccaaacgttgtcaacccatggagaagcaggccttattcgactccctgggatcctttagaaaaaaaatcaccgctctagacttctttgattttcttnnnnnnnnnnnnnnnntctttctcactgtgtctttgttgctgcataagattgaaggtataaatgtatattgttgtgatggaaaggctgtgtggaaattcattgatgatactttaaaatgtcatctttgcttgtactagatttcttacttagaatttttaaaaatcattttcttgtttaaatagtttctttttttaagaaaatggttacattagttttaaaaaagctctgtgat

SEQ ID NO: 12583 - DNA, 677 bp, Macaca Fascicularis
  misc_feature (1)...(677): n = A,T,C or G
ggccctcncannnnnnnggatttcaatgatgagaacagcaaccagagtttccattcggaaggttccctgcaaaagggcacagagcccagtcctgggggcaccccccagcccagccgccctgtgtcacctgccggacccccagaaggggtccctgaggaggctcagcccccacggctgggccaagagagagagagaagttctctgtcacccaggctggagtgcactnnnnnnnnnnnnnnncaatgcagcctcaaannnnngggctcaagggatcctctggccccagcctcccaagtannnnnngactacagagtcttactgnnnnnnnnnnnnnnnnnnnnnnnnnnnnnnnnnnnnnnnnnnnnnnnnnnnnnnnnnnnnnnnnnnnnnnnnnnnnnnnnnnnnnnnnnnnnnnnnnnnnnnnnnnnatcccgggggnnnnnnnnnnnnnnnnnnnnncgannnnnnnnnnnnnnnnnnnnnnnnnnnnnnnnnnnnnnnnnnnnnnnnnnaggcccccgaagcttaccccgtctttgagccagtgccacctgtccctgaggcagcccagggtgacacagaggactcggagggcgcccccccactcaagcgcatctgcccaaatgcccccgacccctgagaagccggcctgcctgtcctgtgccccaggggcccct

SEQ ID NO: 12584 - DNA, 822 bp, Macaca Fascicularis
  misc_feature (1)...(822): n = A,T,C or G
gatgctgtacttgtnnnnngaggattgtcagtgatccacaaggcattagagcatgggtggcatggagaaatcactgtcactgtcaaagatgtcagtcagtatgtcaaggttgtggagtgtaattgcagaattttccttcttcagctcattttgtctctttctcacataaggggagtagtaattaagtgaaagatcacactaccattatttccccttcaaagaaataatatttttacagaagcaggagcaaaatatggcctttcttctaagagacgtaatgttcactaatgtggttattttatattaaacctannnnnnnnnnnnnnnnnnnnatagggctaatnnnnnnnnnnnnnnnnctaaaaccttggttatcaaatacatctccagtacattcagttcttatcaaaaaaaaaacccagacttaatcttgaatgatatgagtatgtccaatattaagtaaaaaatataacaaaaggttatcttcagttgatcttgggcaaaaatacntagcagcaatcagatcccttcatctgttcagtcatctccaaaaacagtaaaaataaccactttttgttgggtgatatgaaatttttaaagggatagaataccaaatgctagaaacagactgcctgagttgagaattttgttttcttaaagtgtgtttctttctaaattgctgttccttaatttgattaatttcattcatgtattatgattaaatctgaggtagatgagcttacaagtattgaaataattgctaactaatcacaaatgtgaaattatgcataatgttgaaaaacacaaacattctaattaaag

SEQ ID NO: 12585 - DNA, 707 bp, Macaca Fascicularis
  misc_feature (1)...(707): n = A,T,C or G
agactagtttggataagannnntgaaaggttccttgtggatccccatttctggtcatcaagatgtggatgtatgtttcttaaagttattacatgctgcatctttcagcctggagaccatgcagaaacatgagaggtgatgacacactaattatgggaagcagaattactggctgatggcccctgaggctgtgtatagcaaaatgacaggacaatcctgcagtaacacttttcccttgaagagaagggggttttgattgtgatatatactagtatctaggaatgaacagtaaaagaggagcagttggctactttattacaacagagtaatgaagtactggatttggaaaaacctggttttattagaacagatggaatgaaagcctaaacctaacattgcctacttagccccctgaattaacagagcccaattgagacaaacccctgacaataggaattcaagggagaaaaagtaagcaacttgggctaggatgagctgactcccttagagcaaaggagaggcagcccccattaccaaataccatttttgtctgggnnnnnnnnnnnnnnnnnnnnnnnnnnnnnnnnnnnnnnnnnnnnnnnnnnnnnagcaacttcgttgtattttcaccaacttattacttgaaattatagcctgtccatttgctgtttctaggctgtgacatattttcttagtggtttggtttaa

SEQ ID NO: 12586 - DNA, 619 bp, Macaca Fascicularis
  misc_feature (1)...(619): n = A,T,C or G
ccaacctgaaagttccttctctagcctgaagagtttgtctttaaaaatgactttcataataaatagacacttgagttaactttttgtaggatacttgcgccattcatacacaacgtgatcaaatatgtggtccatctctgaaaacaagaaactgcttgacagaggagcattgcagtcactttgacaggttccttttaagtggactctgacaaagtgggtacttcctgaaaatttatgtaactgttgttgataaagaacatttatctagaaatcgatacttttattaggaaaagatatttttataggcttggatgcttttagttctgactttgaatttatataaagtatttttataatgactggtcttccttacctggaaaacatgaggtgttagttttagaattacaccacaagtatctaaatttggaacttacaaagggtctatcttgtaaatattgttttgcattgtctgttggcaaatttgtgaactgtcatgatatgcttaaggtggnnnnnnnnnnnnnnnnaatttatttttactgctttctgaaggtagatggaacagtacggaatnnnnnnnnnnnnnnnnnnnnnnnnnnnnnnnnnnnnngcgagcaac

SEQ ID NO: 12587 - DNA, 685 bp, Macaca Fascicularis
  misc_feature (1)...(685): n = A,T,C or G
gggaattttcagaagccattaaagcttatcaccgactcttggacttacgtgacaaatacaaagatgttcaggttcttaaaattctagtcagggcagtgattaatgggatgactgatcgaagtggagatgtcacaactggcctcaaaggaaagctgcaggagttatttggcagagtgacttcaagagtgacaaatgatggagaaatctggaggctgtatgctcaagtatatggaaatgggcnnnnnnnnnnnnnnnnnnaaaatgaaaaggccttccagtgcctctcaaaggcatacaagtgtgacacccagtccaattgttgggagaaagatattacatcatttaaggaagttnnnnnnnnnnnnnnnnnnnnnncacatgtggccataaaatgcagtaaaaacaaatccagtccccaagaagctgtacaaatgctttcctctgttcgactcaatttacggggcttgttatctaaagcaaagcaactttttacagatgtggccactggagaaatgtccagggaattagctgatgacataacagctatggacaccttagtgctagagctccaagacctaagcaaccagtttcgaaatcagtattgattnnnnnnnnnnnnnnnnnnnnnnnnnnnnnnnnnnnnnnnnnnnnnnaagatacatctgtatatctgaaatgcaagata

SEQ ID NO: 12588 - DNA, 742 bp, Macaca Fascicularis
  misc_feature (1)...(742): n = A,T,C or G
tcagatgagtgatgcntcagtgttctnngcttcatnnnnnngtacaagggaactttgaagagagccaggagactatgaagcggcaactcgggcgactgctgctgctcctgagggtgctggacccccagctctgcgacttcctggattcccaggactctggctctctctgcttctgtttccggtggctgctcatctggttcaagagggaattccccnnnnnnnnnnnnnnnnnnnnnnnnnnnnnnnnnnnnnnnnnnnnnnnnnnnnnnnnnnnnnnnnnnnnnnnnnnnnncgccatcctggacatggagcgggacaccctcatgctgtccggcttcggctccaatgagatcctcaagcacatcaacgagctgactatgaagctgagcgtggaggacgtgctgacgcgcgcagaggccctgcaccgccagctaaccgcctgccccgagctgccccacaacgtgcaggagatcctggggctggcgccgcccacagagccccacagcccctcgcccaccgcctccccgctgccgctgtcgcccacccgggccccgcccaccccgccgccccccacggacacagctcagcagcccgacagcagcctggagatcctgccagaagaggaggacgacggcgcagactcctaaccccgcccggcagccttgttctgcacaggcactttagaccgagccagggacacctgcgaggggccgggtgcactccgccgccctactgataagct

SEQ ID NO: 12589 - DNA, 620 bp, Macaca Fascicularis
gcatccccaaatcccaaatctctttcattgattacttcatcacagacatgtttgatgcttgggatgcctttgtagacctgcctgatttaatgcagcatcttgacaacaactttaaatactggaaaggattggacgaaatgaagctgcggagcctccgaccacctcctgaatagtaggagacaccacccagagccctgaagctttgttcctttggtcatttggaattcctgagggcagccagagttccttggtcctttcagtattaggcagaacagccccctggtctgcatagcctgtgaaagcccacggggacatcagtaaccttctgcagccaccatccgatgccattactgtcaagtgagacttggccactatagcctgggcctgccgcaggagctcttcagaaaggcacatgaagaccatggtttgcatcagctttctgataaaacacaaggtctggagtgcccctgcaaagggtattaatggatttcctgccagtgacagagcatgtctattgcaaacaatttctctcagttatgttcagcacttaagaacagctaatggcaataggatctttagcaactttttcacatcatagaaggtgcaatcactcactttgg

SEQ ID NO: 12590 - DNA, 718 bp, Macaca Fascicularis
  misc_feature (1)...(718): n = A,T,C or G
acccgtggggtgtacagtgaagagacccttagagcccgtttctatgctgttcaaaaactggcccgaagggtagcaatgattgatgaaaccagaaatagcttgtaccagtacttcctctcctacctacagtccctgctcctattcccgcctcagcaactgaagccgcccccggagctctgccctgaggatataaacacatttaaattactgtcatatgcttcctnnnnnnnnnnnnnnngtgatctggagctagcagcaaagtttgtcaatcagctgaagggggaatccagacgagtggcacaggactggctgaaggaagcccgaatgaccctagaaacgaaacagatagtggaaatcctgacagcgtatgccagcgccataggaataggaaccactcaagtgcagccagagtaaggtctaggaagattttcgtaaagtcgtatttcatgtcaaaggaaatcagcagtgatagatgaagggttcgcaacaagggtcccagaattgtctagaaatgagcaggtttacaagtactgttctaaatgttaacacctgttgcacttatattctttccatttgctatcatgtcnnnnnnnnnnnnnnntgctttctttgcaacttgtgtaacatttttctgttttttcaggttttactgatgaggcttgtgaggccaatcaaaataatgtttgtgatctctactactgttgattttgcccttgga

SEQ ID NO: 12591 - DNA, 692 bp, Macaca Fascicularis
  misc_feature (1)...(692): n = A,T,C or G
actgagcacaggagcnntaagagtnnntagnagngatgtgnnctgnngtgaggaaggtgggcaggcaccnnnnnnnnnnnnnnnnnnnnnnnaggggcagggnnnnnnnnnnnnnnnngaaggtgggtgcagggaactggcacacattggcacctcaccacacccagcaggagtggatagaagcccnnnnnnnnnnnnnnnagtcagaggaggaggaggaggaggaagaggaagaaatgcccagcaaagacccttccccagagccccctagccgcaggcaccagagggtccaagacaaggctggaaaggcacctcgggttcgggaggagctgtgagtggctgagccagctccttgaggatggggccacttgacttgtgcaaggccatcttgatgccaggacccacagaaagcccctgcgtgacatcaggagcagaacagcaagctctctgtccctgcacccccaccatcttggggacccacaagggcctggactcagaggacaatgcacagggtagcctggagctcaccagggctggggagccgggactgggcccagctgccagacctgcagccccggacagatggggaacactgtgtctccctgaacggaaatggcaggggaggaggctgatgctttacatgaagaggatggtggggttgggggcataaccctgctgctctctcccactct

SEQ ID NO: 12592 - DNA, 687 bp, Macaca Fascicularis
  misc_feature (1)...(687): n = A,T,C or G
tgtttctttacagaatgcagaaaacacatcttaaaatcatatagaaggaaataaaaacacatcagtggttggtgaacacttgaatgtgagattggctctccatctcacagagtccagcggccatcagcagcccagcactcaggggagcaggctgcctgcaaaggcattgttgctgttgttattctgttcactgccccatcgcctccagttgctatggcaactggccattctgggccagccacgtctcttgcatggcagtgcccaatggtggagttgctaggggcaacggagctgtttggaaggcctttcaaagccctcacctggaacattgggaattgtttattttttgatgaggtcatcagaaataatctcaccaggtcagatcccacttgtgctcctgtctctgggggcaccaaggaaactctgacttggaggcatgagcccagtcaccagtggtccaggtgagggctttgaaaggccttccaaacagctccgttgcccctagcaactccaccattgggcactgccatgcaagagacgtggctggcccagaatggccagttgccatagcaactggaggcgatggggcagtgaacagaatnncaacagcaacaatgcctttgcaggcagcctgctcccctgagtgctgggctgctgatggccgctggactctgtgagatggagagc

SEQ ID NO: 12593 - DNA, 762 bp, Macaca Fascicularis
  misc_feature (1)...(762): n = A,T,C or G
cagttaaccagattgagtgccacccgtacctcactcaggagaagttaatccagtactgccactccaaaggcatcgtggtgaccgcctacagccccctcggctctcnnnacaggccctgggccaagcctgaggacccttccctcntggaggatcccaggatcaaggcgattgcagccaagcacaataaaactacagccnnnnnnnnnnnnnnnntccccatgcagaggaacttggtggtgatccccaagtnnnnnnnnnnngaacgcattgctgagaactttaaggtctttgacttcgaactgagcaaccaggatatgaccaccttactcagnnnnnnnnnnnnnnnnnnnnnnnnnnnnnnnnnnnnnnnnnnnncccacaaggattaccccttccatgaggagttttgaagctgtggatgcctgctcatccctaagtgacctatacnnnnnnnnnnnnnnnnnnnnttttttcttgaaaatgtagtatggccnnnnnnnnnnagcagcgggacagcaacctgtagagtggccagcgagggcgtgtctagcttgatgttggatctgaagagccctgtcagtagagtagaagtctcttctagtttgctttgcccttctttttgccccgctggnnnnnnnnnnnnnnnaatactcttttctgaccaaagagaagcaaaatctcnnnnnnnnnnnnnnnnnnnnnnnnnnnnnnnttttnnctgcttggaactgtaatcctttcagcaagacnnnnnttgcctca

SEQ ID NO: 12594 - DNA, 771 bp, Macaca Fascicularis
  misc_feature (1)...(771): n = A,T,C or G
atgcgcctggggttcaggagctgtacacacactggctgcagggcacggactcagagtgtacaggcnnnnngctgcatacgcagtaccacgccgtggagaaggccaacactggcctgggcatccggtggtaggggctgcaggaccaggactcccaggaggccatgcgtgtgcgtgacagcggaaccacatgccccaagaccccagggctcccccaaaaactgtgagtgagctgcagggtgtgctgggacccaagcaggagctaggactggccaggacccgcggctgccccgtcacctccagttgggtgcctctgggttccccgctggctctgcccaggtggggtggcccaggcagcagaaggtccccgaggtcccacagcctgtttcgttggccctgggccgagggccacaggtgctgcccttgctgttgctagtcgggcacccaagtgcttgaggggcttcagcctgtcttggggttgcctgaggaagagcaagacgggttcccacccctgacttctggaggcttcccctgaagctctgtgcagaaggtgggagacaagagctggacctgcaggggtggtcccatcacaaccctgtgtgtggaccctggcaagagggggtgctgggcccctggaaagcaggggttactgttacgaggctgtggtccaaagcaagccaagtacgaagcggcagccatcactagctgtgtcatcccccagccaggtccccgccaggcctgtctcccagcgtctgtctaataaaggcacccccc

SEQ ID NO: 12595 - DNA, 759 bp, Macaca Fascicularis
  misc_feature (1)...(759): n = A,T,C or G
annnnnnnnnnnnntgccaggaaggccccagaaactgccgggagctgtgagccagggcgccaccttgagtggctggtaccatctgtgcctacctgagggcagggccctcccagtcttttgtgacatggacacggaggagggtggctggctggtgtttcagaggcgccaggatggttctgtggatttcttccgcccttggtcctcctacaaagcaggttttgggaaccaggagtctgaattctggctgggaaatgagaatttgcaccagcttactctccagggtacctgggagctgcgggtagagctggaagannnnnnngcnnnnnntacttttgcccactatgcgaccttccgcctcctcggtgaggtagaccactaccagctggtgctgggcaagttctcagagggcactgcaggggattccctgagcttccacagtgggaggcccttcaccacctatgacgctgaccacgattcaagcgggagcaactgtgctgtgattgtccacggcgcctggtggtatgcatcctgttaccgatcaaatctcnnnnnnnnnnnnnnaatgtctgaggctgccgctcacaaatatggcattgactgggcctcaggccgtggtgtgggccacccctaccgcagggttcggatgatgcttcgataggtccctctggcagccattgtccttacctctcctgtgcagcttccagatcctcagccaccttgcctttgccaaccacctctgcttgcctgtccacattaaaa

SEQ ID NO: 12596 - DNA, 754 bp, Macaca Fascicularis
  misc_feature (1)...(754): n = A,T,C or G
gcagcaggagcagcagaaggcccaggagcgtcaagagttatggcaaggtctggaggagctgcggctacgccggctacaggggacccagggggccaaggaggcccctnnnnnnnnnnnnnnnnnnnnnnnnnnnnnnnntgggggtcagagctagacagcacctcagaaggggagaagctaaacccagagctgtcagtccctctatcccttctcctgtccaggggcccagagagaaacacacctacccctggccttgccagagtggcttctgaggactccctgcccagcccagctttcactggggggagacgaggagaggcaatggtggtcttggcaacagaatgctcagcccctcgcagcaggacttgacaagggcaagcttgannnnnnnnnnnnnnnnngggatcttcccctgccccacaaagctgggctccgggctgcaggcgggctcccaccctctgctcctggccttgggcaagggcactcagcgcctcgcctgcccctgcctctgccagcgtgaggtccttcctcatccccaccatggggtccatggtctatttattctcgcccagctcaccctctacacagacactgtcctgggtgcacactcctcccctcccttgctgtgtacttccttgtcccctttttatttattgggcagggggagggtgagggcacaggcaagaagagattcacagtgtcctggggtaaggggggggtcacagtaatcatggtctacccctctttccctggc

SEQ ID NO: 12597 - DNA, 759 bp, Macaca Fascicularis
  misc_feature (1)...(759): n = A,T,C or G
cacatcgaggaatacagatgtacgagtccaatggctacaccatnnnnnactggcatgcactggactctggagatgcctccccagtannnnnnnnnnnnnnnnnnnnnnnnnnnnnnnnnnnnnnnnnnatctgtgtgggaacatggtcaggccgnnnnnnnnnnnnnnnnnnnccggccaagggtcccaacattgtactgagcgaggagctggctgcgcaccagacaccaatcacagacattgccactgagcctgcccagggacaggattgtgtggctgacatggtgacggcagatgactcaggcttgctgtgtgtctggcggtcagggccagaattcacattattgacnnnnnnnnnnnnnnttggagtgccgtgcccctctgtgcagttgtggcaggggatcatagcagcaggctatgggaatggacaagtgcatctgtatgaggctgccacaggaaatctacatgtccagatcaatgcccatgcccgggccatctgcgccctggacctggctcctgaggtgggcaagctactctctgcaggtgaggacacctttgtgcatatctggaagctgagcagaagcccagagagtggctacattgaggtggaacactgtcatggtgannnnnnnnnnnnnnnncagctgtgtggtgctcgattttgtgattcctcgggcagctcctttgccgtaactggctatgannnnnnnnnnnnnnnnnnnnnnnnnnnnnnnnnnnnnnngcannnnnncttgtccc

SEQ ID NO: 12598 - DNA, 686 bp, Macaca Fascicularis
  misc_feature (1)...(686): n = A,T,C or G
cggcccctgtagacacgaccccggggcctgctgttaaaaccactgtagaatcgagagcgggaactgttgtagttggtggtccgggcgcggtagcgggctcgtggaaaaccccggtctgttgtgctgatgcctgttctgttgtttctttttgggatcacctttgatttgcctttcctctaaatatggactcttctatggtcaaggaagtcctcactgactctttgtctgataactctatatactcaaattccttttgggatggccactaaatttgtcacatattatggtaacacnnnnnactgatccacagccatgaaagtgagcttccagctcttctgctgttgcaccatagtccacattgccaacatagatggaacgggcatcagcctccatcttctcctcaatggacatgatcactgggccagcattgcctggaggtggactcatattcatctgcttctctacctcgttctgtagctcctttagcttctcnnnnnnnnnnnncatctccctgactcgagctttnnnnnnnnnnnnnnncgggtcctcaatggcgccgtcccccgggtcaccctcgaccagtcccggctcctcctcctcctcttggctgccgggggctcccgaaccaggcccagggcccggagctcccgggggggcgcggggccggggcggctcctcttcgggct

SEQ ID NO: 12599 - DNA, 760 bp, Macaca Fascicularis
  misc_feature (1)...(760): n = A,T,C or G
cagggacagcgcggggcagaagggcacggggaagtggaccgccatctccgcctggagtacggcgtacccgtcacnnncattggagaagctgtcnntnctcggtgcttatcatctctgaaggatnnnnnnnnnnnnnnnagcaaaaagctgaagnnnnnnnnnnnnnnccagtttgatggtgataagaaatcattcctggaggacattcggaaggccctctatgcttccaagatcatctcttatgctcaaggctttatgctgctaaggcaggcagctaccgagtttggctggaccctcaattatggtggcattgccctaatgtggagagggggctgcatcatcagaagtgtattcctaggaaagataaaggatgcatttgatcgaaacccggaacttcagaacctcctactggacgacttctttaagtcagctgttgaaaactgccaggactcctggcggcgagcannnnnnnnnnnggtccaggctggcattcccatgccctgttttactactgccctnnnnnnnnnnnnnnnnnnnnnnnnnnnnnnnnnnnnagccaacctcatccagannnnnnnnnnnnnnnnnncaaactgatacggttgtgtggcctggggccaatgtaactttccctgccacggtttgactnnnnnnnnatttccctggagtgctaagaaagtcctaagannnnnnnnnnnnnnnnnnnnnnnnnnnnnnnnnnnnnnnnnnnnnnnnnnnnnnnnncctctcacctctcagg

SEQ ID NO: 12600 - DNA, 695 bp, Macaca Fascicularis
  misc_feature (1)...(695): n = A,T,C or G
acatggcnnnnnnnnnnnnnnnntcnnnnnnnnnnnnnnnnnnnnnnnnnnnnnnnnctcttccctgtaccgtattgccacctccaagaggtaccaccttcagcccatgcacctgctgtcccttgctgtgctcatcgtcgtcttctctctcttcatgttgactttctctaccagtnnnnnnnnnnnnnnnnnngtggagtccttcatagcctttctacttattgagttggcttgtggactatactttcccagcatgagctnnnnnnnnnnnnnnnnnnnnnnnnnnnnnnnnnnnnnnnnnnnnnnnnnnnnnnnccgggtacctctgcacttactggcttgcctagggctccttgtcctccatgacagtgatagaaaaacaggtactcggaacatgttcagcatttgctctgctgtcatggtgatggctctgctggcagtggtgggactcttcaccgtggtaaggcatgatgctgagctgcgggtaccctcacctactgaggagccctatgcccctgagctgtaaccnnnnnnnnnnnnnnnnnagctgggacagactcttgnnnnnnnnnnnnnnnngattgtacagatctctctgtgactgactttgtgactctgtcctgtggtttctcctgccactgctttgtgtttgggaggacatgatgggggtgatggactggaaagaaggtgccaaa

SEQ ID NO: 12601 - DNA, 795 bp, Macaca Fascicularis
  misc_feature (1)...(795): n = A,T,C or G
gtatttgggtacctttagggaggaatnncttnngcaataatgtatcccttccctgattgagggtgggtgggtggacccaggctccctttgcacacggnnnnnnnnnnnnnnnnnnatatcgacttctgcagaggatnnnnnnnnnnnnnnnnnnnnngggagggctgagaggagggggaggggtctccgtcctactgttctccagagggcatttccccttgcgccttctcccacagggcccagcccctctcccctgccccactccccaggggtactctggattgagcagtgctcctgtgggggagcctgtaaatgcaggctcagtggaccactggtgactgggctcatgcctccaagtcagagtttccttggtgcccccagagacaggagcacaagtgggatctgacctggtgagattatttctgatgacctcatcaaaaaataaacaattcccaatgttccaggtgagggctttgaaaggccttccaaacagctccgttgcccctagcaactccaccattgggcactgccatgcaagagacgtggctggcccagaatggccagttgccatagcaactggaggcgatggggcagtgaacagaataacaacagcaacaatgcctttgcaggcagcctgctcccctgagtgctgggctgctgatggccgctggactctgtgagatggagagccaatctcacattcaagtgttcaccaaccactgatgtgtttttatttccttctatatgattttaagatgtgttttctgcattctgtaaagaaacatatcaaactaa

SEQ ID NO: 12602 - DNA, 741 bp, Macaca Fascicularis
  misc_feature (1)...(741): n = A,T,C or G
cactagggtnncagctctaagttggccttgggaccctgactgcttgttacaggctgtttatataggcaaacacaagttcaaacacagcttagggcgcgaaattcaaacaaagnnnnnnnnnnnnnnnnnnnnngggtctgtctatggcctgagcaaggtgtcttgttctaaattggttagagcaggaccttatgaggttttttcctggagttgttgattccgggaacttcgaggcagggtaggacccccggaattggcagggtgggacctcatgaggttgtttcccggaattggcagggtgggaccctatcagggtgggaccctattgaggcagggtgggaccctatccagagccacctggtgttttttaagttctttttttttttttttatgaggcctagtttctaagttttatgcggcctaatttcagtttcacccctctttgtttcacatgactagggcatgggtgctaactggaaccatcagttggaagaataacaggcttatctatttcttgatcatctttcccagtgtagagcccaggggactacagataacatgtctggttaacattagccccctcttaaagaaaaaaggagaaagtcatgttttctcagttgaattnnnaaccaagatcactttactcactcaattaaaactgctcttgactgttccttggatagtttccctctgtattcacaaggtcccttagtcnnnnnnnnnnnnnnnnnnnnnnnntgg

SEQ ID NO: 12603 - DNA, 460 bp, Macaca Fascicularis
  misc_feature (1)...(460): n = A,T,C or G
aaaccagaactgannnnnnnnnnnnnnnnnnnnnnnnnnnnnnnnnnnnnnnncatacacgcacaagcgccagtgcgcacatgcacatggaaaaacaaaaggacaagctttctgtgaaacaaaaaatttacttggggataatgtagggattcacatgaattaaatagctgcaattggaagaagagggtcagggtcatttgttcaggttttctattgttttgtcctctgtttcctcttctccccttccttctctttctctctcccctccttttaaatgcaaatgattataaatttcttctaccttccccagctgtttcttcccacctttacagttgtttnnacaaggaggagtaatcaangnnnntattctgctttcaattgtggtcacattggtgatgctcnnnacctgccatggtcacaatttatggatatctgaaccatacatccataaccatatctc

SEQ ID NO: 12604 - DNA, 598 bp, Macaca Fascicularis
cagaacatgacttcacagatgttcagtgccattgctgcggtgacaggccaaggacagaaccctaatgccaccccagcccagtgggcctccagccagtatggctatggcggcagtggaggcggcagcagtgcttaccacgtattcccaacgccagcccagcagccagtggccacaccactaatgacccctagctactcctacacgaccccaagccagcccatcaccacccctcagtaccaccagctccaggccagcaccaccccgcagtcggcccaggcccagccccagccctcctccagctcccggcaacggcagcagcagccaaagtccaacagccatgcagccatcgactgggggaaaatggcagagcagtggctgcaggaaaaggaggcagaacggcggaaacagaagcagcggctgacacctcggccttcccccagtcccatgatcgaaagcacccccatgtccattgctggcgatgccaccccactcctggacgagatggatcggtagggggcctgctcctcggactctggttacctctgaggctgggaaaggcctggccgcccactgcctccctccctgcccctcctttctg

SEQ ID NO: 12605 - DNA, 693 bp, Macaca Fascicularis
  misc_feature (1)...(693): n = A,T,C or G
tccgtnnnncagccagaatatnnnnnnnnnngtgacacagcggccaccaccaaggagcccgtctttatccccagaccaggcatcacctatgagccacccgactataaggccctggactnctctgaggccccaagcttcacccagcccctggtgaaccgctcggtcatcgcaggctacaccactatgctctgctgtgctgtctggggtagccccaagcccaagatttcttggttcaagaannnnnnnnnnnnnnnnnnnnnnnnnnnnnnnnnnnnnnnnnnnnnnnagggagtgttgactctggagattagaaagccctgcccgtttgacggagnnnnnnnnnnnnnnnnnnnnnnnnnnttacagggcgaggcacagtgtgagtgccgcctggaggtgcgagtgcctcagtgaccaggctggctcccggggatggccaggtacaagatgccagccccataccaggagcctgcagggaagttggggaaaccgctccctgctgttggatgtgtgtgtgacaagtgtgtctcctgggctgcagtgggggatcagcaggacagctgttgggcaggcctgagtgggtgttgcacagactggtccacagggctcctgaaggaagctcctggatctttggggtaaaaggagggtgacctcaagaaaggatgtctggggacaggcctttctggcctgctg

SEQ ID NO: 12606 - DNA, 745 bp, Macaca Fascicularis
  misc_feature (1)...(745): n = A,T,C or G
gacacgcagcnnnnnnncccagagggcagttttgctcttttgtatgnnnnncgcaactacaggtaaagcagaagtctgttttcaggaagagtttcaagggagaaaggggacagtttatcaaaaacattgtttcaggagaagggagcataagtttannnnnnnnnnnnnnnacacaatattctgctgttgggaaaaccacagcattttatatattttttattttaataggtttggtgcttatcttctaataagatttaaatatcacaaactgtagcacaaataatttataatttacaaattgactaaaattgggtatagtatggtatttgaaagaataagcatatgcttctgtttattgaannnnnnnnnnnnnnnnnnnnnnnnnnntaaccctcgacgtggctgtcaagttagtcgctccttgctaacctgtgggtgaccacggccccaagcccggagctggacgcagggcccaggacgcgcggctccctcatgctgcctgggcccttcctccaagaccctacagagcctgaggggcaccttggcttccgcctgtgctaggtttgccatgtcagctggaataatacttgaaattttgatttttgggaaaaaaagttttttatcttttnnnnnnnnnnnnnnnnnnccttgtttgcaaactggtaacttttttgcttctcaggaatacagttttcaactgttgacttgctcttgataggaactgagaagcagcactctgtctgcg

SEQ ID NO: 12607 - DNA, 536 bp, Macaca Fascicularis
  misc_feature (1)...(536): n = A,T,C or G
acaccccctctgccacactgctctcnnnnntccagaagcttggttctactgtaagcaacagctccttcatgggctgagaaggggaaaccaggatctcccctaatcaagggcctatacttttatttttcaactctattaactgaactatgcttggannnnnnnnnnnnnnnnnnnncttcaatgccatctnnnnnnnnnnagttgaagacagagtaggggaaatnnnnnnnnnnnnnnnnnnnnnnnnnnnnnnnnnnnnnnnnnnnnnnnnnnnnnnnnnnnnnnnnnnnnnnnnnnnnnnnnnnnnnnnnnnnnnnnnnnnnnnnnnnnnnnnnnnnnnnnnnnnnnnnnnnnnnnnnnnnnnnnnnnnnnnnnnnnnnnnnnnnnnnnnnnnnnnacaatatagtgactgtatttaatgnnnnnnnnnnnnnnncctccctccctctcnnnnnnnnnnnnnnnnnacaccaggggcttctcccctcaaagccataccccgcctcgtgggcgggcatggggggtggtgggtgcca

SEQ ID NO: 12608 - DNA, 733 bp, Macaca Fascicularis
  misc_feature (1)...(733): n = A,T,C or G
gtacnnnnnnnnnnnnnnnnnnnnnnnnnnnnnnnnnnnnnnnnnnnnnnnnnnnnnnnnnnnnntccccattggtaaaataaaggttgggcctgatctcagaaactcaagaagagtgattgtgggccccagggtcgagagagagatactgccaggtccaggactgtccctgtgttctgggtcccagaccacagtgtttcttcctgaagctggtggctgcagccactttgccttgctcccctctgccttttctgaaggatgatggggggccagactgcctctgggagctccgtcaagttcacctccccccaactgcctgcccagccaagtacctggcgcagatcattgtgatgggtgtgcaggtggtgggcagggcctttgcacgggcccnnnnnnnnnnnnnnnnnnnnnnnnnnnnnnnnnnnnntgcccgaggacgcgctggacaccggtctgcagccgcttccaacctctccggcctcagcctccaggaggcgcagcagattctcaacgtgtccaannnnnnnnccgaggaggtccagaagaactatgaacacttatttaaggtgaatgacaaatccgtgggtggctctttctacctgcagtcaaaggtggtccgcgcaaaggagcgcctggacgaggaactcaaaatccaggcccaggaggacagagaaaaagggcagaagccccacacgtgacttcttggctccccccacccaccccgccacctcta

SEQ ID NO: 12609 - DNA, 754 bp, Macaca Fascicularis
  misc_feature (1)...(754): n = A,T,C or G
gagcgccgccccagtggcactgaagtgaccctccttcagcggaggnnttgggagtcaggcctgggcaggaccctgctgactcatgacacaggagctgggagccaggctctctgggcctttctcgggcttccttggcttgcctggtgggggaagaggaggaggggaaggaggaaagggaagagtcttccaaggccagagggaggggtatgaccccccaagaccacccctgaagatgagcatccccttcctctccctgttagaaatgttagcgccccccactgtcccccaagttctaggccccccaaaaagctgccagagccagccgccctctcccagggatgctctttctaaatatggatgggtgtgggagggaggggttacctcccttgccccaaggttccagaggccctaggtgggatgggctcactaaacctcggggaactccaggacgaggaggacatgggactcgtgtggacagccagggttcacttgggctctctctagctccccagttctgcctgcctcctccctcccagctgcactttaaccgataggtggggacctggggggaggccagggcaggcaggccatgaagagagcccctctgtgcccagcactgcctgcgtctgctcttcagtgcccagggtggctgccagcccaccgcctcctgcctggggtggcccggccctcccggctgttgcgacgcgggcttctggagcttgtcgccattggacaatctccctgacggaccctc

SEQ ID NO: 12610 - DNA, 1090 bp, Macaca Fascicularis
  misc_feature (1)...(1090): n = A,T,C or G
ctgcagcccagccccctcttccactcccacctggagaccctgcagctgctgaggactgcgcagctcccagaacaggtcaccctcagctacggtgtctttgaggggaaactcaacgtcattaagctacagggccccttctccgcggaggaggacccctccaggtttcgctccctccattgtctcctctacccagatacaccctggtgtcctcagctgggtgcccgatgaatcctgaactgctgggcaaaggttgggcagaggcttctgggtgtgccttggctcgcaaggtggcactgagggtccctggcaagtgtcttgtgataggcagtccctggcagggccttcgggtggtggcaagcccaggatctgggtgacaattggcactgaaggcaccccaggcccctgggaggtgagttagacagcccaggggaccaggtggaccaggtgatggccagagaagctccaggggccagactccctcaggaggctgaactgaaaaagggcagggggcacttagctggcctggggctcaggggtcctaaccctttaggcagtgacatggcctctgggtggggtctggcccttggccctggctcatgtctctcagtcattcccctggggctcaagcactgggccgcccactcctgcctccctcgcctgggtcctgggttcctgaagggatatggaaatgatggcggaatccaggctctgaagcacctgctgttgttgccaaccagtctcccaaagctccttgctccccaccccttgctaacaggaccagatttggtttggatcctcagcatgctagnnnnnnnnnnnnnnnnnnnnnnnnnnnnnnnnnaatcgtgatgatcctttttgctcatttcccagcctcccttgctgttaggggttaccatgggaccagctctggccagagggaactaagcaaatccaatagagacatttctggggaaggttnnnnnnnncactccccatcttcctgctgtgaatgtgggtgtgatggctggatctggggcagccaccttgctaccatgaaggaaaggccaagacaatcatcccagctatccctccagcatctggttctgta

SEQ ID NO: 12611 - DNA, 751 bp, Macaca Fascicularis
  misc_feature (1)...(751): n = A,T,C or G
gagacagctggagctgtgcccaaagaatggaagccgtttgttccaactgctactttatttctactgaatcagcatcttggcaaaagagtgagaaggactgcgctagaatggaggctcacctgctggtgataaacacacgagaagagcaggatttcatcttccagaatctgcaagaagaatctgcttattttgtggggctctcagatccagaaggtcagcgacattggcaatgggtagatcggacaccatacaatgaaagttccacattctggcatccacatgagcccagtgatcccgatgagcgctgtgttgtgctaaatttccgtaaaacacccaaaagatggggctggaatgatgttcattgtattgttcatcaaaggtcagtttgtgagatgatgaagatccacttatgaactgaacattctccattaacaagtggttggattggcatctgtcattgtagggatagataataagctcttcttatttatgtgtaagggaggtccatataatttaggtggtctgtcaactattctacttatgagagaattggtctgtacattgattgattcactttttcataaagtgagcatttattcatgtgccaaagcctgtactgaagacccctattgtgcacacatggagagaacatgagtctctcttaatttttgtctggttgctaaagaattatttaccaataaaattatatgatgtggtttctcctcnctgtctggttttctcttcatcccta

SEQ ID NO: 12612 - DNA, 733 bp, Macaca Fascicularis
  misc_feature (1)...(733): n = A,T,C or G
cccagatgannnnntnactagcccttccgaactccttgctccataattagtctttnnnnnnnnnnnnnnntgacnntgcaggtcatcatggttttctttttttattgtttttctttttttcttgtcttttttttttttttgnnnnnnnnnnnnnnnnnnnnnnnnnnnnnnnnnnnnnnnnnnnnnnnnnnnnnnnnnnnnnnnnnnnnnnnnnnnnnnnnnnnnnnnnnnnnnnnnnnnnnnnnnnnnnnnnnnnnnnnnnnnnnnnnnnnnnnnnnnnnnnnnnnnnnnnnnnnnnnnnnnnnnnnnnnnnnnnnnnnnnnnnnnnnnnnnnnnnnnnnnnnnnnnnnnnnnnnnnnnnnnnnnnnnnnnnnnnnnnnnnnnnnnnnnnnnnnnnnnnnnnnnnnnnnnnnnnnggcccatggtgtttttctttagggctcttcctacagccttgagaagtagataggcatcagagtatgctactataggaatcagaaaaattcaaaacaaatgtggattaagtgtttaggctctatgtggctcacaaccagaagccttaagtctgtgtgtttctgtgtcccaagactgggctcatattctggctttgcccataacaatgccctgggacttcagggagttccctcatttgtaaaatgagggggtcagagcaggtgatctccatgtttcttcccattctgatattgttgtctgtggcatattctttgtgtgg

SEQ ID NO: 12613 - DNA, 655 bp, Macaca Fascicularis
  misc_feature (1)...(655): n = A,T,C or G
cccagcccctccctaccccaggtctagtggccccaccctccattccggaccctatgggcccagcccctgcccacctagttggtttggggaccctggtgcgtgctagtgggcatgggatcagccaagcttcgttccatctttcctaaaggtcagagctgcagcctagggggcactgccctacagaaaaggtctgcctgagaggcctgaggatcccagagcactccactgagcttcctggaaactggccctaacctgtctgtctccatggatgcatccnnnnnnnnnnnnnnnnnnnnnnngctgtgatctgctaccctagagaaggctcgctccctgcctactggctcacaaatgaggacctgtgggccatgtccttattccttgtttgagacggggctacaagccccaagaagaatttcctggccgggcgcggtggctcaagcctgtaatcccagcactttgggaggcggagacgggcggatcacgaggtcagnnnnnnnnnnnnnnnnnnnnnnnnnnnnnnnnnnnnnnnnnnnnnnnnnnnnnnnnnnnnnnnnnnnnnnnnnnnnnnnnnnnnnnnnnnnnnnnnnnnnnnnnnnnnnnnnnnnnnnnnnnnnnnnnnnnnnnnnnnnnnnnnnnnnnnnnnnnnnnnntg

SEQ ID NO: 12614 - DNA, 695 bp, Macaca Fascicularis
  misc_feature (1)...(695): n = A,T,C or G
tctcacagtgatatgagcagttatacgcgtgggataaaataacattgggtcactgtgaattgagatgaagtaaccattttcatctcttctgcatagactagacattgtttctgtatagtgtatctaaatatcctgtgtaggcaggacttaagggcactttatgtagacttattaaaatgccattttttggagaaattgatggtgttggaaaaaaaaaacatttaaaaaatgctattacaagaatttcactttttttttttgaacagcactaaggctcgtnnnnnnnnnnnnnnnnnnnnncgtggggcaaatgatttcatgtgtgatgagatggagcgctcgttacatgatgcactttgtgtagtgaagagnnnnnnnnnnnnnnnnnnnnnnnnnnnnnnnnnnnnnnnnnnnnnnnnnnccctttccatataccttgaaaactatnnnnnnnnnnnnnnnagaacagttattccttgtcttagaggcccgagagcagtagctgtgggctttaattttttttcccttnnnnnnnnnnnnnnnnnnntccttttttcctaggggtctcgggaacagcttgctattgcagagtttgcaagatcacttcttgttattcccaatacactagcagttaatgctgcccaggactccacagatctggttgcaaaattaagagcttttcataatgaggctca

SEQ ID NO: 12615 - DNA, 628 bp, Macaca Fascicularis
  misc_feature (1)...(628): n = A,T,C or G
acttcgtggatnnnnngnnngtgatgcacaataaagcannntattcctacagcgggacgccctgaccccatggctgctctgaccccaggaggctccggttctgggctcggagctgtgacctccccaacattcacccctcaaccccaagtcctctgcttggggagtgctccaggagccccggaccctgagtcaatgttgggaggaagggtacctggtgtccccagtcaagccggtgaagcccatggggctgctacatggggtggggtcgtagggaggctgtttgcctccatgtctaggaaggcctgtgagaggagcagttgggacttccggacaacttagctgggccctacttggacccaagtttcagaatagtgttcccctatcaaggctgtgactagnnnnnnnnnnnnnnnattccctgtcccctgcccgctaccttcaggccatttagagttgtaaatttacaaagatccacggtgggctccagctgccaagccacccaagggagtctgggccctaggcccagccccatctctccccatgaggggccaagacactgcctgaggtgtgggagggactnnnnnnnnnnnnnnnnnattgtaggagctggaccaactgtatatagttc

SEQ ID NO: 12616 - DNA, 741 bp, Macaca Fascicularis
  misc_feature (1)...(741): n = A,T,C or G
tccatgtagctttttgttcaatgactnnntcanntgcttcctttttgaatttttaacagatagtaagtaaatttggtagtttttttccctgggtcagcgatggaaaggggttnnnnnnnnnnnnnnnnnnnnncagctgagggaaattcttgcccaactaaacccagaactcaaacttaacattagaaaataaggtccagggccggacacagtggcccacgcctgnnnnnnnnnnnnnnnagggggccaaggcaggctggatcacctgaggacaggagttcgtgactagcctggtcaacatggtgaaaccccgtctctactaaaaatacaaaaatgagctgggcatggtggcaggcgcctgtaatcccnnnnnnnnnnnnnnnnnaggcaggagaatcacttgaacttaggaggtggaggttgcagtgagccaagatggcgccattgcattccagcctgggcaacaagnnnnnnnnnnnnnnnnnnngaaaaagaaaacaaggtccagtttttggattcaatgagtgggaaatacattnnnnnnnnnnnnnnntgtgatggattataccaaaattttagtagtgtgcagaggggtggtttcagactaaatccagtcttagagcttgcagagtgnnnnnnnnnnnnnnnnnnnntcatcaacctgcattcccacttaacactttgattagcatgaacttgccaatcaaaaaatgacaatcagttttagaaaatagaaatagg

SEQ ID NO: 12617 - DNA, 758 bp, Macaca Fascicularis
  misc_feature (1)...(758): n = A,T,C or G
cagtttcctttaagagcccgtggcatttttcctcctcctccctaactttagaaatattgtacttgactattttgattagggaagagggatgctgtctccgatctctgttgtctccttgggtctttggggtggaagggaggggaaaggcaggcccgaagggaatgcagacatttgaggcggcctcaggagtggatgcagtctgtctctcctggctccactcttgccgccttccagctccgagtcttgggaatgttgttacccttagaagataaagctgggtcnnnnnnnnnnnnnnnnnnnnnnnnnnnnnnnnnnnnnnnnnnnnnnnnnnnntcctttctgcagtggttcttatcaccacctccctctcagccccagctccaaccctgaggacagctctgatgggagagctgggccccctgagcccactgtggtcttcaggacgcacctggaagctggtgttccctgtcccctgtgcacttctcccactgggacatggagtgcccnnnnnnnnnnnnnnnccggtcccctcacccgcgcttgagggggctgggcagtccctcctctccccagtgtccacagttgctgagccagatggttgnnnnnnnnnnnnnnnnnnnnnnnnnccgtggatctgaacaccgcagcccctgtccttgggtcgcctctnnnnnnnnnnnnncgttgtaccagtgcatggagagaaaattttgcccttctcttgtcttagagttgtgtgtaaatcaagaagccatcat

SEQ ID NO: 12618 - DNA, 745 bp, Macaca Fascicularis
  misc_feature (1)...(745): n = A,T,C or G
caggcttttgcttttttctttccagaccccatagtagagcacttttcacttacttgggggaggtttcaggggatctgttctcaccgttaactcagccagaaagatgccctagttgtgataaaaggtaactcgaggtggagagtagccccggggcccctcgacatggtcgtcactgagggaggctgagacgtgcgctccttggctaatactgttgttttcannnnnnnnnnnnnnnnnnnnnnnnnnnnnnnnnnnnnnnnnnnnnnnnntggagggtgacccatttcaggagctgcctggtaccagtctgactaggtgcaggcaagcttgtgtgggcccaacaggtccctgatagagctggtgccaggtgtgggctcagaccctgggcannnnnnnnnatgnnnnntnggatcccactgattggccagccgagcgagaagcaggctgccgcatggcactgcctgccgcttcgagcttcctctgagccgcagggcctgctacgcgggcaagcgtgctgcctctcttctgtgtcgttttgttgccaaggcagaatgaaaagtccttaaccgtggactcttcctttatccccttttatcccttcctttaccccacatatgcaatgacttaattttcacttttgtagtttaatcctttgtattacaacatgaaatatagttgcatatatggacaccgacttgggaggacaggtcctgaatgtcctttctccagtgtaacatgttactca

SEQ ID NO: 12619 - DNA, 742 bp, Macaca Fascicularis
aagaattactataatgtgtccaaaatatcactgcatacaatatctggtatttgaagagaaaaactgacttttgtacagcataaaacacaggctttcacaaattttgtattgctttttttccagttttgcagaaaatttacattctagttctcttcacacagtagaagttgtaaataatttatgaatgacagtacacattaaaaggtatgcattaacagcatattagtatgctgttttatttgctgaagaaaatactgtcttctatttttaatgatacgttaggtacgacgtgtagttcggtagagttctaaaatttttgtactactttcaatttggtgaaaacgtattaagttgtctaccatgttttcttttctagctgaataaaccacatcaaagaaaagggaccacagtatttgaatgtttgaaagtctgtaaagcttaaggttttaaaaatgttgcccgtaatgttgaacatgtctgttaaaaaataaaagaaaaaatagttgcttcaaactatttttatgagaagttgtaagcattttttagatataaagcagtataaagtacttattgttattttattctgaagttgtttaaaattcaccatgactttgaccgctgcagattctttaagcgggttaatttatgttttgaggtggaatacaatttacactttttcttaaagacatgaatgtgggtttctatattaagcatattttgtgactactattaacagattgat

SEQ ID NO: 12620 - DNA, 729 bp, Macaca Fascicularis
  misc_feature (1)...(729): n = A,T,C or G
tgcagttcnnnnnnagaaacagcccagtctactnnnngagggcctctggctcctcaacaacctcactgcaaacagtcctagtttctgtacctccttgctctccctgnnnntgattgagcccctcttnnnnnnnnnnnnnnnnnnnaatgtggtgagcgtaatggtgctcacagttttgtgcaatgttgcagagaagggtcctgctnnnnnnnnnnnnnnnnnnnnngggcccctgcttccnnnnnnnnnncacacactagccttttctgacactgaagtagtaggccagagtttggannnnnnnnnnnnnnnnnnnnnnnnnnnnnnnnnggctgttcaannnnnnnnnnnnnnnnnnnnnnnnnnnnncctggaaaggcatcaggaagaggcccagctccaggatcgtgtgtannnnnnnnnnnnnnnnnnnnnnnnnnnnnnatctcgtttctcaatgtcactcattcccctctctcttaacatcaagcttctttgtccagtagagcctttggagacagcagagcctttggagatttaggaccataatgatgtctcatgttctctgctcccatacctaagccaagacctttgggtcccagctcctcctctttcactcagcactatctaggcaggaggaccaaaagggactcagtttggtctacttattctggggccctagaatccctgccccccacccttcatttnnnnnnnnnnnnctggtagctt

SEQ ID NO: 12621 - DNA, 781 bp, Macaca Fascicularis
  misc_feature (1)...(781): n = A,T,C or G
gacagcttacaccaaaggacatcactatccctcaaagagagaaacctggacacaagtaccaaaaagaagattaccttcagagcgggctgccaacagaagccaccgttcttgggactgtccnnnnnnnnnnnnnnnnnnnnatttcaagtttgggggccatcttggtttttgctccctacccctcccacttcagtccagcaatttccaccactctgatgtctgggtacccatttttaggagctctgtgttttggtattactggatccctctcaattatctctggaaaacaatcaactaagccnnnnnnnnnnnnnngcctgacctcaaatgcagtgagttccgttactgcaggggcaggcctcttcctccttgctgacagcgtggtagctctgaggactgcctctcaacattgtggctcagaaacggattatctatcctcattgccttattcggagtactattatccaatatatgaaatcaaagattgtctcctgaccagtgtcagtttaacaggtgtcctagtggtgatgctcgtcttcactgtgctggagctcttattagctgcatacagttctgtcttttggtggaaacagctgtactccaacaaccctgggagttcatttcccttgacccagtcacaagatcatatccagcaggtcaaaaagagttcttcannnnnnnnnnnnnnnnnnnnnnnnnnnnncagaggaaggaaaagcaacccaacgctcatggtcaagtgtgattagactttcctgaaatctcagccatttagannnca

SEQ ID NO: 12622 - DNA, 678 bp, Macaca Fascicularis
  misc_feature (1)...(678): n = A,T,C or G
ctttgttcaattttnnntttttttaatctaaaatgattgtgnnnctgcccaagcagcctggagacttcctatgtgtacactggggtggagcttggggcaccatgagaaggtcggcgtgtcctggaggctgacacagaggctggcgctgagcctgcttgttgggaaaagcccacaggcctgttcccttgtggcttggggcatggcacaggcccgccctctgcctcctcagccatgggaacctcatatgcaatttgggatttactagtagccaaaggaatgagagagctctaaccagatggaacactggaacattccagtggannnnnnnnnnnnnnnngaaaactggaacataggagcgtcctaccatgatggaagtgttcagtttataacagtgagactcctgtgaccctttcattcacccccgggacctcaatttattccaagatctttccaaatacccaaatgtccatgcaagcccgttaaataattccatatgctaccattaatagacatacggtgaccacatagtgtgagaatattccaacaagcctcaaactcccttgagcctccccagtacttattaaggcatccaaaatgttcccgtgaactaccccacaaaatgcctaaaactaaaaacaaccaaaaatgtctcccccaatgtcctgagacatgaaccca

SEQ ID NO: 12623 - DNA, 755 bp, Macaca Fascicularis
  misc_feature (1)...(755): n = A,T,C or G
cannnnnnagaagatctcccggagcagtgncnngaaagtgctggaccatgccatgattggccccgaaggcacagacaactgccataaatttgttgacattcttggcttacgaaccatctttcccctctttatgaaatctcccaggaagatcaagaaagtgggaaccactgagaaggaacatgaagagcatgtctgttcgatcctggcttcccttctgcggaacctaagagggcagcagcgaacccggcttctgaataaattcactgaaaatgacagcgagaaggttgacagactaatggagttgcattttaaatatctgggtgcaatgcaggtggcggacaagaagattgaaggggaaaaacacgacatggtccggcgaggagagatcatagacaatgacatcgaggaggagttctacctccggcgcctggatgcggggctctttgttctccagcacatctgctacatcatggccgagatctgcaatgccaatgtcccccagattcgccagagagttcaccagatcctaaacatgcgaggaagctccatcaaaattgtcaggcatatcatcaaggagtatgcagagaacatcggggacggccggagcccggagttccgggagaacgagcaaaagcgcatcctgggcttgctggagaacttctagaggcacctggggcctgcgcaccatggaccgtctcagcttccctcccaggatcagtttctacacaactctgtgtggctttggacaaataaag

SEQ ID NO: 12624 - DNA, 714 bp, Macaca Fascicularis
  misc_feature (1)...(714): n = A,T,C or G
ccaggtgtgggaagaatgcctacagtcaagttttatnnntcctgggcagagccgctacacacgggccnnnnnnnnnnnnnnnnaggacagaattgaatcacttgaaaagaggctcgagataaacaggggtcacatgacgacagaagccaagagagctgcaaagatggaaaagaagatgaaaattttgcttgggggttaccagtctcgtgctatggggctcatgaaacagttgaatgacttatgggaccaaattgaacaggctcacttggagttacgcactnnnnnnnnnnnnnnnnnncatgaagattctgctattccccggaggctagagtgtctaaaagannnnnnnnnnnnnnnnnnagaaagagaaaaggaacttcaacatagatacgctgannnnnnnnnnnnnnnnnagactttaaagtcaaagttctgaagtacagtttatattctgtcacaggattaannnnnnnnnnnnnnncnnnnnnnnnnnnnnnnnnnnnnntatcttcattgacaaatttacccaccatctgtggttttttggttgtttattttaaatgatatcgatcttacacattctnnnnnnnnnnnnnnnaactccacaggacggacattttagagtttaaattattaaggctgtcattcttttannnnnnnnnnnnnnnnnnnnntttttagttttggcctttaatttaaaaagcctaattttaa

SEQ ID NO: 12625 - DNA, 716 bp, Macaca Fascicularis
attattagcttctaactttgcactgagtgtcctcgcccttcctttagctaatcctatacattacagagaattcctaggacagggctggcgacaattcatgtgtaaatgtttactcaaggactctgtgactgcgtttaaaaagtacagtgtatatctctggagaaataatatgtatacctacctttagcagctttttattgtggactaatgcaagaaaattattaccagagtattgcaccatttttccatttggaatataaagttaaagagaaaaaaaaaactgttgttgaactgtggccatagatacttgtaaagaatggatggttccgtggaaggaacagaaacaagcacttgggcgtgggttgtgactgcttttgggggagcctggggtttgggctcccacctgtttacagacctttttttctccttcagactttaaaattttaaaaatttaaaaaggaattaaaaaaaaaaaaaaagagacttccgtcgtaaagaaacctattttcagaatgcagatgcgctccttcagagctctgggacgggacggcgttgttccctcggccatcgtcgtggactctgtcgattgctttcgccccttcgtcaaggtgacaggcgttgtggccactgtcttgcacatgccggacgcgctctcaggaaagccagggctcccgagggcagctccacaccatttcatgtattttaaacccaactcc

SEQ ID NO: 12626 - DNA, 822 bp, Macaca Fascicularis
  misc_feature (1)...(822): n = A,T,C or G
gtaggaaannnnnnnnnnnnnnnnnnctccntgcccagggccccatgctattgtcctggttctgcagctgggccgctacacagaggaagagcagaaaactgttgcattgatcaaggctgtctttgggaagccagccatgaagcacatggtcatcttgttcactcgcaaagaagagttggagggccagagcttgagtgacttcatagcagatgcggatgtgaacctaaaaagcatcgtccaggagtgcgggaaccgcnnnnnnnnnnnnnnnnacagcagccaaaccagtgaggcagagaaggaagnnnnnnnnnnnnnnnnnnnnnnnnnnnnnnnnnnnnnnnnnnnnnnnnacaaaggggcctacttttctgacgccatatacaaggacacagaggaaaggctgaaacaacgggaagagattttgaggaaaatctacattgatcaattaagtgaagaaattaaacnnnnnnnnnnnnnnnnnnnnnnatcagaggcagaaaaggaggaaaaaataaaattattaaaaataaaatgtgatgaaaaaataaaaaatataagggaagaagctgaaaaaaatatatttgcagatgttttaaataggattttgaagatgatttcaaaaatatggcatttcttttggtagtaatgtaagttttattcttcttaatttactatgatttgttaatgtgatgaattgtattttgcaagatagttacagaaatacctacctccctttagctttattaaggcatcattgataaataaaaattaaatgtttaatgtgtataatgtgatttttaatatatatgtgtatatata

SEQ ID NO: 12627 - DNA, 713 bp, Macaca Fascicularis
  misc_feature (1)...(713): n = A,T,C or G
aagaatcaannnnnnaacaattaaccagccagtagattgtctgtcagtgaccttctgtagtaatacagtttttgctaatgtaaataaaaatggtatctgtagctctcaggatcattgtgcattcatatatgctaagccttatgttctctaatagaagcctttcttttccattgtttctggatatttgnnnnnnnnnnnnnnnnnnnnnnnnnnnccttagtacacattttatggagtacatgttgtactaggtttgatttgaaactggtgtttgtggcagaactgtcagggcatgaggagcgctcctcctgtgggtggacacgttcacgcactcacaggttgcacctgctgctggtggtgagcagggggctcagcagcttgaccgccgccccccgagggggctctccccagcttaaactttgttgttcagatttgttaactttttatattaatgactattgaaaatagtaataaaaatgtatattataggcttcaatgtttacatgaatgttacccaaaaagctgtgttttctttggtcagaggtcacgatttatgaaaaacaagatgctgtgtgaatggaaatcatttgcaattgagtgaaacttcattataattcacagtgtaaatttaatccaaacaaattttgtttcaactgaatttataattaactctgaatttgtttgtaatcattaatatttcaattgggtatctt

SEQ ID NO: 12628 - DNA, 751 bp, Macaca Fascicularis
accatcatcagcattaccaacaacgtcatcgggcaaagtttggtctgggactttgtccagagcaattggaagaagctctttaatgattatggtggtggctcgttctccttctccaacctcatccaggcagtgacacgacgattctccaccgagtatgagctacagcagctggagcagttcaagaaggacaacgaggacacaggcttcggctcaggcacccgggccctggagcaagccctggagaagacgagagccaacatcaagtgggtgaaggagaacaaggaggtggtgctccagtggttcacagaaaacagcaaatagtccccggcccttaaagtcacctggcccccatgcaaggtgcccacatgtgtccatcccagcggctggtggcagggcctccattcctggagcccgaggcaccagtgtcctcccctcaaggacaaagtctccagcctacgttctctctgcctgtgagccagtctagttcctgatgaccaggttgactgagcacctcccggcccctgcctctcatgccaactccgccctaggcctggcatggcgcctgtcgcccagggccctggggctgatctcagggaagcccagctccagggccagatgagcagaagctctcgatggacaatggacggccttgcgggggaccgccctgtaccctctttcacctttccctaaggaccccaaatctgaggaatcaacagggcagcagatctgtatattttttttctaagagaaa

SEQ ID NO: 12629 - DNA, 759 bp, Macaca Fascicularis
  misc_feature (1)...(759): n = A,T,C or G
tgcannnnnnnnnnnnnnnnnnnnnnnnnnnnnnnnnnnnnnnnnnnnnnnnnngttgtatttgatgccttcatcacggggcaggggaagaaagactggtccctcttccggatgttctcccgaaccctcacggagccctgccccctggcttcagagagccgagtctatgtggacatcaccaactacaaccaggacaacgagacattagaggtgaacccacccccgaccactacctatcaggacgtcatcctaggcannnnnnnnnnnnnnnnnnnnnnngacttgtttgacnnnnnnnnnnnnnnnnnnnnnnnnnnnnnnnnnnnnnnnnnnnnnnnnnnnngacccccagagaatgaggcccccccagtgcccttcctgcatgcccagcggtacgtgagnnnnnnnnnnnnnnnnnnnngggagctgagcacannnnnnnnnnnnnnnnnnnnnnnnnnnnnnnnnnnnnnnnnnnnnnnnnncaccgtaccctggtatctgcggctgtatgtgcacaccctcaccatcnnnnnnnnnnnnaaggagaacaaaccaagtgaggacctgagtcctgaaccaggcccccagcccacgctttcatgccctctccaggtcccccaaactctcatttcccttggnnnnnnnnnnnnnnnnnnggaaaagcgacacaggcataaagagtaaggaatagtttcaaaannnnnnnnnnnnnnnnactgtgccaggtccagaagtcatttataaaacgaaaatcat

SEQ ID NO: 12630 - DNA, 702 bp, Macaca Fascicularis
caaacaaaaaaaacccccgaaacaccattaggaaaatggtcaaagagaatgtagtatatgcgtatgaatttaacagaaatgaactagatctctatgtatcaaagtagacaagagtgttcaagacatagcgttcaaaataaaattgttcttttaagtgcagcttaacagtggatgtaactgcttctttgctgtggcagactatattttctgaaggccccaacagtctctcccgtccctcttcctcttctagaaccttgatacttccctgtgaagtatcataggtagggtctaatactcccctccttcaacctgaagccctgccttgggcttgtgacttgcttgtaacacaatcaaatacagtgaaggagttaccaggtgacttccagagctaggtcagaaaaggtgatgcagcctcagtgttcaacacatacttgggtctggagccaccacgggaaggctgtcatgctgcgagggagcaaaggcaggtggagggacatacacaggggctgtggctggctgtcctggcctttgagtcatccttgtctaagtgctaggcacacaccttaactacctttaggtaattccatccctcaggtgtcatgtcacccccagcccttgagccttcccatctgaagccccaggctttatggagaagaaacaacatgttcctgccacgctccttctgaactgctgacataacag

SEQ ID NO: 12631 - DNA, 613 bp, Macaca Fascicularis
  misc_feature (1)...(613): n = A,T,C or G
gaacagttaaatgtttgaaatnnnnntttatagagtgggaaagatgtctgtctagttttaagtctttctgaaaaggaatgggctggaatgtttgnnnnnnnnnnnnnnnnnnnnnnnnnnnnnnnnnnnnnnnnnnnnnatacttagatatggggcaggctctattcctacccaagtagcagcgatcagtgatgctggtgctaacccctggtctttgtctgtttccctgttgctgacctcaggcaccacacggtaactcgaggcatcaccaaaggcgtgaaggaggactttcgcctggccatggagcgccaggtctcccgctgtggagagaatctgatggtggttctgcacagattctgcattaacgagnnnnnnnnnnnnnnnnagactctgacctgagtggagacctgtccaccagacacagcttgggactgtgtaatttgaggagaagacacccagcagtgattgacgtggcgctcagccgcggtcattgttgctgttacaaagaagaaaaccagctgagttctaagtccttggttgcttaaaagtagttcccaagagtctgagaagctatctctatttttaagagtcattttttgtaatttttgtaaaa

SEQ ID NO: 12632 - DNA, 767 bp, Macaca Fascicularis
  misc_feature (1)...(767): n = A,T,C or G
gcgcgcacatccaatgtgttgccatgttgaccagtcacagnnnnnnnagttcaaagaggccttcaacatgattgatcagaacagagatggtttcatcgacaaggaagatttgcatgatatgcttgcttcattggggaagaatccaactgatgattatctggatgccatgatgaatgaagctccaggccccatcaatttcaccatgttcnnnnnnnnnnnnnnnnnnnnnnnnnnnnnnnnnngannnnnnnnnnnnnnnnngaaatgcttttgcttgctttgatgaagaagcaactggcaccattcaggaagattaccnnnnnnnnnnnnnnnnnnccatgggggatcggtttacggatgaggaagtggatgagttgtacagagaagcacctattgacaaaaaggggaattnnnattacatcgagttcnnnnnnnnnnnnnnnnnnggagcaaaagacaaagatgactgaaannnnnnnnnnnnnnnnncaaacgttccttgttgccactttgggtatttttgagattttctcttgcatgcccttagctttacagcttttgcatttcctgttgtatttattctcagccattttgnnnnnnnnnntctttatactcagactggaaaagggactttctattgatatcattttcagaatagaaaatagggtaatttaacctaccagccctttcccctaataactgtggtctatacagagtcaatatatttttttcagagaaagttattgctcgattnnnctgaatcataa

SEQ ID NO: 12633 - DNA, 748 bp, Macaca Fascicularis
  misc_feature (1)...(748): n = A,T,C or G
caacgtgaccctctactatgaagcactgtgcggtggctgccgcgccttcctggtccgagagcttttcccaacgtggctgatggtcannnnnnnnnnnnnnnnnnnnnnnnnnnnnnnnnnnnnnnnnnnnnnnnnnnatgtcagcggcagatgggagttcaagtgccagcatggagaagnnnngtgcaaactcaacaaggtggaggcctgcctgttggatatgcttgacatggatctagccttcctgaccattgtctgcatggaagagtttgacgacatggagaaaagtctgccactatgcctgcagctctacgccccagggctgtcgccagacactatcatggagtgtgcaacgggggaccgcggcatgcagctcatgcacgccaatgcccagcggacagatgctcttcagccaccgcacgaatatgtgccctgggtcaccgtcaatgggaaacccttggaagatcagagccagctcctgaccctcgtctgccagttgtaccagggtgagaagccggatatctgccctccctcaacccactccctcaggggtgtctgcttcaagtgatggccggtgcgctgtggagagctgatgcaaggcaagtgggaacccggcttcctgcctttttttctgatccggaccctcggcacctgcttctcaccaactggaaaatttctatgcatcccatgaagaccagatacacaaaattccaccccataatcacgaatnnttgctccactaagaacg

SEQ ID NO: 12634 - DNA, 732 bp, Macaca Fascicularis
  misc_feature (1)...(732): n = A,T,C or G
cagcagcgttccaagctgctaggtggtgggggtcgggggtcttctgtttcactaacaggaacaaagacagaaaccgtgacagagctgccccgccaggccccactgggtttgtctgcacttggtgctcctgcccacannnnnnnnnnnnnnnacaatgacccttccaagaatctttggttcaaggagcaccagttccctcttcattcgtgaaacagggagannnnnnnnnnnnnnnnnnnnnnnnnnnnnnnnnnnnnnngcacccataactgacacctcccacccttggaaaccatgttttctnnnnnngagatgaccattctgggtctaagactgtttcaaagaagagctcatagactgactggaccagaagacagagggtacaacagtgacgnnnnnnnnnnnnnnnnnnngggagctgggcgggcccagccaaacccttcttcttcctaagcccaggcagcaggcaggagttcctggaccctcnnnnnnnnnnnnnnccagaccccagggcaggtctatgggccactgcgggagatgagaccagccttctgtgttcacctaannnnnnnnnntgtgtatctgtctttgatggaattttgtaannnnnnnnnnnnnnnnnnnnnnnnnnnnnnnnnnnnnnnnnnnnnnnnnnnnnnnnnnnnnnnnnnnnnaaaagagccagagttctggacccatgtttggagcatctgtagccttattctcttgcat

SEQ ID NO: 12635 - DNA, 719 bp, Macaca Fascicularis
  misc_feature (1)...(719): n = A,T,C or G
catggcaggtgagcagagcttggcnnnntgccgtggcccctgctggggcagcccgtgttgccagagcctttaagccaaagagcccattggccgtggttggtggggatggacgtggggggtgtcccacctggaccagactggcgtaggtgagctccataccccacctggcattggtacgagagtcggacctggacagggccagctgctgggggagcggcgctgggggctggaggctggaagtgggtggtttgtgtcccctgtttacttttagctgatctggggttgggtgtacgggttctgtgcctctgagccctgcggcccacctgatgtttacgtgggggggggcggggggggcaggtgtctccccctggtccccgccccaagagcctgctgtctatatggaggaggtgctagtccggcccaccgggctgctgcccacccctgcatgcctcagttgcccaccccgcctgcccctggacatgaagtggtcactcttcatccacggctccttcccacccctcannnnnnnnnnnnnnntgttttgaattcacaagttcctgctcctccccatgctgagctccttttttccttcccctccagcctttgcctgggaatggtccttgtttgccaggcttctcggagggttcactgtacattcgttctcaggtggtcttgtggctgtctttcggaaaatggttattttatatgatttgtcatgg

SEQ ID NO: 12636 - DNA, 712 bp, Macaca Fascicularis
  misc_feature (1)...(712): n = A,T,C or G
catttttatcaaatatatgtatcatcgaaggttgcatctgtacagtattaaatgctattaatgtcgtcactcacatgcacgacagtccttgttcccccaggaagggcctggtggccccagcacacacttgggattatgtgtatacgtaaatattgggctgtttccctcgtcctgtgaagtggttctcgaattcctacgtaccgtaaagctgtacccttgaaagtacagatgtggcnnnnnnnnnnnnnnnnnnnnnnnnnnnnnnnnnnnnnnnnnnnnnnnnnnnnnnnnnnnnnnnnnnnnnnnnnnnnnnnnnnnnnnnnnnnnnnnnnnnnnnnnnnnnnnnnnnnnnnnnnnnnnnnnnnnnnnnnnnnnnnnnnnnnnnnnnnnnnnnnnnnnnnnnnnnnnnnnnnnnnnnnnnnnnnnnnnnnnnnnnnnnnnnnnnnnnnnnnnnnnnnnnnnnnnnnnnnnnnnnnnnnnnnnnnnnnnnnnnnnnnnnnnnnnnnnnnnnnnncaaaaaaaaattaaaaaaaaaaagtacagatgtgatatgcagaacatattgttctcatagatttttatacttgatcaattaatggaatcagatttttaaataagtgtaattttctctctaggagaccaagttgttacatctaataatgcctgtcagtgatcaaaagaaactgaaaagtagaatgggatatggcttttg

SEQ ID NO: 12637 - DNA, 734 bp, Macaca Fascicularis
  misc_feature (1)...(734): n = A,T,C or G
ttactctgtagannnnnnnnnnnnnnnnnnnnnnnnnnnntcacgcagccctgactgcgtccacactgcagaagcaggccttggtaagagtcagcgtggctcgtgggagctggaggtcagggtgtgatctctgggctgttagacatgaccctgtggttgaaacacgtacgtgaagtaacagtgagatgcacctgtcccctccgggacacaaggnnnnnnnnnnnnnnnnnnnnnnnnnnnnnnnnnccccaccgtgcctgtggnnnnnnnnnnnnnnnnnnnccacttcttgtacggcctctcggatgagatgaagcaggcccacnnnnnnnnnnnnnnnnnngtcagccacgacaagctcctggccgtgagcgataggtacctcggcactgggaagagnnnnnnnnnnnnggccatacttggacccgagaaccccaaaatcgccaaggacccnnnnnnnnnnnnnnnnnnnnnggccctggcgcccccgactgcgcaggagcccctgagacaacaggcnnnnnnnnnnnnnnnnnnnnnnnnngaaatgctactgctttttccaagaatattatgtcattcttaaggtgttgccactgactggcaagtcagtcttaagagcgaccaggaagatgttcattgaaatagtcatgcatgcaatgccaannnnnnnnnnnnnngaattttcactttctactgacagaaaggcttgttttacctcaattctagaatat

SEQ ID NO: 12638 - DNA, 1324 bp, Macaca Fascicularis
  misc_feature (1)...(1324): n = A,T,C or G
attatttcttcagtgcctcaggagtatccttctacaccagctgctgttaaaatgtacaatgaactctagtcccaagggatacagaagtgctcttattaccagttttcccactcttggccnnnnnnnnnnnnnnnnnnattctaatttaagtccccaacctctgaatttggttttaagtttacctagtgactgaccactctttttataacaaaagaccttatacttatgatcatttccataggagaccaccccttaacttttactgcaaacccaacaagatgagacacttaaacccagacagatgtaacaaaggatttctgttgtctgagtcccagagtattatatagaaagtttctgcttttatgggtaaataagcttattatcttaatttgttctgtggtttgccgttaaccaagattctcccatttaaaatgccacagattgagcctcagggcagatccgaaagcctagtagttannnnnnnnnnnnnnnnnnnnnnnnnnnnnnnnnnnnttaagtaaatagtaaagcctttatttttgtgttaagaacagcattttgagggtaaaacctatctgcccatgctttacaaccttttaaatttgtaatatttatatatcatgttatggtacatattgattgtcttgaaatttctttaacttcttttttataagtatgcaacagtcagccagggggaagataaagttacattataaaacacacattaatgcatttaataaatatatattatctatcaaaaatgagccttagctcttcatcaattaataaaaagcacctgctgaggactcctgtaagctggtatcatcattgcatcattggattataaaagccacaatgctccctttcggcttggggtttggcctgagnnnnnnnnnnnnnnnnnnnnnnnnnnnnnnnnccacccgaattcatccgtgttcagtgggccctgacggcatctgggctaaaaaaaaaaaaannnnnnnnnnnnnnnnnnnnnnnnnnnnnnnnnnnnnnnnnnnnnnnnnnnnnnnnnnnnnnnnnnnnnnnnnnnntaagctgtcagagctgactccctctcttcccaccctccatctccagtggggagaaatccaggctagaatgacaattttctattaaaaggggggacaagannnnnnnnnnnnnnnnnnnagcgatgttaataaccagacacggaacgatttgtgcttacaatgagagattttgatcacagatgctctccttccagtcgnttttccctaaacaagtcttgtttacacaaacagatcttaagannnnnnnnnnnnnntgtctttaannngct

SEQ ID NO: 12639 - DNA, 628 bp, Macaca Fascicularis
  misc_feature (1)...(628): n = A,T,C or G
cgggacaactggcacaagcgccgcaaaaccgggggcaagagaaagccctaccacaagaagcggaaatatgagttggggcgcccggctgccaacaccaagattggcccccgccgcatccacacagtccgtgtgcggggaggnnnnnnnnnnnnnnnnnnnnnnnnnnnngacgtagggaatttctcctggggctcagagtgttgtactcgtaaaannnnnnnnnnnnnnnnnntctacaatgcatctaataatgagctggtccgtaccaagactctggtgaagaattgcatcgtgcttattnnnnnnnnnnnnnnnnnnnagtggtacgagtcacactacgcgctgcccctgggccgcaagaagggagccaagctgactcctgaagaagaagagattttaaacaaaaaaagatctaaaaaaattcagaagaaatatgatgaaaggaaaaagaannnnnnnnnnnnnnnnnnnnnnnnnnnnnnnnnnnnnnnnnnnnnnnnnnnnnnnnnnnnnnnnnnnnnnnnnngacagtgtggccgagcagatggttatgtgctagagggcaaagagttggagttctatcttaggaaaatcaaagcccggaaannnnnnnnnnnnnncgtttnnc

SEQ ID NO: 12640 - DNA, 754 bp, Macaca Fascicularis
  misc_feature (1)...(754): n = A,T,C or G
aacagtcacagtgcaggtgttgaagccatnnnnnnnnagcggcctcaccgaggcggatgtccctgcactcgtggacacctgccaccgggccatgaggaccaccttcctccacatctccaagaccccccaggagaacggggccactgcggggcctggcgtgcagctggcccagtagctgagaccacggcagggcaggacctggggagggcaggtgggaagccaatggctggaggatgggcagaggggacccccacccaggcttccaaataccactgtgtccggctcccccggctctcattcagccctggaagcaggaggtcccttctgtcactggcctcagacatgggcccctggcgtctgctgcagggggatcagctggaccctccccaggctcgagggcagggactcacccccacggcacctcagagctgggatgatgaggatgaggcctgaggctgtggccggcaggtgggctgagccacaaggcccccggatagcccaggagcagacgggaggaccccaaggcccgacgttcactgcccgagccctctgctctggccacctgggacccactcggatgcagttgggctccagggtccagcctacaagctgcatcaggctctcagggagagaaggcgcctggagggccgggagtcccagactcacgcaccctgggccacagggagccgggaagtgggacctgctgctcctgccagcgtggaggactctggagtcagcattgtactccgttgct

SEQ ID NO: 12641 - DNA, 744 bp, Macaca Fascicularis
  misc_feature (1)...(744): n = A,T,C or G
caggagagtgcgtggctcgagtggnnnctgcggctgcaggacacacaggacaggctcttctgggactcccagggtggcggctacttctgcagtgaggctgagctgggggctggcctgcccctgcgtctgaaggacgnnnnnnnnnnnnnnnnnnnnnnnnnnnnnnnnnnnnnnnnnnnnnnnnnnnnnnngctgcatggcttcacgggtcacaaggactggatggacaagtgtgtgtgcctattgactgccttctccgagcgcatgcgnnnnnnnnnnnnnnnnnnnnccgagatggtccgcgccctctcagcccagcagcagaccctcaagcagatcgtgatctgtggagaccgccaggccnnnnnnnnnnnnnnnnnnnnnnnnnnnnnnnnnnnnnnnnnnnnnnnnnnnnnnnnnnnnnnnnnnnnnnnnnnnnnnnnnnnnnnnnncctgtcccgccagctgcctttcctgagtaccctccgacggctggaagaccaggccactgcatatgtatgtgagaatcaagcctgctcaatgcccnnnnnnnnnnnnnnnnnnnnnnnaaaactgctacatccatgactgccccaacccccttggtctggggcagaaggtgaagcatcccaactgactagagactcaggccctgcagggccctatagaacctgtggccatccctgagcaccctgccaccaggtgacctcggccatactcactgccccccttgggcacccactc

SEQ ID NO: 12642 - DNA, 729 bp, Macaca Fascicularis
  misc_feature (1)...(729): n = A,T,C or G
ggcaggactgggcacttggagnnnngcatgccaaaatcattgcagctataacattgatgggtnnnnnnnnnnngctgaaaactgtaannnnnnaggtttatgcaaatggcatccggaacattgaccttcactatattgttcgtagactggcagctccagtgatctctgtgctgttgctttccctgtgtgtaccttatgtcatagcttctggtgttgttcctttactaggtgttactgcggaaatgcaaaacttagtccatcggnnnnnnnnnnnntttttactgatggtggtggtattgatggcaattttgtccttccaggtccgccagtttaagcgcctttatgaacatattaaaaatgacaagtatcttgtgggtcaacgacttgtgaactacgaacggaaatctggcannnnnnnnnnnnnnnnnnnnnnnccacagtcatcccaagaataaagtagttgtctcaacaacttgaccttcccctttacatgtccttttttgtggacttctctctttggagatttttcccagtgatctctcagcgttgtttttaagttaaatgtatttgacttgtgttctcagcattcagagagcagcggtgtaaggttctgctgttcttccctggatcttctgactttactgctgtctgagatttgtatatgtgtaaatacaagttccttgataccctaaaaccttggattaaacagaatgtgcattgtacatcttt

SEQ ID NO: 12643 - DNA, 727 bp, Macaca Fascicularis
  misc_feature (1)...(727): n = A,T,C or G
tatagaatcagtggatgaaacaagggnnnnacttgatacaaaaccttttataaaaaatattgtttaacaatactcaattattataaatgatctacatgttcagattgaaattgaaagcttaaaacttgtgaataatttgaatattcaaagcaatggagaaacaagttatatatgctgacagttcctgtgtttcttcttgttttgtacttaagcaccatatattatagttgaatttgcatatctgtttattgccttatgtaaatgagtgtggccatttgtataagcctctttgatattttcacccagctctttcttaatgtctgtgttggcttatgcatcagcagaaatctttttgaaagggttgttatatatgtaaaaagtgttaacaggnnnnnnnnnnnnnnnnnnnnnnnngaggatacaaacgtgctggtagggagtgatattcaagatatactgtgaagtgtaannnnnnnnnnnnnnnnaccatgtatatattatattcccnnnnnnnnnnnnnnnggtatgtttgtttaacctctgtctcttatctctgtatgtgtatatatcttagtatgcatatatacatgtatttgtatgtgaatagactttgaaaaaaatacagaataaacttcatggtggtnnnnnnnnnnnnnnggagtataggattgggttctaggataggagcaagacttccttctatatttgaatttttaaatgatgcaca

SEQ ID NO: 12644 - DNA, 753 bp, Macaca Fascicularis
  misc_feature (1)...(753): n = A,T,C or G
agtcactgtagccannnntcacaggcanctnnnnnnnnnnnnnnnnnnnnnnnnnnnnntttttccctgcccccaaatttaaagcaatccctgactttcaatgacagggcacctgccaatgttcttgggtcactgaagaagttactaacatgagcctgtgcatagaattttaggagataaatggatgaatttctgtgactgctggtcagatcttaacaagtctcnnnnnnnnnnnnnnnnnnnnnnnnnnnnnnnnggagaggaacactatggaaacttcccaggtgactnnnnnnnnnnnngttnnnnnnnnnnnnnnnnnnnnnnnnnnnnnnnnnnnnnnnnnnnnnnnnnnnttggctttttctcaaaacattattatcttcttggcagatccaggagaaaattagaacagaaaaataatggttgtggatttctaaacaaagcaannnnnnnnnnnnnnnnnnnnnccttgcattggcaaaactacctcttcagtgtttttgtttaacttttgattcaaaagcgtcttaccgataaggataaatatcatatacatcattatgaaaatattgctatgagataataagccatatatgaatgttgtatacaactttagggtttgcatttaatcctgaagtgttacctcctttcatgtctatttacactattttcccatttactaagtggggaggggtctccttatatagtgcttcatcgttaataagtcaatacctgtgttcctgggaatgt

SEQ ID NO: 12645 - DNA, 756 bp, Macaca Fascicularis
  misc_feature (1)...(756): n = A,T,C or G
gaacaccagcatacaatgatggaagaattagatgtggtgatattcttcttgctgtcaatggtagaagtacatcaggaatgatacatgcttgcnnnnnnnnnnnnnnnnaagaacttaaaggaagaattactctaactattgtttcttggcctggcacttttttatagaatcaatgatgggtcagagaaaaacataaaaatcacaaataggctnnnnnnnnnnnnnnnnnttatcttgtcagtttttatatgtaaatacactgttaaaatgtcaggaaaagtatgatctaatgaaagtcagttacacctcagaaaatatgattccaaaaatattaaaactactagttttttttcagtgtggaggatttctcattactctacaactttgtttatattttttctattcagtaaaaagccctaaacagctaaaatgatttgtataccccactgaattcaagttgatttaaatttaaaatttggtatatgctgaaatctgccaagggtacattatgaccatttttaatttacagctaaaagatttttttaaatgcattgctgagaaacaatgctttcatcaaacaagaaataaatatttttcagaaattatagttgtcttttagtatgtgatactaattaagattacttgtattattaccatttaaaagatcctagtaatttatccttgcaaataccatgttatttgttacnnnnnnnnnnnnnnntgttctagggctatccctaaaaatgctcagagaat

SEQ ID NO: 12646 - DNA, 917 bp, Macaca Fascicularis
atggacgacccagtccctgtccatactggagacgtggtcacgggttcagttgtgttgcagagaaacccagtgtggagaaggcacatgtcggtggctctgagctgggctgtcacttccaggcaagaccccacatctcaaaaagttggagaaaaagtgttcccaatctggagatgacagttgaggctttatttggaagccgtgtgcgtctcctgaggggtgacgaacacaagcaacccaagatgcgcccggctgctgcacgctccttcgaagtcggtgaacgttcgtgccacactgacccctccccagcctggcaggtgacgtcagggcccttcacagacaaacacgcttgggctcggcaggagctgccgtggccacccccgctgcccagtgtctgccctctagaagtaggctgtgtttctaggtgttcacccgtggtgtccacagtgctgacccgtggctaggtcagagctccatgttcctaagctaggtctaggtccacactcctagaacgcccgcatatcagcctgtgtaccctgtgacagtgactgttcccgcctcctgtgttagtggtgcccttcctgccatcgctcatccactcgtgtgggatgtaggattgcacagggctgtgccagtgctgtgtagggaacaccgccctggctcagcgcgggagctgaggtggcgatgcacgcgatgggactttgcatgggatagttttgtagacgtcttccaaataaattatgtgttggcgcattgcacatgctcaataaatatttttaaatgagtgaatgtcattgtgtatcctgttttacgcatatgtgttattttttgtaattacaggatcatactatatgcattgctttgtaactttttctcagtattgtgaaaaaacttccatatcagtagatacatttttttgt

SEQ ID NO: 12647 - DNA, 446 bp, Macaca Fascicularis
  misc_feature (1)...(446): n = A,T,C or G
cggcaagatggcagaggtagagcngaagaagaagnnnnnnnnnnnnnnnnncacctaccgcggcgtggacctggaccagctgctggacatgtcctacgannnnnnnnnnnnnnnnnnnnnnnnnnnnnagcggcggcggctgaaccggggcctgcggcggaagcagcactcactgctgaagcgcctgcgcaaggccaagaaggaggcgccgcccatggagaagccagaagtggtgaagacgcacttgcgggacatgatcatcctgccagagatggtgggcagcnnnggtgggcgtctacaacggcaagaccttcaaccnnngtggagatcaagcccgagatgattggccactacctgggcgagttctccatcacctacaagcccgtgaagcacggccggcccggcattggagccacccactcctcccgcttcatccctctcaagta

SEQ ID NO: 12648 - DNA, 772 bp, Macaca Fascicularis
  misc_feature (1)...(772): n = A,T,C or G
cgcagtnnnnnnnnnnnnnnnngtgaccacctagtcatggccagaggcccgggaccagtgacaccctgcgtccnnnnnnnnnnnnnnnnnnnnnnnngtcgcagccatgaagtgtcaccagtatctcctactgtgaagtcagctgtgctctctgctttccactcgcttccacggcttccgcctcctgccataaaaccagcgagtgtcgtggtgcaggcaggccctgtggcctgctgggctgagaggagtcagagccccagggcgccatgaagcagccactggaacaccccccgccgccccccacccaccagtcctgcccctgcatggagcccctgtggttagtagcccgtatgatcacgtagacccacccaacacactcctgcacactggccccggcccacggcgcggcaatgccctgcgcggggatttcacctcacccttctnnnnnnnnnnnnnnnagtgaccagctctgtggccctgtgtctccagaggcttgtgattaactgtggcggcagacacagcttgtccacagcttgggccaggcttcccctgtcctcccaccggtcggctgcttggcaaggctgttcaggacgtgcacttctccaagtcagcactgagtggcccagcaccgcctagccctgccaccccactgccctcctgggccttctgctggatgggcacctggagggttctggtttttacttttttaatgtaagtctgagtctttgtaattattgaatcgtgagaacattttgaacaattacctgtcaaa

SEQ ID NO: 12649 - DNA, 770 bp, Macaca Fascicularis
  misc_feature (1)...(770): n = A,T,C or G
acagcatgacgagcgaggtgatagaagacgagaagcaatnnnnntccaaggccaagannnactggaaacaaatcccacnnacggtggacggcatgcttggggggtatggccacatctccagcatcgacatcaacagctcccggaagtttctgcagaggtttttgagggaaggcccgaacaagacaggaacgtcctgtgccctggactgtggagctggcattgggaggatcaccaagcggctgctcctgccgctgttcagagaggtggatatggtcgannnnnnnnnnnnnnncctggttcaagccaagacctacctgggggaggagggcaagagggtgaggaactacttctgttgtgggctccaggacttcaccccagagccggactcttacgacgtcatctggatccagtgggtgataggccacctcaccgatcagcacctggccgagttcctgcggcgctgcaagggcagcctccgccccaannnnnnnnnnnnnnnnaaagacaacatggcccaggagggcgtgattctggatgacgtggacagcagcgtgtgccgggaccttgatgtggtccgcaggatcatctgcagcgcaggcctcagcctcctggctgaggagaggcaggagaacctccccgatgagatctaccacgtctatagctttgccctgagatgagccannnnnnnnnnnnnnnnnnnaggaaccacagtccgggtggggggaactggcagctgggcaagatccaggcgccacactggcggttcgtga

SEQ ID NO: 12650 - DNA, 724 bp, Macaca Fascicularis
  misc_feature (1)...(724): n = A,T,C or G
cattcnnnaaattccggttcgttttacttgatgcgtatgacttgagtgtcttgggcatggannnnnnnnnnnnaaaatacgagcagtgtatgnnnnnnnnnnnnnnnnacaatccaaatacggaactgaatagtcctcaaggtgaattattccnnngagctgagaatctaatagattgtctttaaattcttcaactaccttttnnnnnnnnnnnnnnnnnnnnnnnnnnnnnnnnnnnnnnnnnnnnnnnnnnnnnnnnnnnnnnnnnnnnnnnaagaacagctaaactggttgaatgaagtgcttacattctctgacacaaaccaagaaaannnnnnnnnnnnnnnnnnnnnnnccannnnnnnnnnnnnnnnnnnnnnnnnnnnnntggcctggaactacagannnnnnnnnnnnnnnntttggtctcatgagtgcgtggtgtgtttctttgctggtcacacccnnnnnnnnnnnnnnnnnnnggatccttttggtgtatatcacgtcagcctagaaggagttattgaaacagctccagacagccaagcgtttggcacagttnnnnnnnnnnnnnnnnnnnnnnnnnnnnnnnnnngaggcagagttccagacagaattatgaattacaagaaagaaagagccgtcnnnnnnnnnnctaatttattttgtttaacttgatagaaaatgagctttgtatgtgtttgtccctcntaacaaaaaa

SEQ ID NO: 12651 - DNA, 610 bp, Macaca Fascicularis
cccgcgacagaaccgctgccgccgtctctaaggtcgcccgggtcccgccgccgccaccatgcctcggggaagccgcagcatggcctcccggccagccagccgccccgccgcgccctctgcccacccacccgcgcacccaccgccctcagcagccgccccagcacccgccccttcgggccagccggggctcatggctcagatggcgaccacggccgcaggggtagccgtgggctccgctgtgggacacgtcatgggcagcgccctgaccggagccttcagcggggggagctcggagccctcccagcctgctgcccagcaggtccccacccccactgccccccagcacctggagatggggccctgcgcctatgagatcaggcagttcctggactgttcgaccactcagagtgacctgtccctgtgtgagggcttcagcgaggccctgaagcagtgcaagtacaaccatggtctgagctcactgccctgaagaggttggtgcaaacttgggggccagtcctgcacccacctctacccctcgccgacagccagaccacaacaccagattgtacccggatagctgggattggaagtgaggaggtttctcacccca

SEQ ID NO: 12652 - DNA, 712 bp, Macaca Fascicularis
  misc_feature (1)...(712): n = A,T,C or G
agatgataatnnnnnnnnnnnnnnnnnnnnnnnnnnnnnnnnnnnaaagccactacatttccagctctaaaaagagccagacagacacaatccctgcttccagagttcaccattcagaatacagaaggtcaagcactgattctgaatcattatgagctttgatttcatctttcaagatttgcatagatactgatttcttctggaagggcaaataaaatcttcccttacacatcattctttggattctcataagggatatcttgaagtctgtatgttgacaagtccagtagacactttgttttctctaattgccttcttctgcttaagactatctcaagtattttnnnnnnnnnnnnnnnnnnnnccaacatacaccttctgcnnnnnnnnntatccagttggcttttctgtaannnnnnnntacccctttctgttccctttcactgttttcctctgttgctttcctccttcacagaagtctggtgatctgggcttctccatctttcctttcctggcttcttattcacatgggtgactgatcttagcacttccttaaaagttgagttttcaataaatataactcatcagcacttccgatcnnnnnnnnnnnnnnnnnnnnnnnnnnnnnnnnatctgtgtaataatactctcttcctgaatgctatttagaaatattatcntnnnnacaccaatggtttcttgaagctgcttg

SEQ ID NO: 12653 - DNA, 274 bp, Macaca Fascicularis
cctcccctccccaaagccttcctcactcgtggaggttgggcacggaccagtggcccagccctgggtgtcccttcccctctctggccctcagtttccccactgggacattgtgtgctgcaaagccattggttgggctacttcttcataggcatgcacttacccaggggtgccacccttttgtcacctcttccacaagcactttggcatgtaaacaagcaagagcactgcctctatagggtaacctggaacattctctaggttatatcaatagaaa

SEQ ID NO: 12654 - DNA, 1276 bp, Macaca Fascicularis
  misc_feature (1)...(1276): n = A,T,C or G
ttggcttagtcagaaaaaaacagaggataattaagatactagtcatgaaaagtgattcattcttttttgtcattccataagcttgctgaatagtgtaccagtagtatattgtatttccaccatactctgtgaatctaattttattctttgtgttgatatataatatacataaatatgtaagctaaacatataactatatgttttaagaagaaaacatctacaaaagataaaaagagatgctcagttggttgtttacttaatagaaaccattgtattattgcaaacgaaggaaaaatgaagagactataaaagtcagctaatgaagtaagatatgtagtaaagtaaggactattcagaaaataagaaagaaaatttagaaaatgaaacaggaaacaatgccgaaaagaatgaaaacagagaaaaaaatgtatgtgcttgaaagtaaaatatttacaatagtagcttaactatttcactccttaaataacaatactaaagaagttcatatatcctggaataacatgtcatcttcaaaaatttttaatttctaatatttttaaataataacaaacagtgttaaagctgtattttttcttaataaataaaagatattacaaatatttctttagggaagctcaaatggatgttgtcttgttaacattggaacgaatataaatcttcaaaatacaataatatatactgctttgtnnnnnnnnnnnnnnnnnnnnnnnnnnnnnctcttcaaatttgaactaacccttacattccatatgatgtgatgtaggcttataagatgctaaaatctataggttttggaaatgaaatattctattttttcttttttgtacataatgggaatttcattccagattgtatttaatttatatattaatttcacagaatattaatgtttcttaacttcttaaagcatgctagtgttttatgtatatgtacacatatattcagacagggtnnnnnnnnnnnnnnnntaacattatactaaaatattgcttaatctgtttttaattacaaaatgctaatgatttgttaaattatagtttaaannnnnnnnntccaggnnnnnnnnnnnnnnnnnnnnntatgcaccactgtaagtaaccttacaaatagagttaatccaagacagtattaacaaactatgctttgtctttaataaaagggataggattaacaaatgtattgatggcataacctattcagctatgtccttatttttgcaataatgtaaccncaaatattggatnnngaaccaaca

SEQ ID NO: 12655 - DNA, 676 bp, Macaca Fascicularis
  misc_feature (1)...(676): n = A,T,C or G
cgccgcgtccagtcgttgccctccgtgccgctgtnnnnnnnnnnnnnnnnnnaggnnnnnnnnnnnnngatgcgcaacaacctgtcgctgggggacgcgctggccaagtgggaggagtgccagcgccagctgctgctcggcctcttctgcaccaacgtggccttcccgcccgaagctttgcgcatgcgcgcatctgccggccctgcccccgccgaccccgcccccgccgacccagacgacctcgcgtccccgcagcacccgccaggccggcccccttgctgagcgccgctgctctcgcggcccggcctgtgatcggggccctggggctgcctgagaccccaaccctctccagggatcctgcctgnnnnnnnnnnnnnnncaatgcagagtgaggagatggggggagtcacagctgccaagaggggcctttaccgtgggcccctcgccagccactcaccagctgcactgagtggggaggtttccacacctctcccctgggccgctgaggccccgcgcacctgtgccttaatattccttcccctgtgctgcctgggcacctcccccacccccttacccccgagaactttgcagcttcccttcccgccccatttttcatgtcctgctgaaaaatgnnnnnnnngaattatttnntcgcgaaagagcacagtaataaatg

SEQ ID NO: 12656 - DNA, 732 bp, Macaca Fascicularis
  misc_feature (1)...(732): n = A,T,C or G
actgaagcatgcaaagggtaacctacagttgctgcagaactgcctggcagtgttaaatggagacacataagccacactccgccttcctgttaaaaagggctgccttccttcaaatgttatttttgttttcttnnnnnnnnnnnnnnnnnatgctcactggaaaccaacagaaaacagctgaaaaagtgcatctactcctctttttctgagaaacatggagcagcacacacctaggcgatgccagtctgtgtgctggatgctgcactgtnnnnnnnnnnacagtggtccatcatcgtgcacttgtcatactcagaagtccaaagttcattcttctttaaagtagcctctataactctgtttattttataaatagtattccttatggctgccaatcttatttacctttaaataatttctgaagtttaaccttttcagaatgcattgttcaaacaagatgaagattgccttttttgaattttttttaattttgtttttaaaagcattatataccaccttagttcannnnnnnnnnnnnnnnnnnnnnnnnaatcagacttatttttaattactgaatatttcttagaagttttgggacagattttatgtaatctttataagtatgatttctgaagaaaagcaaatgcattagtatgtttgccttaaacttgtagactaaaccaattattgtaaaataaacagcgataacagtgatagtttttaactctctggtaa

SEQ ID NO: 12657 - DNA, 691 bp, Macaca Fascicularis
  misc_feature (1)...(691): n = A,T,C or G
acnnnnnnnnnnnnnnnntattnnncagcanngctggagcagaaaggatcacagatgtggctttggatttctggaggagtggaaagcagnnnnnnnnnnnnnnnnncaaagacattgaacatgccttgtctgtgtcggttttcaataacaagaacagtggctnnnnnnnnnnnnnnnnnnnnnnnnnnnnnnncattgattattttgttcccttcctccccnnnnnnnnnnnnnnnnnnnaaatgtgtatccgagtggaaatgcagtcccgaggctatgaaactaatgaagacattgtaagcagagtggctgaggagatgacatttttccccaaagaggagagagttttctcagnnnnnnnnnnnnnnnnnnnnnnnnnnnnnnnnnnnnnnnnnnnnnnnnnnnnnnnnnnnnnnnnnnnagccgagtctctacttggagttggaaaagaacagnnntttcagcctcctcccccagatcctttccatggaagaggannnnnnntgaatgtttcatgtaagatgtgacaggaattctgtcnnnnnnnnngtttccaccccctggtgcctgtaggccaccgagggaccatgggcaaggacatgaagcttccccagcctgcacagaaggaaggagccagctcccagcccactcatcgcagggctcatgattttttacaaattatgttttaatt

SEQ ID NO: 12658 - DNA, 686 bp, Macaca Fascicularis
caaagctgcttctgagagataagagggaaggggtagaaggaaaggtaccccttgaaatgggaattgagtctgttagaattaaaagcttatctcatgtctgctggggacagtatttgcaccaccaacgcctctcctcacctgctttgagcgataatctttatcaggtattctaaacttaaagggattccctttaaaccaactcaagctgacctttcttatctagcctgctgtttggctgtactcatgggctttgataatatctcctaaaaatgagattttggtaatttctcctatgcattgggcaactgccatcgtgaccactgtgctgtcttgctccatccactgccctggcctcagcgttatcagggcagcctgtgctggctgcagtactgtggtgcttgggccactgcctgagaggagccaagtgtgtgtgtgtgtgtgtgtgtgtgtgtgtgtctgtgtgtttgtacagattcgagcaatggatgcaaggaacgtgctgtatgtaatagaataaagaagttcatgcttttggcagaagtagtgggtcagtgtggaagagaggtgagggtgtgcttcactttttgataaagagaaagatgtttactcatcaacccttcaaaaggtattaacacaatgtttaccaagcctattgctttatctgaaaaacataatttgtgttttct

SEQ ID NO: 12659 - DNA, 759 bp, Macaca Fascicularis
  misc_feature (1)...(759): n = A,T,C or G
atcagcacagtgannannnacagacagcagtgaggcagctaagtacgatnnaaatgccaccggttctggaagagcgagtaccaataaatgatgtgttagctgaagatacgattttggaaggaacagaaacaaccaaatatgtgtttactgatatatcatatagcataccacaccgggagcgttttattgtcgttagagaaccaagtggcacactacgcaaagcctcttgggaagaacgggaccggatgatacaaatttatttcccaaaagaaggtcgtaaagttttgacaccaataattttcaaggaagaaaatcttaggactatgtatagtcggnnnnnnnnnnnnnnnnnnnnnnnnnnnnnnnnnnnnnnnnnnnnnnnnnattccactgagtatatcaaggttcatcacaagacctatgaagatatagataaacacggaaaatatgaccttttacgttcaacaagatactttggtggaatggtgtggtattttgtaaataataaaaagattgatggtttgctgattgaccagattcagagagannnnnnnnnnnnnnnnnnnngcttggtccagctgtatcacatactccatccagacggccagtcggctcaagaggccaaggatcaggctgctgagggaataaatttaatcaaggtctttgcaaaaacagaagcacagaagggagcctatatagaactaacactgcaaacttatcaagaagcactcagtcgccattctgcagcttcctaaaaat

SEQ ID NO: 12660 - DNA, 737 bp, Macaca Fascicularis
  misc_feature (1)...(737): n = A,T,C or G
atccagagccgtgtggaaacggtgcnnnnnnnttnnngccgcagcgaggaggtccggcnnnnnnnnnnnnnnnnnnnnnnnntcctcaaggacaccaaaatcacgtgtgaggagaagannnnnnnnnnnnnnnnnaacacgtacggggagtccaagggccggtgagggagggtattgccctccgtgagcacagagactctccatgggagggggnnnnnnnnnnnnnnggatcctggggcctgggtgggctgggggacagctgaggatgggcctagcagatgaaacttgccagcaaggccaaagcaaatggtttctcctgtggatagtggacagagacctttgaattattcatttttctctatcttttattttttcaaagatattatttgactctatnnnnnnnnnnnnnnttttaaaccttttcttnnnnnnnnnnnnnnnnnnnnnnnnngaagttttcaggtggagaccaagcggcctttgctcttcttcctccttcctgccacactatgctttcttcctgccatggacccctggaggagacctatggagggacagttttgacctgacccctagaggacacagttttgacctcttcagcaccaggaaggaagctctgaggatggttgcagtgaggaagcnnnnnnnnnnnnnnnnttctctctcttttttgctggacattattgagtttgtgggaccctgcctcttcctgctacctgtgagtctgcccagagtcc

SEQ ID NO: 12661 - DNA, 799 bp, Macaca Fascicularis
  misc_feature (1)...(799): n = A,T,C or G
gtagcatcaggatgagatcagtgannnnnnctgaagannnnnnnnnnnnncaagcaggggcgagtcctggttcccttgcccacgtgggaccccagtagaactcagcccttccacgccagcccttcctgctgcctccctcctgtctggcctctggggcctgtgcttagagcccgggctccagccctgagtgcttctgagctggtggactgcccaggggccannngaggatggtggtgctgctgctgatctggggaccgccgtcttccctcccacacgcatttcatccctccctctagggcctgtggcagttctcccaggatgcgtggagagagcctgggccagcccacagcgttcctggtcannnnnnnnnnnnnnngtcctcatctctggtcccttccgatctgaagcctcgtacctggctcatctccacctgcatttctctttcctgctgctgttttggaaaaagaaaaagaaaaaagaagcccaaattagtgagaataatatctaattctctcattttttgcaggtctgtgataaagaacttagtcatcccttccacctcctactgtgaagagcaaccctgggtcccacactgaaatcccctctagtcacccatcctcaccccccagggagccccctcccacctcacctcacaggcagtggggcagaaaatgattaatgggctggggagccctggagaaccttgactctggaagtctcgaggcacctccttcgctccttagctggcccattggttttctgagccgggggctgaactggaacaagtcagaccaaaaag

SEQ ID NO: 12662 - DNA, 958 bp, Macaca Fascicularis
gacaagaacgggcacgacggtgacacccaccaggaggatgacggcgagaagtcggattagcagggggccgggacggggagggtgggaggggggacagaggggagacagaggcacggagagaaagaatgtttagcacaagacacagtggagctcgggattggctaaactcccatagtatttatggcggctgcctgcggaggccccagtccgacttgcaggccacctctagctttcttcctaccccagtcccggcctccctcctcctcccctgcagcctggataggtggatacctgccctgacatgtgaggcaagctgaggcctggagggtcagatgggagaccaggtcccaagggagcaagacctcgagaagcccagaacccctggccattcccccgttttgaacacgtgtaactgacagtctgcccgggcccctcggggcacacgccactgcgctctcaccctggtactgcatgcacgcaatgctagctgcccctttcccatcctgggcaccccgagtctcccccgacccggggtcccaggtctgctcccacctccacttcctgccccactcaccacctctgctagttccagacgcctccacgcccacctggtcctctcccattgcccacaaaagagggggcacgagggacgagcttagctgtgctgggaggagcagggtgagggtgggcgacccaggattccccctccccttcccaaataaagatgagggtactaaagttgtcttggtttttattttattattatttttttctttttccagtatactagcttgtcttttaagaaaggggatattaaaaaaaaaaaaagacaaaaatgtttttaaaaaaaaaagcaacacccacacctgtgtctgtatatagtcagcttatcttgtgttcagtcgtttgatctctacagagagaagtggaaaatgctgtatcaagggtgggcttagct

SEQ ID NO: 12663 - DNA, 682 bp, Macaca Fascicularis
  misc_feature (1)...(682): n = A,T,C or G
gtatgactgctccagtgcagacatcaaccccataggcggaatcagcaagacagacctgagagccttcnnnnnnnnnnnnnnnnnnnnnnnnnnnnttactgccctgcagagcatcgtgtcggcgccggccaccgcagagctggagcccttggctgatggacaggtgtcccagaccgacgaggaagatatggggatgacgtacgcagagctctcggtctatgggaaactcaggaaggtggccaagatggggccctacagcatgttctgcaaactcctcggcatgtggagacacgtctgcaccccgagacaggtcgctgacaaagnnnnnnnnnnnnnnnnnaagcactccatgaacagacacaagatgaccacgctcacgcccgcgtaccacgccgagagctacagccctgaggacaacaggtttgnnnnnnnnnnnnnnnnnnnnnnnnnnnnnnngccttggcagtttcggtgcatagaaaatcaggtgctacagctcgagagggcagcgccacagtccctggacggcgtggactgaggccaggtccttcctggaggcctcctctcctcggggaccccagcgccttgtcaccannnnnnnnnnnnnnnnnngtaggagcccagaacgacacggcacatcagccgagaaggagggaacttttcagtcaaatcctcaaaaaga

SEQ ID NO: 12664 - DNA, 662 bp, Macaca Fascicularis
  misc_feature (1)...(662): n = A,T,C or G
ttcaaggatgtttggtcaagttnntgagcagttctttgttggctatctctcaacatccaactggatctccccaacacttgctgctacttttgttcgggtgcccccatcccctacnnnnnnnnnnnnnnnnnnnnnnnnnnnnnnnnnnnnngcaggatggagaggtgattggagtgaacaccatgaaggnnnnnnnnnnnnnnncctttgccatcccttctgatcgccttcgagagtttctgcatcgtggggaaaagaagagtgagcctggcttatggggaaatacgggaggggcattcattgggacttcctggagggtggtctattgggagaagagggcagggaaggaaggatgtagctgggtggggcttatttgtccctctgtcacagattcctcctctggaatcagtgggtcccagcggcgctacattgggnnnnnnnnnnnnnnnctgagtcccagcatccttgctgaactacagcttcgagaaccaagctttcctgatgttcagnnnnnnnnnnnnnnncataaagtcatcctgggctcccctgcacaccgggctggtctgcggcctggtgatgtgattttggccattggggggcagatggtacaaaatgctgaagatgtttatgaagctgttcgaacccaatcccagctggcagtg

SEQ ID NO: 12665 - DNA, 687 bp, Macaca Fascicularis
  misc_feature (1)...(687): n = A,T,C or G
ccttgtgtgtattctggctgggggccagattggggaagcccttctccccgggtctgctctgtggggggcttccggaaaagggaaccctgcggtacccccaggccaaagcaagtaagcagttagcaccccccaatcccagaggcaacaatagagacacaggctgggttggtctgcccctcagtcaggtcctcttacccacccaccagcccccaggccagacacctctcccaaaggggcagtctccccgtcttgcagatctcagcttggggggtggggggagtcatgcccaggggaggagcctttttatctggagggagagaaggattctaggggtgtggagttggagaaagagggttccttgagccacccttcccaccctagcctttgctggtccccaggccaagccaccaagtgaaaccttccaggatactagccccgccagattgggtcccagaaagcccgcctgccttttagcacttggatacacacagacccacggagctcctgtgttttgcctctcacacacatacaggcccacagacagatgggcagatgcacccagagccccatgcacagcgtcctacgtgagaaagagacacggccccctggctgagcccctgtcctcccctctgtccccccattcgcccccccccccgcatgnnnnnnnnngnnnnnnnnnngttcttt

SEQ ID NO: 12666 - DNA, 818 bp, Macaca Fascicularis
  misc_feature (1)...(818): n = A,T,C or G
cgaaggatgatggaaatgctgcnnncacagggnannnnnnccagaaggctgacagaagagcatggagtggttcactgtcatcgagcatatcaccgaaccaatgccaccattactgaactggtcatagggaatgaatattacttccgggtcttttctgaaaacatgtgcggcctcagtgaggatgccaccatgactaaagagagtgctgtgatcgctaaggatggtaaaatctacaaaaatccagtgtatgaagactttgatttctcagaggcacccatgtttactcagnnnnnnnnnnnnnnntatgccatcgctggttacaatgccaccctaaactgcagtgtgagaggaaatcctaagcctaaaataacctggatgaaaaacaaagttgttattgtggatgacccaagatacagnnnnnnnnnnnnnnngggagtctgtaccctggaaattcgcaagcccagcccctatgatggaggcacttactgctgcaaagcagtcaatgaccttgggacagtggagattgaatgcaaactggatttttgaatgtataatatcatctaaggtgggctgtccttctgcaggctcctcttgcaaggcgtacctccaaacataattgattcctatctgcgagacgtacactcaagcaatcctgaggaatactgagggcctggccactgcctttctgcactctgctgctttgaaatctggttgaaatgagaaaaagcattttttgtttttccaccaggcccccaagtgtggtctttttctttcctcctaatgttgaagagaaaaaaaaaaaaaaatgcccagatgct

SEQ ID NO: 12667 - DNA, 695 bp, Macaca Fascicularis
  misc_feature (1)...(695): n = A,T,C or G
tgcttctcttttttttgtnctcgtccggggatcccgagctgtcctnnnnnnnnnnnnnnnnnnnnnnnnnnnnttggagctgatcacaacccaggccacaaannnnnnnnnnnnnnnnnnnnnnnnnnnnnnnnnnnnnnnnnnnnnnnnnnnnnnnnnnnnnnnnnnnnnnnngttttctgggccttcgacctttataccagannnnnnnnnnnnnnnnnnggatgaagatgaacccagggagtctgtgttcaccaatgagagggtcnnnnnnnnnnnnnnnnngaggggaatggtgaggaagagccgggcatgggtgctggagaagaaggagcggcacaggcgccagggcagggaagtcagacctgacacccagtacaccggccgcaagcgcaagccccgcttttaannnnnnnnnnnnnnnnnnnnnnnnnnntgcctctgtacttttctatattgttcagctgacaaagtagtattttagaaaagttctaaagttctgaaaatgttttctgcagttaaaaaaaaannnnnnnnnnnnnnnnnnnnnnnnnnnnnnnnnnnnnnnnnnnnnnnnnnnnnnnnnnnnnngaggnnnnnnnnnnnnttgaggccaggagtttaagacgtgcctgggcaacataatgagacttcgtttctggggggggaggggggaagctctgagcatcttaatt

SEQ ID NO: 12668 - DNA, 752 bp, Macaca Fascicularis
ggcatagaatgagggtgtaacccatcacaagcaaatggtcagaacagttaatgaagcactgcctttcctcctcctcagattttatgataaaagcaaatgtggccttctcagtatcattcgatcgctagttgagacttttaattaaggtaaaggctgctggtgttggtacctgtggatttttctatagtgctgttttcgttctgccaatataatgagtgagtattacattggccttgggggatagaaaggaggaagttctttcttttcagggctaccttatttctactgaggatccagagcaggcctgtccatgccattcccacgcacagatgaaactgagctgggactggaaaagacttagaccttgacctgggttctgggtatatttgcacttttgagactggtagctaaccatcttgtaagtgccaatgtgtaatttagtaaaacttacatagaaacaaggtccttaaaatgttcctttggccaaaagctgaagggagttacggagaaaatagttaacaattactgtcaggtgtcatcactgttcaaaaggtaagcatatttagaattttgttgacagttaactgactaatcttacttccacaaaatatgtgaatttgctgcttctgagaggcaatgtgaaagaggaagtattacttttatgtacaaagttatttatttatagaaattttggtacagtgtacattgaaaaccatgtaaaatattgaagtgtctaacagatggcattgaag

SEQ ID NO: 12669 - DNA, 903 bp, Macaca Fascicularis
  misc_feature (1)...(903): n = A,T,C or G
agctcctatatagactactccagatnnnntcgcttctttgatacttgtagcttattgtaattttttttaagaaattcaaggtcattattattgtacaaaataagcgctttgattaacacagctatatagtttttttaatttttaaaaaacctgtggagacagtgatcttgtctttaaaatatgatagtcctttcagtataatgtcttagattaaagacgttgcctttaatatctgttgggaaggaaatgtccagacttttcaaatctcttattatatgtttcctttttttgtttacatagggaacaatgtttatagtcgtgtgtacagtgggggtctacaacaagaagtgtatattttcaaacaattttttaatgatttaacaatttttgtaaatcattttcaggcttctgcagctgtagattctcactgtgaatcccttgcttgctcatgcataagtgtatttgcaataccaaatatacaggtttagtatttttgcctgttagtgatcgtttcacatgtgtaacgttttggttgagatgttaaatggtggacgagtactgtggatgtgaatgtgggaagtaattttaatcatatgtaattggtcacaaggcctaatttgcagtaactattgctgttttatttaacaatgccttgttgctttgtatgcattaatgtttggatgtaaagattgtgtgtctatccaacagggagccacagtatttaaattgaccaacctaatgttacaactactttgaggtggccaaatgtaaactaaaagccttaattaaagtggtgcaattttgtataacttagcatcagtagttcaataaatttggattgnnnnnnnnnnnnnnncattataattacttgccacttgaatgtgttttgtgtaatgttttaac

SEQ ID NO: 12670 - DNA, 741 bp, Macaca Fascicularis
  misc_feature (1)...(741): n = A,T,C or G
tgaacctcctctctctgggctcataatcatatatgagtataagttatgctattcacatttgtatttgctannnnatacatttatttgttatatctgacaagcactgggaaatcaaaataattatttgcattacaaactcattactcatgtgctttgaaagctttatnnnnnnnnnnnnnnnatataggctatctgaatcttctcttctaaataaaaactagatttgtnnnnnnnnnctattctttttgtataagcggcttaactattttaattgtagcaagtgaagacaaccagcatcactatctcaactcaagtgcctacttagaaaacttgtcctggctgccagtgctgatgctccttactaataaagctgtttgagacagggctgaatacatccttacagccccggtcagtggcattcccacgtacgattcatttcctaagactgatttatagtattttcagatgttgccatcatcatgttataaacaatttttatatctcttgctttttatcccacaatttaggtttttaccatatgttggtatggtcaccataataatgaatgactatccaaaattcaagtatgctcttttggctataatgggtgcatatgtgttactaaaacgtgaatcctaaaacgagaagcagttcctgggaccagattgaaatgaattctgttgaaaaagagaaaaactaatatatttgagatgttccattttctgtataaaagggaacagt

SEQ ID NO: 12671 - DNA, 751 bp, Macaca Fascicularis
tgtgactgggtacagggttgctgcttgcggagtgggagacagggaagggccctcccgccccctctctagagctgagcacagactcaaccccagcattgccggactccgcttgaatttggatttggaaattcttaggaaaggaaatgagtggggttttgtgggggctctgctttaagaaatgcccatgtcaaccatgtcaatgcccaagaccccctcagtcttcagttttctttaatagggtacatccccagagtaaaaaccaggtccatgttcaagaaataggttggagactccttgattcctggctcaagccaacttctgagaagaaagacaccccggagtagtggaggtggggtgcacggccccctcctgtatcacaaatcaattcacaaagtagtgaatccatctttggacagaaacttcaactgcagtcaggcttccgtttatgacagtaactcgagaagccttttctcaaggagatgccaacgcatgaagtggttgtatttatagaagttaaatcaacctcttctgagaggtcataataccttacaggaaatggtgagcctctgttgtgtgaaaactctggataaaactgatcgtagaaatagtaacaaaaacattcgtgaatattcttgcctgcctgcttatgagaaagaaaattaccagctgaggttaaaccattagtgtgtataaagttgatttatactgtgaatctagcaaaagttggtcacattttaaaattttttgatag

SEQ ID NO: 12672 - DNA, 833 bp, Macaca Fascicularis
  misc_feature (1)...(833): n = A,T,C or G
catttaaggcctnnnnnnnnnnnnnnnntcatctcatggggtccagagtggagtccaggctnnnctgaaaccagggctgagcatatttccatagccaaggatgtgggactccctggagctatctgtggtcttagagaaggatccagacatacacggctttggggtaccagctgtgatcactgatcaataaattatatctggattggtccttgtagggggagttttaagaatccagaacatcttgctcttgattagcacatccaaaaacaccaagacaaatatccagtggaacagaacctcccctgcctggggagttccgaccacgttccccagcagggtgttaatccactgtccctggccctactcagcctccaggttccactttcctaggagagagtggagatgggaagacagggaaaggaaggcagcaggaggccacaagtccaccgggtcttcatgtcaagaagggagtaacgtgtctcctcattgcccacggacccagcctctgtccaggtgcccctcatggccacagtttaacacaagctcccctgctccagccaaattgatctcccagtcttgaccttacccattccaagtgctctgccagtccctgttcatccaagttttaagtcctccaccctgttttaagagactgttccgggtctcagtggtctcttgaccaccattgtctcagagctgcccactttgtgtgtgccacatgctgcctgagtcacatgtacatcttatttctgcctctagttttgtaagctcnnnnnnggcggataacatcttatactactcttgtattctgatggcacctagtgcagtgctgg

SEQ ID NO: 12673 - DNA, 701 bp, Macaca Fascicularis
  misc_feature (1)...(701): n = A,T,C or G
tactgaattaggccntcctcaagactagctccaccattcacctctattcatcccccatgggctcataatcattttcatttcacctttgatttggaaggaagacgtttcttgcnnnnnnnnnnnnnnntgtctgcttgactttcagaacttctcacctcagccctaaagatggagcctgtgggttctcagagagatatcacaacttgagtcccgaagaagaggccggttccccacccaccttcccccaaaccctaagcacctgcgccagtacaatcaagaagaggaaagtatgtgaagacccaggtctggctctgccacttgcctggccatgtcaccttgaagcagtgacctgactctatattgctnnnnnnnnnnnnnnnnnnnnnnnnnnnnnnnnnnnnnnnnaccttacaagacaaatgcaagggcatttcaccacagagaggacctttgtgctcactttggcccgggaggcagtgatgctcatggttgcatgactttatgagttgctgggccaggannnnnnnnnnnnnnnnnnnnnnnnnnnnnnnnnnnnnnngtccatcagttcagactgnnnnnnnnnnnnnnnncattatgactgtcctagtcatgggagagtaaatgtagattgaatgctaggagtcctagagctggagagtgtgattttgaggtccccgttgggaaacgtgtgccagaaa

SEQ ID NO: 12674 - DNA, 744 bp, Macaca Fascicularis
  misc_feature (1)...(744): n = A,T,C or G
atcagatagtctagctgatcagaattgaatcagcannnnnnnnnnnnnnnctagatctggtgtgagtggtggcnnnnnnngcctcaacatgtcaagaagagactcagaaagcacccgccatgactcggagactgaggatatgtnnnnnnnnnnnnnnnnnnnnnncccagagnnnnnnnnnnnnnnnnnnngtgacagtgaggggnnnnnnnnnnnnnnnnnnnnnnnnnnnnnnaaacgtgaccccaaagagnnnnnnnnnnnnnnnnnnnntttgttctggcttcagaattcaagtccttcctctgatcgagttagtgcaataatctgggaggggaatgagtgcaaaaagatggatatgtctgtgttggaaataagtggcatcatcatgagcagggtcaatgcctatcagcaaggagtaggttatcagatgctggnnnnnnnnnnnnnnnnnnnnnnnnnattttttccattcttacatcgacttttccgtgagaagagccttgaccagctaaagtccatttcagctgaggagatcttgactctcttttgtggggcaccacctgttacacctattattgttttgtccataattaatttttttgaaagattgtgtcttacttggatgttttttttcatgatgtgtgtggcagagagaacatataaacaggtcagtggagaaataagtaaaattttttacctctgtttttgtatatgatattccattgagtcgtttttgttctc

SEQ ID NO: 12675 - DNA, 773 bp, Macaca Fascicularis
  misc_feature (1)...(773): n = A,T,C or G
catgcagctcactnnnnngttcaagtgacctccnnnnnnagcctcccaaagtgctaggattacaggtgtgannnnnnnnnnnnnnnnnnnnnnnnnnnnnnnnnnnnnattgtgtgtacgatacttaaaatttaagagattatgtgcacggcagacctttagaactgaatnnnnnnnnnnnnnnnnnnnnnnnnnnnnnnnncttgcgtaactgaagctttgtgcctgttgtcagagttgagttttgattccttgaatggaaggtgagctttgtggggagatgtcagagggaaggtatctcggtcaggggtagcgtcaggctgcggataggggctgcggtctttgctccagcagggtgaagccctacagtgtgaagtaccatccacatgggtcccacttggcagttcactcagagtctgaggtagaagccagatgaggagctacggatgcagaggttaagggcctgcctggctctaccacactttgctaggaagccgctggatctgggaaagttgcaagctgaaagttgccagagagtggggggcgggaaggcagcagcactgtaacgggagctgggacgagctaactcccaagccctaaagaccagaaccagggtaaggggatttggggctgaaatagcaaactccttcatctcctggaagggagacccacttagataatctctaggcaggagaggtgaattcagcctgatatttcaannnnatttatcagtctagaagtcactactgcacaatgttgccnnnnnntaggta

SEQ ID NO: 12676 - DNA, 700 bp, Macaca Fascicularis
  misc_feature (1)...(700): n = A,T,C or G
cacagttcgttannnnnnnntagtaatgctgattttattgttccggttgaaancgatggaactatacatcaggtgtatgtgctgaagcggccacatgtggatgagttcctccagaggatggggcagctttttgaatgtgtgctctnnnnnnnnnnnnnnnnnnnnnnnnnagaccctgtggctgacctcctagaccgctggggtnnnnnnnnnnnnnnnnnnnnnnnnnnnnnnnnnnnnnnnnnnnnnnnnnnnnnnnnnnaggacctaagtcgccttgggcgggagctgagcaaagtgatcattgtcgacaattcccctgnnnnnnnnnnnnnnnnnnnnnnnnnnnnnnnnnnnnnnnnnnnnnnnnnngatgacatgacggacacggannnnnnnnnnnnnntccccttctttgagggcctgagccgggaggacgacgtgtannnnnnnnnnnnnnnnnnnnnnnnnnnnnnnnnctggcctctgcctgcctcccgcctgtgcactctggaacctctggcctcaggggacctgcctgtcctcagctccctggaagctgaaagtgaggatactccgtgctccatgccacagggtgnnnnnnnncatgcctacctgttttgtttttttaagaacagaaacaactattttaaaagaactcttttaacaaatttcataaagggacatgcattttactgga

SEQ ID NO: 12677 - DNA, 726 bp, Macaca Fascicularis
  misc_feature (1)...(726): n = A,T,C or G
gccaacaaaaaaaattaccaagaaacctattccagatgaacacctcattctaaagaccnnnnnnnnnnnnnnnnnnnnnnnnnnnnnnnnnnnnnnnnnnnnnnnnnnnnnnnagaggaagctannnnnnnnnnnnnnncgtttggagtttctgtatgataaacttagggaacagacactttcaccaacaatcaccagtggtttacacagcattgcacggagcattgaaacnnnnnnnnnnnnngaaggattgaccatgcatacccacatagttagcaccagcaacttcagtgagacctctgctttcatgccagttctcaaagttgttctcacccaggccaataagctgggtgtnnnnnnnnnnnnnnnnttttccactcaatatggccatttttccaaagaaacatgtttaaaaaaaatnnnnnnnnnnnnnnnnnnnnnnnnnnnnnnnnnngcatagcaaccagtcaagagcaattacactatttctgccgatatactcaccttagaactgctcagaaccctggtgctttattttttgttttaatcttttgttgccagtgatgattttcctattctnnnnnnnnnnnnnnnnnnnnnnacacatagtatggtttcctgaagtattctgataaatgtgttttttaaaacctcaatatactttttagaaaaggagcatctggttatgcataaagcagagctaaaactaaatttctttcatgtcct

SEQ ID NO: 12678 - DNA, 696 bp, Macaca Fascicularis
  misc_feature (1)...(696): n = A,T,C or G
acacaagcactncttcagacatnnnnagcgtgnncgtagacaagaggattagacttcccctgtatagcagcatagattttggcttgatataatgacaaacctaaaaaagaattataattgcnnnnnnnnnnnnnnnnnnnnnnnggaaaaaatgtaatatgtatcactgaggattttcagataaagctgaacactaacataaagtaggaaatgttatagtactttttaaccagaaatttctgtagtattttctagaagaactactcctctagccccacagttttcctttcttccccttataattcctagagtgatattttttctattatgtaagcctcacttttaatgagagtagtccactgataaacacactgaccatttcttttttgaatatactttgtattttagtttactgataatgtctctgggaataaatctgaacaagatggtctttaaaatccccacattttaagattggccaactgacccaaaatagtaagtcctctctaaggttcttatccaaaactttaccatttcctttaccactgatgttaccggaaaataaaactcttcagtgtattgaatatgtctacacattttagtatattttaaattattctgtccctctctattttttgttaaaacaaaagnttaattttttnnnnnnnnnnnnnnntgtgggtgtctttaaactgc

SEQ ID NO: 12679 - DNA, 786 bp, Macaca Fascicularis
  misc_feature (1)...(786): n = A,T,C or G
atgaaggactcnttttgntnctaactataaacttggatcacctatgttaaaaccttatttcacattccacatcattttagaatttattttcgaaggggaatagtttcaatgttttattcacttgggctttttttcttccccctcattctttaaagaactgcttaatatttaatctgttgtgaagaatctgatttgcactctgtagtgtttaaagaaacaaagaaactctaatattgaatctcttaaatttagtgtatgtaaacagcttacaaatatgtattgtctaaatgcatttaaatctgttttattcaaagaaaagctaaagcaaaaatactggcatatgaccatgcaagactgtcaatgccaacaaagacaacactaatcagcacatcctacactggattgcagtgctttccagattatttgaaaaacgttacagacaacttgcctgatttttaaatgagcataaaaggccctctaacctatgcaggtttccccattatacatatagaaaatgctagtatgttttgctcacttcatatgtaacaggtgcccttatgttgtgctgtatcctgtgctttttctgtgggaccattccattcaggagcaaagagcaccatgattccaatcttgtgtgtgtttactaacccttccctgaggtttgtgtatgttggatattgtggtgttttagatcactgagtgtacagaagagagaaattcaaacaaaatattgctgttattcagttttgtttgtggaatttgaaattactcaagtttaaaataaaa

SEQ ID NO: 12680 - DNA, 766 bp, Macaca Fascicularis
  misc_feature (1)...(766): n = A,T,C or G
agagcatggctccccatnnccccagcctgtccannnagnatctggacctcatgctcctggatgattcactgctaccgctggnnnctgatccacttctgtccaccatgtcccccgaggcctccaaggccagnnnnnnnnnnnnnnnnnnnnnnntggaggagggcgatgtgctgtgaccctggctgcccctgtgccagggaacaggggccggcctgggggctgggaggcctgggggcacctccctcccacccttcaggctgcactgtgtgtgaagtagccacctgccctgccttcctcctccctgctggcccctgtttggacttagtgcnnnnnnnnnnnnnnntggggtcaggagaagcacccccagggcagccctcttgactggcccagtgggaagaggccttcagcccctctcccggagatggaatcgtggggcagtgaggggcaaggtgttctagaggtgagaagagggcctggtggagacgccctgtcttctgagcccgacccctcattaccagtgaaggacatgctgaagggtcggggagactccttacctgaggcaactggtcctgggggtgcccaggcctgcctttctgggactcagatggcaggaggtccgccccgcagcctggtcctcggccctcccacaggtgggcaccccccactttggtgctaacagctctccaccaggtggtgtgagcgcgggggctgccagaagcgggaggggtcactgccggaagagcagctgccctccgaccccccactt

SEQ ID NO: 12681 - DNA, 566 bp, Macaca Fascicularis
  misc_feature (1)...(566): n = A,T,C or G
acaggatnngnnnnnnnnnnnntgagacgctatgacctgaagatgggccagctcttctcagactacgtgggcagccccnnnacctgcacctgcttcagccgggacgggcagtgcaccctggtgtccagtctggactccacattgcggctcctggacaaagacacaggggagctgctgggcgagtacaagggccataagaaccagnnnnnnnnnnnnnnntgctgcctaagcgagcgtgacacacatgtggtcagctgctctgaggacgggaaggtgttcttctgggacctggtggagggtgccctggctctggccctgcctgtgggtcatggcgtggtgcagtcgttggcctaccaccccacagagccctgcctgctgaccgccatggggggcagcgtccagtgctggcgggaagagacctatgaggcagaggatggagcaggctgaagccaggggacccaccaacaggaccaaggaccgagacacagatgcggaaggactgcagagaccattttattctagagaaatggctgaccaaaaagtaggggaggggctgggtctgcaaa

SEQ ID NO: 12682 - DNA, 792 bp, Macaca Fascicularis
  misc_feature (1)...(792): n = A,T,C or G
tccccctggtcgtgaggcctatcctggtgatgtgttctacctacactcccgatgttggagagagcngccaaaatgaacgatgctntttggnntggctccttgacnnnnntgccagtcatagaaacacaggctggtgatgtgtctgcttacattccaacgaatgtcatttccatcactgacggacagatcttcttggaaacagaattgttctacaaaggtatccgccctgccattaacgttggtctgtctgtgtctcgtgtcggatctgctgcccaaaccagggctatgaagcaggtggcaggtaccatgaagctggaattggctcagtatcgtgaggttgctgcttttgcccagtttggttctgacctcgatgctgccactcaacaacttttgagtcgtggtgtgcgtctaactgagttgctgaagcaaggacagtattctcccatggctattgaagaacaagtggctgttatctatgcgggtgtaaggggctatcttgataaactggagcccagcaagattacaaagtttgagaatgctttcttgtctcatgttatcagccagcaccaagccctgttgggtactatcagggctgatggaaagatctcagaagaatcagatgcaaagctgaaagagattgtaacaaagttcttggctggatttgaagcttaannnnnnnnnnnnnnnnnnnnnnnnnnnnnnnaattttgccantgttatagtaaattagttccatttgtaaaagggttactctgatactccttatgtacagaaatcacatgaaaaataaag

SEQ ID NO: 12683 - DNA, 720 bp, Macaca Fascicularis
  misc_feature (1)...(720): n = A,T,C or G
tccagnnngtctttgagggaggacctatacccataatagaattatggcactcnnnnnnnnnnnnnnnnaagaaatcaattacttccttactgttggaaggacattgtaaagtatgtggttatatgcagtgaaacnnnnnnnnnnnnnnnnnnnngaggagttttcactttactacagtgatataaaaaccagcagtttttacactaaattttttaaagaaatatagacaaaaatatagaattaaacctttggttccaaaatgggaaaggttccatgatgcataaatcatttctcatttgctttaaaaaaatttaaaaatgtaaaaattatgagagactttattcgttaacaatggggtaaagagctatatacatgaaatgagtcttataaaattaagtgaagtgcaaataaaagcactgctactataagacattctggaatggttgtttaataagggtattatccatttgatctatagcaatgtgattttatttttaaaaagaaaagcagtgtgttttctttttttgttgttttcttttnnnnnnnnnnnnnnncaattgctttcttctgtatctgcgaagtaatctnnnnnnnnnnttgttctttttaaaatttgatttgttataaaattgccaaatagaagtgtttcagatacatagtttgtacctgtatttttattttattgcctcatgttcttgtaagtcattcttaattgaccaa

SEQ ID NO: 12684 - DNA, 686 bp, Macaca Fascicularis
  misc_feature (1)...(686): n = A,T,C or G
tgatgttcatcgggaaacaactgagaacatacgtgtcactgtcatccccttctacatgggcatgagggaannnnnnnnnncccnnnnnnnnnnnnnnnnnnnnnnnnnnnnnnnnnnnnnnnnnnnnnnnnnnnnnnnnnagctccgggagcggcactggaggatattcagtctctccggcaccttggagacagtgcgaggccgaggggtagtgggcagggaacctgtgttatccaaggagcagcccgcgttccagtatagcagccacgtctcgctgcaggcttccagtgggcacatgtggggtacattccgctttgaaagacctgatggctcccactttgatgttcggatccctcccttctccctggaaagcaataaagatgagaagacaccaccctcaggccttcactggcccaggagaggagggaggcaagccagtcgggtttcctggagcaatgggtgcgccagccctgagcatgactctgccaagcatccagaccacaaatgcaggaatttggccgaggagcagctttaggtatggatgacgactaagccaagctacttcctgagcttctctcagatttccaagagccagagatgaattgtgctgcaacttgccccaattcttannnnnnnnnnnnctctgccactgcagtgattgttagaggtcattttctgaataatat

SEQ ID NO: 12685 - DNA, 644 bp, Macaca Fascicularis
  misc_feature (1)...(644): n = A,T,C or G
gccannnnnnggagcatgagaannngagccagggtcacccttttggggtctgnnnnnnnnnnnnnnnnnnnnnnnctaggagcagggctgcctcttctccctcccggagctctgcttgtgggcacgccctgttccctcaggtgccattctcccagagcttaggtgcccataaatgttcttactgcggtggagtagggcctcctggtcccacgctgtcgcatgggctagatctcaggtgtgctgttgagccaccttgagatgagggctgcttcacagtcaagtttccagcctgggcccctctcgggccttctggttggggactctcagcctcnnnnnnnnnnnnnnnngcaggtctgagaggctgcccagcagcaccccatgtcagggccacctcgttttccatttttgaatagcgctccctgtggtttgtgcccactgctccatacagcctctggtcctcactcttgaaagctccatgataagcgcagagatgggcaatgtggatcagaaggtgggcctcttactgtggaagagggaagtataggtgaatagatgtcaaaacccctgannnnnnnnnnnnnnnnngttggattttctttttctggcagacatttcagtacattcacatttctctcatttgctga

SEQ ID NO: 12686 - DNA, 1156 bp, Macaca Fascicularis
  misc_feature (1)...(1156): n = A,T,C or G
cccaaaatctgataatcatgtctaaccaagtaataatgttttannnnnnnnnnnnnnnnattattctgttatctaaaaatgtataaaataggaatatgaaaaaaatgacaacagcaagatgttttattttaatattaaacaattccaccacacttctgaagaataaacnnnnnnnnnnnnnnnnnnnnnnncaatgtatcaattttcagggaaatctttttgtttatctaccagacatgttctaactttgtattgcccaaagtatattaaatacagatgtgtaatataaagcatcaatatcacctaaaacatcctatataagatataacctgatagatggtcgattacattgctatactgcttagttttaactggtttatttttattgtagcagaagagaaatgacctgaaaaaaaagtatgagtttgataatcacacacatgaaagtaccattttgtaactcaacaaaagataaaacatacttcatcaaaaggcttctcgcttggtgtcaggttgtcacatgtgaccactctgcaatgcgaannnnnnnnnnnnnnnnnnnnnnnnncatgtttaaacttggaaaagaggatgctacaatagtttcaaagttcagtgtgtggacccgaggaaactnnnnnnnnnnnnnnnttgataacaatgtgattgtacaaaataaatgttcttaaggaaacaacttatgtaacatttgctacttttacttaaacataaataaatcccattgaaaagataaaagttattttcttcttgtttcttttttaatgtataaaaattaggaaaaattttgttctaggctaatagctttttcactnnnnnnnnnnnnnnntaccattacaatttgactatgtagctctgactaatttttcttgtaannnnnnnnnctatgtaggatnnnnnnnnnnnnnnnaggaaagtaaatacatttaatatttttattgaaaaaagataatcttactaagatatatgctatttgctttattaaaaatgctacttgataatgtaagttttgcctaataaaggcaaataaaattacctttgcaaaacataactgtattattcaactggaacttgtatggtcttatgtattttgaaatatgttgacatctttatagatantnnnnnnaatgtatttttg

SEQ ID NO: 12687 - DNA, 1571 bp, Macaca Fascicularis
  misc_feature (1)...(1571): n = A,T,C or G
cacagatgaatttaagttattctgaggaagaatttgatgttttgtctgagtcagctcatgacttcatcaggacacttttagttaagaaacctgaggatcgagccactgctgaagaatgtctaaagcacccctggttgacacagagcagtattcaagagccttctttcagaatggaaaaggcactagaagaagcaaatgccctccaagaaggtcattctgtgcctgaaattaattcagatactgacaaatcagaaaccgaggaatccattgtaactgaggagttaattgtagttacttcatatactctaggacagtgcagacagtctgaaaaagagaaaatggagcaaaaggccatttccaaacgatttaaatttgaggaacctttgctacaagaaattccaggagaatttatctactgagcagtatttccctttagaactttaagatttctacattgaaaaatgttaatattatttatggacctctggccaaatggtacatgtactggaagtggataaccagtatcacttacacaaacaaaaataactttgtcaaatttgtggagttaggtggaagtcacattttaaaagttgccaaccaggagatttaacaggtacagttatccatttcaatgttatttttaagggagatgttggtaccttgtaattctacaccctgtttctnnnnaatgagaatttgtgtacaaagatatttgtattcactttctttaaaaaatccaagtaaaagtgccnnnnnnnnnnnnnnnnnaatctcttgcattattnnnnnnnnnnnnnnnnnnnnnnnnnnnnnnnnnnnnnnnnnnnnnnnnnnnnnnnnnnnnnnnnnnatttgtttttggcaaaattttagtttaagcagacatctaaattttcgagacctagaataacattcactaaagtttgatactgtctttttttaatattttcttagtgctttatagtgacttgatttggtttctgttgtgtttttgcctaaatgcttgtaacatatcagtgaaaaaccctaatttttttttctcttcaatatcactagtaagacaggtggtaatttttcacctctgaaattattctggtttaagtgtcagctcttcagccacttccctcatcacaccacactcacatgcatctgctgtctcacgtgctgtacccctgccgcttcctggcacctccccccatgcttctcatttaattttggccaattgtaggtatcagtgtgatctgatcaacactctggttaccttggtcagtgaaaagatgctactatattgcttttgtcccaaagtgagtaaaatcccctagaacggagagagagagagtgtgtcttcatgccgaccactgagcctgtttctgctgagtttcttatcagccctcaagctctgctaggaaaagctataaaatgccaaaatatttataaacatttactttgtccataaaaaatttacattggatactctgtcattaggaggtactttgtcccaaaaagatgtataagaatgtactaatagttttatttgattaggattgaacagttcaggtgtatctaggccc

SEQ ID NO: 12688 - DNA, 1167 bp, Macaca Fascicularis
  misc_feature (1)...(1167): n = A,T,C or G
ggcagcacatnnncctagaaatctaggaactgtggtaggttcttccttgctgtactccaggcttgcgtcggggtcatagtcatccctcctgcattgctccattccaaacgctgcaaacacgttcttaataagaagggtaggactggatgttgggaaattatgtttacgtgaacatctatctccaaatctgcaagctcctgttttactgtagaagaaacaattannnnnnnnnnnnnnnnnnnnnnnnnnntccaaggcggggttccgggttttgccctgtggcgccattttccaactcattnnnnnnnnnnnnnnnnnncttctggacagcttcctgtttttctttcttctcctctcgtttctgttcctcctcttctctctctttcctctgctgttcttcccattgttcctttaactttcgctcttgttcttgccgttttcgagccgcctcttccttttccttctttattctgaactcttcctgtgccttctgctcggcaatcactcctcatgtaatctttgcctctctcttccccatagcttttctagttgttgtttttcaatagaagtgtcctcctccttctgtgagagtcctgagtccctcagtggagcaagttcctgccggcgtttctttcgtttctccttcttcagggcagccctgtactttctgtggcttggtttctctggaaatgtcatcttctcgggcgcagccatcttgccggcactgccccgcccctctagttgtatcctttataataaactggtaaacattgtaaccgcagatccagcccaatctggttcaactttgtgtaataaaatggcgagttgtttttcagttgccttggacccccaggttgcaagttacgtaccctgagcatgcccagatgaaccaagtgtgcagatccaggcggaacctaagtgctcagatggaggaacagggactgagttaagaagtggacaccacgtggcatgatctgtgatccaatcagattgagccctgnnnnnnnnnnnnnnnnnnnnnnnnncagatcaagcctcctgaatcccctcattacaagatccaatcacatcatgcctcactaccctctttgtataaaatctgccccagcccccagctggagagacagatttgggcaagactcatgtccgcttgctgnctgcctgaaa

SEQ ID NO: 12689 - DNA, 749 bp, Macaca Fascicularis
  misc_feature (1)...(749): n = A,T,C or G
tgaggtcaggacatggctgattcgatgctgatgcagggatctaggggcctcactgatcaggccatattttatgctgtgacaccactgccctggtgtccccatttggtggcagtatgccccatacctgcagcaggcctagacgtgacccaaccttgtggggactgtggaacaatccaagagaattgggtgtgtctctcttgctatcaggtctactgtggtcgttacatcaatggccacatgctccaacaccatgaaaattctggacacccgctggtcctcagctacatcgacctgtcaacctggtgttactactgtcaggcctatgtccaccaccaggctctcctagatgtgaagaacatcgcccaccagaacaagtttggggaggatatgccccacccacactaagccccagaatacggtccctcttcaccttctgaggcccacgatagaccagctgtagctcattccagcctgtaccttggatgaggggtagcctcccactgcatcccatcatgaatatcctttgcaactccccaagagtgcttatttaagtgttaatacttttaagagaactgcgacgattaattgtggatctccccctgcccattnnnnnnnnaagggtaccaactactccaacccagaaggaaaggggggcagctcagtggccccaagagggagctgatatcacgaggataacattggcgggaggggagttaactggcaggtaggcaaggtgcatatannnntaa

SEQ ID NO: 12690 - DNA, 780 bp, Macaca Fascicularis
  misc_feature (1)...(780): n = A,T,C or G
agtgccagtcagtnnngagcgagcgnnccctggacagttgcagagaaacacaggcttgtcgtgccgtttaagctttgcttgcaagagtggatgccccgcaatcgttcctgctctcccgggccccaggcctggggcatgcgtcgcacctgcccggcccggcggctgcgcctccctcctccgcctgaccaatgagacattcctcccctcacgcccggcccggtcccttccagggcaactcccagggatgtgatgacatgcagggttcaagtgttcttggttccaggcacctcccggctcatggggagcccagaggtccatgccgaggagaccaggcaggacctcccgaggctgcgccccggccggcccatgcattttgtgatcccaagtgactctgtggggagggtggggcgaggcgtcaggagggtagacggggagcccctcccgtgcatggctgccctcccgttcattttctccaccacagccgcttgcacgtatagatactgtggtcccctttcttttaatatataaattatgtatggtgaagtggagtgtaatgtgtaggtcccgtatttaatgcctcttactgccttttgaagcgcagccccctgtggcccgcagtcccctgagcctggctgttgtgtggtatttatgctctctttgtctgcctgtttctaaggaaatgcatgtgtgccctgagccgtgacgatcatcctgtccgtgtcgcgagcacaggcanntgtgtnnnnnctgtcctccctgttgattggtctggcattcngt

SEQ ID NO: 12691 - DNA, 739 bp, Macaca Fascicularis
  misc_feature (1)...(739): n = A,T,C or G
catttggttctnnnnnnnnnnnnnnnnnnnncggggtttcttcctctccccannnngaactgctcaactcttaacccaaattagtgtcagccaaaaggagttttcaagacagtcctgtcagtacttnnnnnnnnnnnnnnnttagacagtcttcatttccagccagtggagtcctggctccagagccatctctgagactcgtaccactggatattttaatatcagatcattacccaccaaacttccaatcgtatgcctcccacaggccaagggnnnnnnnnnnnnnnnnnnnnnnnnnnnnnnnnnnnnnnnnnnnnnnnnnagtacagaggagaactagggaaggaatgatgttttgcaccttattgaaaagaaaattttaagtgcatacataatagttaagagcttttattgtgacaggagaacttttttccatatgcgtgcatactctctgtaattccagtgtaaaatattgtacttgcactagcttttttaaaacaaatattaaaaaatggaagaattcatattctattttctaatcgtggtgtgtctatttgtaggatacactcgagtctgtttattgaattttatggtccctttctttgatggtgcttgcaggttttctaggtagaaattatttcattattataataaaacaatgtttgattcaaaatttgaacaaaattgttttaaataaattgtctgtataccagtacaagtttattgtttcagtatactc

SEQ ID NO: 12692 - DNA, 795 bp, Macaca Fascicularis
  misc_feature (1)...(795): n = A,T,C or G
gcagcannnnnnnnnnnnnnnnnnnnnnngaacannnnnnnnnncccagcagatggagaatagaccctctgtccaggcagcattaaaacttaagcagaagagcttaaagcagcgcctgggtaagagtaacatccaggcacggttaggccgacccataggggccctggccaggggagccatcggaggacgaggcctacccataannnnnnnnnnnnnnnccagaggaggactacgtgggggacgtgctaccagaaccctacttaggggcgggatgtcgctccgagnnnnnnnnnnnnnnnnnggtggacgagccgtagctccccgaatgggcttaagaagaggtggtgttcgaggtcgtggaggtcctgggagagggggcctagggcgtggagctatgggtcgtggcggaatcggtggtagaggtcggggtatgataggtcggggaagagggggctttggaggccgaggccgaggccgtggacgagggagaggtgccctaactcgccctgtattgaccaaggagcaactggacaaccaattggatgcatacatgtcgaaaacaaaaggacacctggatgctgagttggatgcctacatggcgcagacagatcccgaaaccaatgattgaagcctgcccaccctcccatgagagactcttgttagtcaacacatctgtaaataaccttgagataacagatgagaagaaatctgattgatgctggatggacctatcacaataggttgtggacttacttgccaccagcttgtgcatttagtgtgttactttttgatact

SEQ ID NO: 12693 - DNA, 801 bp, Macaca Fascicularis
  misc_feature (1)...(801): n = A,T,C or G
gaatcgaccacttagctgtgcatcagaggagcagagaagcaggcagttcatgcctgagaggttacccttcaggatgacagagctgagggtctttgtaggagttgctcttgctgtgtaaagcactattgtcttggggttgacccctagggcagttcttgataggttctgctgggcagaacatatgggttaaatctcggtagagagttttcctcatcctctatccataagtgtccttccatgcaaggtcctactctaggtgatagacagggaccccttctactgaaccttttgaggaaaggaggaaggaagaaatnnnnnnnnnnnnnnnnnnnnnnnnnnnnnnnnnnnnnnnnnnnnnnnnnnnnnnnnnnnnnnnnnnnnnnnnnnnnnnagaatccgtcctttcatttcaacttatnnnnnnnnnnnnnttttatatataaatattatataaataatgtataaaacattaaaagttaactatgtaagatattatttctgaaacaattttagctatatccactatgattataaactgtgtctcgacctgtgttatttacattagctgcttaaaaaagcattgagttaattttttaaatatcaactaaaatatcatagttctgtggtagacattgttttataatgaaagaaataactgcaactagagaaaactgtataaaaacattaaattgtcagtatttttgtaaggttccattttgtaaagagaataatattcaaagacttttgtagcatacaaagtgaaaacttgtatctgcgaaactatacttgtattaaatgtgc

SEQ ID NO: 12694 - DNA, 719 bp, Macaca Fascicularis
  misc_feature (1)...(719): n = A,T,C or G
cagggtgaagcgcccgcagnnntgcagcaggtgcaccgccaaagcccccttcggtgtgaccgcagcctggctgaccgtgagggccagagagagccttcacggacggccctggtgggtgagctgngctgtggtggcggtttaaaagggatctagtttccagctgcaggtttgttagagtctgttctacatgggcctgccccctgtgatgggcagagcctcctggtacatcgagaagaatcctgtgggtcccgtcccgtcaggagggactcagaggctctgctgccagtgagacttcccgccgggcagctgtgcgcaccaaagactnnnnnnnnnnnnnnnnnnnnnnctggggtcttctgactggaggggaaggatgtactttccaaacaaatgatacaaccctgaccaagctaaaatacgcttgttaaaggctattttctatatttattgttgggaaaagtcactttaaagacttgtgctatttggaagcaaaactattttttttgtcagtggaatgcggtttttttactattccatcatgaggaacaacatagattccatgatctttttaatgataggacagactgagatttgaaggaaacgtacatcaatctgtgaaacatagaccttcgctttatttttgtaagtatcacctgccaccnngttttgtaatttgaggtcttgatttcaccattgtcgggaagaaaatttcaataaat

SEQ ID NO: 12695 - DNA, 711 bp, Macaca Fascicularis
  misc_feature (1)...(711): n = A,T,C or G
gnnnnnnnntcactttttcatcccccaccttcccccttccctgtaggaaggcattggtggctcaannnnnnnnnnnnnnnnnnnnnnnnnnnnnnnnnttctgagactttgggagtttccacagaggtgagagttggtgggaaggaagcagggannnnnnnnnnnnnnnnnnnnnnnnnnnnnnngtggctgtcnnnnnnnnnnnnnnnnactcactaatcccaaacnnnnnnnnnnncatctggcctctctgaggattctgggtaccttaaaggctataaaataaaacaaaacaaaacaaaaacatcaaaccaatgagataacataaagcatgtctcctgctagannnnnnnnnnnnnnnnnnctaaattacacaaaatagaccgtaataggataacactgtgtataaatccttccnnnnnnnnnnnnnnnnnnnnnnnnnnnnnnnntgctgttctcttctgcaaggttgaagcttgacttgtgatgtacctgggtgggctcttggtccaccccgggctggggcctgcaccaggcatgaactaactgggcccagcggctgacagaacacaggactttcctaagtacccgtaggtctgtggagcgagacagagcagagttgccatgtcaacacatggggaatgatatgatagaaacaatctttatgactaaaagaaactcatcttcttcattaaaatctttggtgtcctt

SEQ ID NO: 12696 - DNA, 769 bp, Macaca Fascicularis
  misc_feature (1)...(769): n = A,T,C or G
ttgcagcactgaagtgaaaaaggagannnaggagaagatgaccatcctccagacctacttccggcagaacagggatgaagtcttggataacctcttggcttttgtctgtgacattcggccagaaatccatgaaaactaccgcataaatggatagaagaagagagaagcacctgttctgtggagtggcattttagatgccctcatgaatatgaagctttagcacagctgtagttacattcttttgaaatggcattaaattatttccatatattatatagtaggtccttccactttttgggcagtagcaaatctagcttttttgtacagacttagaaattatctaaagatttcatctttttacctcatatttcttaggaatttaatgggtatatgttgtctttttggcaaggtatatatgccttttggctgaagcaacatgtatatcactgttgactttttctttcttagatctagttttaaaaaaaaacaccacataaccattctttgaagaaaggaagggattaaatattttttttccctaacactttcttgaaggtcaggggctttatctatgaaaaagtagtaaatagttctttgtaacctgtgtgaagcagcagccagccttaatgtagtccattcttgctaatggttagaacagtgaatactagtagaattatttgggctgcttttagtttctcttaatcaaaattactagatgatagaattcaagaacttgttacatgttattacttggtgtatcagtaatcat

SEQ ID NO: 12697 - DNA, 691 bp, Macaca Fascicularis
gtggggttgcattctttgaatgttttgttattgcctggatatatggaggtgataacctttatgacggtattgaggacatgattggctatcggcccgggccctggatgaagtacagctgggctgtgatcactccagttctctgtgttggatgtttcatcttctcgctcgtcaagtacatacccctgacctacaacaaaacatacgtgtaccccaactgggccattgggctgggctggagcctggccctttcctccatgctctgcgttcccttggtcatcatcatccgcctctgccagaccgaggggccgttccttgtgagagtcaagtacctgctgaccccaagggaacccaaccgctgggctgtggagcgcgagggagccacgccctacaactctcgcgccatcatgaacggcgctctggtgaaaccgacccacatcattgtggagaccatgatgtgagctctctcgggtcgacggggccggccgctttcctgctgtttactaacattagattctcatagggccaggtttacagagctttatatttgcactaggatttttttttttcgtaattgtcacagaaaatgtaattgtggctatgtctctgcgcgtgcgtctgtgtctatcagtgtctgtgtgttttgttttgatttgggggatattttgtacaaaaagaaaacccacgggaagat

SEQ ID NO: 12698 - DNA, 739 bp, Macaca Fascicularis
  misc_feature (1)...(739): n = A,T,C or G
cagacataataactacanncagaggaccatggaggcggagggatcatggtttcagggcactgaaaactnnacgagtcaagaggactagtgcatggactgaaagtcagacatgccctcaaataggctgcatttttttttccaggaatgtaacctttcccctttttcttctgacctgagccaannnnnnnnnnnnnnnnntttcctgtacgtggagctgaagaggggttgctgtttcccgaatgttttccagttcacaggcgccgcctgcctgcccggggatggccttgagaagacacccaaatgtacatgaggcagcagaatgccttttaggaaatttttaaaaagtaatttaaagttatgtagaagtttggtaagaannnnnnnnnnnnnnnctcttctcccctnnnnnnnnnnnnnnnnnnnnnnnnnnnnnnnnnnnnnnnnnnnncatgggccgattttcattttttcagtttnnnnnnnnnnnnnnnnagctttgttctagttgaatnnnnnnnnnnnnnnnnagatgttgaaatttgtcttttctatctttgttatgaatgtgctatggccccttttggagacttctattgggtaatattccatgtgagagaaggaaacatgatattaaatgttgtgaaaaataataatgatgataataatacaatatatnnnnnnnnnnnnnnnnnnnnnncaggttgcttgggaggagaaaatttattcaaatccaatgata

SEQ ID NO: 12699 - DNA, 697 bp, Macaca Fascicularis
  misc_feature (1)...(697): n = A,T,C or G
acttgtgccactatgnnnactaggtctgtaggtccctggtgcctccagtactgcactttgcccccaaggtctttgacttcgtttcctgaagggtcaccaaaggtcagctcaaggctgggaaaaaccatttccagctttagcctaaacagggcatgtagatctctctcccactagagccccgaggcatgagaggagagagcaactgtcctttctttttttttcccttcctttttgcaggcccatggtcagctctggtctagacgnnnnnnnnnnnnnnnagccctgggaccctgccagtctcagttcatctcttaccaggagcaaggccctctgaagcatgggccgtgccagctgtgccctagtgataagggtaagaggaaagatgtcagactcactgcccttatttctctgcccatttcattctaggctcacactgtccttgtcaaggtgggcagaaaagcagaggttttctctgcaccaacccctctctgcagatggctggagaaagggtgggccaactcttcaccttctttcctcagctacgtttttttgtttgtttgttttttggcaggggacaaggagcatggtggtcttggctgactatttgctcaccttcctgtttctcctctgcccctggaagggaatgtgggggcccacttttttgtacatgtaccacctccttttcctcttgtacata

SEQ ID NO: 12700 - DNA, 684 bp, Macaca Fascicularis
ataatgagcaactatgaatactataatataaaattctgtattgtaatgattaggaaggtataacagtttaactatagctatttttaaaagtttctctactattttttctataaggatgtatacaaataaaagatggtttggaaatttctattttattcataaggtaaaggaaaaaaaggaaagaagttattgtgatataataaacttttcttgttgtggttgtaatttcctaccagtggagaaaaatcagggtaaaaataggattatttctaaaattatcattagttatgcttttatataaaatctgtggtatatttctgaataagttcataaactatatggcttaagtatttgaaaattattatttagtgaattattatggatcttttaatttatgattatcttttaaaaattcctatagctccctatacttgctcatatcttcattaataaaatttcagatgaccaaattaatgtggtatatgaaatttcaaattgtttaatattttgtcttaaaattttaattttcctccagaagctatatcacattgcagaagagagatgcatctgccaaattcgattatggcaaaatacaaagtcagttaatttaggaacattatgattttgctcaaagcaaataggcttttattttacattgttaactcaatagatttctaaatgcat

SEQ ID NO: 12701 - DNA, 731 bp, Macaca Fascicularis
  misc_feature (1)...(731): n = A,T,C or G
gaaagatgtcagntnnnnttnntcacagtcactgtttaccttgagcagtaaatccgaagtcagcnngctctactactaacaggnntgctactagatgatctctaatcatctaggtggggcttcctttctatagggaggataccagcaggctcttaagccttccaggacactaaggtcatgnnnnnnnnnnnnnnnnnagcaatgctagataactgagaaatcatgttctttgtggactatttcagacaaccagtttccgacagtccagcccagaacttttccttctccttttgggttctctcttctactttcctggggagagattaagggctnnnnnnnnnnaggggcccactttgaggagagcaaagcacaagtttgcctgaggaatgcatcccaacttctccccagcagctctgcctccctgtctgtgaagccgcagccctgccctgtcctgacttcatctctccttctgcccaagtctgtgtcccatcagacttgctcagcttaacagttgcccggtcctgctggccccctttcctcaggcctccctcctctgaaacaggatgtgcgcacgtgggccacagccctaaggactcctcccggactacacagcccacacctggccctgctcacggctgttccacccacccctcttcgttctggagcatatcagggaaagaagagttgacgatagattgccttcaccctcacagcgcacaaataaagctacg

SEQ ID NO: 12702 - DNA, 689 bp, Macaca Fascicularis
atgagcagttcactctatgcttcaagtcaactaaacaggccaaatagtcttgtaggcataacttcttactccagaggaataacaaaagaaaatgaaagagagggagaaaaaagagaagaggaaaaagaaggagaagataaatcacaatctaaatcaattagagaacgacggcgaccaagagagaaaagaagatctacaggagtttcattttggacacaagatagtgatgaaaatgaacaagaacaacaatcagacacagaagagggatccaataagaaagaaactcagacggattccatttctagatatgaaaccagttctacatcagctggtgatcgatatgattccttgctgggtcgctctggatcatacagttacttagaagaaagaaaaccttacagcagcaggctagaaaaggatgactcaactgactttaaaaagctttatgaacaaattctagctgaaaatgaaaagctgaaggcacagctacatgatacaaatatggaactaacagatcttaaattacagttggaaaaggccacccagagacaagaaagatttgctgataggtcactgttggaaatggaaaaaagggaacgaagagctctagaaagaagaatatctgaaatggaagaagagctcaaaatgttaccagacctaaaagcagacaaccagaggctaaaggatga

SEQ ID NO: 12703 - DNA, 1033 bp, Macaca Fascicularis
  misc_feature (1)...(1033): n = A,T,C or G
aaaaaaagaataggatcaaagnnntataaactgttgtttaattacgtgagaaacatcttcagtggccaaggaaattgtccatttctctcagaaagcaaatgaaatgctacagctatacccagaccttttataggtaatgaagcagttcaaaacttgaaagaaaacaaaacctgtcctcagaattctataaaggttattaagaatgttccttaaaggtttaagaagcagtaagcagcatctgaagccacaatctattataaatactttatttcaactagaaggtacaatctctcaggggtttcatagtttaaaaagctacaatcacatcatgttgtaactacataaaaaacagtgctgtaaatggaactgcttggctttgaccatacacatttctgcacagcccttacagaatctgcacaaagaagtatctccctttgctccagttaattgttcttgtacgtaagttgctttctattccagtatatccagagtggtgaaataacaaggccagccacgtagccaaaggnnnnnnnnnnnnnnnnnnnnnnnnnnnnnnnnnnaggagagaatgtatgagatcagaggaataggaagtgtttttattattgctcctacaaaactagaaattgtagtcatctggagactattctcccatatggatgaaactctgtcattaaataatcttcaaatattccaaagaagctaagtagcacctccaaatgcttgatctcttctccctgctccttccatctttttggagccgcctaggactgctgcacaactgctgtgtttgnnnnnnnnnnnnnnntctcttagttcttttggatctgctctttcctaaattccaagacttcctccatctatgttcctttttcttttcttttctttttaagcacctccttcaatagattnnnnnnnnnnnnnntttctttttcagcacctccttccatagaatcccgtttctactgaaaacccttagccatgctttgagnnnnnnnccnnacaaacacaagcaaggcacagtagtaaagta

SEQ ID NO: 12704 - DNA, 1126 bp, Macaca Fascicularis
  misc_feature (1)...(1126): n = A,T,C or G
attacaagacaaagatttttaacttaacatgaaaaattcactcttttattttcgaaaaaaagttaacttttcatactaacaaacagaacaagatttaaggtaaatttcttaaacattatccagaaaaataacaagatttatagtatctacttctggtactaatatacacaaaaggccaaaaccatgcctattctgcaggtgtagcttcggtgctctcctgttcaggggcaggctcactgcctgcttcttttccttctttgcttcttttagattttttgtgtttgtgtctcctgtgactatctccttcttcactttcatggcgacgtctactattacttcgagaagacttatgtctggtttcctctttttccctgtgtcgtctttctctatgtcgttcttctttctctcgacttgctctgtgacgctcataacctctttctgcatattccctgtatctgtatcgttcnnnnnnnnnnnnnnnaacacttggtgtaggactgtgatcacgctccctctctctctctctggtgcgttctctttctctgtcccgatcacggtctcgctctctgtctctgtctctctctctatctcggtctttctctcttctggcataatagtcccactgcttgctggtgtccacaagactaggccatgaaggcgcagaaccaggaagatggggaaaggcaacatnnnnnnnnnnnnnnnnnnnnnnnnnnnnactatcataaccagaggaatgtccactttctattgttggtataagagatggaggtggagctcctggtggaggaggaaaacctgaaacattcaaccataagataaaaaatgttannnnnnnnnnnnnnnaatgtcaagagtgaaacnnnnnnnnnnnnnnnnnntaaatttctctggggatatgaatgtgcttctctatgttgtaataatggacagaaaaaaatagagctcaaacttataaacagatttttagtgcaataaaactttaagtaagcagtctggtctaatacacagagaacaaactgggagtcaggacattggtcttattttcagcaccacacacagcccattttgtaagtatnnnnnnnnnnnnnnnnnnnnnnnnnnnnctccatacataaaacagtag

SEQ ID NO: 12705 - DNA, 728 bp, Macaca Fascicularis
  misc_feature (1)...(728): n = A,T,C or G
actgcaagctaattctatgnnnnntgaaaatgcggtacagtctacaccagtaacagctgtatcttctggtaccaaagaacagataaaaggaggaacaggagacgaaaagaaagcaaaagagaaaattgaaaaaaaaggagagaagaaggagaaaaaacagcaatnnnnnnnnnnnnnnnnnnnctctaagccaatagatgtttcccgtctggatcttcgaattggttgcatcataactgccagaaaacaccctgatgcagattctttgtatgtagaagaagtagatgttggagaaatagccccaaggacagttgtcagtggcttggtgaatcatgttcctcttnnnnnnnnnnnnnnnnnnnnnnnnnnnnnnnnnnnnnnnnnnnnnnnnnnnnnnnnnnnnnnnnnnnnatctcaagcaatgctcatgtgtgctagttcaccagagaaggttgaaatcttggctcctnnnnnnnnnnnnnnnnnnnnnnnnnnnnntacttttgatgctttcccaggagagcccgacaaggagctgaatcctaagaagaagatttgggagcnnnnnnnnnnnnnnnnnnnnnntaatgatgaatgtgtggctacatacaaaggagttcnnnnnnnnnnnnnnnggaagggattatgtagggctcaaaccatgagcaannnnnnaatcaaataaaatgcttcnnnnnnnnnnagacatttaaaaaaaccttaaaaat

SEQ ID NO: 12706 - DNA, 725 bp, Macaca Fascicularis
  misc_feature (1)...(725): n = A,T,C or G
ttcacggtcctggcnnntcacatcctgtcccctgagcagtggagagccacacgtgtggaaatcttgcggaggctgctggtgacctcacaggcccgggcagtggctccaggtggagccaccaggctgacagataaggcagtgaaggactattccgcttaccgttcttcccttctcttttgggccctcgtcgatctcatttacaacatgtttaagaaggtgcctaccagtaacacagagggaggctggtcctgctctctcgctgagtacatccgccacaacgacatgcccatctacgaagctgccgacaaagccctgaaaaccttccaggaggagttcatgccagtggagaccttctcagagttcctcgatgtggccggtcttttatcagaaatcaccgatccagagagcttcctgaaggacctgttgaactcagtcccttgaccaccacacagcagctgcagtggcgaagacgaagctggcttgccttccaccctctgttctccctccttgtgcgttgagttccctccgcggatgctgcattgttaccccgccctcccctctctcatttttcttggtgtggcttggggtttttaggcttcctgttttatctcgtgtgtgtggtgcactagctatgaagttgtctgtaacccaagccatcaaagggcctgtacatacctaggagccatgagttgtcccggccaacttcatacttgagtttgaaacaa

SEQ ID NO: 12707 - DNA, 774 bp, Macaca Fascicularis
  misc_feature (1)...(774): n = A,T,C or G
gactcatgtagatatttgaatgatttannctggatgtgatgaaggagttgatannnnnnnnnnnnnnnnnnnnnnnnnnnnnnnnnnnnnnnnnnnnnnnnnnnnnnnnnnnnnnnnngtgaaaaagcagtatgaaggaggtatctttaaaatagcttcctgggcagatctggtaaatgctcacgtggtgccaggctcaggagttgtgaannnnnnnnnnnnnnngggcctgcctttgcatcgggggtgcctccttattgcagaaatgagctccagcggctccctggccactgggaacnnnnnnnnnnnnnnnnnnngaatggctgaggagcactctgaatttgttgttggttttatttctggctcccgagtaagcatgaaaccagaatttcttcacnnnnnnnnnnnnnnnnnnnnnnnngcaggaggagataatcttggccaacagtacaacagcccacaagaagttattggcaaacgaggttccgnnnnnnnnnnnnnnnnnnnnnnnnnnnnnnnnnnnnnnnnnnnnnnnnnnnnnnnnnnnnnnnnnnnaaaagctgcttgggaagcgtatttgagtagacttggtgtttgaatgcttcagatacatttttgtgaagacattgaagatgtgacagtccccctgaaagtcactagctggaaataatccaattattcctgcttagattcttccacagggcctgtgtaagaataggttctggagttatcatggactttaggaaatattgagtaattggtaatcactgcatg

SEQ ID NO: 12708 - DNA, 726 bp, Macaca Fascicularis
  misc_feature (1)...(726): n = A,T,C or G
cagtagcagcagagtccgcagtccggtgtatagcaaatcccattaaacttnnncggcttgtcatggaaaagacacctcattgctttctcactgnnnnnnnnnnnnnnnnnnnnncagcagctatgggggttccagagattcctggagaaaaactggtaacagagaaaaacaaaaagcgcctggaaaaagagaagcacgaaaaaggtgctcagaaaacagattgtgaaaaaaacctgggaaccgtgggtgctgttgccttggacttcaaagggaatgtagcctacgcaacctccacagggggtatcgttaataaaatggtcggccgagttggggacacaccgtgtgtaggagctggaggttatgctgacaatgannnnnnnnnnnnnnnnnnnnnnnnnnnnngggaaagcatcctgaaggtgaacctggccagactcaccctgttccacatagaacaaggaaagacggtagaagaggctgcggacctatcgttgggttatatgaagtcaagggttaaaggtttaggtggccttatcgtggttagcaaaacaggagactgggtggcaaagtggacctccacctccatgccctgggcagccgccaaggacggcaagctgcacttcggaattgatcctgacgnnnnnnnnnnnncggacctgccctaagcccctggaagattgtattccagatgctagctgagaggtcaagtacggtctcctcatgaga

SEQ ID NO: 12709 - DNA, 735 bp, Macaca Fascicularis
  misc_feature (1)...(735): n = A,T,C or G
tgatcagagcaatgtacagcnnnnnnnnnnnnnnnnnnnnnnnnnnnnntgtggctgcaacnnntcagcgccccaggcctgcagacccgatgnnnctgcctgctgagatccctccagtttttcccagtgggaagttgggaccaagcacaaactccatgtctggtggggtacagnnnnnnnnnnnnnnnnnnnnnccaaagccacatgcctctgttggcagtgtcaagaatgagaagacttttgtggggggttnnnnnnnnnnnnnnnnnnnnnnnnnnnnnnnnnnnnnnnnnnnnnnnnnnnaactggtgggtcacttgcaagggatgccctttgtcatggacttgcccnnnnnnnnnnnnnnncaagaaccagggaaggggctcagtgagcctctggagccgccttctctcccctcccaactcagcatcaagcaggcattttatgggaagctttctaaactccagctgagttccaccagctttaattattcctccagctctcccacnnnnnnnnnnnnccttgctggaagtgtggtgcagctgagccacaaagcaaagtttggtgcgagccacagtgcatcactttccttgcaaatgttcactgacagcagcacagtggaaagcatctcactccagtgtgcgtgcagnnnnnnnnnnnnnnnnnnnnnnnaaggctgcggtgcattctgtcatgatgactgtattggaccctcaaagctctgtgtattgtgcc

SEQ ID NO: 12710 - DNA, 590 bp, Macaca Fascicularis
  misc_feature (1)...(590): n = A,T,C or G
acctgcgacnnnnnnnnnnnnnnncnnnnnnnnnnnnnnnacgaggcctgaaagctgtgctggagcggcaggcttcctaccgcttctactccagttccctgcttgtcatctatgatggcaaggagtgccgggctgagtcctgcctggaccgccggtctgagatgcgtctcaagcacctggacatggtgctccctgaggtggcgtcatcctgtggccccagcaccagccccagcaacaccagccccgaggcgggtccctcctctcagcccaaggtggatgtccgcatgattgactttgcacacagcacgttcaagggcttccgggatgaccccaccgtgcatgatgggccagacagaggctatgtgtttggcctggagaacctcatcagcatcatggaacagatgcgggacgagaaccagtaggccctgttctgggcccccagaaccccttcctctccacccacaggcagggaccattgttctgaacttgccgtgaggacacacagacttgattttaaannngttatatttctctttggtgtaaactaaaagaaatgtttttagcggtagcctggaatccatatatataaa

SEQ ID NO: 12711 - DNA, 728 bp, Macaca Fascicularis
  misc_feature (1)...(728): n = A,T,C or G
cttccatcaaggattttacatatgagacatggtggggttataaattggtcacatacaaactagaaaacaagatgcatggggaaaacataaactgaacattcattaaagttgaatgccatatcctaagtgtgaaatcttaaaaacactgaacaaaggcttcatttgtccacatctcttcattctgtgtccttataggaggcaggactgttgtggaagcaggaccacatgaagactgcccttgccagcaaatctgggaacaaactgcaagtgacttaacccagtctcaagactccatcataaataattctcacttctttgaacaaggtgatgtcccttcccaggttgaggcagaactatctataattcatacaggacagaaaccttcacagaatgggaagtgtaaacaatccttnnnnnnnnnnnnnnnctttgatcttcctcagcagttacactcaggagagaagtctcatacatgcaaggagtgtggaaaaagcttctgttacatctcagctcttcgtattcaccagagagttcacttgagagagaaactctctaagtgtgacatgcgtggtaaggaattcagtcagagttcatgtctgcaaactcatgagagagtctacactggagagaaaccattcaaatgtgagcagtgtgggaaagccttcagatgtagagcgatacttcaagttcatttncaatacacacaggagagaaaccttatatttgtg

SEQ ID NO: 12712 - DNA, 633 bp, Macaca Fascicularis
  misc_feature (1)...(633): n = A,T,C or G
cgccaggttagagggaaagccagcttcctctactcgctgccgcacaggcatcctgtcaacgcagcttgtttcagtcccgatggagcccggctcctgaccacggaccagaagagcgagatccgaatttactctgcttcccagtgggactgccccctgggcctgatcccacaccctcaccgtcacttccagcacctcacacnnnnnnnnnnnnnnnnnnnnnnnnnnnngggggacacgctggcctctgcaatgggttaccacattctcatctggagccaggaggaagccaggacccggaaatgagagacactaaagaaggtgtgggccagacaaggccttggagcccacacatgggatcaagtcctgcgagcagaggtggcaatttgttaaagggccaaaagtatccacggctagggttggagcaggggtgctgggagctggggcgctgtgggactgggacacttttgtgttaatgctctggacctacctccagagactgctccagagttggtgacgcagctgccccaagggcccctctgtatctagcctggaaccaaggttatcttggaactgaatgacttttctcctcctctcagtgggtggtagcggagggatcaagcagttatttgattt

SEQ ID NO: 12713 - DNA, 702 bp, Macaca Fascicularis
  misc_feature (1)...(702): n = A,T,C or G
gaaccaagaggataatagagaaagagannnnnncgggaaggcccgagacagagtccacgnnnnnnnnnnnnnnnnnnnnnnnnnnnnnnnnnnnnnnnnnnnntgtgcacgtggtggggccacagagacnnnnnnngtgaactctcccagggcccatctcctgcatcccnnnnnnnnnnnnnnnncatggtgccttctaaggacagctccttccctactcattccctgccaagtggggtcagacctctttacacacacattcccattcccaccaaccaccagaactggatggtggcatccctaaggtgcctgaggcatcctgggaatggtctggagtaacccttccttatttttatttttatttatttatttatttttttgnnnnnnnnnnnnnnnnnnnnnnnnnnnnnnnnnnnnnnnnnnnnnnnnnnnnnnnnnnnnnnnnnnnnnnnnnnnnnnnnnnnnnnnnnnnnnnnnnnnnnnnnnnnnnnnnnnnnnnnnnnnnnnnnnnnnnnnnnnnnnnnnnnnnnnnnnnnnnnnnnnnnnnnnnnnnnnnnnnnnnnnnnnnnnnnnnnnnnnnnnnnnnnnnnnnnnnnnnnnnnnnnnnnnnnatacagtgggagagggcgaggggaagaagatagtgggaaagaagaccaccgagacagggagaagaggtggagagagcgctgttgtttcact

SEQ ID NO: 12714 - DNA, 751 bp, Macaca Fascicularis
  misc_feature (1)...(751): n = A,T,C or G
gaaaaatataccaattatgaagtggtaaccatggttactcgaggccaccgactctaccagccgaagttggcatctaactatgtatatnnnnnnnnnnngagatgttggcaggannnnnnnnnnnnnnnnnnnnnnttnnnnnnnnnnnnnnnnnnnntagatgaactagttgnnnnnnnnnnnnnnnnnngaagataagtgatgtaaccagtggctccaagattccaaagtgcaaggaaggatgggcactttgtggcttttaatttattgagcacttggacatgtagatggttttacttgtaaagtggaaacacataaagaatttgtttctagacggaatctcccagagtgtttccacttagaaacactctgttgccttagaaatggtgattaaaatcactcatttctattcattcctcaggcacttgagtgacagttgtttaccaggcactgtgtatagccccnnnnnnnnnnnnnnnnnnnnnnnnnnnnnnnnnccatgttagctgannnnnnnnnnnnnnnnnnnnnnnngggaaggggaagggtattagagtcatgacccagcaacccttctttttcccttnnnnnnnnnnnnnnnnnnnnnnntgagacattgtctacaattgggttctagataaatcaggaacccacctaaataagtaaccatcttttgttttgaaaacatctcagttttcaagactgctcttagtattacatgaacaatatttgtatgctgtatatattgtaa

SEQ ID NO: 12715 - DNA, 685 bp, Macaca Fascicularis
aaattctttatttttttaatgtgattcctttatggcattagggtaaggatgaagcaacaatttttaaattgtgtatgtgcatatgaagcacagacgtgcgtgtgtgtgtgtctgtgtgtgtgtctgtgtatgtgtgtgtgttctaatggtaatttgcctcagtcattttttttaatatttgcagtacttgatttaggattctgtggtggagggcagtgtttcaaagtttagtcacagctttaaaatattcagtgtgactttaatattataaaatgatttcccatgccataatttttctattaaataggacaattataaagcatgcaaaagttagagatctgctatataacatttgttttgtgatttgaactcctaggaaaaatatgatttcataaatgtaaaatgcatagaaatgcatgtaatacctgtaagacttaaaaattgtgtttacagatggtttatttgtgcatatttttactactgcttttcctaaatgcatactgtatataattctgtatatttgataaatatttcttcctacattatgtttttagaatgtttcagaaatatacatttatgtctttatattgtaataaatgtgtacatatctaggtatacgctttctctctgctgtgaaattatttttagaattataaattcacatgtcttgtcagatttcatctgt

SEQ ID NO: 12716 - DNA, 732 bp, Macaca Fascicularis
  misc_feature (1)...(732): n = A,T,C or G
catcaagcccaggnntaaaggctgaagctttcatagtgcagagatgcccagcctgggcacacacgcctcctttntggccatcttctctctgtgtagggcacactttaacccagtctctgttgctgttgagtctctgctttgttttgtacagtcataggaaattctgacctgatctgaaggggcaccttctgttcactcccacaaagaagtgtcaggttctcattgagatgttttaaaatttttcctcaaatatttacatttattaaatgtggaactattaggaagctcttccaaaatctcattccagcatagttttgatttttcttgtcttttattttaaannnnnnnnnnnnnnnnnnnnnnnnnnnnnnnnnnnttgggcctgggctagacaaaactctcaaagtaaagtataaaacttacaaaagaatattctcgtttggttttatctaggtagatgtaatatatgactttttataaaaagagtatctatatgaaattgacacagtattttcaacttttatattccatactaaagatatgaagaactacatgtaacattatcatttttattaattgcacaactctaatgataaaggttggattgtgttagaggaattggctcttgtatttgcctctagagaaacatggtgtagttctctttgtatttatggattcctttataccatgtcacatttcctttggtcctctatgttgaagtgccttagactc

SEQ ID NO: 12717 - DNA, 707 bp, Macaca Fascicularis
  misc_feature (1)...(707): n = A,T,C or G
gccagcatgccttnaattctgaagaagctttaaaggtcnnnnnnnnnnnnnnnnagggcctgtatacattgcnnnnnnnnnnnnnnnnnnnnnnnnnnnnnnnncagaacaatgtatttgctataaaccgtgaacaaggaattgttggagattttgacttcaccaaatctgtgagtcagcgagcctcnnnnnnnnnnnnnnnnggtgacttgnnnnnnnnnnnnnnngagttgaaaatgggaaaacctgcttctccaagttcagacttatatgcttatggctgccttttattatggctttctgttcaaaatcaggagtttgagataaataaagatggaatcccgaaagtggatcagtttcatttggatgataaagtcaaatccctcttctgtagcttgatatnnnnnnnnnnnnnnnnnnnnnnnnnnnnnnnnntacatgctgaatgtttcttgataccaaaggagaaatcagttccaaacccagaaaaagatactgaatacaccccatataaaaaggaagaagaaataaagatggagaacttggataaatgtatggagaagacaagaaatggtgaagccaactttgattgttaaattattattctgtnnnnnnnnnnnnngttctttttaaaaatttgtttagtttggttaatacacagaaatatctagaagtgttctgggactagttgggttgtatctttagta

SEQ ID NO: 12718 - DNA, 734 bp, Macaca Fascicularis
  misc_feature (1)...(734): n = A,T,C or G
aatnnnnnnnnnnnnnnnnnnnnnnnnnnnnnnnnnnnnnnnnnnnnnnnnnnnnnnnnnnnnnnnnnnnnnnnnnnnnnnnnnnnnnnnnnnnnnnnnnnnnnnnnnnnnnnnnnnnnnnnnnnnnnnnnnnnnnnnnnnnnnnnnnnncaaaaaaagaatcaggagggcacatgggcacggggagtgatgaaccagagaaagctgctgtctttctgggcaagtgccaagcaactgatcgcctttgacccctaggaaagaaaaannnnnnnnnnnnnnnnnnncattttaaacttcgcttccgaaaannnnnnnnnnnnnnnnnnnnggagcagaacttgagtgtggccgagggcnnnnnnnnnnnnnnnnnnnnnnnnnnncccccatcgcggccccagcgccccttctgtgctgtctgcggcttcccttccccctacacctgtgtcagctgcggtgcccggtactgcaccgtgcgctgtctggggacccaccannnnnnnnnnnnnntgaagtggactgtgtgagcctgggcattcccagagaggaagcgccgctgtgcnnnnnnnnnnnnnnnnnnnnnnnnnnnnnnnnnnnnnnnnnnnnggagctcttcctggaccgagggaggagccgctcattcacnnnnnnnnnnnnnnnnnnnnnnnnnnggaaagagcaacctcactcctgggaacggtctggcaggtaggctgggcccnnnngtgctgtga

SEQ ID NO: 12719 - DNA, 661 bp, Macaca Fascicularis
  misc_feature (1)...(661): n = A,T,C or G
gcacaccaaggcagggagtcggcnnnnnnnnnnnnnnnnnnnnnnnnnncacagggtcctgtgcttggattgtggggaacagactccccggggggtgctgcaagagcgcttccaagtcctgaaccccacctggagtgctgaggcctatggtctggctcctgatggtgacgtctttctctcagaggagcaagtccggagctttcaggtnnnnnnnnnnnnnnnnnnnnnnnnnnnnnnnnnnnnnnatgtcgttttcttcggggacacagtgaaccctgacaaggttgattttgtgcacaagcgtgtaaaagaagccgactccctcttggtggtgggatcatnnnnnnnnnnnnnnnnnnnttacaggtttatcctcactgcccgggagaagaagctgccgattgcaatactgaacattgggcccacacggtcagatgacttggcgtgtctgaaactgaattctcgttgtggagagttgctgcctttnnnnnnnnnnnnnnnnnnnnnnnnnnnnnnnnnnnnnnnnnnnnnnnnnactctcacttgagtcttgctgctaaaggtaattgccttctcagataacagattccagttcccattcgacagagtagggtgcactgacaaagtatagaaggttctaggtatcttaatgtgtggatat

SEQ ID NO: 12720 - DNA, 671 bp, Macaca Fascicularis
  misc_feature (1)...(671): n = A,T,C or G
gcactgagtacctagagtgnnnagagnnnngggctggagtgaaactggggccaccgaagnnnnntcccccaaatcagcaggcagcactgacaccaggagcagagcccagtgctaggcttgtgccagctgatatgagcacagaaaaggggagacaaagttgtcacttctcagagagctgtnnnnnnnnncccatcagagaggggccaggagccaccaagaagacataagtnnnnnnnnnnnnnnctttagtacagtctacaaatcctccaataggaagtaacatcactgctactggaaaaggactgcaaacttaaatgtatacaggtgtccaacagatagggatatttaacatggcagggaaacaaaaacacagccagctggaagtacatgcccatccaaaggcatgannnnnnnnnnnnnnntaaaaagtaccccttcatccaaacctcatagcttgcatttctgccttcaacctcaggaacaagaactgactaaagggatgtagggaagggctgaggactgtgaagcaatgattttacaatgagtcaggccactgtgaagggacatgctctgcaggtcctgcctttgagttgctggagaactgtctatgtctgcgctcctccctggctctccatacccaccacccagacatnnnntttgcttgatggtaa

SEQ ID NO: 12721 - DNA, 710 bp, Macaca Fascicularis
gcacaggacagtcctatttttggtgtcttttctgaaaataaagtgctttagagaatgacttgtgagcacatctttagggaccaagagtgagtttctgtaaggagtgactcatggcttgcctttgtctctcaggaatacttttctaactaggactgctctcacctgagacattcgcccgcgggatctcagggtcccgggctgtggcgcatcatgacctcaacctggctcctcatcttctccagcttccctgtcgttgaaagcttcagaagtttactgattctgctcctgcctgttctctttctgactctgacagcccaatgccacccggtatatgaagtgacaccagtactctgaaaagcatcatcgtccttggagggactgagcactcagcccttcagccacgatttcaggatcgcttccttgtgagccgctgcctccaaaatctcctttgaagctcagacatctttctccagcttcaggcctgtagacataactgttgttcatctccatttactttccagtttgtcccccctcctctctgtgttccccaaatcagagaatagcccaccatcccccaggtcacctgtctggactccccattcacccactttggcaggtgcaggtgaggataacacaccagacagggtagctgtcccccagcaagtgccctgtgtggtcattgcaccccctataaaacgcgctatgtctcc

SEQ ID NO: 12722 - DNA, 852 bp, Macaca Fascicularis
  misc_feature (1)...(852): n = A,T,C or G
cttaaggacttccattctgaatatattgtcagtgnnnctgactttacttcccaactctcaagtcaagttgnnnnnnnnnnnnncagaaatattcaggaatatcttagcatccttaccgatccagatggaaaagggaaagagaagattgcagagctttctaccactgctcaggaaataattaaaagccaggccattgcgatgaaggaaataattnnnnnnnnnnnnnnnnnnnnnnnntataaactgcaagatttttcagaccaactctctgattactatgaaaaatttatnnnnnnnnncaaaagattgattgacctgtccattcaaaactaccacacatttttgatatacatcatggagttactgaaaaagctgcaatcaaccacagtcatgaacccctacgtgaagcttgctccaggagaacttactatcatcctctaattttttaaaagcaatcttcatttatccttctgttccaattgaactttcacaaagcacagaaaaaattcaaactgcctatattgataaaaccatacagtgagccagccctgcannnnnnnnnnnnnnnnnnnnnnnnatacatatgaattggacctgcaccaaagctggcaccagggctcnnnnnnnnnnnnnnnnnnnnnnnatggcattttttgcaagttaaagaaaatcaggatctgagttattttgctaaacttgggggaggaggaacaaataaatggagtctttattgtgtatcataccactcaatgtggctcacttgtattgaaagacagtgaaatgagnnnnnnnnnnnnnnnnnnnnnnnnnnnnnnnnnntctagaacatatagtgtgatttaagttacagaa

SEQ ID NO: 12723 - DNA, 724 bp, Macaca Fascicularis
  misc_feature (1)...(724): n = A,T,C or G
gnnnnnnnnnnnnnnnnnnnnnnnnnnnnnnnnnnnnnnnnnnnnnnnnnnnnnnnnnnnnnnnnnnnnnnnnnncgcatctgggacctgaataaacacggtaaacagattcaagtgttatcgggccacctgcagtgggtttactgctgttccatctccccagactgcagcnnnnnnnnnnnnnnnnntggnnnnnnnnnnnnnnnnnnatggagcatgaggnnnnnnnnnnnnnnnnnnnnnntagagggccatcaaagcagtgttgtctcttgtgacttctcccccgactctgccctgcttgtcacggcttcttacgataccaatgtgattatgtgggacccctacaccggcgaaaggctgaggtcactccaccacacccaggttgaccccgccatggatgacagtgatgtccacattagctcactgagatctgtgtgcttctctccagaaggcttgtaccttgccacggtggcagatgacagactcctcaggatctgggccctggaactgaaaactcccatagcatttgctcctatgaccaatggtctttgctgcacattttttccacatggtggagtcattgccacagggacaagagatggcnnnnnnnnnnnnnnnacagctcctcgggtgctgtcctcactgaagcacttatgccggaaagcccttcgaagtttcctgacaacttaccaagtcctagcactgccaatccccaagaaaa

SEQ ID NO: 12724 - DNA, 1312 bp, Macaca Fascicularis
  misc_feature (1)...(1312): n = A,T,C or G
aacattgcatgnnngatnannnnngtgtcttnncgttaaaaaattattgcaaaagtattctgaactgtcaagctgcccagtcagatgggctgttgccatttaaaatcactgtaattaattagtttgattagagcacaaagcttagctaatcaaccattatttttcattttgtttgttctaagaggattgaaaatcagtttagtttaaatgtctttctgttaggcctttctttcttaacaatgaagaagagatgattcttctagtttatggttaaaagtttttgaagtgtctcaaaaatattttactaactgtaaccctaaaattgttgtcttttggtttatgaaatgggtaatttttgatatttccccagttctttttaatggggtcaataatggacattctagtttaaggtggttgatggatttagccatatatgctgctaaagaaattgtctaccttttcttcctcacctgttccatttatgtaaggttgagattagagggaaagcattttctatatcaattgtgtttaaacctttcaagaaggttatttagctagcttagtgttgaactaaattttttttaaacaaggcgaggtctaatgctgttttgagattctgaaattaaatgaaaatacttatttcagaaatgcatttaatgctttttttcttgtgacagttacgcaaatcagcttgaattccatatgtccctgagttatttttatcataaagccacaaatgtattataacaaggcaaattgtaatatatataatccttaactcataaccatgtctcggtttatttttttttcttggattgaaaagtactgaaattcaatgtgacattaaaatgcaaattttcctatttatttgagtagaaaatcacttaccagtgagcatatatattttaaaatactttctttggatattgtaattcttaactggttgtaaattggaaaagctgggattacatatggtgtgtggttacagtctaaattttttcatcctcctgtgcgtcataagcatgtttgtaatattttaaaaaatagttttactgatgctacaggaatttcaagcctgtggcgaatgttagtatttaccatagggagtgaagcggagttatggtttcattcaatagagtattgcttattatacttgagtggaatcctttcctcacatactcctacagacgtctgggcctggaaattttttttttttttttttagaaaaacaccacttttattatgtacaataaaatatttcattagcttgaattgtatagatttttaaaaattcaatgaaagcatgttgttt

SEQ ID NO: 12725 - DNA, 781 bp, Macaca Fascicularis
  misc_feature (1)...(781): n = A,T,C or G
tgcagccggagagccaagggcnnnncgctgccaccgcngnnttcccagagaccaagcagccaggtgccgtggccagtgganncagaggtgctggtggagggactaggacttcggggttaggccgcgggattctttctctgcaggccactttcctgacatgctctctctacataactcagcatccgcgactgccgtcaacagctggtcctacccagagtatttctgagccctgaggggcctgccagattggttctnnnnnnnnnnnnnnnnnnnnnnnnnagcatactaactcctttcagattttgtggagggacgtttggaagtggtttactctcttctgccctctccgctacctccacctttccagtccgatgagccccacctgagcacacccagcccctccttacccagcatctggagtacannnnnnnnnnnncctgnnnnnnnnnnnnnnnttagaggtctgttaggcctgccaaatggcggccagctgccccggagggagggcaggcccccttctctctctttccccagatccctacctgagactcaccagnnnnnnnnnnnnnnnnnnnnnnnnnnnnngtatttgtacttgagaccacctcacacaatctgtatgggcccaaccctgatctcaacctccttccctccacccgaagctgtcgttcttcctatggcagcagggggtcccaggacgtgcctcgtacatgccttgagcttgtcagtccactgagctttcgtccatgagacaacgcaaggggcctgtatctgaataaaa

SEQ ID NO: 12726 - DNA, 721 bp, Macaca Fascicularis
  misc_feature (1)...(721): n = A,T,C or G
tggcgcggcgcggctcactaggcggggtaggttcggagtcccgccactnnnnnnnnnnnnnnnnnnnnnnnnnnnngaccggacaggcgcgggcggccgggctaggctgggatcgccgctgctgcaggggccgccactgcagcccacactccaatttagtggctagtgttctaattcctttggggttcacctgggtccttaatggggactgggccaagaaaagttatactgaagatagacaggactgtaaaaaacagaactctgggctctacccctgcttcaaccaaagagctccgatttttacttattttttattttacacataaaaataaatttttttatgtgtaaaaattgttctgataaattttcattgnnnnnnnnnnnnnnnnnnnnnnnnnnnnnnnnnnnnnnnnnnnnnnnnnnnnnnnnnnnnnnnnnnnngtaattctgacaaatgtttgaaaccagtcactgaacagtaaagttgcnnnnnnnnnnttttatcagagaaccaagtataccagttttagaagttctttgggttaatgtttgttttacttttcttacatgcaaaatcatagcattagatctaaaaaagaagatagtttagccaaaagttttaagcataagtaaatattaatactaaagagaagcattgataaaacatgcattcaattttttttctcagttgagacattcagtgaaacgttttgagtattat

SEQ ID NO: 12727 - DNA, 604 bp, Macaca Fascicularis
  misc_feature (1)...(604): n = A,T,C or G
agtggggcccctcnaggaaagcttggggcnnntctgaacagannnggcaggcagggtcaactgcagggccacagcagcagcaaccagctggagccccccagcctggggcagtcccaccaggggttcccccccctggaccccatggcccctcaccgttccccaaccaacaaactccnnnnnnnnnnnnnnnnnnggcagtgccaggcagcgggcacccaggcgtggcggacccaggcacccccctgcctccagaccccacagccccgagcccaggcacggtcacccctgtgccacctccacagtgaggagccagccagacatctctccccctcaccccctctggagatcacnnnnnnnnnnnnnnnncttcccccaccactgggaccctccccagcctggagagttcatcactacgtaaggaaagctccttccgcccctccaaagccctcaccatgcctaacagaggcatgcatttttatatcagattattcaaggacttctgtttaaaagatgtttctaatgtctgggagagaggataggatgggaatgctgccctaaaggaagggctggtgaaaggtgtttatacaaggttctattaaccact

SEQ ID NO: 12728 - DNA, 767 bp, Macaca Fascicularis
tacatggaccaaatgcatcagaattttgaagaacaaatgcaaggcatgaagacccagctaattcagctgagtaccttacttcgattgttagacagtggattttgcagttacttagaatctcaggactccggatacctttatttttgcttcagatggcttttaatcagattcaaaagggaatttagttttctagatattcttcgattatgggaggtaatgtggaccgaactaccatgtaaaaatttccatcttcttctctgttgtgccattctggaatcagaaaagcagcaaataatggaaaagcattatggcttcaatgaaatacttaagcatatcaatgaattgtccatgaaaattgatgtggaagatatactatgcaaggcagaagcaatttctctacagatggtaaaatgcaaggaattgccacaaacagtctgtgagattcttgggcttcaagatagtgaagttccaacaccagattcagacgttggtgaagacgaaaatgttgtcatgactcctcatcctacatctgcgtttcaaagtaatgccttgcctacacactctgccagtggagccagagatgacagtccaacacagataccagtgtcctcagatgtctgcagattaacacctgcatgatcactattcttgcttttttgggaagagacactttgttgcaactctttttcaagtacttgaaagttgaaaatttaaaatcttggtattgatcatgctttaaggtttatgtaaagaaagtgtactgatgt

SEQ ID NO: 12729 - DNA, 709 bp, Macaca Fascicularis
  misc_feature (1)...(709): n = A,T,C or G
cggctacatgacnnngcatgagctggatgnnnnnttgaagnannnnnnnnnnnnnnnnnnnnnnnnnnnnnnnnnnnnnnnnnnnnnnnnnnnnnnnnnnnnnnnnnnnnnnnnnnnnnnnnnnnnnnnnnnnnnncgcaaggacctggagattgtgctctgcagcgagccccccatgtaaagtggggatgggggctgcttctccacctcccccaaaccctgctcctgctgccctgatgcctctacccagacccagagaccatgagcgccccacccccacccctgcagcctgcacacacctgcctgcagagcaggaaaggagaggtggaggatgggctgctggggggccatcctgagccccctgcacccacccctgcccaggcagactactctgcctcagtggatcacacacacggaaggtgatgggcatgggtggaggatccctaattctcttcgctgtgatgcatgagctccctcgctgtatgatttaggcttctatgtccaacagagtggactcttccctctcgctcccctctgccagtcccccatgccaccacccaccccaaacttccaggttccatccgccaccttgctaatggtgtagctgtcctctcagaacgcctgtgtgtggagggcacccgccctttccttgcctttttacttggcgtgctccttttctctttgggtttcttgtttaccaaagaagagt

SEQ ID NO: 12730 - DNA, 761 bp, Macaca Fascicularis
  misc_feature (1)...(761): n = A,T,C or G
gccaggacagaaagtgctatgaaaggggcttctaaactcttttgaacatgacccttagtaagaaacacaatttatataatgacccagaaaacacatcacatcttactgtcaaaattaaatgtgtgatccatcctagcattttctgttccattccttttcattctatttcatttacaaaacacactagttgagacctttcaaatggatttttatgacccactactgggtttggattcacagtttgannnnnnnnnnnnnnnnnnnnttcagataaggagaccatcctgtttaagtttattcttataagcaggtcagtcatatgagacttgatcaataaatatccaatacccagagtcctgctctcagagttccagagttcttctgtttcctgacccacttttctaccagtaaaagacatagaccaatggggaggagggaggagagatggatatttcagccctctcnnnnnnnnnnnnnnntggatgcctctgggccataaggctaagcagagtgagcttgtgttagttggtagcttttaaaaaatataataagaaaaaagtagagattctctaaactctagcctggtttcctagattgagaactacgatatttttctctgataattaatatctactctcctacaagagctcaagcctgaagatacaagactattagnnnnnnnnnnnnnnnnctcagtgtattagaaaagaggnnnnnnnnnnnnntctaaacattcttgaattgtttgaactgttttgaaa

SEQ ID NO: 12731 - DNA, 701 bp, Macaca Fascicularis
  misc_feature (1)...(701): n = A,T,C or G
gcaacccggagaagaggaagcagtatgaccagtttggcgatgacaagagccaggcggcccggcacggccatgggcacggggatttccaccgcggctttgaggccgacannncccctgaagacctcttcaacatgttctttggcggcggcttcccttctagtaacgtccatgtctacagcaacggccgcatgcgctatacctaccagcaaaggcaggaccgcagggacaaccagggtgacggcgggctaggggtgtttgtgcagctaatgcctatcctcatcctgatcctcgtgtcagctttcagccagctcatggtctccagtccaccctacagtttgagcccaagaccgtccgtgggccacatccacaggcgagtcactgaccacctgggtgtcgtctactatgtgggagacactttctccgaggagtacacaggctccagcctcaaaacagtcgagcggaatgtggaggatgattatatcgccaacctccggaacaactgctggaaggagaagcagcagaaggaaggcttgctgtaccgggcccgttactttggcgacacagatatgtaccacaaagcacagaagatgagcacccccagctgcagccgactgtcagagactatgaaatccctggagaatttttggtgacacgcactgagccaaggtgatggactgtatatttgaggaaagacatacaaa

SEQ ID NO: 12732 - DNA, 770 bp, Macaca Fascicularis
  misc_feature (1)...(770): n = A,T,C or G
agcaggcagacnnnngcaacgaccgccgcatggcgtccaagcgcgtgcaggagctnnnnnnnnnnnnnnnnnnnnnnnnnnnnntcaaggagagnnnnnnnnnnnnnnnnnnnnnnatggtgatgggtgtcctgaaccaagccttcgacgtnnnnnnnnnnnnnnnnnnnnnncagaagcgcatctactgcaacgcactggccctgcggtcccaccacttccagaaggtgggaaagaagccggagctcacgctggtctgggagcctgaggacatggagcaggagccagcacagcaggtcatcaccatcttcagcctggtggaggtagtcctgcaggcagagtccacagccctcaagtacagcgccatcctgaagcggccagacacccacggccacctgggccctgagaaggaggaggaggaggaggaggagtctgatggtgagcccgaggactcaagcaccagctgagctctgccagccgcctgccccacctgcctgtcctgccacactggctttaggaacaggacctattgacacagagggggatttttaatttggtttttaacaactcaggggtttgtttttacttttatttaatttttacagctcaacttttaaacaaactgcaggggagagggtggggctggaaggaaggctgaggcctggtcagcagtgaccccagcagagcgggccccagtcctcctgggaggccggccccccttttttctgggccctactgccctcctctgcccaggaagtggggggtttctg

SEQ ID NO: 12733 - DNA, 710 bp, Macaca Fascicularis
  misc_feature (1)...(710): n = A,T,C or G
ggagaggaaggctcagtggcagttccgtggtggggggggnnnnnnnnnnnnnnnnnnnnnnnnnnnnnnnnnnnnnnntcacgggcatggggacagggatagggagggttgcagagtggctgtcacgcccnnnnnnnnnnnnnnnnnnnnnnnnnnnnnnnnnnnnnnnnnnnnnnnnnnnnnnnnnnnnncaagctcataacctacctgagtcacacggtatgnnnnnnnnnnnnnnnnnntnnnnnnnnnnnnnnnnnnnnnnnnnnnnnnnnnnnnnnnnnnnnnnnnnnnnnnnnnnnnnnnnnnnnnnnnnnnnnnnnnnnnnnnnnnnnnnnnnnnnnnnnnnnnnnnnncaccttaagggaggagactacccctcatattgtctaatgcccaatttctgcctccaaagaaagaagtaaaaactaaaaggcagaannnnnnnnnnnnnnnngacagcccggcgccacaccctgggcctggtagttaaagatcagcccctgacctaatcggttatgctatctatagattacagacattgtatagaaatgcactgtgcaaatccctatcctgttttgttctgatctaattaccagtacatgcagcccccagtcacgtaccccnnnnnnnnnnnnnnnnnnnnnnnnnnnnnnnnacacccccttagagttgtgagcccttaaaaggacagtaattgcttacttgga

SEQ ID NO: 12734 - DNA, 716 bp, Macaca Fascicularis
  misc_feature (1)...(716): n = A,T,C or G
ccagaacagatggatatnnnnntccaggtattagcacaacttataaaagaatctttatgaagaaattaaactaggttgggcatgnnnnnnnnnnnnnnnnnnnnnnnnnnnnnnnnnnnnnnnnnnnnnnnnnnnnnnnnnnnnnnnnnnnnnnnggctgcagtaagctacgatcacaccactgcactgtggcctgcgtggcagaacaagaccctgtctcttaaaaaagagaaagaaagaaatcaaactaatcatgctgctcatggatttttccaataaatttcttgttttggcaggaagaaatgaacactggtattattagacttacagattaaattaaatttcctcaaacatgtcctatctgtagtagttcaactagacaccttttaaagtgcctctaaattcatcagatggccaaaatgtatttataatccactgaagcattttgaaaaattttcaacctgtaaaaaattacttttatcttggatttattataaagaactttatagttgctttataatttcccataaattgtctttgaaactaacattttacactgaattattttgagattttaaagaaaaattaagttcaaaatgatatataatgtgtactttttctacttttaggaaaatttaatgagagcttattgcaaaaattgttataagttgatcattataagtgactttcagtaaaagtaccataaacattatgtt

SEQ ID NO: 12735 - DNA, 749 bp, Macaca Fascicularis
  misc_feature (1)...(749): n = A,T,C or G
gccatcacnnnnnnnnnnnnnnnnnnnnnnnnnnntcgancnngcacctcccacactgnnnnnnnnnnnnnnnnnnnntgctcaccagtgtcgtgnnnnngnncagcctcctcgtcctgggggctcatcagcaacagtatcgggaagatttgtttcagatccccatgnnnnnnnnnnnnnnnnnnnnnnnnatcctcctcaacatctgcnnnnnnnnnnnnntgagctatctgacctgggtgcgcttctccatctggctgctgatgggactcgcagtgtattnnnnnnnnnnnnnnnnnnnnnnnaaggagaaccagcgggagctgccagggccaaactccacgcactacgtggnnttccccaggggcagcctggaggagacagtgcaggctgtgcagccccctagccaggcgccagcgcaggaccccggccatatgnnnnnnnnnnnnnnnnnnnacttgccctgctctcccacacctgcttgggaggccagagaggccggacaagccaggagccccttctgttgtgggcagcctgggtttgcaggcctgcgcaggctggggcgtcctcaggaccttaggactttgtccaggagctgaacttcaggtcttcaggagtgggccttggccgatgctggtgccgtggactctgcccagagccttcttgtttatgatcagctccaannnnnnnnnnnnnnnnggtggggtggacgggaaggcccacagcccaagggatccataataataatg

SEQ ID NO: 12736 - DNA, 767 bp, Macaca Fascicularis
  misc_feature (1)...(767): n = A,T,C or G
gctgagccctgcagnnncnggcgcagccgtgggagctgagggtctggcannngagaggcagcagctctcccgcaaccacgctgnctgaaggtcctctggctccagctgtggccctgcatccagatacctgcctcctccaaggcaggcaccgccacccctgcctcctccagacccctcccactgcctgnnnnnnnnnnnnnnnnntggggttcagacttctgcttcagggacacttgggttgtgtccccaggagccctgcggctgcccgcagatgaactgagtgcccgacagctgagaccggcgcccacccgccctgagcataactnnnnnnnncgggcgtggcctgcatagtgtcctggtgttgggagtgccccgtggacagagccagagggcagtggtgctccctgtcnnnnnnnnnnnnnnncccccatccaggcgggagggcagagggaggcccgcgagcctccccagggcctggcctcttcatggaaaggtcccagtaccacccatagggggtctcagctctggcatggctgccctggatgtggccaaggagggggcttcaccctgtgtccctaggagagggtggcctggaggcagagctgtgccacactgacccccggaggctgcatcctccccatggaatgggctgttgtcctgcccccacttggcccacagcaggccagacccccccatacccccgcccagagctcagcagccagcctgggtcctgccagggcttctcgaaggctcgggggaagaataga

SEQ ID NO: 12737 - DNA, 602 bp, Macaca Fascicularis
tgcacaggagcctggaagggctcaaccaagagctggaggaggtgtttgtgaaggagcaaggagaagaagagctgctgaggatccttgagatccgtgatgggcaccgggccccagctcctccccagagtggcagctgtgatcatcccctcctcctcctggagcctggcaaccttgccagctctccttccatgtccttggcatccccccagccttgtggcccggccagtcatgaggaacaccggggtgccgccgaggagctggcatccacccccaacgacaaagcctcctctccaggccacccagcctttcttgaagatggcagcccatctcctgtccttgcctttgctgcctcccctcggcctaatcatagctacgtcttcaaacgggagcccccagaaggctgtgagaaagtgcgtgtgtttgaagaagccacgtacagaggtgggtgcctgtagtcctagctactcaggaggctgaggtgggagaatcgcttgagcccaggaggcggaggttgcagtgagccaagattgcaccactgcactccagtgtgacaacagagtgagaccctgtcccaaaaaaaaagatagtaaccaatttatcgg

SEQ ID NO: 12738 - DNA, 681 bp, Macaca Fascicularis
cactacagtcataacacacgagcatatttacctagaagcgaatttctaccgatgtagccaccactttttagaggcctattaaacatgacatcatccaactgcaggtcaactcatagttgtagccttgcaacttaacagtcatcataaaataagtaatcaaattaggtacctggaaacgtagttattaccatctcatattactgtctaattaaaataaacctaacgcaaacatgtttgtccttatatattctacagtggatagaattaggaattgatggctttaaaaaaaaaaaaatctatgaagagtctgtttaactcttcatgttccatctttatctctgaagtaaactattttgaaagtcctcttttttaactgaatttgtgcttaactgtcttcactattaatactatttagaaataagctaattggatcagtggcttaaataacagctgactgtgtgtacatatgtatataatatgtatatacaatatcaggcatgcatgtggcttggaattttgtttcctccctaaaatgtggaagtgaataaaacaagttttagtcatttatacaaagtcacaaatataaagttcagtttgtcacaagatgaaattgctcacaaggtaaaattgtattgtttggcaaaatcgcaagtaacaatcctgtgagttttctattagcag

SEQ ID NO: 12739 - DNA, 736 bp, Macaca Fascicularis
  misc_feature (1)...(736): n = A,T,C or G
tcacttacgtgcgnnnnnnnnntgaggaactggatcgtgccctgcgcaaggttgtcggggagttcaaggatgcgctgcgcaactctggtggtgatgggctggggcagatgtccttggagttctaccagaagaagaagtctcgctggcctttctcagacgagtgcattccatgggaagtgtggacggtcaaagtacatgtggtagccctggccacggagcaggagcggcagatctgccgggagaaggtgggtgagaaactctgcgagaagatcatcaacatcgtggaggtgatgaatcnnnnnnnnnncttgcccaagatgcccacacagtcggaggtggataacgtgttnnnnnnnnnnnnnnnggacgtgcagccctacctctacaagatctccttccagatcactgatgccctgggcacctcggtcaccaccactannnnnnnnnnnnnnnaagacacccttgccctctgagcctcgccggatccctgggagctccttgatggctcccagaccttggcttttggggattgtactattgggcctttggctctgctgcctgcttggggttgttggtgagacttggaaggggcagcccccgnnccggtntntcgannnnnnnnnnnnncctctggtcatccttttaatctttgctgacagttcagtcctgtctgtactgtgtctccatagccctggtgtggtcccccttctttctccactgtacagaagagccacca

SEQ ID NO: 12740 - DNA, 779 bp, Macaca Fascicularis
  misc_feature (1)...(779): n = A,T,C or G
tcagttcggtcaccaagagaagcgacttcccaggagcaccagtccnntcacagaggtgctgtgagcgaggcctccttcggcccaggcggagcctcgggcagtctctcctggtcctgcatgtgtccacctcccgctaataataggtattttgtatacagatggacagatatttttttaaacaggggagttttcctcatcttggttcctccttagggggccagacaagaaaggaaaggcctacggtttctggagcaaccctgtcccccacctgtgaccagtcactctggggcaagcatctctgggaagggcacagccgnnnnnnnnnnnnnnnnnnnnnnnnngtcagcggggcattttaggatgtcagggccccagggtgacacgtgtccagcttnnnnnnnnnnnnnnnnnnctnnnccacagnnnngctggggtggagacaagctacaaagtgcccaggatgccatccaccgcggtccccttcagtacctcacacatggtccccagcttctcctaggatcccagtggcatttatcagtggccagctacctgccaggcccgggctggggcacggtctgtggccacgaggccaggccgcctcccgcacccccaccccgtggcagcgcatacctctgcttttctggaatgtgtgtgcatcaatgatgtttgtannnnnnnnnnnnnnnnnnatctattttcgttacaagggcaaatgaagaatgaatattgatctaaaaaaagaaaagaagacaaaaaaaaaaaaatacccaaagccatcc

SEQ ID NO: 12741 - DNA, 699 bp, Macaca Fascicularis
cagaaacaggaaagaaaatatcccttaaaaagcttttttgaatgtgtggaagtaattttagtataattagattttttcccatatttttgaaagatttttcagatgtgaacattaaaaataggcttccatttaaaattatataaatggtttgggatctttttgcactgagcaattttatttcaggcttccagtagtccctgtgagttatcctggacatttcgatggtttttggtaaggccaaactctaataagcaaaacagagaatactgatgtatacttaaccatatctgtaactgatacttgcaccatggaatttttcattgagttatttcctcattctttcaaaaaataagggactataaatcagttacgtagtatcttttgtttttgtagctgattccttctttcttgtatgcctctttagtaatttcagagattaactattgctttaaactgtgatactttgatttgctagattggcaaaactgatactaatatagttaagttcatctttgaaatacatctttgtgcgtagagccaaaaaaaagataaaattaataatagttcccttgttgtttgagattaatttggcatttgaaatgatcattttattttacaatcatttataatgaatcaatgttccagttagctttaaaaggtatacggtgctaattagtaaaatattgaaggcaatatttt

SEQ ID NO: 12742 - DNA, 749 bp, Macaca Fascicularis
  misc_feature (1)...(749): n = A,T,C or G
gagnnnnnnnnnnnnnnnnngcaggacagcaacaacaagttggcaggcgcccngcgagaggccaacgccgccgcagcccagtggaggcagcagctggaggctcagcgtgcagaggccgagcggctacggnnnnnnnnnnnnnnnnnnnnnncccaggcagcttcagaggtgaccccggccagcgagaaggaggggccgggccagggccagtcactgnnnnnnnnnnnnnnnnnggtgcaaaccaaggaccaggagattcagaccctgaagagtcagactggggggccccgtgaggccccggaggctgccgagcgtgaggagactcagcagaaggtgcaggacctggagacccgcaatgcggaactggaacaccagctgcgggcgacggagcgcagcctggaggaggcacgggcggagcgggagcgggcgcgggccgaggtgggccgggcnnnnnnnnnnnnnnnnnncaggctgtttgagctgagtgagctgcgtgagggccnnnnnnnnnnnnnnnnggctgcaccctgagccggggctggttttccatgaacgattccggcctgggtgtgggccaggctgcaggcggcatagttggacccatttgtcctggaaagggactgggggtcccaacttagccctgggtgggccgggccgggctgggctggggtgggccccagctggctctggctgttggcagcttgggggctgtttttgagcttctcattgtgtagaattctagatcccca

SEQ ID NO: 12743 - DNA, 1360 bp, Macaca Fascicularis
  misc_feature (1)...(1360): n = A,T,C or G
aaaagtgtnnnnnnnnnnnnnatgaagtnnntnnnnngggagtgaaggaggtagatgacttctnngagcaagagaagaacttccttattaactattacaataggatcnnnnnnnnnnnnnnnnnnnnnnacaaaatgaccagnnnnnnnnnnnnnnnnnnnnnnnnnnnnnnnnnnnnnncagcctgcnnnnnnnnnntggctttagaagagcccacagtcatcaaaaagtacctgttgaaggttgctgagctatttnnnnnnnnnnnnnnnnnnnnnnnnnnnnnnnnnnnnnnnnnnnnnnnnnngcnnnnnnnnnnnnnnnnnnnnnnnnnnnnnnnnnnnnnnnntgctaaggatctcttatacagacgcnnnnnnnnnnnnnnnnnctatgaaannnnnnnnnnnnnnnnnnnnnnnnnnnnnnnnnnnnnnnnnnnnnnnnnnnnnnnnnnnnnnnnnnnnnnnnnnnnnnnnnnnnnnnnnnnacaactttccgaatctgcaaaagaagnnnnnnnnnnnnnnnnnnggaagannnnnnnnnnnnntagaaagaatctaattgaaatgtttgaactggaaataaaacatgccagcagagctgtatgacttgttcaagaataactgatatgccttcactcagaagaaaagaaatgaatgtgaaagaaagccaagcatcacttgcacttaaatcattaccacggaaaatttattagcttcaagtttaaaattatgtgaataaatattttgatttctacaaatcttaacatttaaccatgttggtttaaaaacattattgcttgctacttggacaaactaatttttccttgtnnnnnnnnnnnnnnnnnnnnnnntctaaatactgggttctcctgtagttcgtctttagttactgagaaagggtgtaggagacatnnnnnnnnnnnnnnnaagtagaagcaatcgccgggcctatgtccctacaaacccatgatggtcaggnnnnnnnnnnnnnnnnnnnnnnnnnnnnnnnnnnnnnnnnnnnnnnnnnnnnnnnnnnnnnnnnnnnnnnnnnnnnnnnnnnntttgttttgcccgtcactnnnnnnnnnnnnatctggtattgactacagcaagagacataacagcaagaaaatctcatttatctttatatactctttgcatctcctttttttagttgagatacaaatatttgaggggagagaaatatctatgggtatatatggaaacatnnnnnnnnnnnntttgtaagannnnnnnnnnnnnattaggaagagtatgagctccctccctagtggccattggggggtgaggggggtatggtgtatgtctttgggcatttgtttttttataaa

SEQ ID NO: 12744 - DNA, 756 bp, Macaca Fascicularis
  misc_feature (1)...(756): n = A,T,C or G
atttgccaaaatcagtataatcctttgtttatctgcataaattttacagtagaatatgatcacaccttcatttttaaacctctcttctctttgacaaaccttccttaaaaaaggatccaagataatacaggtaaataccctccactcaaggaggtagcactcagtcccccaccttgtgagtcttcactaaaattagtgactcatttccaaagagtggaatatggaaagggaaacatagtaactttacaggggagaaaannnnnnnnnnnnnnnttcaccaagtgatcaacattaacgtcaccagtgataagtcatgtggatttgttctatgtaatctttctaaaaattcgtaatcccaatctaattatgagctaaaacatacagcaaattcaagctgaaggacattctacaaaatatccctggggtattttagagtattcctcaaaactgtaaaaatcatggaatataagaaaatcctgagaaacaatcacagaccacatgagactaaggagacatgggagccaaatgcaatgtgctttcttggannnnnnnnnnnnnnnnnnnnnnnnnnnnnnnnnnnnnnnnnnnnngtctgaatagaatctggagtatttttaacagtagtgttgatttcttaatcttgataaatatagcagggtaatgtaagatgataacattagagaaactgaaactgggtgagggctatctgggaattctctgtattatcttaccaaattttcagtaaatctaagaagt

SEQ ID NO: 12745 - DNA, 1468 bp, Macaca Fascicularis
  misc_feature (1)...(1468): n = A,T,C or G
annncngagannnnnnagcagatannnnnggctaaagaaatacngggaagagtcagacctcgaattagcaaaggaaacttttggtgttaataatacagtttatggaatagatgctatgaacccatcttcaagnnnnnnnnnnnnnnnnnttggaaagttactaaaagataaaattacacaatatgaaaaatcactatattatgccagttttttggaagtcttagttcgagatgtgtgtatttcattggaaattgatgacttgaaaaaaattnnnnnnnnnnnnnnnnnnnnnnnnnnnnnnnnnnnnnnnnnnnnnaancnaagcaaagccaaaaagaagaagaaaggtgtggttcctggagggggattaaaagccaccatgaaannnnnnnnnnnnnnntatggtggttatgatggaggatatgtacaagactatgaagacttcatgtgacattttatcttttcttggtatcatctttatgttgcccacaatcccttgaacatgtagcacaacttcctttcctttcagttctgccaaatgctacnnnnnnnnnnnnnnnnnattttgtgctggttatttaaccccttgacacttaggtnnnnnnnnnnnnnnnnnnnnnnnnnnnnnnnnnnnnnnnnnggttaaaattggaacctaagttgctactaaatcatagttcaaaacaaacctaataatgttgtcattgttgctatctgatttcatagcagcagtcactaaataaattggaaacaaaannnnnnnnnnnnacaaaaaaactgtgtagtatttaccagcaccattcnnnnnnnnnnnnnnnnnnncatacctcctnnnnnnnnnnnnnnnngtcaagnnnnnnnnnnnnnnnnnnnnnnnngtggtgtgcacctagtattaaaattgctttgtcttaaaattgaacatgaggatattaaaaatacattgtgaagaagactgcttatctcagagtgaagatactgcggctgaaaagcactagnnnnnnnnnnnnnnnnnnnnnnnnnnnnnnnnnnnnnnnnnnnctaaagaaggtaacctttccattattgcattacatgttgtggaatctctnnnnnnnnnnnnnnnnnnnnnnnnnnnnnnnnnnnnnnnnnnnnnnnnngtgcttcaggtgggggagggaaacatttttatttgactgatttaagtgtctgagaaacaaatgtttgttctcttannnnnnnnnnnnnnnnnnnnnnnagggttttggcatttcctttcctttataaaacatgctcagcaaactgcaccagttaactacagtttggtaaattgttatgttaacaattatgacatctgcaatgttttataaagcaactaatttaataaaatcactattgtgaggacttaaattttgtgttacctcnnnnnnnnnnnnnnnnnnnnagtatagaacacagctcttgggattacagttctctacatactaaa

SEQ ID NO: 12746 - DNA, 455 bp, Macaca Fascicularis
ggcaacagaccaggattctgtgtcaaaaaaaaaaaaaaagaacagcctttataggccacagtgatctgcacaatgtttatatgctttgacctactaactccttctcctaactaaatatttgattttaggagagtgtttaaataaattatagtatgtctgtatgatggaacgtcattttcccattaaaattatgtttacaaagataatttttattgacataaaaaaaaaaaaataactctaatgtaatttatgttgaaaaagctgaatataagactttatatacagtaatatttgagctatgttcaaaaatacataggaaaagactgataaaatgaaatatggcaaaatgttaatagttttccttggaatagggtaataggcaattttaaaacagactcctttataaaaacaaatgaaaaaagcatagactcctttatatgttttgagctccctcc

SEQ ID NO: 12747 - DNA, 850 bp, Macaca Fascicularis
  misc_feature (1)...(850): n = A,T,C or G
agctttcactactgattagtggagagtttcttattaactgtcacaannnnnnnnnnnnnnnnnnnnnnnnnnnnnnnnnctggaggtcaattacacagcagaatgttccagaattttcctaccgagttgttgctgtcgttagcagtagaacctnnnnnnnnnnnnnnnnnnnnnnnnngtctctccatgaagaattttacgatgaatgaaaagttaaagaagtttttcagtgtcttaactacaaatacannnnnnnngattgagtttatttcatcaatggaaggatataaatatccaatatatggtgtccagtggcatccagagaaagcaccttnnnnnnnnnnnnnnnnnnnnnnnnnnnnnnnnnnnnnnnnnnctgtgaaaactgcattttatttagcagagttttttgttaatgaagctcggaaaaacaaccatcattttcaatctgaatctgaagaggagaaagcactgatttatcagttcagtcctgtttatactggaaatatttcttcatttcagcaatgttatatatttgattgagagtcttcaatttgttgacagggcaaatttgaataattccatgattaaactgttagaataacttgctactcatggcaagattagaaagtcacagattcttttctataatgtgactggctttgattcttcattcagtataggactatttatataatatttgataattagtgagacataaataatcacagtgttttcatggaaaagccttcttatagctgaagattggaaaaaataaatttactgatatacaaatattttttctaattgatttgctttggatataaataccatcctctacctgccnncc

SEQ ID NO: 12748 - DNA, 722 bp, Macaca Fascicularis
  misc_feature (1)...(722): n = A,T,C or G
tgtacaaatatcactcttcaggtttagtttatagagccatggctatggattcttagctctgtaaggaagtacttctataaattcttaggtttagagatgataccatctgggtacctttgcttgaaccgtgcaaccacatctgggtctagcaggtggatcccatccagttggtttccaagggtgatccagttgggttgcacattgtgtggtcgtccaaataactcaatcttgcgagtgccgggagatagtctttcaannnnnnnnnnnnnnnnnnnnngtttatgactggtggaacgaaccaagcagtgttccttcccatggttcaaccagtgacctgtacggcctgtccgaatgatgcgttgcagttgatttgtcttcacccaaataatttcatctacccgttcatacccccagaggtttagacattctctccccaactccatggccctgcctgtgacccagaggaagagaaagccatcatcctgtagtacgggtatgttgagcctgcgcatctcatcatctgtcagggtcccatagggcagctccatgtgaatatcccagggtgggtcagccatcacaactgcaaacttgcccaatatnnnnnnnnnnnnnnnnnnnnnnnnnnnnnnnntccactgaggtgggaagagtcggtctgcactggaatcacctccgacactctgtgtannnnnnnnnnnnnnnnnnnnnnnnnnnnnnnnntg

SEQ ID NO: 12749 - DNA, 160 bp, Macaca Fascicularis
  misc_feature (1)...(160): n = A,T,C or G
ctntgggccatggatcacacctgtaaggtactaattattgcccagcctggggagatcaggagaggtctgcatcgagttagtaagttgggtttagcttttgtgtgtgcatcagtgacttatagttctgtaataacgtactgtaaatgcatgaagcactgtt

SEQ ID NO: 12750 - DNA, 425 bp, Macaca Fascicularis
ctttcagcagtgtattaaaaacttttacaaagaagaattccttctctgtagccaccgtagcatgaaacatctcttgcttgccttcttgggtctcaaacgtgaagggctttgttgctttcagtaccataactggcaaacagtctttccgaaactcttctctgatagattcctgctgggccaccctctgtttctgctcaggcttaacatgaggagagacttttggtgcagcacgttgctttgtgacatcatttctgacggctgcagatgcagcaggactcatttcaggttgacttagtggctttggttttgttaccgatttgtattccttatcaactgattaaaaaatggaagacatggccaataagcatataaacatacgagcagtgcacattttcaaatgtcaccagaaataaatactaaaacca

SEQ ID NO: 12751 - DNA, 973 bp, Macaca Fascicularis
  misc_feature (1)...(973): n = A,T,C or G
aaaaagcaaagcnnnngccagactgagggtgctttttggggggtgggagaaatgaactgacagataaacagtaactcagcgttaagtgacccgtggatcatcagtagaacccaagcatggtcctgaacagtgtattagcagagctttagtttatctcagtcctggatgggagagagggaggagtaaaactgggcaagacaaagagccctggatcgttgaattgatactttaatttctgctgttggctgttaataatttggattatttatgtttataaatgatacagatctgtttacaaggtttgtagatactttttttgttcctgttcatagatgggaagcttccttataactgatgcagagaaaaattagtccttcaaatactgctgtattttcaggaaaaaaaaaggggtgtttctattgaaactgtactaaatttttgcctacaatttaccttgttaaatattgtagataaattgctaatactaatagccaaatagataacactaatgctttgtttaaaaaaaaatgaaaaaacaaaacaaaacaaaaaaacatgagcagtggtgttctaaatgaagttatgacatctgtcctaattagtttcttaaatacatttactacttaatggttttgaagcaactgtttaatttttaaaatttttgaaaacttgctaataaccttttgttcagaatttagtagattgtttaatgcaggacatcaactacataatgaaagatgcttaaatgcttttgttattcaggnnnnnnnnnnattaaatcaaactatcaaactacaagagaaccttagtcctttttgtttttgtctaaacatgttagttcagtgatgtcttggtgaactgtgagtgaactgtattgatttttctaatctttagagaccttcacacagcatgagggctgttggcattttgaaaaaggttaataagtagaagcatacatgttttccttttnntt

SEQ ID NO: 12752 - DNA, 770 bp, Macaca Fascicularis
  misc_feature (1)...(770): n = A,T,C or G
ctggcagtcactagactggagggtgtcggtgaggccacccgtgcagtgnnnncgggagacatggaagacctcccttgtgggctggtgctcagcagcgttggatataagagccgtcctgtggacccaagcgtgccctttgactccaagcttggggtcatccccaatgtggagggccgggttatggatgtgccaggcctctactgcagcggctgggtgaagagaggacctnnnnnnnnnnnnnnnnnnnnnnnnnnnnnnnnnnnnnnnnctggccagatgttgctgcaggacctgaaggctgggctgctcccctcgggccccagnnnnnnnnnnnnnnnnnnnnnngccctgctcagcagccgaggggtccggccagtctctttctcagactgggagaagctagatgccgaggaggtggcccggggccagggcacagggaagcccagggagaagctggtggatcctcaagagatgctacgcctgctggggcactgagcccagccccagcccctgtccctggcagggaagggatgaatgctgggaggggaaggnnnnnnnnnnnctgagtgggactttgcaacctctgctgatcccagctggctgtggcttggaggcttggctgctattccagcgtctcctccctcctagggaaggtggcccttgcgcccgagnnnnnnnnnnnnnnnnnnnnnggtaaccttagggacaggtggaggtgcgggccgacctaactccttacccacctctctactgctggactgtggagggtc

SEQ ID NO: 12753 - DNA, 556 bp, Macaca Fascicularis
  misc_feature (1)...(556): n = A,T,C or G
ccaaacaactgcaggtgctgagatttntggaatctccattggagtgacacaaattctggccatgattctcaccattactctgctctgggctctgtattatgatagaagggagcctgtgacagaccaaatgatgtccttgaagaatgagaactctcagcacctgtcatgtccctcagtagaactgttgaaaccaagcctgtcaagaatctttgaacacacnnnnnnnnnnnnnnnnnntaacacacactttgagatggaggagttataaaaagaaaagtcacagaagaaaaacacaaacttgttttattagacttgtgaatttttgagtacatactatgtgtttcagaaacaggtagaataaaaatgttgtcataaaataatacctaagcatatactattctatgctttaaaatgagcagggaaaagtttcatgtcttaagtcaccacctggacaataactgnnnnnnnnnnnnnnnnnnagacaggccgggcgcggtggctcaagcctgtaatcccagcactttgggaggccgagacgggcggatcacaaggtcag

SEQ ID NO: 12754 - DNA, 742 bp, Macaca Fascicularis
  misc_feature (1)...(742): n = A,T,C or G
attngnnnnnnnnnnnnnatgactcctgnnaatatcaggcaaaacagcagaaaacacctttaataaaacccatacattccactttctgttgggttccatatacggagagtgccctgtgccaaagccacgagtcgaccgtccaagaaaagttcctatgatacaagaggagagggcaatgcctgcccagttaagannnnnnnnnnnnnnnnnnnnagaagcaacagagaaagaagtagaaagaatcttgggattgttgcagacatattttcaagaagatcctgataccccaatgtccttcnnnnnnnnnnnnnnnnnnnnnnnntctttcccccgtacagtggaaaacatctttcatgtttccttcattatacgggatggttttgcaagaataagacttgaccaagaccgactgccaataatagagcctgttagtattaatgaagaaaatgagggatttgaacataacacacaagttaggaatcaaggaattatagctttgagttnnnnnnnnnnnnnnnngattgtgaagacctttgagatttcagagccnnnnnnnnnnnnnagtcagaggcagcagaagctaagtgcttgatgctagctgaaggactcaaatggatagcgaagtccaaaatggaaagcagcatgtattgtatatattgtatgattcaacatttttaaaggcagattgtttttagtaaaatgtagcttttgatagttaataaattgtcatnnntcttgataa

SEQ ID NO: 12755 - DNA, 714 bp, Macaca Fascicularis
  misc_feature (1)...(714): n = A,T,C or G
gcaaccttccaccccctctgcggagggcctggagccggcagggggaagatgggaaggaggtggagctgggcttgcgtgggggccaggtgggaaggggatgaggcttgctcaggcggaggggcccagggcagggctctgctccaggattcctttcttcctcctcctcccgcagccggtgagggtttgggaaccaggattggggtctgcccaccaccctgcttcctgcttcgttcagccaccatccccaccttaccccaggacccctgggaggctcccaagcccagcttccctatctaggtgccttnnnnnnnnnnnnnnnncagcatgccccgctcagggtcccaagctccctcactgccaccggagacagtgtggcccccacatctccccatctacctctatccttaacctggttctgagccacggagacagggaggaaggagcgccacagtgccacctgttgggcctcataaatgcccctgcagcccatgggggaggggatgaggaagtggagccaccctgcctctgcagggcaaggcagggcctgccccagtggggcttgggaccatctcgannnnnnnnnnnnnnnnnnnnnnnnnnnnnnnnnnnnccaggctgcagcctcaggcactggcaggggctggtgcggccccactcccctcccctactcccgtttctgcccatcctgactgttgtgaccaaccccgtttaaac

SEQ ID NO: 12756 - DNA, 741 bp, Macaca Fascicularis
  misc_feature (1)...(741): n = A,T,C or G
gtaagaaagntcaatgcaggaaaaccaccaaccatccttgcacaccaggctgaacaaagcacagtgatttcttcccttcatcccccacccccaccccaattcgcatattcccatccacatcagtttaaattttgaggttctttgattgggagtaccagtgaagagggagttggatgagtagaggagccttaaatctggccacctctaagtcccaggagaagggagctgcaggcccagtcagtcaagcagaagctgcattcagtaggtctttgaagtggttgtccatctccctgttctgtgttcaagcccccagcaaaaggtatggcagtagaggatgaccaggtccaagctgcccagttcagagctacggaagcatggtccgttcaccaacgccacgtttctagagagcagtgagctgattctccaatggtgagcaggggactacatgtgaactgggacctgcaggccaatgtatccctgaggaaaagtccacaagaacaattcaagaaactagtaagaaacaatgggcagaaagctgtgggacgaaagcacagcaggcttctgggaggctggagatcctttctctcaaggccaggattattcccacctgccacagttcacatgccacaaataacatctcaccttcagtcaagaaaaacgcagaggaaaaagatggctcatttgaacttgagccccagctatgttcttcagactgtagctccacaactacccttttaccta

SEQ ID NO: 12757 - DNA, 758 bp, Macaca Fascicularis
tacagtttacaacttctccaatatgccagtcaaaccaatataaaagagaaagaaaacacatgtaagagttaaaatctgttttcaaaatcttaaactagtaacacatttgaactactaacttgaacattgtatttgagatttttctcaccaagacttcacttctaaactttaaaagctatttcctttttgagacaggatcttgttctgttgcccaggctggagtgcagcaggacactctccacttaatgcaatgtccacctcctgggctcaagccatcctgccacctcaagcctcctgagtagctgggactgcaggtacattccgccatgcccggctgattttggtagtttttgtagagatggggtcttcctatggtacccaggcttgtctcgaactcctagactcaggtgatccatctgccttggcctctcaaaagtgagtttttttctccatggcttgtgcttttttgtgtatcctcagaaatctttgtctaatcctaggtcataaagatttcctctgtgttttcttctaacagttttaggttctatatttaggtctctgatcgattattgtgttttttctatacggtatgagggatgggtcaaggttcaggattttgtgtttgtttgcatataaacatccaattgttccagaatcatttgctgaaaaggttgcctgtgtacttttataaaaaataactgatcataaatatctgggtctattatggattgtctagtcagagatgtgtaaactgagct

SEQ ID NO: 12758 - DNA, 640 bp, Macaca Fascicularis
ctgcacagactcgcacgtcgcctgctttggctataactgcgagtcctcggagcagtgggagtcagctgtccagggcctgctgaactacataaataactggcacaaacaggacgtgagcatgaggtaaggctgccttgacctggccttcaggggaagggagtaaaggaaggggggggactgggggtcctctaggtcagtgggggcaccgcaggtggggctctccctatacctgggacacctgctggatgtcacctctgcaaccacacccatgtggtggtttcatgaacaaactacgctcctcctccttctcctggcctgggacacacagagccaccccagccttcctggtatcgccggccttcaggtgtctggagcccccacacctggccaacctgaccttggaagatgctgctgagtgtctcaagcagcactgacagcagccgggcctgccccagcgcaacgtggggccaggactcagctggacagcccccgcctgtccctctggagctgggctgctgctgcctcaggacccccccctccaaccccagacagagcctgagctggccagggccgggagggcgggagggagggagcgggggtgggccgtgtacagcgtcagcacctgggcaggtctgcggag

SEQ ID NO: 12759 - DNA, 740 bp, Macaca Fascicularis
  misc_feature (1)...(740): n = A,T,C or G
tccannnnntctatgtttaaagctgtacaattgtcaggtttttatggtttaaattgtaaatgtgttttcccctttgctaattatgtttttttttttagtcttaaaatgtgaaaggcatttatgaatggtaaaggagacactatatacaaatgtatatttgtaaaagctatttttatgattagcatgtttcactgttgatcatatataaaaggtgatattgcaattctgtatttaaagcttatttccaacaatgtcatgtaagaaaatatgcatcttatgctagtttttataatttatttttaatttatagtttaaagtacttgagatcataatgataaaatacttgaaaaagttatatttctgccctgtataagcaccctttttattaataaagaatgcagatatttcagatgtgatataatagttaaagaactgttggtttgatctgtgattaagttgagcatgctccgctctacagaactaaaatgatccaattattacttcagtctgggtatgagattcnnnnnnnnnnnnnnnnnnnnnnnnnnnnnnnnnnnnnnnnnnnnnnnnnnnagactgtcttgcccttggatccaaaagtttaaattagtgcatactcatgtcatttcacctcctgttcctaggaactctccattcccaagcattgcaagtgttttccagataatcttagctgttgtcttgtgctgtggaaatggaagaaaccatcttcacagactgta

SEQ ID NO: 12760 - DNA, 687 bp, Macaca Fascicularis
  misc_feature (1)...(687): n = A,T,C or G
aagagtacttgggaatcagttgtgtccannctgaggtctccagtgggagggtggtaactgctgtccctgggttcaggctgtgcttctggaagcgtcgaaatgggatgcctgagccttgaggaaaagcagcaaggttagcattaaagtcgagaggggcagctcaggatgctaccagggagcacatcatttctggtgtctcgtctaaaggtaaaaccttccctatattcgccagccagatgtcccaaatccctttatctagattgctttttgcaccaaagctgtggacagaaaagcctccttaagtgagctgagggcaaaggaaatcgaatcagatgacttgtgtgtgcgtaatcgggcttgagccagaggctggggagctgagtcccagccacacctcactggcccttttgcttttcacgcccaggaatcagttggcccgggaagtgtgctgggcagctgttcttactccagctcaacccattgggtgttggctgttttggttttagttgttgctttgtattttgttgttttaattaataggctttatttgtaagagcgattttatgtttacagaaaaattaggcacaaagggattcccatatcccccctcttctttgcatatttcccctctaattagcatgttgcattagtgtggcactttgttataaatgatgaacttgtattcat

SEQ ID NO: 12761 - DNA, 749 bp, Macaca Fascicularis
  misc_feature (1)...(749): n = A,T,C or G
gatgtgcaggtgttcgggtatagnnnggaggtcaacgccgacnnnntgcgtagcgcagtgcagcaggtcaaccagtcctacacacagggcggccagttctannnnnnnnnnnnnnnnnngctcctcttgttggatattcgggaccgaattaatcgcctggcccctcctgtggccccgnnnnnnnnnnnnnnnnnnnngttctcctgtatgctgaaananngcctgaaactgaccaacagcgagatcatcagggtgaaccacgccttggacctgtacaacacggannnnnnnnnnnnnnnnnnnnnnnnnnnnnnnnnnnnctgctaacccgggactccnnnnnnnnnactttccctgttgttgtgcacacacaacagaacaaaatgaagcaaaacaaaacaaaaaaacccacaaaaatttgtaaaatgtaattaatattcaaagaaaaggaggaaaatcttcatttgttggaaatgaaaacgttctagcaactgtatannnnnnnngggcatgtttgttatttctatactctgtcatgaagaagggtctcagccttttgtggagcattgagggagttgcttcttaggcctcaggtgctgtattgaggggggagaagggagaaagcatatgcaatgaattgtaaagatctnnnnnnnnnnnnnnnnaagattaaacactaaaaagaaagagagatatatgtaatgtacaactgacactgccatttttcctttttggaggaaatggacata

SEQ ID NO: 12762 - DNA, 738 bp, Macaca Fascicularis
  misc_feature (1)...(738): n = A,T,C or G
gtggcacccactttgtctcctcaggtagtgatgaattagttgctctgtcacaaaaggagggaagtagcatccaattaagttgcttaagagaggaaatgtacatcttgtataacttagggagtgaagaaaatgtaggcacgaaagtgaaaagtgaggcagctagttcttcctattccattcttgaccaacctgccctttcttaatatgactagtggtcttgatgctagagtcaacttactctgttgctggctttagcagagaataggaggaaccatatgaaaagatcagcctttctgacttcaatccnnnnnnnnnnnnnnnnnnnntactccaaactgtttctgatgggttctgtgagaaaaggattnnnnnnnnnnnnnnnnnnnnnnatactacacactccctttctcctnnnnnnnnnnnnnnnnnttagagggtctgaggactctgagaattcgtgttacagtaaacaaaactaacaatctcccatttcctacactacttnnnnnnnnnnnnnnnnnnnnnnnnnnngtgaaaacttnnnnnnnnttgggagacatttctgtagaatgtcagtttggagaaatgatgagctacgccttgatgaaagannnnnnnnnnnnnnnnnnnnnnnnnccattatggtttttcctttctctctctcaagccttattcttcaactaaaagatgaggattaagagcaagaagtgggggggatgtgaaaataattttatgagg

SEQ ID NO: 12763 - DNA, 770 bp, Macaca Fascicularis
  misc_feature (1)...(770): n = A,T,C or G
acnnnnnncgaggagcatgtggaaggtcnnnngccatcacctgtgaccaacggaaccagccctgtccagctcaatggtggnnctgcgtgctcgtcccgnngtgaccttcctggttctgacaaggacactgaggatggcagtgcctggaagcgagaccccttccaggagagcggcctccacctgagccccacggcggccgaggccaaggagaaggctcgagccacgcgagtcaacaagcgcgcgccgcagatggactggaacaggaagcgnnnnnnnnnnnnnnncttctgagccccttcctgcctgtctcggggccctgggacccctcctgcacggaccttgggcctcagcctgccccgagctccccaagcctcagtggactggagggtggtcctgccactgcccagaaatcagccccagcccccatgagcccccgtcctgcccttgcctgccaggtactggnnnnnnnnnnnnnnnnnnngtggggagagagacccagagatgtgagagagaggcagagacagagacacagagagagagagcgagcgagagagagagagagagagcgagcgagcgagagagagagaacggcggcagcacggggtgagggcctttgctgctctgccggggcctgctgactgaaaggaatttgtgtttttgcttttttccaaaaagatctccagctccacacatgtttccacttaataccagagcccccctaccccccccccgacttcccctcccccttgggacgcgctctaaataatgca

SEQ ID NO: 12764 - DNA, 698 bp, Macaca Fascicularis
  misc_feature (1)...(698): n = A,T,C or G
tccctccaggcaaatgcccttcacaccgacgatcattgtgcccacttnnnctgggctggagagttggtttcagtttcctacaggagatacctttctttcccttactccctatctaacatttgtgctctgcaggcagctttgcccattctctaagcctggcttagaaggccctgggaatgtcctgtagagagagacctagataagtcatgcaagtgagagagacatctgaggaaaatggaagacctaaggcagacaggaaggaagcacaaaagacaagcattgggtcagacccataaaccacctcccaaatgctgtcnnnnnnnnnnnnnnnnnnnnnnnnnnnnnnnnnnnnnnnnnnnnnnnnnnnnnnnnnnnnnnnnnnnnnggaatctaagtgggagaccatattaatttgggtccgattaattggagattactaactgtggacaaaagtttatctttgcacaatcaaaaatggcatttgtttagtaaattaagagtataaacaatattgctagaggtggcatgtttagtctaccgaaaacaatacttttcaggcacttaagaaatatccttttagaagcagcaagtgcatgggctaattatcatcaatctttatgtttttgttaaagaaacatctacaggatctttatcagtgaccttttgtaagacattagtttgaggtactacctatgtac

SEQ ID NO: 12765 - DNA, 755 bp, Macaca Fascicularis
  misc_feature (1)...(755): n = A,T,C or G
ttgatnncatganntnnnnnnatcagtacnnaaacannnnnngatgagccctggaggcaggcatgattgtcaccgatgagcctgggtattatgaagatggggcttttggaattcgcattgagaatgttgttcttgtggttcctgtgaagaccaagtataattttaataaccggggaagcctgacctttgaacctctaactttggttccaattcagaccaaaatgatagatgtggattctcttacagacaaagagtgcgactggctcaacaattaccacctgacctgcagggacgtgattgggaaggaattgcagaaacagggccgccaggaagctctcgagtggcttatcagagagacgcaacccatctccaaacagcattaatacctccctggttttgtttttacaaaatggtctggggaaaggaagaaacgtggcagatccctgacatctttcccctttcctctccttcttccctacctcccctttttactttagactttaagaagaatagaaaatcttcttatcctctttgatattttattgcaaacactgagtcttttatgattttttaattgttgagaacgagccaagaataaaannnnnnnnnnnnnnngagggcccctccaaagtcgaacacttgatgaaagggagttgcccnnnnnnnnctggccagtgatggggaaacaatgagtgctccnnnnnnnnnnnnnnncnnngtnnnnnnnnnnnnnnnnnnnnnncttaatgctcatg

SEQ ID NO: 12766 - DNA, 738 bp, Macaca Fascicularis
  misc_feature (1)...(738): n = A,T,C or G
acagcgacnnnnnnnnnnnnnnnnnnntnnnnnnnnnnnnnnnngaagaggtgtttcagtccctctccaagatcctggatgtggccagtttggaggtgctgaacgaggttaaccgaaggnnnnnnnnnnnnnnnnnnnnnnnggccgactccannnngcannnngacgacaccatcctgacatgagaggcctgggcccacagcagcatttgccgctccacatctttgctcaatgttttcatttttgaaaatacatttgttccgatggggagcttggaagatggcgttcccagaaagtattttaatatatcaatagaccacagccaaagccttaaatcaaacccacacacannntgaaaattgcctcctccatctctcaccttttcctgtggagaagagaaggaaaagcacacgcatgcgcctcagcaannnnnnnnnnnnnnnntgtttgtccagtttagcatggctaggtctggaactataatagcagggtcagactgcgggttcctcttctcctgtgcttgagctctggtttgagagctggcgctaccaaccttttgcctagatcctgagtggggcacagacggtggacgtctgcccagtgtggtgtgtctggcttggcttttcaatattgtgaggtctgattggatctgacccctgnnnnnnnnnnnnnnnnnnnnnnnnnnncagttcccaagtctggggaggggtataggttgaaaggctgttgaaagaggaa

SEQ ID NO: 12767 - DNA, 768 bp, Macaca Fascicularis
  misc_feature (1)...(768): n = A,T,C or G
gatggtgggcagctgtcgcactgccatgagccctgggnagatggagaaacacctgctgctcctctccgagctcctgccagactggctcagccttcaccacattcgcaccgacacctacgtcaagctggacaaggccgcggacctggccagcatcactgcacgcctggcccgccaggcccgcgctgaagaggggctgtgagcctgggggccactggcctggggccaccagcattttcttttatgaacatgatgcactttacttttcctttctggagtgcccctgagggccagaggcagagctgggctgcaggctgcacagcccaagggtctctggctgcaggtggtggcccctgcatggggctcacctggtggattcacattaaacctgtttctgtgggcacctctgtccttgctgctggtggggaagggaagccagatcccagcaccccctagggggccatcagggcaggggaatgtggctgagggtgaagggggcttggcaacatggggttgggtagtgtgggtggcaggaggccatcccctctaatcttggaacctctgaacatgggatgttccacagcaaagggtgacttttgtcattaagaacttcaagattgctgcaggggccttcacaagagggccagagccagccacctttgaagacgcggccctgccccgacacaggcagcctggagaagctgggcaggacatccctggagcctccagaagggactggcccgcccacacaccgcttcagtactataataa

SEQ ID NO: 12768 - DNA, 847 bp, Macaca Fascicularis
  misc_feature (1)...(847): n = A,T,C or G
gagcgattccgaagcctgaggacgccattttacagaggttctgactgctgcctgcttacttttagtgtcgatgattcacaaagcttccagaacttaagtaactggaagaaagaattcatatattatgcagatgtgaaagagcctgacagctttccttttgtgattctgggtaacaagattgacataagcgaacggcaggtgtctacagaagaagcccaagcttggtgcagggannnnnnnnnnnnnnnnnnnnnnnnnnnnnnnnnnnnnnnnnnnnnnnntgtggcagcagcctttgaggaagccgttcgaagagttctnnnnnnnnnnnnnnnnnnnnnnnnnnnnnntcagacagacacagtcaatcttcaccgaaagcccaagcctagctcatcttgctgttgattgttagattgttggtgcattctaaccaactcacacatatacacaaaatcaacatggggatggagaagagaattagcatttgcagcagtgtatcatctactaataaaattaaactaatgtatgttgctgcttcgttcgttggtgggagaagggacacatccaatcatggaggaatatatttactcaataatggcaccttacatttataaattgtaacggttgtctaataacgtttctttaaatatgtaagttgcagagctaataaatgagatgannnnnnnnnnnattataattaaaataagaaacttaactattctagaagttatacttggattttttcctgggaaaatggagaactactttttatatgtgtatgtttttatgcaattagcattgtattctnnntcagggaaataatttcctaaagcaataatgttag

SEQ ID NO: 12769 - DNA, 760 bp, Macaca Fascicularis
gatcaatgggatgatataggcccgagtccccgggcatctttagagaggtgttcactgaagacaccgtctccatggcatcttcgtcttcactcttaggcactttgggggtttgagggtggggtaagggttttcttaggggatggtagacctttattgggtaccaaggcatagcatccaagtggcataattcaagggctggcacttcaaggtgacagaggaccagcccttaagggagagcttgcggccacagccatctgtggtaactgacatgattagcagaagacaggaacatttaggggcaagcaggcactgtgtggtcatgatggaatttcatatccacagatagggagttgttgtataaagactttgatgcttgcaaactagagatgtgcaattgatttcttttcttcctgggttttgtaacacccctgtttcaacgactgtcctccacacaagggaaggacagaaaggagtggccattctttttttcttggcctccttcccagggccttaagctttggacccaaggaaaactgcatggagacacattttggttgagaatggaaaccacaacttttaaccaaacaattatttaaagcaatgatgatgaaccactgtttttagacaccttcatttcgaggtgaggagctccacagattgtttctatacaaatataaatcttaaaaaaaaagttgttcaactattttattatcctagattatatcaaagtatttgtcgtgtgtagaaaaaaaaaaccagc

SEQ ID NO: 12770 - DNA, 763 bp, Macaca Fascicularis
  misc_feature (1)...(763): n = A,T,C or G
tacaacaccggcagacatnnnnccttcctgcctgcaccccgacctgtggtcaatgtgtctgggggtcccctcctttatagccaccgactcagtgaactgcggctgctgtttggagctcgcgacggagccggctccgaacatcagannnnnnnnnnnnnnntctctgctgaggtgcagctcattcacttcaaccaggaactctacgggaatttcagcgctgcctcccgaagccccaatggcctggccattctcagcctctttgtcaacgtggctggtagttctaacccattcctcagtcgtctccttaaccgcgacaccatcacccgcatctcctacaagaatgacgcctactttcttcaagacctgagcctggagctcctgttcccagagtccttcggctttatcacctatcagggctctctcagcaccccgccctgctccgagactgtcacctggatcctcatcgaccgggccctcaatatcacctccctccagatgcactccctgagactcctgagccagaatcctccatcccagatattccagagcctcagcggtaatggccggcccctgcagcctttggcccacagggcactgaggggcaacagggacccccggcaccccgagaggcgctgccgaggccccaactaccgcctgcatgtggatggtgccccccatggtcgctgagactccccttcgagtattgcacccgcccgtcctaagcctccccacaaggctaggggagttactcctaaaacaaagc

SEQ ID NO: 12771 - DNA, 1092 bp, Macaca Fascicularis
  misc_feature (1)...(1092): n = A,T,C or G
ccaatcttttggcttccctgtgccacattagaagaacaactgtctcaggccacacacaaaatacactaacactaaggacannnnnnnnnnnnnnnnnaaaatagaggacctaaatgttttaagaaagtgtagggattgtgttgggatgcattccaagccatcctgagcatgcggactgcaggctgtgggttagacaagcttggtttaaagcactgactgtatgttatgtggtttaaatatcatctcactagtatttttattgacagagcatcttgaaaaataaggaaaagcttacacggacttacaatctcatcaaaatacaattttatagtctgaattaatgatttacattagagttgggaaaccccgtgttggaggattatggtgtcagaatgatgatttctagtagcctgaggtgatgatcgtctgggaactgtgtccgcagcactaagatgaacattttgtattctagccattctccttccctagcgttctgttcctctcccttccctggcgtgccgttccttcttccctagcgtgcagttccggaccactcccatggacagtaccggtgttcctcacattcttgagcataccatcctttgtgggtctcggaaatacccatgcagagaccctnnnnnnnnnnnnnnnnnnnnnnnnnnnnnnnnnnnnnnnnnnnnnnnnnnnnnnnnnnnnnnnnnnnnnnnnnnnaaaccgtgtttgggtttnnnnnnnnnnnnnnnnngaattcagttagtttctgagaagggatgagaggagtgggcaattaatgttctagaaaaatttttatctctctctacttgaaggacgtcagaaatttcatccttcaggaaagccacatggtagcgaggttataaaaactagtgtttgaataaaacgtacgtgaacttttcccagaaaggttcnnnacaattttctcttgggatatcgctacaatgccaggcctccannnttaccactaacgttgatgtttgacttttagtaagactgacactagtggatagggtgacaatgaacagtgcactctgtgannnnntgacatcgangnnnaagttaaatccatgctgttac

SEQ ID NO: 12772 - DNA, 755 bp, Macaca Fascicularis
  misc_feature (1)...(755): n = A,T,C or G
ctttgcacccaggtgattgaaatctctgaatatcgaacccaactctatgnnnnctgcaaatcgaatgatggccattgcacccaatgttacagtcatggttggggaattagttggannnnnnnnnnttgctcatgcaggttctcttctgaatttggccaagcatgcagcttctaccgttcagnnnnnnnnnnnngaaaaggcactcttcagagccctcaaatctagacgggatacccctaagtacggtctcatttatcatgcttcactcgtaggccagacaagtccnnnnnnnnnnnnnnnnnnnnnnnnnnnnnnnnnnnnnnnnnnnnnnnnnnnnnnnnnnnnnnnnnnnnnnnnnnnnnnnnnnnnnnnnnnnnnnnnnnnnnnnnnnnnnnnnnaattagaggccaggttgagaactttggaagatagagggataagaaaaataagtggaacaggaaaggcattagcaaaaacagaaaaatatgaacacaaaagtgaagtgaagacgtacgatccttctggtgactccacacttccaacctgttctaaaaaacgcaaaatagaacaggtagataaagaggatgaaattactgaaaagaaagcaaaaaaagccaagattaaagttaaagttgaagaagaggaagaagaagaaaaagtggcagaagaagaagaaacatctgtgaagaagaagaagaaaaagggtaaaaagaaacacattaaggaagaaccactttctgaggaagaaccatgta

SEQ ID NO: 12773 - DNA, 715 bp, Macaca Fascicularis
  misc_feature (1)...(715): n = A,T,C or G
tagagagtgtcacatgacacnnnnnncntccaaggataaaacagannnnnnnnnnnnnnnnnnnnnnnnnnnnnnnnnnnnnnnnnnnnnnnnnnnggactaagaccaggtgccttccgcaatctcatggtctttcaggtccctggttacttttctcaaagaccnnnnnnnnnnnnnnnnnnnnnnnnnnnnnnnnnnnnnnnnnnnnctgtgagtccattctagaggtcactgaaaggccctataaacaggacttggatatgggacctggccccgacattattactggccataaaggcagacttaatccatacagaaaccagtgtgtccatgtgctctgcacaaaaacagacctgttgtccaccaatccactgacaagagggtttccatgagaaccgaagtggactgaagctatagtttttagctggtgtgggccagaggcagggtcagattgggaagaggcaaagctgaggaagcagaagttggagtctcatgttgctccctcttcccatgtggtgctctgggttcctgtggattgtgaaggcgatctcaagagtgtttccctccaaacctgnnnnnnnnnnnnnnnnnnnnnnnnnnnnnnnnngagggtgtagttgtatttattgtgttgtaatatttttaacatcctgtgacttcatgctagaagttttctattgtttatagaaactttttgtagaaacattaactccaa

SEQ ID NO: 12774 - DNA, 759 bp, Macaca Fascicularis
  misc_feature (1)...(759): n = A,T,C or G
gacctgccagtgcccaagcttgctttccacattnncctgggatacagagacctagacctgtctttggggccattagcatctggggttagcaagaagagtggggagcatggaactcctgggctctcgtggggacgttcagggtatcggggtgggaggtctgtctgcactggcctccccgatctaaccaggccctgatgtaggggccctctgctcaggctgcccccttgggctcttgcagctcttgttcaggtagtggcccttctggtttgttctctgtggggcagttggtgggggctgggggaagaggctggcagaagttaccctgggtggggaagggggaggaggggactcttagagccagcaggccccactgtattatgtatatatttttcaaggtctgtttttctaactgaaaagctaagggcttgattcctagccccgttctgtggggcactgggtgatactcagtttcttgttcctggtcatggagaggggcctggggcactggttccagctgtgtctggtggtccggctgcggggaaggggcaaaaaggcaggcaggccccttcactgcagtgccgagcctcaaatccactctggagcatgaggctggatgcagtggtggtgaggctgcacctgctccatcccgaggcagccaggctttgttttgcgctcttctgtcacaaatgctgcactattggttcttaagttttttatctccagatcctaatttatgcctatgcaaaaaataaatgagcc

SEQ ID NO: 12775 - DNA, 1291 bp, Macaca Fascicularis
  misc_feature (1)...(1291): n = A,T,C or G
ttcattcatcttggcaggacttattgnnngtggannnngcatttacaagtacttcatgcccaagagcaccatttaccgtggagagatgtgcttctttgattctgaggatcctgcaaattcccttcgtggagnnnnnnnnnnnnnnnnnnnnnnnactgaggaggctgacattcgtgaggatgacaacattgcaatcattgatgtgcctgtccccagtttctctgatagtgaccctgcagcaattattcatgactttgaaaagggaatgactgcttacctggacttgttgctggggaactgctatctgatgcccctcaatacctctatnnnnnnnnnnnnnnnnnnnnnnnnnnagctctnnnnnnnnnnnnnnnnnnnnnnnnnnnnnnnnnnaacttatgtggttcgtgaagacctagttgctgtggaggaaattcgtgatgttagtaaccttnnnnnnnnnnnntaccaactttgcaacaacagaaagtccttccgccttcgtcgcagagacctnnnnnnnnnnnnnnnnnnnngtgccattgataaatgctggaagattagacacttccccaacgaatttattgttgagaccaagatctgtcaagagtaagaggcaacagatagagtatccttggtaataagaagtcagagatttacaatatgactttaacattaaagtttatgggatactcaagatatttactcatgcatttactctattgcttacgcttttagtaaaaggaaaaaaaaaaaaaaaaggaactactaaccactgcaagctcttgtcaaattttagtttaattggcattgcttgctgtttgaaactgaaattatatgattttcattttttctttgaatttatagggtttagatttctgaaagcagcatgaatatgtcacctaacatcctgacaataaattccatccgttgtttttttgtttgtttgtttttttcttttcctttaagtaagctctttattcatcttatggtggagcaattttaaaatttgaaatatttaaaattgtttttgaactttttgtgtaaaatatatcagatctcttaacattgttggtttttttgtttttcattttgtacaactttcttgaatttagaaattacatttttgcagttctgttaggtgctctgtaattaacctgacttatatgtgaacaattttcatgagacagtcatttttaactaatgcagtgattctttctcactaatatgtgtattgtggaatgcacaaaattgcgtaggtgctgaatgctgtaaggagtttaggttgtat

SEQ ID NO: 12776 - DNA, 768 bp, Macaca Fascicularis
  misc_feature (1)...(768): n = A,T,C or G
ttagtacagatgcnngtaactccatggtgcccaacttgnntttcaaagaaccattttaaaatttatttnnnnnnctctagctagcattggatttggtgtctagtacaggttctgggatttcaagaagatgctttaaatatttccatcactccagctaatctaagacccgtttctccggagtaggagttcaatctgaatattcttggagaaagatgctgagtggcattgcagccttcctacttgggctaatcttccttctgatgggaatcatcatccagcttagggctcagaaaggatatgtgaggacacagatgtctggtgatgaggtctcaagagctgttctgctccctcagccatgctgaggtcctcactgaagcttctctccctggagcctgaagtagtgatgagtagtctgggccatgggcgaggtaaaggacatccatgaggtcaatgttctgggaataaccctcttccctgatccttggaggagcctaaactgattctggagctctgtgttctgagatcatgcatctcccacccatctgcccttctcccttctacgtgtatatcattaaccccattgccaaggacactgtccagaaactcccctaagaccttactccttccagccccaaatcatttacttttctgtggtccagccgtattcctataagtcatgatctccaaagctctctgtcttccaactgcagtctccacagtcttcagaagacaaatgctcaggtagtcactgtttccttttcactgttt

SEQ ID NO: 12777 - DNA, 857 bp, Macaca Fascicularis
  misc_feature (1)...(857): n = A,T,C or G
gannnnnnnnnnnnnnnnnnnnnnnnnnnnnnnnnnnnnnnnnnnnnnnnnnnnnnnnnnnnnnnnnnnnnnnnnnnnnnnnnnnnnnnnnnnnnnnnnnnnnnnnnnnaaaagccccacaagagaaaatttatgaagattggggtgagccctcctgctaagcagctgccagggggcagaatccacttctctggttatgataatgaccgaccaggcaatttggtgtatcgcttctgcgacgtcaaagatgagacctatgacctgctctaccagcaatgtgatgcccagccaggggccagcgggtctggggtctatgtgaggatgtggaagagacagcagcagaagtgggagcgaaaaattattggcattttttcagggcaccagtgggtggacatgaatggttccccacaggattttaacgtggctgttagaatcactccactcaaatatgcccagatttgctattggattaaaggaaactacctggattgtagggaggggtgacacagtgttccttgctggcaacagttaagagtcttcatggacttattttaggagaggccaaattgttttttgtcattggcgtgcacacgtgtgtgtgtgtgtgtgtgtgtgtgtgtgtgtgtgtgtgtaatatgtcgtataatcttttacctaatttcttaaaattgcaagatgactggctttattatttgaaaacnnngtttgtgtatcataccatatatcatttaagcagtttgaaggcatacttttgcatagaaataaaaaaatactgatgtttggggcaatgaggaatatttgacaattaagttaatccttcacatttttgaaaactttgatttttatttcatctgaac

SEQ ID NO: 12778 - DNA, 552 bp, Macaca Fascicularis
  misc_feature (1)...(552): n = A,T,C or G
gggagtcgccatccagctgnnnnacagacgacgaactacaatgcacggtgcggtttgcaggaggcnactnnnnnnnnnnnnnnnncacacatcnnnnnnnnncaaggcttcctggatacctcacccccaccccacccctaattcttacccagatcatggggttggggcagaaacctggagagagggacatagccccttaccacagctagagaatctggtggtatccaaagtgtctgtgcaggcgtgggcaggtgggcaggcaccaaggccctctggacctttcatagcagcagaagaggcagagcccggggcagggcagggccaggagtgctttggggacatagaggggactgccccccgcccccaccatggtgctattctggggccggggcagtcttttcctggcttgcctctggccagctcccagcctccagtagagtgagacttcagatgttctgatgccttctggatgtcatctctgcctgccccaggaatggaagatgtgaggacttctaatttaaatgtggaactcggagggattttgtaaactgg

SEQ ID NO: 12779 - DNA, 739 bp, Macaca Fascicularis
  misc_feature (1)...(739): n = A,T,C or G
cgggccccggcgcagaagcaggagccgctctcactcaggggaccgctacaggcggggtggccggggcctcagnnnnnnnnnnnnnnnnnnnnnnnnnnnnnnnnnnnncctcagtccgtcccgcagtcgcagcctgactcacagccgcagccacagccccagccccagccagagccgtagccgcagccgcagccgcagccgcagccagagcccctcgccatcacccgcaagagagaagctgaccaggccggccgcgtcccctgctgtgggcgagaagctgaaaaagaccgaacctgccgctggtaaagagacaggagctgccaaagtcacccaagctgacgcctcaggagaagctgaaactgaggatgcagaaggcgctgaacaggcagttcaaggcggataagaaggcggcacaggagaagatgatccagcaggagcatgagcggcaggagcgggaagacgagcttcgagccatggcccgcaagatccggatgaaggagcgggaacgccgagagaaggagagagaagagtgggagcgccagtacagccggcagagtcgctcaccctccccccgatacagtcgagaatacagctcttctcgaaggcgctcaaggtcccgatcccgaagcccccattaccgacattaggcagaagagggaggggtggggaggacaagggggtggggtaaggggcttaagctgtgatgctgctggttttatctctaggaaaaaaaagtcaa

SEQ ID NO: 12780 - DNA, 1078 bp, Macaca Fascicularis
  misc_feature (1)...(1078): n = A,T,C or G
acatatacatggattttccannnntcnnnagagagagcatcacaatataatattaggggtgttacgtatagactcactcaaggggtagtaaaaagaatcattcctgcagtagcttccacaaatgccgtcattgcagctgtgtgtgccactgaggtttttaaaatagccacaagtgcatacattcccttgaataattacttagtgttcaatgatgtagatgggctgtatacatacacatttgaagcagaaagaaaggaaaactgcccagcttgtagccagcttcctcaaaatattcagttttctccatcagctaaactacaggaggttttggattatctaaccaatagtgcttctttgcaaatgaaatctccagccattacagccactctagagggaaaaaatagaacactttacttacagtcggtaacctctattgaagaacgaacaaggccaaatctctccaaaacattgaaagaattggggctcgttgatggacaagaactggcggttgctgatgtcaccaccccacagactgtactattcaaacttcattttacttcttaaggaaaatctccacacaatagaaaacttatggaaataatatactttgtggatgctaagaagtttaattgatgttatttttagcaatagtgttgctgcgatttgtctttttttatataatgaaccactcttttttaactttgtaacttgcccttgaagacagaattttggtgttggtgcttgtaagcattttcgttaataatatgagaaatgatacctggagaaagagattatgagcaaatgtattgcttcttttagaggaggaggcatacaccctcttttgtgtgaattttgttattatggtcaaagaatgcattcctagttttcatttgagcacccaaatacacaaaagatttccctttaaagaaaataaagaattaagttttaaataacattaaattttacaatccgacatctggagtatattgaacataggctatttcttgatttaatactcatttaattgtggccatccaaatgaatattgcagaatttatcttgtccataataatttgta

SEQ ID NO: 12781 - DNA, 766 bp, Macaca Fascicularis
  misc_feature (1)...(766): n = A,T,C or G
cagagcaggaggagntgcggacaaagcgggcatacagcannanngccanaaactcacggaaaaagcggcannnnntcaagtcannctgccgagaagaggcagagatgccccgcggaagccacagggaagccacagagagacggagccgnnnnnnnnnnnnnnnnnnnnnnnnnnnntggggctggcgggaagcggccccggccggagagtcccccagcacaggaagaggaggcccctgtatcaccccacaagaagccagccccccagaggcgaaggagggccaagaaggcacggctgctgggccccactgtgatgcttggtgnnnnnnnnnnnngccgccagagactgcaggcctttggcctcaacccnnnnnnnnnnnnnnnnnnnnnnnnnnnnnnnnnnnnnnnnnnnnnnnnnnnnnnnnnnnnnnnnnnnnnnnnnnnnnnngcaggcaggggcctcaggctcctcccctcaaatcaagcnnnnnnnnnnnnnnnnnnnnnnnngtaccatctgctgcagagaacctctcatctgtggccnnnnnnnnnnnnnnnnnnnnnnntttaggaggctgaggtgaaaggattacttgagcccaggaactggagaccagcctgggcaacacagtgagactccatctctacaaaatgtggnnnnnnnnnnnnnnnnnnnnnnntattcaggaggctggggaaggnnnnnnnnnnnnnnnnnnnnnnnnnnnnnnnnnnnnnnnnnnnnnnnnnnnnnngcactccag

SEQ ID NO: 12782 - DNA, 1123 bp, Macaca Fascicularis
  misc_feature (1)...(1123): n = A,T,C or G
tttcgnnnnnnnnnnnnnnntnntcctcaccctggccttcgccttcctggtcaccctgcctcggaggctgctggtggaccncttctcagnccggttctgggcctggctggaacgagagnnnnnnnnnnnnnnnnnnnnnnnnnnnnnnnnnnnnnnnnnnnnnnnnnnnnnnnnnnnnnnnnnnnnnnactgccccctgctgcccctgctgaatagcgtcttcctcttcctcaccttctacatcaagaagtacaccctnnnnnnnnnnnnnnnnnnnnnnnngcggcccttccgcgcctccagctccaccttcttcttccagctggtgctcctcctgggcctgcnnnnnnnnnnnnnnnnnnnnnnnnnnnnngtcagcagcatccactcctcctgggactgcggcctcttcaccaactattcagccccctggcaagtggtcccggagctggtggcccttgggctcccgcccattggccagcgtgccctccactacctgggctcccacgccttcagcttccccctcctcatcatgctcagcctcgtcctgacggtgtgcatctcccagacccaggccaatgccagggccatccacaggctccggaagcagctggtgtggcaggttcaggagnnnnnnnnnnnnnnnnnnnnnnnnnnnnnnnnnnnnnnnnnnnnnnnnnnnnnnnnctctccaggccccaagtcccctgcctcccaagcttcgcgccctcggtccttctgccccggattcccgtgccctggctctccgggcgcccgggccccgccgccgggcccctccgttgtggatgccgcgggactgcgttccacttgccctggaccgcacggtaccccggcctccgcccgtagattccgcttccccagcgtcgcagagctgtaaccccgatccctgcctccccaaagcctccctggggcccctccaggcctccttactccatcttccaggcccctggcaaccaccgccctcctcagtggctccagggcctccctcaggggtctccaaagacggacacacaaagcaggaagaacatacgggaattttctctttatattttgatctcatccctttaaaatgtctatttttattacgttttttataatatac

SEQ ID NO: 12783 - DNA, 684 bp, Macaca Fascicularis
  misc_feature (1)...(684): n = A,T,C or G
gtgtatactcagagggagactgggcagaggccaggctggagggggcgtccagagtgtcctgagaaccgcctggagagtggggagtaatgcagaagcagcagagctnnnnnnnnnnnnnnnnnnnnnnnnctgcccacaggacagctttgaaatggcagcaaagggttaggaaggaggccatccccacctgtcctcacctgttcttgttcctccctgctgctttgcagaaagggtttgatgtgttcaatgcactggatctcatggannnnnnnnnnnnnnnngagaagctcaagtttggcataggggacggcaacctgcagtattacctttacaattggaaatgccccagcatgggggcagagaaggttggannnnnnnnnnnnnnnnnagtcaccactgagattctggataaagccactgaaaattcgaaccaggaaatggaaccccaccactgttggtccaattttcacacacgtgagaatccctggcaaagggagcagaactgnnnnnnnnnnnnnnnnnnnnnnnnnnnnnnnnnnnnnnnnnnnnnnnnnnnngggctgcgtgacgtcacctccggtcgtgtctctggtctccgtgnnnnnnnnnnnnnnnnnnnnnnnnnnnnnnnnnatcaagggaatgtaactgctgaaaactagctcgtgattggcatataatgga

SEQ ID NO: 12784 - DNA, 721 bp, Macaca Fascicularis
  misc_feature (1)...(721): n = A,T,C or G
tgtaactgtttnncctagagttanctgaaagcnnnnnnnnnnnacctganaaaggcaaatnnnnnnnnnnnnnnnnnnnnnatattatattcctaactaaaggttttttttttgtttgtttgtttgttttaaccatttccagattatttgcatgggtgcaaaagnnnnnnnnnnnnnnntggnnnnnnnnnnnnnnnnnnnnnnnnnnnnnccaaatgactatacaggaaaggtcgcagaagaaatagaggacatcatcaaaaagggggaaacacaaactctttagaacataacagaatatatctaagggtattctatgtgctaatataaaatatttttaacacttgagaacagggatctgggagatctccatgtttgatccatttgcggcagtgcgctgaaggagtatcttacttgggtgattccttgttttcagactataaaaagaaactgggataggagttagacaatttaaaaggggcgtatgagggcctgaaatgtgtgacaagtgaatgtgagtaccccttctgtaaacactgaaagctattctcttgaattgatattaagtgtctccttgctctggtaaaagatagatttgtagctcgcttgatgatggtgctggtgaattgctctgctctgtctgagattttaaaaaatcagcttaatgagagtaatctgcagagaattgataataacatttgaaaatggaaagatggtatac

SEQ ID NO: 12785 - DNA, 685 bp, Macaca Fascicularis
cagacccttcccctccacccccctggtcttccaagctctgtttcctcagtttccaaaataggaacagctcacctccgcagcacgcgacctaccaggacccatgcccctccctccgccctcatcaaacccagagacccgggctccctttctgccaccccagcctgagtccagcctccatgcccaagtgagggggccgctgccggaacctcagacacactccagttcagggctgtaggaggccttggctgcatatgcctatgaccaatggcacggctttggggcccctccgcaggagccccaggggccaaggtggggtgcgggggttagaggctgggatggctcctggccccaccgccagggggcagcgcaggccgggccgggaggaggcagcggcggctcgggctgggagtcaggcggacgctgccctccggggctggacgtgcatccctcagtctcttggccgcctgggagtcgctccctcgtgcccaccccacctgccaggcctccttggacccacatctgttcctgcttttgtcttcgtcactgcggcagagccctttgacatcttgatatgtatcgggtgaaaaaaataactttgggaatcccccttcagttcttgaaaaggttccatgacttgaatctctgaaatgaagaaaacaaccgactcacaaacctgcaagtagct

SEQ ID NO: 12786 - DNA, 591 bp, Macaca Fascicularis
  misc_feature (1)...(591): n = A,T,C or G
ccacaatatccggagacgggaaaacacccagcaacatatcactgcgcgcagagccatcccccaccctggatataatcagcagaccatccataatgacatcatgttattgcagctgagccgaagagtcagacggaatcgaaatgtgagaccagtggctctgcctagcacccaggagagactgagacccgggacgcagtgcactgtggctggctggggcttggtcagccagacgaggagaacagacagactccgagaggtgcagctgagagtgcagagggatagggagtgcctccgcctcttctctttctacgacggcggnnnnnnnnnnnnnnngggggaccggcgggaacggaagtctgccttcaggggggactccggaggccccctgctgtgtaacaatgtggcccacggcatcgtctcctatggaagaccgtcagggattcctccagaagtcttcaccaggatctcaagtttcctgcnnnnnnnnnngagaacaatgagaagcttcaaacagctggatcagatggagatccccttgtgactgactcttcttctcggggacacagaccagctccacagggtgccagagcc

SEQ ID NO: 12787 - DNA, 589 bp, Macaca Fascicularis
  misc_feature (1)...(589): n = A,T,C or G
cgctgtcaatctgttgtagagtttattaagagagccactatgcactccaagaatggaaagtttctctatttcttaagatacagggttccaggactgccaccaactcttgtccanntgctctatccagtgtcccgattcagcaatgtcaaatccctccagcacccttgcagattccggatacgacagctcttcaggatagatcacatcccagatatcccactgcctaaacctctgatatcttatatctgaaagttctactactatgatcctcacgaagaggtatacccgtctctaaaggaagcgcagctcatttccaaacagaagcaagaggtggaaccctccacgtagcgaggggctccccgctggtctcccccacgggcacttggttgccaagatccagctttgaagaaccaaattaagctaccacgaaaagaagaggaaaaatgagggaacgggaagattgggattctctgttcagagacttcggttccccacgcagccctggggcttggaagaagcacacgaccctactctgcgtggggctccacctcatacccacccctgggcatcttgggactggaggggctcc

SEQ ID NO: 12788 - DNA, 747 bp, Macaca Fascicularis
  misc_feature (1)...(747): n = A,T,C or G
gtaacaggaatnnnnnatgtttnnnnttnntgtaaacaactgaaagaatacttagatcatattctagtatgttctgagatatctttaagactgatcttaaaaactaacttctaagatgatttcatttcctcatagcatacagtttactttgtacatatgtttgaaaccaactactatagaagatgaggaatctattgtaattttttgctttattttaatctgccagtggacttatttgaaattttcactttagtcaaattattttttgtattaattttttgtgcagacataaaaatagcaatcattttaaattgtcaaaatttccagattactgataaaaattatttgaaaacaaactatgggtaataaaggctagtcagaaccctatacataaaatgtagttaccatacagattaatatgtagcaaaaatgtatgcttgatatttctgaactctgttaatttttctgctgtattccagctgaccaaaacaatattaagaatgcatctttataaatgggtgctaatcgataatggaaataacttagtaatggactatatgggatgttaataatgaagccatatgtttatgtctggattttaaaattttaaacaatcatttactatgtcatttttctttaccttgaagaacataaactgttatttcagttctacaaatcagcaaaatattatttatggcaagaaatattccgttgaaatgtgctgtaacatgggaaaatgtaaatgtt

SEQ ID NO: 12789 - DNA, 662 bp, Macaca Fascicularis
  misc_feature (1)...(662): n = A,T,C or G
cagccatgcctcatcnntgtcatannnnnnnnnnnnnnnnnnnnaagccagacccggctcccctacacctgaagttnnnnnnnnnnnnnnnnnnnaggnnnnnnnnnnnnnnnnnnnnnnnctagcctggacctggnnnnnnnnnnnnnnnnnnnnnnnnnnnnnnnnnnnnnnnnnnnnnnnnacagccaggagccatcctccnnnnnncaggcctttgtgtgccannttgtcatgattcctcactgtggacccctgtctggaccaccctagtgtgctaggctgagcagtacagtgtgaacagggccatggtgtattataggccacagcccagcactcctctggctgctctcaaaccatgtttcatcctcagccttcctcccaccaacttaatcccctgtggtgagtaccgtggaaccccagcccatctcactatcatactcagctttccctgatgacccatcccagcccccgaagctctataccaagaccacagctactgcacaccaccctgaaacagccacagccaaggcacctggctcctccttgctcccctactgatggtgtcctaccccgaactccaaaaattacacctggagtcaggtgcagaagggaaccttgtatttcacaggcctcattttgatgcaaaaagacaggtaata

SEQ ID NO: 12790 - DNA, 741 bp, Macaca Fascicularis
  misc_feature (1)...(741): n = A,T,C or G
atgccccagggccgaannngaagccggtgcggccnnnnnnnnnnnnnnnnnnnnncttccgggtcatggnnnnnnnnnnnnnnnnnnnnngtaaacaaagctccgtcctaaactggcaggactgtgaggtgccaagtcctcagtcttannnnnnnnnnnnnnnnnnnnaatatgcggccacccagctgtaccctccgcccccgtggtcccccagctcccctcctcactccacaggcttggcgaggccggtcagggcacagggcgagggcctcttgccctgnnnnnnnnnnnnnnnnnnnnnngataggggcagccagaccagctcccacaggagttcaactggacctgagacttcgaggggtggtggtgagaccccccttgggagaggaccccggggaagggggtttttcctttgagggnnnnnnnnnnnnnnnnnngggctcagcttcctgccttccatagctgccatggcctcacctggagcggaggggacctggggacctgaaggtggatggggacacagctcctggcccctcctggcactgccctcactgtccccccgcctgaagggggtgctgagcctcctgtggcccgcagcagtgaggccacagccgtgggttgcagggagacgggcagcacgacgtggccattctaggaccccccaggctggcagactggggagctgggggcagagggcggtgccaagtgccacatctagccatagcggatgctcttccagtt

SEQ ID NO: 12791 - DNA, 787 bp, Macaca Fascicularis
  misc_feature (1)...(787): n = A,T,C or G
agaggtctctccagctgtcnnnctgccagttgcacatctgctcggttgcatgtcaagactcctaggacagttttgctagactcctaagttttattttgagtaatctttgggagcattgagattcctttttgagatgagtttggtatgaaagaaactggcaactcataccttgattaactgggggcattcccattgacatcagcttgaagaaagatggcagagcactggcgaccaagcacttgcagcctcctgctctgtggcccctcctcactccagggatgccgccctgggtctggagactgttggaggaaacccgcctcacgaggtgcccagcttccctggaggggtctcctcatggtaagtgaatgcnnnnnnncccaagcttccggcttcatttgttttctcttttagattgtttgagggttgatcacagaccaaaagtgatgagtgatgtcannnnnnnnnnnnnnnnnnnaccttcttgcccctattgtctcagcacaacactaatcgacttttccctcagcgtgggtggagggtgggcagaggaaaagccctgtggctctggggacttgggatccannnnnnnnnnnnnnncagctggctctgccctgccagtgccacagagtgccatggcccggaagactggttttcttccatctaggccaggccatccagtggccatcctccgtgtcctcctgcctgttcctggtgtgacttnnnnnnnnnnnnnnnnnnnnnnnnnnnnnnttttctgtgctgtggaccatnnnctctcacgcactca

SEQ ID NO: 12792 - DNA, 749 bp, Macaca Fascicularis
  misc_feature (1)...(749): n = A,T,C or G
gctgtatttatttttcatgtcatcagaatttccatannnnnnnnnnnnnnnnnnnnnnnnnnnnnnnnnnnnnnnnnnnnnnnnnnnnnnnnnnnnnnnntgtttatattcaataaaattgcatgctcctccgcgcagcatcttaaccctcccgttcactgttttagaactagttgttctcctctgcacaaagcgattttatcaagctttccagagcagcttcgattccaagcactccgagcagggttcggaagctgagaggagcggcttctatggctctgttcttgtccagctccagggctcgctgtgggactttggtgagaagatccagctttggaaaaaccttcccgtcttcatctatttgtatcctccaaacaatgactaattcaaaccctggccggctnnnnnnnnnnnnnnnnnnnnnncaggaggagggcccctccgagaggtacacggcatctgggtacttttccttgaaannnnnnnnnnnnnnnnnacgatattcaaaccactccacaaaaaaatgcaggcttcgaaaaaacatgaacagatcttttctgtcttctgctctagacacaaattcacttaattctgagcattctgtgggctccattattatgttgaggtcagtaacagcannagataatctctccttattctgaatttccagaatctgaaattcagttgaaatgtaccatgtggcaattcctgatatctnnnnnctgtnnnnntttctaactctttctgca

SEQ ID NO: 12793 - DNA, 683 bp, Macaca Fascicularis
  misc_feature (1)...(683): n = A,T,C or G
gcccatgtnnnnnnnnnnnnnnnnnnnnnnntcccttcggctgtggtgcctcctctggccccccaggtccacgtcctttaaattggccctttggctcttgcccttggctcctttgggcagacagcaggcttaggccattgacatcgcagttcttcctatcaacttcagtgacccagggtctgaactgcccccattctagggcaacctggggcagacagacctggtggggggtggggaaacctccttccaccagagcttgcttgaagggacccaggagtccttgggcccagatctttaaacctttgtgtcgtgttgcagcagagtgacgatgggggttggggggttatttattttgcctgtccttatccctgctttgacacctgagcatctgattcctgtccccctcgtgccatctcgcctgggtggagccaggaacaggagggacacttcccagaatccgcatgtttccccagtgattgcaccccactgccaccgtggtgcctggctttaactcccacccctgatatgactcctttttgcagagacgggaatggcggctccagcagggactacctttcttatgaacccagggggacccccctacacacacttgatcccttccttccctccccccttccctcccccagtgcgttctgtgatcgccaagttcaaagctgtgcaca

SEQ ID NO: 12794 - DNA, 634 bp, Macaca Fascicularis
  misc_feature (1)...(634): n = A,T,C or G
actaaaagtagggcagaggtgagagattcagatttacttgcctttgtaggacttcttggagaagnnnattgtttcattacatgtcagcatataatgagtcaagctgcttgcatttatatcaatacaatgatatatatttctccaacaatggagaaatacagaaaatctatgaagtggaatgttcagtattagaagaatcccatagaatcattggtgaattaaaaacagatttgagacagtttaattttcctcatactgtaacaaagaaaactttatgaaatgtttaaaagtcataaaactgcaatatcagttctgcaaaagtaaaaaatatacagttattatgatggcaaggagaaaatcatttgacattaatgtgcgtatgtgatcttaaaaacaaatggaatggaatgtgagattgcacttcttactggattcaatgaaagttactaaaatgcattgatagacagtatagcactttggtgttaaacgtaaaaattaatgtcaaaatatgatacctcaaaataataggtattagattgctataagaattatatttgttttcatgtatgagtctctttcaaactgaaggttccagtatcttctttaagaaagtatgtatattttgtttccatac

SEQ ID NO: 12795 - DNA, 749 bp, Macaca Fascicularis
  misc_feature (1)...(749): n = A,T,C or G
tgcggggggcctgnnccaagannnnngcggagcagtgggcaagatccgcctggagctgctcaccatccaccgggcactggagcgggccgcgaggccacccgacgcacccctcgacctgtctgtgaaacgtgcgcctgccaaggggccccaggctcttggagaggcgtgggggcagcccgagctgagtcccatgttgaccaggggtacccccgagccacccagcatgctgggccctgcagtgccccaacccttctccggccacaccacaaagtgtgaggccgactccagtgtcccacccccggggctccccctcccggcctcagatgaccctgtcattcctggcagtggctggggcacctgtgttacnnnnnnnnnnnnnnngacccctgaggctgtctgtggtctgcagagcccccggggcgccgaggtctgaccagcagtgcctgaggtccgaccgtctctgcccacagtgtgccagcccctctcctgcagccccgacccctcacctgccccagccctgtgggcgccgaggtctgaccagcagcgcctgaggtccgaccgtctctgcccacagtgtgccagcccctctcctgcagcccccgcccctcacctgtcccagccccatggccaaggcctgggacctgccccacccccgcatgcatgtggatagacccccacgggccgtggccaacgcttttccctggggccacacagggacatgggaggtcacagttatttattgatcacaa

SEQ ID NO: 12796 - DNA, 733 bp, Macaca Fascicularis
  misc_feature (1)...(733): n = A,T,C or G
cgtcgtgcgttacgcacagaggcaagcagctaagagcccgggatccccagcctgctgnnnntccagcacttctctcttcgagcggcgaccccctannnnnnnnnnnnnnnnngctgggagacgccggcgccggggcctgccggcgcggggaggaaagcaaaatccaactaatggtgtatattgtagggtacagaatagagcgtgtgctgttgataatatctctcacccggatccctcctcacctgccctgccactctgcatggtttgatttcgacctggtcccccacgtgtgaagtgtagtggcatccatttctaacgtatgcattcatccaacagagttatttattgactggagatggaaagtcacaccacctgatgggccttctgggcctccaaagcccatccttggggttccccctccccgtgtnnnnnnnnnnnnnnnnagcagacactgccaggcctccctcctgggggcactgcctgaaggcgagtgtgggcatagcattagctgcttcctcccctcctggcacctatatggcctggcatcgcatcgtggtnnnnnnnnnnnnnnaaatcgtgtgtccgtggaaccagtcctagccacgtgtgacagtctcgcattctgtttgtctcgtggggggaggtggacagtcctgcggaaatgtgtcttgtctccatttgggtaaaaggaaccaaccaacaaacaatgccatcactggaatttcccaccgnt

SEQ ID NO: 12797 - DNA, 770 bp, Macaca Fascicularis
ccaggcctaaaagtggaaggaagtcgggatcctcctcctcttcctcaggaacccctgcatctcagctttatccacagtctcgggggctggttccaaagtaaagccagctcctcctctcccagggcggaaacagcatttgccttctgagagaagagactagcaaaaagctgcagagaggactcggcccagactcagaaccgttcccctgaggagaagtgatggcctctttgcagatcaaccagcttaatctggtcaaacgtgctgttcctaatctggcactcagcccctctgggaaacatcttttaattagcatctcagaaatgcatgggtaaggtaaagtgcgatagtccaagtggaaagcaagagaatgaccagtgaccttgcttccttccaccttgccttcttctcccccttcccttgccctccgtttctctcctctctccttttccggcctgttctttacatggggctcccttcttgttgaacaatagggcagaatcaggagtccccttagcaggaccacatcttcggagcctcgggataaaatgacagtgagattgaaaagtgaaaagcctagaacttgactaggtgcctgttcttgtagggagaaatgagaaatcgcatttgaatccaggccccaggtgggcaccatcagccgtcttgcctccatgcacctcagtaagaagtggatctgcctttggggcctgcccagtgaggaaatctcttcctagtttctgcttctgaaggattcaatgtgggagcaatagaaa

SEQ ID NO: 12798 - DNA, 692 bp, Macaca Fascicularis
  misc_feature (1)...(692): n = A,T,C or G
gtatgacatacctggaagactgagaagggtatattatngaaagnatctttttatttccccaaggtctttcgcactggagacagcataaaagagtgaacaaatgttgggatgagagaagatgacatcaatgtgggagttcactataactggggataaactagaagtacctgtgattttacagtagtcttattacctgccagggcttatctagccatggcaatgtttgccttgaatgggggtgaaagcctttctttgttgaatcaaatactactacactattacacttccacactatttatttggggatgggctgggagtgacagtagcctagtagttcagatacctgattgctgccccattcttttagaagcacacttctgccaaggagtggttagtactgctgtgtttggtacatttggtatttttttatggtataagttttctttacctgtcctttagagtagattttattcatcataggacagaataatcaaggacaaccaaaatccttttgttagtttcagtacctcagctagcagcatttctgagatatcattcaatgttcctccgtgtcatggagtgaaattcttgttttatgggtattgggagtgtgggaatgtgataacctaaacaatctttgctctgaaattccattttcccctctttccttgaattgtattgacctacagagt

SEQ ID NO: 12799 - DNA, 741 bp, Macaca Fascicularis
  misc_feature (1)...(741): n = A,T,C or G
ggaggcacagaaggggcctgtgagtctccaggaggccattcgagaacaggcatctagctactccctccagcagagggacctccacaatctcatggtggacttgagannnnnnnnnnnnnnnnttgggccggggcagggctctgggtcacaggcaggtactccccctaccagagacagagatgtagacgtcctttcagctgccttgaaagagcagctcagtcattccaggcaagtccattcatgtctagaaggcttacgagagcagcttgatggcctagaaaagacttgtagccaaatggctggggtggttcagcttgtaaaggctgcagcacacccaggcctggcggaaccagcagacggggctatgcccagctccttgctagagcaggggagtatgatcttggcactgtcggacacggagcagagactagaagcccaagtcaacaggaacaccatctacagcaccctggtcacctgtgtgacatttgtggccacactacctgtgctctacatgctattcagagccagctaacccctggcccctcctccagagggtctgaggcaatatctgtaaatgtggatttagttagagacttgtagcaatgaagtgagcctttgggggtgtgtataacctcaatctgaaggagcagcatctgtgtcactcaccagcaggcacacttcactttgcagacaaggttcatttacattaattatcaaaactttgtgctaatgtccaataaa

SEQ ID NO: 12800 - DNA, 731 bp, Macaca Fascicularis
  misc_feature (1)...(731): n = A,T,C or G
gacactggccgcnncgagatcagcgagttaaagcaggtggnnnnnnnnnnnnnnnnnnnnnnnnnnaaaggaaagctgattttcttctatgnnnnnnnnnnnnnnnnnnnctggaaaggcatcgttaaagaatctggagtgaagcacaagggattgattgaaatacccaatctttctgaggaaaatgaagtagatgacactgagaatttacaatgggaatgnnnnnnnnnnnnnnnnnnnnnnnnnnnnnnnnnnnnnnnnnnnaaagaaaaccgagtgagaataccctgcaggttcannnnnnnnnnnnnnnggcactgggtgtaaggattcccactgtggctcttcacatgatggaactgtttgacacaacnnnnnnnnngctgtatannnnnnnnnnnnnnnnnnatttggtgcaaaagttttctaaatctactgctgtattagaagctgaaaagggagggaaattccagatgtttgatgnnnnnnnnnnnnnnnnnnnnnnnnnnttgttaacaaatannnnnnnnnnnnnnnnnnnnnnnnnnnnnnnnnngccagaagaacactatgccacggttgcactgaattttgtgcctactctagggcaaacggaattacaattggactgtaaaggagttcctgtcnnnnnnnnnnnnnnnnnnnnnnnnnnnnnncagaagcagcattttgaagaaataannnnnnnnnnnnagctgacccctctaaat

SEQ ID NO: 12801 - DNA, 814 bp, Macaca Fascicularis
  misc_feature (1)...(814): n = A,T,C or G
agggcagacatatacacgaaaagtggatatnnnngtactgtctgtgctggctagcttgggggcgtcagtacacaagatttgcaccgacatacgcctctggcaaacctcaagagatggaggaaccccnnnnnaancagcnnnnnnnnnnnnnnnnnnatgccatacaagcggaatcccatgcgttcagaacgttgctgcagtcttgcccgccacctgatgacccttgtcatggacccgctacagacagcatctgtccagtggtttgaacggacactggatgatagtgccaaccgacggatctgtttggccgaggcatttcttactgcagatactatactgaatacgctgcagaacatttctgaaggattggtagtgtaccccaaagtaatnnnnnnnnnnnnnnnnnnagagctgcctttcatggccacagannnnnnnnnnnnnnnnnnnntcaaagctggaggtagccgccaggattgccatgagaaaatcagagtgctttctcagcnnnnagcttttgtggtcaagcaggaagggggtgacaatgacctcatagnnnnnnnccagggtgatgcctacttcagtcccattcactcccagttggatcgtttactggatccttcttctttcactggtcgtgcctcccagcaggtgcagagattcttagaagaggaggtgtatccnnnnnnnnnnnnnnnnnnnnnnnnnnnnnnnnnnnnnnnnnnnntannnnnnnnnnnnnnnnnnagaattaaacgaaaaatcattaattgctgaggcatgaaaattgtgttactgtaatgcaaaaaaaagg

SEQ ID NO: 12802 - DNA, 741 bp, Macaca Fascicularis
  misc_feature (1)...(741): n = A,T,C or G
caaagagcagtccccaggcacgggggtccctggaggaacagctgctccaggagcnnnnnnnnnnnnnnntgaggaaaggagagaccactgcaggcctgagaagtccttcccagccatccagcccccaatcccccagtcccactggccttccaacacagacacctggcttccccacccaacccccctgcatttctagtccaccctccagccatcccctcacatgaccctaggaccagcagtctgagagggtaggtaccagaagacccagaagctctcatcatggcactgttgcagcttcctctggcccggctggaaagactccagaatccagtgtggtactgtggaaggagcattggactgaaggcttcagtggctgtgtgtcccaggacaggtcatggctcctctctgggcccagcccatttatctgtaccatgaggtaactgaagtaaggagagcagtgaatgtcaaactgtcagagccataagcctcacatattttccctcaacaagggcagctcctgctttatatatttgatatgtaggggttctgtgagagattttgggttttaaaggaatggttttattgcattaaagaaaaaaatgctttggaaaccagaggcctggatgatgttaaagtctatcctgtcccacttcctacattctgggactacagtgaagcctggagtagggagactgattgagtttgggggctgggaccaggggagtcaaaaatagatgagta

SEQ ID NO: 12803 - DNA, 784 bp, Macaca Fascicularis
  misc_feature (1)...(784): n = A,T,C or G
gggcttcgcacattnnnnnnntgcacgcccttcacgccggatggacgcgcacacggggagctgcccgagcaacacaagcgtaagacgctgctcagcaccgaccacgccttcccctacatcaagactcgcatccgtgtgtgccacagggaggagacggtgctgannnnnnnnnnnnnnnnnnnnnnnnnnnnnnnnnnnnnnnnnnnnnnnnnnnnnnnnnnnnnnnnnnnnnacccaccagatgctaagatgctacagatggtgcttcagggctccgtggggcccaccgtgaatcagggtcccctggaggtggcccaagtgnnnnnnnnnnnnnnnnnnnnnnnnnnnnnnnnnnnnnnnnnnnacaacaaactgcggctctgcttcaaggacttctgcaagaaatgtgaggatgcgctgcggaaaaataaggccctgattgggccggaccagaaggagtaccaccgcgagctagagcgcaactactgccgcctgcgggaggctctgcagcccctgcttacccagcgcctgccccagctgctggcacccaccccacctggcctcaggaactccttgaacagagcaagnnnnnnnnnnnnnnnnnnnnnnnnnnncaaggaccaaagctgcacctagaagaaccagcagccggccctcagctatctgtgctgcgaggggagtctcccctggtgcccactgggctatggggtgaccacattgtactcggtgctgggccctttgcccctgtgtccccatctgtatgcactgatgctcctcccttttt

SEQ ID NO: 12804 - DNA, 747 bp, Macaca Fascicularis
  misc_feature (1)...(747): n = A,T,C or G
agcccatccannnnnnngcagagcagttgggttagaggctcatcgaggcaagcagcaacactgggggcgggggcggggtggggcagtgctgcgtctgctgcctcccatgccctttctgacctcagacttggaactcctcaagaacctgaagatnnnnnnnnnnnnnnnnnnnnnnnngtgggaggagagagcaacagagaagctctgagagccccatcccacaaccagtctagctctagttgttatatttaggcaaaactttgtagtcttctttcccttttatgatggattttgataaaagtacaaaacagggtttaattttcttttttatcacctttgaatttggaaatgttgagcacccaagctcttctgtacctatttaaattaaagtccaccaaggggactgcagctcctagaacatgagaatcaagcctctcaatattaaactgcggagtgtggcccctgctttctccgtcctcctgcccaaggacgacggggattgctccagggctgctgggtagtttaccgtcccttctctaggcatggagttggcactgacatcacagcttcataaccccaccaccgccagcttcccctgcctcctacatccagtctgttcttgttcatagtgagaatcctgtgttcccacttcagtgacaactgaattgtttgttgttgttgtttttttattattgtcttcaaggaggaagggccccattaaagggtgaacttgtaataaattggaat

SEQ ID NO: 12805 - DNA, 734 bp, Macaca Fascicularis
  misc_feature (1)...(734): n = A,T,C or G
gcaacataattcctgttttcatgggtcctgtagatgnnngaggcaggaagataaggcagggagtgactgaataaactctgccttttaagttgagcatctgggccggtcacagtggctaatgcctgtaatcccagcactctgggaggtcgaggtgagtgggtcacctgaggtcaggagttcgagaccagcccaaccaacatggtgaaaccccatctctactaataataaaagttagccgggcatagtggtgtgtgcctgtaatcccagctactcaggaggctgaggcaggagaatcacttgaacccaggaggcagaggttgcagtgagccaagattgtaccactgcactccacccctggtgacagagtgagaccgtctcaaaaattaattcagcatcttgagggctgcaagtgcagaaggaatctattctcagtagggcatagggcatgcactggcttagcagttgggtatataaggcttgaatagtctatatgtgaactgctataagcagggttcatagggaagtggatagattgcttcagcaaagtgaactgtgtgatctccaggatggagggagaaagatctgatccaaacgagaacagatttgtttattacaggtatgacagcctaaagaaattatctttttgcaaaagaaatattaaatgatttagcagtctccatgtgtgttaatgtttcaannngtgtatcataatgnnntataattgtgtaacaaaa

SEQ ID NO: 12806 - DNA, 778 bp, Macaca Fascicularis
  misc_feature (1)...(778): n = A,T,C or G
agcatgaccatnnnnnnnnnnnnnnnnaannnnnnnnnnnnnnnnnnnnnnnnnnnnnnnnctgcaagaggccttgctggaacaagccaaggttgtctggcagttccgcgggaaagaagatttggataagtggagagtgacttctgataagacgattggaggcagaagtgaagtgtnnnnnnnnnnnnnnnnnnnnnnnnaaagtgcactgctctatggaactctgagctctgaggcacctcaggacggggagtctgcccgcagtgggtactgtgcaatgatatccaggattccaaggggtgcttttgagaggaagtnnnnnnnnnnnnnnnnnnngttcaatactctgtatctccgtgtacgtggggatggtcggccttggatggtgaatatcaaggaggatacagatttcctccagaggacgaatcagatgtatagttacttcatgttcacccgtggtggaccctactggcaggaggtcaagattcctttttccaaatttttcttctctaatcgaggaagnnnnnnnnnnnnnnnnnnnnnnnntctgcttgacaagatctcttctataggattcaccttggctgataaagtggatggtccattctttctggagatagattttattggagtgtttactgatccagcccatacagaagaatttgcctatgaaaattctccagagcttaacccaaggctttttaaataaagattatgtggtagttttgttttactactctaagggtactagcatctataatgatgtagacaaaataaa

SEQ ID NO: 12807 - DNA, 726 bp, Macaca Fascicularis
  misc_feature (1)...(726): n = A,T,C or G
agcatcaggcagacagccaccannntgagcatggacaaggactgtctgcgcactnnngacaaggccactgtacannnnnnnnnnnnnnnnncccctgagtacctgcacatagaccagcggctggtgttccgggaaggccgcaccaaggctgtcggcaccatcacnnnnnnnnnncagaccaccaacaactccccgatgaactccaagccccagcagattaaaatgcagtcgacgaaaaagggccccctgacgaaacgagacgaggggggcccatctggcgggccagcagtaggagcacccccacctggagatgaagcttcctgtctaggggctgggcagccagctgcgtccagcagtctccagcctcagcctaagcccagcagtggaggccggcgacgagggggccagcgccacaaggtgaagtcccagggggcctgtgtgactcctgccagcggctgctgaaccttctcctggcccaccccaccacccaaggggtcatcatactctggccaccgctccaccagatgggcagagcagctatgaccgccacccagccctcctgctcaggccacagccggagcctccgcattgcccccacccccattttccaggggggttgtaatttataagctgaggaaggcagccagacctggaggactgaccatctcccactgtcctccccaccttcttcctcactctcacattttttgtacatctgggccctta

SEQ ID NO: 12808 - DNA, 743 bp, Macaca Fascicularis
  misc_feature (1)...(743): n = A,T,C or G
cacccagccgcttcattcggcgacccagcaccacnnnnngcccctcacccatcagagtggccttggagacctcatcaggcttggagcagaaaggggagtgcagcgggtccatggccccccgtgggccctccgtcactgagagcagcgaggcctcccttgacacctcctggcctcgaagccggcccagggcgcctcctaaggcccgcatggctctgtccttcagcaggtttctgagacgaggctgtctggcttcacctgtctttgccaggctctcacccaagtgccctgctgtgtcccacgggagggtgcagcccctgggggacgtgggccagcagctgccacgactgaaatccaagagagtagcaaactttttccagatcaaaatggatgtgcccacggggagtgggacctgcttgatggactcagaggacgctggaacaggagagtcgggtgaccgggccacagaaaaggaggtcatctgcccctgggagagcctgtgagggaaaggcaggcagagctgggggctctggaccaggaagatgctctgacagatgccatgggatgggccacaggacacactcactcgagaaccaaagtgcatttgagtgacatttgagggttggggagacaagatggggtagattgtggcaaagaatgctctggctggttaccaggggccaactccttctcctcctgaccctccctcccttgggcagaagaaaggcatgtagaccaggagactt

SEQ ID NO: 12809 - DNA, 737 bp, Macaca Fascicularis
  misc_feature (1)...(737): n = A,T,C or G
atgtnnttgnnnaatanctgttacaaatttatatttcaagacaaattgaatcttattttgtaatacttttggaatttcattaatannnnnnnnnnnnnnngaatattttcagccttaagaaatttaagtttggaagtccttgctattcaacagaataacaagaaagcttcagaatgtatcactctcctgaaaagaagatattaagaagcccttttatttatggttatagttttatttatagtctcaaaannnnnnnnnnnnnnnnnnnnnnnnnnaatttgccatattttgtatnnnnnnnnnnnnnnnnnnnnngcctcaagaaaaagtgctttttctccattgatgaggctagaccctaagaagtaattaagtcaatggaaatcgaatggaagttttcccatgaactaagcatttatcagttccctgattagactggaagaagaaacnnnnnnnnnnnnnnnnnnnnnnnnnnnnnnnnncttcataattaataaaattgatatgaatgaatgtagtgttctttgaattagtaaacagtacagctgtgacgatcatttttaacaagctctacttgtgttctttataaagtgtgattttcagaaagcaaacaaaacacaattacaaggttgaatctgaggaaaataatccttgtgccatagaagtatttacaaaattgcatttcattgttatgttttattttctgatacatgatgttcaattatatctttaggtaa

SEQ ID NO: 12810 - DNA, 717 bp, Macaca Fascicularis
  misc_feature (1)...(717): n = A,T,C or G
cgaaactacaagaagctgttgggctcctgttgctcacacaaggagcgcctaagtatcctccggnnnnnnnnnnaagccctaggcatgaaaggtgaggcccggcgtgccctaggggctgtagtagagggccttgctgctggggnnnnnnnnnnnnnnnnnttcttctgccccaggtaccccttccctagagaagtgtcgggccctgaaagagcagagggaggaggcagctgaggtagcctccttggatgttgcgaacatcatcagtggctcgggtaagggatttcctctcactgcccgggagcagataggtgaggttggacattctcgggtatctgatctctcatttcccctttcccctaggccggccacnnnnnnnnncagcctggaaccctttaggagaagcagcacccccaggggagctgtaccgtcggaccctggactcagatgaagagcggccccgtcccgcacccccggactggtcacatatgcgtggcatcnnnnnnnnnnnnnnnnnnnnnnnnnnnnctctgccaccctcaggaaggacccttgatccatgtacaaagcatacatnnnnnnnnnnnnnnnntgtctgtggaacagaagcagctttcttcagagaagactgccgttcccgaggacacaagctgttgggatgctacttctcagcttcacactctccatttaaggtgtttatttttnnnactcaataaagga

SEQ ID NO: 12811 - DNA, 755 bp, Macaca Fascicularis
acccctgcacctggcctgtcgccgtggccatgcagctgtcgtggagctgctcctgtcctgtggcgtcagcgccaacgccatggactatgggggacacacacccctgcactgtgctctgcagggcccagctgcagccctggcccagagccccgagcacgtggttcgggctctgctcaaccacggtgccgtccgtgtctggccaggggccctccccaaggtgctggagcgctggagcacgtgccctcagaccatcgaggtcctgatgaacacctacagtgttgtgcagcttcccgaggaggctgtgggcctggtgccccctgaaactctgcagaaacatcagcgtttctactcctcccttttcgccttggtgaggcagcccaggtcgctgcagcatctgagccgctgtgcgctccgctcccacctggagggcagcctgccccacgcgctgctccgcctccccctgccaccgcgcctgctccgctacctgcagctggattttgagggcgtgctctactagatgtccacggccttttgagagggcctgaaagcagatgccccagcctgcagagggcgcgcctctgcactaactcaggccaggtagcctagcagcggaggcccagctgcgaaggcaggtgtggatgctgcaattcccaatgcagagaagcggactaacagccacagccagatgatgtctgatgaagacacactcctgttggggctctcctggggcccccttctagcctgtgcaaaccctg

SEQ ID NO: 12812 - DNA, 734 bp, Macaca Fascicularis
  misc_feature (1)...(734): n = A,T,C or G
tcatgcctggagttnnnnnnnnnnnnnnnnnnnnnnnnnnnnnnnnnnncgcccagctcagtgttctacctgccgtctgaggaagnnnnnccgagcctccagctgagtggtctatnnnnnnnnnnnncagtacagaagtaattctggggggattcatctggatgaagacatggagacaagtagaggcaggaacttggccaaagtcacacggccaactagtccttgtcaccctttggcgtcccctgcccagggccccaacatcatcccagcagacatcattttcatcgtaaaggagaagctacaccctagcnnnagcagggagaatgacaacatcttcttcnnnnnnnnnntccctctgggcaaggctctcacatgctgcactgtggaggtgaagactctagatgaccgtatgctcaacatccccatcaatgacatcatccaccccaaatacttcaagaaggtgccaggtgaggggatgccattgccggaggaccccactaagaagggggatctcttcatcttctnnnnnnnnnnnnnnnnnnnnnnnnnnnnnnnnnnnnnnnnnnnnnnnnnnnnnnnnnnnnnnnnnacatgactgcggtgggctggagcaggggtgagaggaggctagctgggcctcaccccacccctacccgccacagcctcagggtgtgcacaggtgtgcatagcctcagggagcctgctgcacagatatgataccagagtgggatggt

SEQ ID NO: 12813 - DNA, 740 bp, Macaca Fascicularis
  misc_feature (1)...(740): n = A,T,C or G
tgatgccagcgtggggctggcctggctggccgtgggcagcatgtgcnnnntcatcgccggcnnngcggtgggctnnnnnnnnnnnnnnnnnnnnnnnnnnnnnnngatcttccctctgcatgtcaagggtgtggcgacaggcatctgtgtccnnnnnnnnnnnnnnnnnnnnnnnnnnnnnnnnnnnnnnnnnnnnnnnnnnnnnnnnnnnnnnnnnnnnnnnnnnnnnnnnnnnnttgcctccgctttctgcatcttcagtgtccttttcaccttnnnnnnnnnnnnnnnnnccaaaggaaagactctggaacaaatcacagcccattttgaggggcgatgacagccactcactaggggatggagcaagcctgtgactccgagctggacccaagcccagagcccccccgcctgccccaggggagccagaatccaggagcacagcccctctggagcctcggtctgcagggtccttcctttctggcatgctccctccagcccacgacccggggctaggaggctcacccgcctnnnnnnnnnnnnnnnnntgctgctnnnnnnnnnnnggcacacctcagagctttgcagacctgcagtcagccctccatgcgcaacactaaagcagtgcaaggggaggtgggcctctgggatctttgtcttcaggctagaggtgcttttggaggttgggtgctgggcacccggtcgctcctctcacgcggctgccttatcgggaaggaact

SEQ ID NO: 12814 - DNA, 835 bp, Macaca Fascicularis
  misc_feature (1)...(835): n = A,T,C or G
gaatcatcagagaatccacagtggagaaaaaaaatttaaatgtgaagaatgtgggaaaagatttactcagaattcacaactttatacccatcgtagagtccacagtggagaaaaaccattcaaatgtgaggagtgtgggaaaagatttactcagaattcacaactttattctcatcgcagagtccacactggagtaaagccatataaatgtgaagagtgtgggaagggcttcaacagtaagtttaatcttgacatgcaccagagggtccacaccggagagagaccttataattgtaaagaatgnnnnnnnnnnnnnnnnnnnnnntcaagtattttgaatcataagagactccatggtgatgaaaagccattcaaatgtgaagaatgtgggaagagatttactgacaaatcacagcttcattcccatcagagggttcacactggggaaaagccatacaaatgtgagaagtgtggaaagggcttcagatgggcctcaactcatctaacccatcagagactccatagtagagaaaaagtacttcaatgtgaggactgtgggaaaagcattgtacacagttcatgccttcaagaccaacaaagagaccacagtgaagaaaaaacatctaaatgtgaggactgtgggaagcgctacaagaggcgcttgaatctcgatatgattttatcattatttttaaatgacacataattattgtacacatttatgggttacagcatgatatttcaatacatgtatacaatgtgtannnnnnnnnnnnnnnttattagcatatccatcacctcatttatcatttatttgtgttgatcatttatcatt

SEQ ID NO: 12815 - DNA, 887 bp, Macaca Fascicularis
  misc_feature (1)...(887): n = A,T,C or G
ggccagcacgannnnnnnnnnnnncagcccggagtccagccgcggccagtgtggggagaacctcgcatgggcatcctacgatcagacaggaaaggaggtggctgatagatggtacagtgaaatcaagaactataacttccnnnnnnnnnnnnncacctcggggactggacactncnnnnnnnnngtatggaagaacacaaagaagatgggcgtgggaaaggcatccgcaagtgatggatcctcctttgtggtggccagatacttcccannnnnnnnnnnnnnnaacgagggcttctttgaagaaaacgtcctgccaccaaagaagtaacttgttaaatgtaatgggaannnnnnnnnnnnnagaacgtggatatgaagtgcctagaacaaccaaaacccggctgtgcgtctgtccctgtgggtgtatgtgcttgtgtgtgtgatgcatgtgagtgtttctggtacacacacttgggcatannnnnnnnnnnnnnntcattcttactacaggagtgnnnnnnnnnnnnnnnnnnnnnnannnnnnnnnnnnnnnnnnnnnnnnnnnnnnnnnnnggaggggggaatccgttttttaaattttttgttatttttaagcaaacttcttttgtactttnnnnnnnnnnnnnnnnnnnnnnnnnnnnnnnnnattccaaatgtttgtgatgctgagaagtgaagttcattttatgtgatcttcatgcgccgtaatctacttttggtagataattaagattattaaaccctcatttaaatgtgacataaaatannnnnnnnnnnnnnnnnntatannnnnnnnnnnnnnnnnnnnnnnnngcaggcaggggctccattttacagaattactgagatttctcagttgtaaaaca

SEQ ID NO: 12816 - DNA, 737 bp, Macaca Fascicularis
  misc_feature (1)...(737): n = A,T,C or G
agaaatcaggatgaccaagtgaaggagctaatggacttgatgnngngatctgttgatgggagaaaaatggtgatcactataccaatgggctgtacaanntaatacagaggtctaaatgtggatctgtgggatcagatcaaaaattaaaggaattcaaagagagccttataaagtacatggaaactcagagaagttacacagccttggctgaagcaaattgcctgaaaagagccttaatcaaaacacaactgtgtgttttattttgtattcagttgtgtctcagattgctaattctgttgctttgcatattgcacagcatgtgcactttgttttgttgcttactctttagtatgtgcaatttactctgcagcttgctgtttattatacccaaaaagttaatgatagtttcgagaacagttattagactagaacgcaggactcctaggttatttactcactagtgggtgaattttttattatttactcactagtgggtgaatcacagtgctttccctgtaaaatgtggtacccgatgtcatatttgagattctatgaaatgtttaaatcttaacatcactccaattattaatgaaccaaatcatatggtaagttactgtctgcattgaaatataatatcaaagccttttgaaatctgtaaacataaaattcctctcattttcaaatatttaaagccagttttatgttcctaaaaactcattttcttctttctagtacta

SEQ ID NO: 12817 - DNA, 741 bp, Macaca Fascicularis
  misc_feature (1)...(741): n = A,T,C or G
aaggtgaagatgaagggatggctganntaatggaagatgtgatcgtcaggagtaaaaagcaccagaagctcaagcaccagaaagaggctgaggaggatgagctggagataccccctcagtaccaagctggaggnnnnnnnnnnnnnnnnnnnnnnnnnnnnnnnnnnnnnnnnngggccgaatacaaggccaagaaagcaaaaggtgatgtgaagaagaaaggccgaccagatccctatgcctacatccccctcaacagaagcaagctcaaccgcaggaagaagatgaagctgcagggacagttcaaaggcctggtgaaggctgcccggcgaggttcccaggtgggacacaaaaaccgcagaaaggatcgtcggccctgaggcccagggctgccccgtgatccagcctgaggccctttcagcccccaggctaccttgccaccagctccaggtactcaagannnnnnnnnnnnnnngactcaggatgacttggaactagggcttggctctcagaagtcctggattnnnnnnnnnnnnnnnggaatcacccttcagagacatccctggtgcctggagatgggaatgtggcctcagtgcctctgagtaggtgccatggggcacctttgctttctgcccggagtggccacaagcaccagagcagatgatctctnnnnnnnnnnnnnnnnngtacccatgtggcatcctggctgtggtctgggtgtatgagatttattgtgaccag

SEQ ID NO: 12818 - DNA, 708 bp, Macaca Fascicularis
  misc_feature (1)...(708): n = A,T,C or G
taaaagcacaaataatgaaagagannnnaaagccaggaagaaaatatgaaagaancttcactttactgaagcatgtgcaaggcagcttacaaacaagactaatatttttacaaaatgtcattaaagaagcatcaaggtttaaaaaacgaatgctaatagaacaactggagaacttcttggatgaaattcatcgaagagccaatcagatcaaccatattaatagcaattaaaagaaaatagaatgtggccacttatttcactatcttcttcaaatacaaagtaaatacaagactgttgtgatcttgcattcattttctgacatgcattgttggctatttgaaatactaaaagcaaatctacagatcctttttccatcattttacagtgaccttttcttcattttggtttatttttgtaatgtgaaaagtatcactctaaaaaacatttttatttaacaaactaaaaatattcctccaaatctcttgcttgtcattgactcttgcgtgtcaatttccctcaggttctattttcttaaaccaacctttaaaattgtcacctctgttaaggttgaactttgccaaaaaaaattaaaaagaagttactttgtaatttttggggaaaaaagcacatacattaaaactaggtaatgttttgtatatacagttattttggatatattattgtaagttgtacnnnatgtattttgaa

SEQ ID NO: 12819 - DNA, 696 bp, Macaca Fascicularis
  misc_feature (1)...(696): n = A,T,C or G
gctgcagaatccagacnncctggagnnatgccanncngtgnnnnnnnnnnnnnnccagttggggggcagaggctacgggtcagagagcggggaggaggactttgccgcctttcgatcaaggccaagctgctatggaatgccagacatcacctcccagctatgacagtcagtgcccaaggaagtggtccagttggggggatcctggacccttggcacccaaagggcgcaaatcccgcaaaaagaaatccaaggccacacagccgagtcctgaggacagagtggaggacccttcgcctccaagcaaggccctttccaggacacgaagggcaaagagagaccttcctgagaggactgcaactcagcggcctgaggggcccagcctccagcaggacccagaagttcccacagtgcccaagaaggggaggagaaaggggcgacaggcggcttctggccaccgcagaccccggaaggtcaaggctgacaccccatccttggacccggaggggacctcagcctcttagcaggagggtctccttgctgcactcaccctttcttgtcttgccctgaatcttggggtctgaattcnnnnnnnnnnnnnnnntctgaaggtgcgaaacaggccctannnnnnnnnnnnnacaactctcatgtttttaattgtaccccaccttccacatctttaaagctcatgtgaaa

SEQ ID NO: 12820 - DNA, 772 bp, Macaca Fascicularis
  misc_feature (1)...(772): n = A,T,C or G
agtacaacacctaccccatcaannnnntctatacgtccaacatccccatcnnnnngcagtctgccctggtgtccaacctttatgtcatctcccaaatgctctcagctcgcttcagtggcaacttnnnnnnnnnnnnnnnnnnnnnnnnnnnnnnnnnnnnnnnnnnnnnncccgcnnnnnnntatccagttggtggcctttgctattacctgtcccctccagaatcttttggctctgtgttagaagacccggtccatgcagttgtatacnnnnnnnnnnnnnnnnnntcctgtgcattnnnnnnnnnnnnnnngattgaggtctcaggttcctctgccaaagatgttgcaaagcagctgaaggagcagcagatggtgatgagaggccaccgagagacctccatggtccatgaactcaatcggtacatccccacagccgcggccttcggtgggctgtgcatcggggccctctcggtcctggctgacttcctgggcgccattgggtctggaactgggatcctgctcgcggtcaccatcatctaccagtactttgagatcttcgtgaaggagcagagcgaggtcggcagcatgggggccctgctcttctgagcccgtctcccggacgggttgaggaagctgctccagaagcgcctcggaaggggggctctcatcatggcgcatgctgctgcggcatatggacttttgtttaataatgtttttgaatttcgtattctttcattccactgtgtaaagtgctagacatnnccaattaa

SEQ ID NO: 12821 - DNA, 607 bp, Macaca Fascicularis
  misc_feature (1)...(607): n = A,T,C or G
agagagttaaggtgtccntatgttggaaactcaagtggaaggaagatttggtttggttttattctcaaagccattaaacactagttcagtatgtgagattatagattctaaaaacttcaggtggcnntgcctnnnnnnnnttcctcctccatttctctcaagggaaatggctaaggcggcactgtctcatggctctcgtttttgggggtcacggggaaggtagcaccagacatagccacttttgccctgagggcctcctgtgtgcttnnnnnnnnnnnnnnnnnnnnngcaagtgagggagacagaagtctaggcccagggatggctccagttggggatccagcaggagagcctccgcacatgaggctggtttaccaacatctactccctcaggatgagtgtgagccacaagcagctgtnnnnnnnnnnnnnnnnnnnnnnntggaattaatttataaatttaataaatcccaagataatcccagccagtgttttttccttataataatttgataaggcgattataaaaaacacatagaaggaagtggaaccagatgcataagaggaaatgatgnnnnnnnnnnnnntatcnngatacctaatattt

SEQ ID NO: 12822 - DNA, 750 bp, Macaca Fascicularis
  misc_feature (1)...(750): n = A,T,C or G
cacgtccaagggttctctctcctgcttgcgcttagtgtcctacatggggttgtgaagcgatggagctcctcactggactcgcctctctcctccccccaggaggagcttgaaaggagggtaaaaagactaaagtgagggggagcagagttcactgtacagatttgacgactgtcaccaaaatccataaaaaacaatagtttngtgcctcttctcgaacagtggatgacacannnnnnnnnnnnnnnnnnnnnnnnnacaggtnnnnnnnnnnnnnnnnnnnnnnnnnnnaaggttgttttgcttattgtatatttgtgtatgtagtgtaactattttgtacaatagaggactgtaactactacttaggttgtacagattgaaatttagatgttccattggccgtctgaggaggtgtggacttttatatatcgatctacataaaaactgctacatgacaaaaaccacacctaaagaaatttgaagannnnnnnnnnnnnnntcactttgtgtaatctgaaatctagctgctgaataccctgaagtaaatccctgttcactgaagtctttcaattgagctggttgaatactttgaaaaatgctcaattctagctaatgaaatggatttcccagtagggnnnnnnnnnnnnnnnntgtatagtagttatatgcatatgtttctgtgcatgttctctacacagttgtaaggtgtcactgtatttaactgttgcannnnncaacttccaataaagc

SEQ ID NO: 12823 - DNA, 649 bp, Macaca Fascicularis
  misc_feature (1)...(649): n = A,T,C or G
gaggcagtcagtcattgnnnnnctgcaaagtnnnnnnnnnnnnnnnnnatacacacacagagagcattnnnaggccacagctccacannngccatgggatgttatgtggcaggggatggggctcattctgttgggaggtcaagttaccaatgccaagggctgttgattttgtttttatttttatattttctcccagcttttcagaagatggaaatgagacagttaagtccaaaccccaatgttgacagccatatgcatttgcaaatctatctagattacagannnnnnnnnnnnnnnnnnnnnggaaacataccagatagaagatcttgggagaggcccagaaatgcagcaccttgtcatgacaaaagaggaggcagcagaggaaggatagttacaaatgcatccaccttaatttttttcaataggcttgtacatcttattaatggaaggagaaaggagacaggagaggataaatgtcaagatgcagaagaattgacatgtatcccatcataaaatggtagaagttgagttttcaatgagtagtcatagttgaatttttacaaccaaagctcccatttgattgtaatcttgccaaaatgtaatggacgtataaatgaacttggggtataagcaataatatccactagtg

SEQ ID NO: 12824 - DNA, 731 bp, Macaca Fascicularis
  misc_feature (1)...(731): n = A,T,C or G
gctttccagaaccacnnnnngaaacaggtgggccccaaggccaggatcctaaagcacaccaggaagatgctaaagatgtttatacttttcctcaagaaacaaaagaaaaacccaaagaagagccagaaataccagcaattctgaacgagattcatccagaaaatgatgtctatagttatgctttgttttaacaatgctcaaccataaagttggggtccaatggaacatacagcttaacagtttatgcgtgattttctcaaaatattgtaaaacttttgacaatgctcattaatattattttttctacttgtagaccatatttgaaagaaataacattnnnnnnnnnnnnnnnnnatagacaatatcatgctagagtgtgtgtgaatgtgtgtgtgtatgtgtgtatatgtctgggagaggatagtggtgggaagagacaaataaggaagcggggaggactggataattggttttcccccctaagaacatttatttaagtcttaagagcagataagtgactaagactgaacacttacattttggggagtgtatagttttcttgtaaatgctgttcattactaatgaaacagtagcatcaaatttttattcaggctttagttggctcttttggttagttttaacaattctccttaaaagatattttggagtgatgaatgtagtttacttttgtatttgaaatttgattttctatttttactttttaaatattg

SEQ ID NO: 12825 - DNA, 791 bp, Macaca Fascicularis
  misc_feature (1)...(791): n = A,T,C or G
gcatcaaagttaataaaaagtttatgnnncatgagacttctagtgattgcctactnnnacatttatttaaatttttgtgaaagaaaatttagttttaaaggctataggaatgtgttatatgtaccttaaacagataatttaattttagcaatttaccataactgatacttagctaacaattgtccataacttagttttaagtgtaagaaatatnnnnnnnnnnnnnnnaaagaaggaatactactttctaagaaagaagatcttataatagttagtaggttaaactactttaaaaggataagttttggttcaaagttgataaagaagatgagatttgtttttctcttctctggctgatttttaaggatattatgtagttcatttagtcaacagacttgaaatgtttgatatagcaagataggtatggtaatttcaaagtgaattgggaattcctctggctcatataaccctttttttttctttaagtattcttgagatacaaaaaaaaaaggtaaattaaattttcaaaaaaaaaattccggatctgtttttaagctccatctggtcctcataacctgtaacttttttcttaaaacctttcagctgaaagtggggtagaggtggagtaatctgtggatttgtttctgttgtcttttaaaatgtcaaatatgtaaatttttaaaaaaaccaccagatgcagaaatgtgctttgacatcatttgaaacctaaattttcttatgttgtgattatattaaaaagggataaaagaagagtgtcaaacatgattaaa

SEQ ID NO: 12826 - DNA, 770 bp, Macaca Fascicularis
  misc_feature (1)...(770): n = A,T,C or G
accgggcagcgtggggacctggcgttcagactgcctctcnnnnnnnnnnnnnnnnnnntacttggatactggggtgggcaggcaggtttgggaaccggggcagaatcagctctgtgctgagcctcctggcctggcccccaccggtgcatctgcccagtgcctccacctgccccggctagcatgctgctggaccacaccccaagatcaggggccctggnnnnnnnnnnnnnnnnnnnnnnnnnnncacccaattttgtcatccgagagagagcacaaactgcagacccttgttgcagctaaaggaaggccctacagagaatggaatcaagggcagagacaggacacttcacaggacacttgagcacagtgaagattttattcacacttttggttcctgagttttatatcgaggactcagctatgaattgctatctaaatctcagagcttagaggccaacccagtgactagaccttccagtgaagaaagtgatctcaagaggtccagggacttaacagccaagccacaccacccgacacgttcttccatgacacacagagatctaacgcaaggcctgggttnnnnnnnnnnnnnnnnatcacctgagaagcaccacatcctttcagacacatcctcggacacacacgcagtcttggtgcccccaggttcaatcctacgttagttcttttgatgagaaggaaataaaccaaaccagccacttgcactatggcttccaagccaatgttattgactcaataagtgcttagcgatt

SEQ ID NO: 12827 - DNA, 763 bp, Macaca Fascicularis
  misc_feature (1)...(763): n = A,T,C or G
ccaaaggcacnnagaannnnnnnnnnnnnnnnnnnaccaaaacnnnnnnnnnnnnnnnnnnctgccggagacagtttgacaactttaagcgagtcttnnnnnnnnnnnnnnnnnnnnnnnnntccctggtggacaatattcagcaacactttctcctctctgaccggttgnnnnnnnnnnnnnnnnnnnnnnnnntctttgctaacannnnnnnnnagacagggaagaaaaaactgcagtatctgagcttnnnnnnnnnnnnnnnntgcgctgagctcatgatccaaaactggacccttggagccgtcgactcnnnnnnnnnnnnnnnngacatggacttagacaagnnnnnnnnnnnnnnnnnnnnggaactcaaggnnnnnnnnnnnnnnnnnnnnnnnnnnnncctgcatnnnnnnnnnnnnnnnnctgctctccggggaaagctgnnnnnnnnnnnnnnnnnnnnnnnnnnnnnnnnnnnnnnnnnnnnnnnnnnnnnnnnnnnnnnnnnnnnnnnnnnnnnnnnnnnnnnnnnnnnnnnnnnnnnnnnnnncctcgtggagaagtttgtggaaccctgccgctccgaccactggccactnnnnnnnnnnnnnnnnnnnnnnnnnnnnnnnnnnnnnnnnnnnnnnnnnnnngatggcttccgacaccaggccctctgggaccgctacatgggcaccctccgcggctgcctcctgcgcctctatcatgactgaggcccctcccaatgtcccgcccacac

SEQ ID NO: 12828 - DNA, 717 bp, Macaca Fascicularis
  misc_feature (1)...(717): n = A,T,C or G
ctgtgtgtgtctgtgaccacctctgtctcaatggcgcggccacttccttcctgtagctgggtcagagcctgggtctgcccttttgtccagatcagctgttttttttaacattttaagtctgactttttttgcttttctaaagaagcagtgagaaatgggctgggagtgctcctgtcccactgaccccgtggggggtccctggagcacagcctccagccgccataattccatgccaggatgtttttccacaaatcagtcgattgaaattcagaggggtcggaatgactcgacctatccttcaatgttgaaaataaatgtctcagccaaaaaccttccttgagctgcgatgcttttccccttggcctgcacctctttccttaaaacttctgcagggaaagccccggcgcgggcgctgttgaaaagtctggtcttgccggtggttttgttctgcgcagtttctggggagggttggatgcgtcccctgctgtccagccctccccgctcgaggccccacgagtctgggaccctcagtgggaagggggctggcatcgctggcgacccacacattcctcacgtagcttccgctcccaggaaggggctttaaatcctgtatatactttttagagattcttttaaagtttctgaaatgcttatgtgcatcttttcttgtacacacttttgtgaagatttcannggangggagtcgtctgccattaa

SEQ ID NO: 12829 - DNA, 760 bp, Macaca Fascicularis
  misc_feature (1)...(760): n = A,T,C or G
agatcagtanttcannncnncnaaaatgtaannnnnncctgtgggagttcagtgtgttctgtggttaagtgggtgtgcttaatcattctggaaattctgatcagatgaaataaaaaaaaaaaaatcttgatgcaataacagtgattttgccacttctggttgtttgagatggatctgtcccatgttagtctggggttttattcagcttgtgttgctaccagcagttcacaggtaaagcagaaattctctttaaccagcaagtttctgctttttaaagttacttttagaataaatcatcagggaaatgaagagaggatgcttttgctttgggttttggtcaaaaactgattaaataatgtaatgtctctggcacacactaaaaaccatacacttcagttgtgatctcagtggcatatttatttggttaggtttcattacatttattattacagatgttcaattgaccagatagttcagtgttttctttcctttttttggaaattttgagtttgtgactgcagtgttcaagaactcagcatccttattttctacaaatactgattaaaataaaatgctgtaaaatgcgttgtaaaacattatcatgatcttcccatacctttgttgtacttgtgccgaaatgtttttatattcctttgtctggaagaaaatgtttgccttcattttgatcattttgttcaccttggaatcaacaggttttgatatttttctcttggaagattttatatctttttgggaatat

SEQ ID NO: 12830 - DNA, 718 bp, Macaca Fascicularis
ctggagtgagtagtttctgagtttgctttgctatgttcgtatggaattatgagatgggctcagcagggttgtgaatgtcatgtagggtccataggattgtggctttgtggagtaggtgagatcacaggaaacaatgtgtctgtactaactgttgtttatcatggttttgtgtgtacattccatgataactgaaaatggatcactatgtaagtgatgttaatgactgaagaactctgtgtgtgtggtgtatgtcattttgcttgcagaattatgatagtttctaataagtaaaatagcataagcattggaaactaagaggtaaaattataatttctagatgacagggttgcaataactggaaacatcatacaaactaaatccaatatgttgaaatgaggaggactccatatgtagcacagaagaaaaatactttcatccctaccactttcaacagttatatagatttgaggttccctcccacacactacccaccgcctgcttgtccctggatgaaactgggggtgatttaatgccctcctaaatcactctaagccaagtaaaagtacttgaaatactaaaaatcacaaggtcagccttgtagtaattaaaatagtcattttctgattaaaatgtttactgtaaaaatcaaatttcaaacttcatttaaaagaaaaatttctttaaactgtctggagcctacagtgtaattactttcttc

SEQ ID NO: 12831 - DNA, 724 bp, Macaca Fascicularis
  misc_feature (1)...(724): n = A,T,C or G
atgaggtaaaatgaaaacacnnnngatatnnnannnnnnnnnnnnnnnnnngtgatggcatatttctanttcaagtagtgaaggaaaataaatatgcactagagggtgagattttgnnnnnnnnnnnnnnnnnnnttggtataagctaactaaagaaataatttttacattttgtattttccaaccaaacagaatcgggaccagtattcacatctactaagtgatcattttctgccataccaaggtcataattccttccgtgagaaatattttagtggggtaacaaaaagaattgccaaggaagaaaaatccacccaggaatgaaaattaagattttgacaataaagagagagtaagaatttgatttagaaagacatcaggatgtgaactttcatgtatgatccagaaaatatgtactgttttaaaatattttatatagaaaannnnnnnnnnnnnnnnnnnnnnnnttttaaagttatctttgttttatagacttttttgttgtatgtattacagtctttataatcttatttaatgtatatttttacttccaagtactgatggagatggactcaaaacagttattttttttacaattaatctacaaagggagttaatattgttgactnnnnnnnnnnnnnnnnnnnatattataagcaattaatagtaattaagaatgtattcatttggtagatatgtttatttggtttttgatggtcattga

SEQ ID NO: 12832 - DNA, 720 bp, Macaca Fascicularis
  misc_feature (1)...(720): n = A,T,C or G
taagatcctccagaaatcccctctgcctcctgggaatgtgaaaacacttggagagacnnnnnnnnnnnnnnnnnnnnnnnnnnnnnnnnnnntccggctacgatggggccaaatcgtccttaagaacgaccaccaggaagattnnnnnnnnnnnnnnnngttcctgcataaccaggggaagnnnnnnnnnnnnnntccgctgtaccacgcaatgatgggtggcagtgaggtggcccagaccctcgccaaggannnnnnnnnnnccaccgcctcccagcttcacagcaatgttgtcaactatgtccagcagatcgtggcacccaagggcagttagaggctcgtgtgcatggcccctgcctctnnnnnnnnnnnnnnnttnnnnnnnnnnnnnnnnnnnnnnnnnnnnnnnnnnnnnnnnnnnnnnnnnnnnnnnnnnnnnnnnnnnnnnnnnnnnnnnnnnnnnnttaggtatctgtgactcttgggnnnnnnnnnnnnnnnnnnnnnnnnnnnnnnnnnnnnnnnnnnnnnagagaacctgcccacagctctccccgctacaggctgcgggcactgcagggcagcaggccttctccgcctctccgcctctccgcctaagtctctgggaagaagtggagaggactgattctcttcttttctttttttttcttttcttttttctcgctgatnnnnnnnnnnnnnnnngcattctgattgttc

SEQ ID NO: 12833 - DNA, 668 bp, Macaca Fascicularis
cccaaagtgctgagattacaggcgtgagccaccgcgcccggccaagaataaaatactcttaagctgacctaatgaagtgtttccttaccactgtgattattattactattatttgctatattttaatattgttgtttactgaatattctcctttaaacagactcgctttttaaacttcgtttttaaaaggaacttttttttccccaattgctgccaatagtggataacatgtatcactcgctgccaaaaatataaagtgaccataaaaaagaaaaataaatttgctggggaggggtgcttcatgctggtgtggccaaggctgacagctatctcttctctgttacaaaacgagataagcaagtgttagcattgccttaaggtcacactggcatctccctgaacttctccagggacagaaggaggagtaagttgctcatcacatgggccactagggccatctcctcccaccagtggcccccactcacaggcagctggcaatgtcctacctgcctgttccccagatggagaaacaggctctgagagttcacaggtcttgcccaaagtcattgattttgatgattaaaaagaataaacacagtgtttcctgagtagcagtgattgttatgccttgctattttaataaagattctattttcgtataacattgt

SEQ ID NO: 12834 - DNA, 883 bp, Macaca Fascicularis
  misc_feature (1)...(883): n = A,T,C or G
catttaaatannnnnnagcaataatgagaaaaaaggagagagaaaatgatttaaacagggtggattccactctgtgggagccctcaatggacctcaaggcggaactcagcctttccaatgaactctaagcatgtagacagcctgagctgtgtctaaggctggtgtttaaagatgggtatttgtcatacaatatgggtcctaaatccaaccaactacacattttatctggtgttcacaccaagaaacaatgatctactcaaacattggagaaaaatctgccagagaaagggttgtcaactggcggtgtgtcttatctctatggtgtaactggactctgactttagaccattacctattaggaagattcaaaatgactgtgtttttaaaggaataaatcccagtgtnncnnatttgacattcttatcagcaaaaaaacttgatttctagtaaatctataaaaaggggtaagtccctaaatttcaaatgagaaaactgaagcacaaggaaaaaaataactagtttgaaatattttgaaaagtaataacataaaactaatatttgtagaagattatgttgtatataacaaattggcatttatagaatatgacctatttatctaaagtttataaatgtttatacctaatacaattctgtttggagtaagaatgattatataatcattatccatttgggtataaatctgtatttttagttttttttcccttcgattagtatgtgttatatataaaagacagaaaataaagtataaatcaagaacttaaattttatataatttatttctacagtgaaagaagattgataccttgtcatgagtaaattcctttgttttatagcaaaaaatttattgtgctttttagctggc

SEQ ID NO: 12835 - DNA, 708 bp, Macaca Fascicularis
  misc_feature (1)...(708): n = A,T,C or G
gggttcgggggccggggggcgtggtgaaagnnnnnnnnnnnnnnngtgttaggttttggcagtcttagttcattttctcatccctggtcnnnnnnnnnnnnnnntgcgttggggatgtctgggtgtgatcttgcagaaggagtcagaaaccaccgtcgagaaggaaataaagaagagggagaactgatggtttcttgtgtgtaagccacagacgcatgatgaactgtcacctccacctccttcctcctcagatgtttgatggtgacttatctgagagctttgaaggagagaccatcagaaaagacacgttgcattcattcgtctctgaatgctttatgcccaggttccaagggcctagaagagtgagcttgattctgacaccaacgtcaaggaacaggagcttgcttcggaagtctcttaaatgcagcatttatttctaagctggttcgtacaagagcttcccaagtagcaggggacagggcaaaggtaggcttagggtcttggcatttcagagcctgtttcaaggaaatttttttccagtttagacttccagcagtcttcaannnnnnnnnnnnnnnnnnnnnnnnnnnnnnnnnnnnnacatttgagaaccttgctgctctctgctgcaggcatcctttacctcacagtttcctgaacagcatgctttgtatcttatttttctgcataccattgctcagtgggtgg

SEQ ID NO: 12836 - DNA, 606 bp, Macaca Fascicularis
  misc_feature (1)...(606): n = A,T,C or G
caaggagaagggannnnnnnnnnnnnnnnnnnctcagggaagaccagtggggacaagacagaaaaaatcaccatctatcaacaccatcgacgtttgagtgaagaaacacacccagaagagagatgcactaacaactggggatggggatggggtcagggagagcccaagatggtgatctgcctgagactcccagagggtaatgacactcccacaatctcaggcctggtacccatcctctttccactgtgagcagagccagaaggtaggtctgttaagagtctgtgcccctggacctggggagtggatatcagatgggatatctccttccatcccccggtccaggggagagtcacttgttgtaccctactccattaggtcccaaatgggggccccatttcacctgtatcaggactctcagcatccccagctgcccccacatcttgcctctgggcctcagagagggactggtcgcattttctgtgggtactcctcttaccccaacaaataaaaggaattgtctgagcctagaggcagatgctgcactgcactactccaatgtcttccatggagcctcaggtgctccccctctcacctggcagccccttc

SEQ ID NO: 12837 - DNA, 740 bp, Macaca Fascicularis
  misc_feature (1)...(740): n = A,T,C or G
tgtatatattttcttactgtacataaacatgtttccttaagtcgtacagaaggtgacgcgnnnnnnnnnnnnnnnnngtgtgttcagattgccgctggggaatcttcttgtgtcttcagcgcccagccctttgtgttcctggtgaagcagtttcacgtgannnnnnnnnnnnnnnnnnnnnnnnnnnnnnnnnnnnnnnnnnnnnnnnatgccagtgtggagcaccctcccaatcttagttcagaagaggcttgtatgacctgttcaggggtcatgtgaggtctcgccagtttcgtgagtccttcagaggccagaaagttctgaagttctgagtcgccaaccagggtcacttagcaccttgccactggcgagtgtagaggctgcttctgtgtgtggtttaggtaaactggaaacgagatactgacatgctgccctccagaggtctgcatgctccgcttcacatgccgttcactctcagtctaagacttccaggcgggccctttgtccagcctgcccggtagagtgaggctgcctctcccaccaggccttgggatcccatttagaaacggcgttcacttcagaaggtactttttaactgctcaatttttgactattttcaatagtttgctgaaaactcctgataacacttgctactacatatcatgttttaattgcttgtacagttaacctttaattttatttagtaaagtgtatcaaagtaggacttttttgaattgtaa

SEQ ID NO: 12838 - DNA, 701 bp, Macaca Fascicularis
  misc_feature (1)...(701): n = A,T,C or G
atgaccaaaagtccaatgacaacatactggcaaagtacactaggatagatacacagagtggaacactatgcagcaatcaaaatgatgagatagatacgtatttattgtcatgaagatggtttatggtaaaaatttaaaaagtggttatcaaataatgtatttgatacatgattacttctcatttttgcaaaaaagaaatacgtgtgtgtgcttttaagaaatctaaggatatacaatgcttttgcctttctttccctctgtactttctgtgttttctannnnnnnnnnnnnnnnnnnnnnntcannnnnnnnnnnngtagtgagtnnnnnnnnnnnnnnnnnnnnnnnnnncctgggtttgtgcctcagtttcctcattcgtgcttcggtttttccatctttaaagtgacctcagttttattatctgcaaaatggggataacagtagggcctgccccatggnnnnnnnnnnnnnnnnnnnnnnnnnnnnnnnnnnnnnnnnnnnnnagtcagcaccaagtaagcactcagtgttctcatggtgtaacaaacaataatccattcatcctgagatgaacttctgacgcgaggtttatgccttagtgactcctaccgaggtgggtctcctgggcttgctgttgtcttcagattccagtcctgtgtaacctgctggatgtctgttnnncctggcctncnnctggc

SEQ ID NO: 12839 - DNA, 865 bp, Macaca Fascicularis
  misc_feature (1)...(865): n = A,T,C or G
tagggggttcaaaagcatcaagatgacttacaggatgtaatagggagagctgtcgagattggtgttaaaaagtttatgattacaggtggaaatctacaagacagtaaagatgcactgcatttggcacaaacaaatgatatgtttttnnnagtacagtggatntnnnntacaagatgtggtgaatttgaaaagaataaccctgatctttacttaaaggagttgctaaatcttgctgaaaacaataaagagaaagttgtggcaataggagaatgtggactgaaaacaataaagagaaagttttgtcccaaagatactcaactcaaatattttgaaaaacaatttgaactgtcagaacaaacaaaattaccaatgtttcttcattgtcgaaactcacatgctgaatttttggacataatgaaaagaaatagagatcgctgtgtagggggagtggtgcattcatttgatggtaccaaggaagcagcagctgctttgattgatttggatctttatataggatttaatggttgttcactgaaaactgaagctaatttggaagttttgaagtcaattcctagtgaaaaattaatgattgagacagatgcaccttggtgtggagtcaaaagtacacatgctggatcaaaatatataaaaactgcatttcctaccaaaaagaagtgggaaagtgggcactgcttaaaagacagaaatgaaccctgccatataattcaaatattggagataatgtcagcagtgagagatgaggatccactggaattagccaataccctatataacaatactattaaagtattttttcctggaatataattggtatatgtcttccactttccatcatgtatgtaaa

SEQ ID NO: 12840 - DNA, 703 bp, Macaca Fascicularis
  misc_feature (1)...(703): n = A,T,C or G
caccgggaggtgcagcggcccaggcaggccgggcgggagggaggagggccgagacaagagccgcgnnnacaccgggaggtgcagcgggccaggcaggccgggcgggagggaggagggccgagacaagagcagcccacccagcagaaatacaacccgagctacaaagcatgggaaaaagnnnnnnnnnnnnnnnnnnnnnnntgagcacgttggcaaggaaaaagaaaaaagaaaaaagaaaaagaaaaaaaaaagaaccttgtgtctgtctggtgaaaaaaagaaaaaaaatttggaagagaggaccatgagaattttaataaaacagaaggaaactaatggaccttccaggatttattgtggacggatgtggatatattctgtacagaaacaacacatatggaagtggactgaaacctatgtnnnnnnnnnnnnnnnnnnnnnnnnnnnnnnnattttgtaaaatattagtctttattttcattttttgtaannnnnnnnnnnnnnnnnnncataaagaaaaaggaaacaagaattaggnnnnnnnnnnnnnnnncaaataattataaaaaattgtcctgtgtctatgtatctatatctgttttgtatttttttctggttccaaaccagatttcctgtgattctatactaataatttttgatataaccctttgcttcttataatgagtgcgatatatgttgt

SEQ ID NO: 12841 - DNA, 742 bp, Macaca Fascicularis
  misc_feature (1)...(742): n = A,T,C or G
tcactgcagggaacctcnaccgtggaaaatgaagccacagaaagaatttatcatttcgtggtgnnnnnnnnnnnnnnntaccagtgcgtccagggatacagggctctacacagaggtcctgctgagagcgtctgcaaaatgacccacgggaagacaagatggacccggccccagctcatatgcacaggtgaaacggagcccagtcagtttccaggtgaagaggannnnnnnnnnnnnnccgacggccttcctgagagtgagacttcccgcctcgtcacaacaacagattttcgaatacagacagaagtggctgcaaccatggaaacgttcatatttacaacagagtaccaggtagcagtggccggctgtgttttcctgctgatcagcgtcctcctgctgagtgggctcacctggcagcggagacagaggaagaatagaagaacaatctagaaaaccaaaagaacaagaacttcttggtaagaagccgagaacagacaacagaagtcatgaagcccaagcgaaatcaaacgtgctaaatgctcgcccaggagacatcccttgtgctcgcctgggttttggaagctctgaagtcacatcacaggacacggggcagaggcaactttgtctctacgccaactcagtcccatcagagagcaagcgctacccacttctaaatagcaatttcgtcattgaagagaaagggcaagaccactagaactgtcnnnnttattttcatgtatat

SEQ ID NO: 12842 - DNA, 788 bp, Macaca Fascicularis
  misc_feature (1)...(788): n = A,T,C or G
gacgtgcagtcggtggagcctgtagatcagagaacccgggacgccctgcaacgcagcgtccagctggccatcgagatcaccaccaactcccaggaagcagcggccaagcacgaggctcagagattggagcaggaagcccgcggccggcttgagcggcagaagatcctggaccagtcagaagctgagaaagctcgcaaggaactcttggagctggaggctctgagcatggccgtggagagcaccgggactgccaaggcggaggccgagtcccgtgcagaggcagcccggattgagggagaagggtctgtgctgcaggccaagctgaaagcacaggccttggccatcgagacggaggctgagctccagcgggtccagaaggtccgagagctggaactggtctatgcccgggcccagctggagctggaggtgagcaaggctcagcagatggatgaggtggaggtgaagaagttcaagcagatgacagaggccataggccccagcaccatcagggaccttgctgtggctgggctatgannnnnnnnnnnnnnnnctccagtccttgggcctgaaatcaaccctcatcaccgatggctccactcccatcaaccttttcagcacggcctttgggctgctggggatggggcccgagggtcagcccctgggcagaagggtggccagtgggcccagccccagggaggggatgtccccccagcctgctcaggcccctcaagctcctggagacaaccacgtggtgcctgtactgcgctaacccctgattaatacaatga

SEQ ID NO: 12843 - DNA, 729 bp, Macaca Fascicularis
  misc_feature (1)...(729): n = A,T,C or G
gaagctatttgctgaagacataacaaagcaactcttacttaatttggaataatctttaaaaaatcccagttagtctctaattttttatatgctttaatctgtacacccccaaagtatatccttttgtttatatttatctcaggatgctgttgatcacaagtttttaacttgatctaaattaaatgttnnnnnnnnnnnnnnnnatatgtatcggatttcttcaaagaaagaacttcttttaaagaaagaaaagaggaggactctcacacaacnnnnnnnnnnnnnnnnnnnnnnnnnnnnnnnnnnnnnnnnnnnnnnnnnnnnnnnnnnnnnnnnnnnnncccaggtgaagctggcctgttttctaaaggaaaaggattgccacatggcaagaggatgcatctttcttcccagtgtataagcctttaaagactgctactgctgctatgcctcttggatgcccacttcgtgtgtacatagttacctttaacacagtggttatctaatagctctaaattcatttaaaaaactccaagccttccaccaaaacagtgccccacctgtatacatttttattaaaaaaatgtaatgcttatgtataaacatgtatgtaatatgctttctatgaatgatgtctgatttaaatacacatattaaaatgtatgggacaaccaaatccacactcgcaggcatttgtagtcaactgtaatcaaacnnnnnnnnnnnnnt

SEQ ID NO: 12844 - DNA, 963 bp, Macaca Fascicularis
  misc_feature (1)...(963): n = A,T,C or G
gatgcaccnnnnnnnnnnnnnnnnnnaggagggaatnnnagtgtggcaacacaacaaaatnnntgngnnnnnnnnnnnnnnnnnnnttttaaggacatgacaccaactattaggaaaactcagaaaattgttattaagaagagagaaccattgaattttggcatcccagatgggagcacaggtttttctagtagattagcagctacgcaagatctgccttttattcatcagtcttctgaattaggtgacttagatacctggcaagaaaataccaatgcatgggaagaagaagaagatgcagcctggcaagcagaagaagttctaagacagcagaaactagcagacagagaaaagagagcagccgaacaacaaaggaagaaaatggaaaaggaagcacaacggctaatgaagaaggaacaaaataaaattggtgtgaaactttcataacacatgttcttcacattttatcatgccagtaggagaaatctcagctccacaactctagcaacatttgtatggatgtaagagtattttaagaatatacactgcttgattttaatacattgatcaagccatccaggacaccaggattctcccaaagtaccttgaactcttagtgattgagactcaaaaaaacaaaaaagacttgagacaatgttttcttcaacgtgctccaaatataagacatttgtttgctgtacagaaagtatcacaaatggaatatatcagtacctctcaagctagtgtttctagctaaataaatgggtgtatataattttatggtggaaaaggtctgttatgatttccttcaatgtgcataatgataaaataaataattttaatattttatttccatggttacctgacctaaattagataaattgtagggctttagctttcttatttttgtcaaaaanttggtgttgacatacattctctctaatttgaacatggtattgttta

SEQ ID NO: 12845 - DNA, 787 bp, Macaca Fascicularis
  misc_feature (1)...(787): n = A,T,C or G
caaggaaaagtgaaataanncaaaaaatagtnnncccaactgttggctaagaagaaatgcaaaagaagtggcataggagtgtgttatgggtgctgaactctctctctttttccccgattttccagagctaggctgtggagtagagtttgtataggtaactannnnnnnnnnnnnnnnnnnnnnnnnnnnnnnnnnnnnnnnngtgcttatgtcacagccttatgagttagctttcctgctagccccctagtcagtcactaaactagtaactagtggggtttaatgaaggtcatcagtttctgagatgggagagcaacaagtagagatgaagttaaaggtatttatcatccaggaaatcatttctgagtcaccattgacaggcactattctaatcagtagttcacttttatatttagtaagattttctggggtgacaataagagatattagataatataccatatgtatttattactagtcttttcctctaggaaaagggatgctttgataattaaggccagaggcccattaaatgagaaagtcacagatatatttctccaagaaagccaacaaccgccaccacaatgacagaaatgacaacaaggccctttaacttgtcttctagtttagcgacatccttcatttgacatttagtagaattcctctttggccacaagaataagcagcagatagacaactatggctgttgaggttctcattttggtttgttttaatttttcgaacttcannnnnnnnnnnnnngtaattagtttaaaaataaagtcct

SEQ ID NO: 12846 - DNA, 671 bp, Macaca Fascicularis
  misc_feature (1)...(671): n = A,T,C or G
acattgggatgtaatcggtggagactacannnnntctttgttaaactttgtaggattaaatatttgcatggcagggggcttgagatactcctttttaacactgagcagccagttaaaaccgaaacctnnnnnnnnnnnnnnnnnnnnnnnggatttgaagagctagagtctgcgggaggattggagactgacttgtgactgggggctggggggcattcccagtgggaatgtgaagccagaggtttcagattcgtgacatccaccccctgggcaagcaannnnnnnnnnnnnnngcaaagagaactacctnnnnnnnnnnnnnnnnnnnnnnnnnnnnnnnnnnnnnnnnnnnnnnnggccacgccttaccggtggaaagcaaatcttttcaaaataagccactgggactcggtaggtggagccccagctgnnnnnnnnnnnnnnnnnnnnnnnnnnnnnnnnnctctgtgccatgtgctggcaggaggttgatgtgatggtgactgttttctgnnnnnnnnnnnnnnnnnnnnnnnnnnggtcccagccnnnnnnnnnnnnnnnnnntttcagtttagannnnnnnnnnnttattctaataaaattagttcactgccagtaatttgttagctttgatgaannnntannnnnnnntctttcctaatatcaaa

SEQ ID NO: 12847 - DNA, 728 bp, Macaca Fascicularis
  misc_feature (1)...(728): n = A,T,C or G
agaaagaaataaagggatgtataatcaatttgacatagataattctggtagataatatcaatgtcattttaagtnnnnnnnnnnnnctccttgtggttttgatatccatgtctttaaagcgccccagtacatgacaatctgnnnnnnnnnnnnnnnnnnngcatttagacctctgaatccagagaagacttttctttgtgtagctcaggctgggctcggtgtgccctgtggagaatgtagatcannnnnnnntcacgggtacttgggccatcccctcgttccagccctctctggccaacagtcttttgtctctagggctaagacagtgcctctccctgaacggtggactcctcctcaannnnnnnnnnnnnnnnnnnnnnnnntccaccagaagttagagtttgtggagaagaacgcaaagtacttcttaggtagatgggcttgggagaggattggaggtgcatgcttgcttccgccctaagattcacatagcccagagcccctcacttccctcctcctccacccctggtcttgctgacctgccttcgacctctcttccatctgtccctagctgnnnnnnnnnnnnnnnnnnnnnnnnnnnnnnnnnnnnnnnnnnnnnnaaaccctgcgttcagaaatggaaatgttcaatggtgagtccagcggtaatagtgtgtgctggcctgggattgttgcagtgtttccttgtgctgttgacttgaggggcc

SEQ ID NO: 12848 - DNA, 1221 bp, Macaca Fascicularis
  misc_feature (1)...(1221): n = A,T,C or G
ttattttgttatttttggataaaatttattttatggcttaggatctatgacccctgcctcgagagggagaaacggtgacatgggatgggggagtgaagggaagctggcagtggatagggcaacagagaagatacagcaggcagggccccttcatacactggagggccacatggtcaggcctggacccagacactcaccctggctcccaggcagcattggagatatggagccatatgtagatgtcacagccacttggacccacttgggcacagtcagactccaaattcagagtatttttgggttagcatatgtcagagaggccagcacacttgctgctgtcttctgtgcaatgtctcacnnnnnnnnnnnnnnnttgtcaaacaggcaaaagcagacacatgttctatgtggtcatgcaactaacatgccagctatacattaacatatcttaggtacatacacgttcacacagctatacatgaagaaactcggcccttgtacttttgcatagtctcatacacatatcagaagcctccacctcgctaacaggaatttggggctttgggagattttttaatcagggcaaaacttgtattggtaaccacatgtccagacccctcctgtgctccatccagggtcccttgagctgcttcccattcccccagggctgagacctaatatcctctatccctggcctctagcgtaaatgtgtctgtatgttcctgcctaaccatcctaggccctgggtcagagtgggcggagaagccttccatgccctaacctgtactcctacccagcccacctcctgctcagccccnnnnnnnnnnnnnnnctctgtatgtgtgtgtgcgtgcgtgtgcgcgctgcaggtgcgggcatgttggggcgtgtctcagagcctgaacttcccttccagtcagtgctggaaggaggtgggcaggggaatgatgaaaggaannnnnnnnnnnnnnnnnnnnnnnnnnnattctcctgtcttttcctcctgaccgagaagtaggtggggataggagggcaccctccccatctgctgcttggcagggcatgagtaagtgtccagagcaggtctgtgggggtagtagaagagctgtctctctgggttctccctcccggctgggnnnnnnnnnnnnnnnnggcccttaggtccatgtgggacattgagatcccagattgcccatagtgggagggttgcaggaggggctg

SEQ ID NO: 12849 - DNA, 766 bp, Macaca Fascicularis
  misc_feature (1)...(766): n = A,T,C or G
ggagaagagtgacacagttgctgatatagaaagtgaaccagtggtagaaagcacagaaactgaggggacataatcatcactcagtaggtaaaagataccttttgtaaagttgtcatctctctgtaatagataatggctgactnnnnnnnnnnnnnnnacttttgtctgccagaattaagttaatctgatgttcatgttcacctttctcttaaaataattgtacaactgacttgtatagacattgttcttaatatgaacatggtaggtaaactttttttttttatttttctgataaaatataaatgttggccccagattcttttaacgtcaaggaaatgaataacagcttgtcagagacttcctatggaagaaagaattttttagataactatcattaggttggatatggtaatagatatatttcagaatagcaagtcgtggtatatcttatccatatctttaggctgctgcagaattttaaggttatagataaagctgtgatattttatgcaaagactggctctaggtatttgaggagcacaatacagagattttaaaaagtgattttgtaaaatctacactatggtctctgtttctccaaagtaagtgtttgtgatttgttcctcatactgcagtgagtaaaaaagacacaagaaaacaacaacgtaaatattaaagtacgtttcaatgttnngtgaattttgtttttagatgccaataaaacttcctccccctcacactgnnnnnnnnnnnatgatccacctca

SEQ ID NO: 12850 - DNA, 758 bp, Macaca Fascicularis
  misc_feature (1)...(758): n = A,T,C or G
cagacaggaagcaccngccnnnggaatatacaaatannancatanctctttgcttgtacaaaaacagttaagaaagcttacagcagattatttacaaacagtatcccgggatatgatgaaggcagaggtgggctggcttagaggatgggatctgtgggggcagaggagccacagcagcccagagggtcccaggctggnnnnnnnnnnnnnnnnnnnggctctgcaaggcactggactctgctactgagaagggggcttaattcttcttgtggaggaacttcattttgttgcctgtgggccagagaggacaagagagagaatgttcagtgttatcccttccaacctccactccctctcctccttgtagccataaccctcttagtgggagaggaagagggttaggaagnnnnnnnnnnnnnnnnnnnnnnnnnnnnnnnagggaaaacacgtgagagctctaattagggcactggtattaatcgctgtgtggttttaggcaagccacttaacctcttnnnnnnnnnnnnnnnnnnnnnnnnnnncatgctatgattctctatctgnnnnnnnnnnnnnnnngcagggaggggagcattttgcaggaagggcacttgcactgctgtgtctgcagacctgttatggtctagaggaaagctcactggctctcatggccttcatattcattcaggatggagcgcacacagaaagacctgatgtatgtgggaacctnnngattcctctttgtatgcaatatggaa

SEQ ID NO: 12851 - DNA, 772 bp, Macaca Fascicularis
  misc_feature (1)...(772): n = A,T,C or G
catgacatgagaagagacttngtnnnntntactgggctttttcatgtctgtacatgctattggcttatcgtttgtatctgaagggcagtaggctgaagataacagtgtacaaggtgggaaaaaccagctcagaggtgatgttgccgagctactctgctctctgtacctgctctccactgggacttcgtataaccctcaataactgttttttatttggtcttagggctatctgatacttaagagctgaaggcattccagctggcacagaggaatatttttctaagtgttaatgttctatatggtaattgggggaagaattatttcttttgacaagttaatatacggatggctgtttgtatcagccatggttctttctggcggaaaacagaattctccaactaaaaagattttaatggcagactgattacagtggtgtgggccagaaacaaggggcactgaaacacccggagacnnnnnnnagcaggaagccattaccattctgagccttgaagggcaaggatggaaacagtgttaccagagcccagtaagaactgctgtcatggaggaggggccaccttgtaagagacatcattactnnnnnnnnnnnnnnnnnnaaattgctggtgcctctctttggagaaaccaaccagatacatctgcgggagagcccaggtgggcacagagaagggtggagagagaatctgggaagagaaatggagaataagcagcacagtgtttttcatttctgtaaattcctatgtagaaggctcag

SEQ ID NO: 12852 - DNA, 756 bp, Macaca Fascicularis
  misc_feature (1)...(756): n = A,T,C or G
ctagagatgctgnnncaggccctngnaacccacctaactagtaggggggtcagtgttctcagaggtcagccagtctgtgggctcagcctccaggcagaagggcgctggaaggtatctctaagggannnnnnnnnnnnnnnnnnnnnnnnnnnnnnnnnnattccagcttcagtgcttagcgagctgctccctgctnnnnnnnnnnnnctggctcgtgccctgagtgnnnnnnnnnnnnnnnnnnnnnntgtggtgaatctgcagtaccaaggagcccatctgcctgtccagggatttggacacttggtnnnnnnnnnnnnnnntccaggcgtcctgggaatcgtgtatgactcagttgctttccctgagcaggatgggagcccccctggcctcagagtgactgtgatgctgggaggttcctggttacagacactggaggcgannnnnnnnnnnnnnnnnnnnnnnnnntttcaacagcgggcccaggaagcagctgccacacaattaggactgaaggagctgccaagtcactgcttggtccatctacacaagaactgcatcccccagtatacactaggtcactggcaaaaactagnnnnnnnnnnnnnnnnnctggctgctcacaggttgcccctgactctggctggannnnnnnnnnnnnnnnnnnntgttaatgactgtatagagagtgggcgccaggcagcagtcagtgtctgggcacagaacctaacggctnnncccaactgccactcagaa

SEQ ID NO: 12853 - DNA, 732 bp, Macaca Fascicularis
  misc_feature (1)...(732): n = A,T,C or G
cannnnnnnnnnnnnnnnngagtnnnnnnncagcagctccagcgggtnnnnnnnnnnnnnnnnnnnnnnnnnnnnnnnnnnnnnnngacagaacaggacaaatggatgtcgcacacnnnnnnnnnnnnnngtgcccctctgtggttcatagactactttcgtnnnnnnnnnnnnnnnnctgcttcttaattcagtgttatgatatcttccagtttttgctttcataggtcagaggtctatcttgtgtgtgcgttagacttgatgagaaggtgtgaactctgtagaaagtctcttcttcatcactgaattcagtcacttggagatgacaacttcacatgctaacccgatgaccccagaaaactgtgtgagattcgtaccgaagaacctggtnnnnnnnnnnnncttagacccaacctggtcgacagctcgagaaagcattttttccaaggaaatgtctcggccatgggtactgtattnnnnnnnnnnnnnnnnnnnnnnntgtgggccctgagctctgaccctcgtgtctgacgcggccacctctttctggaggggctgaggacagatgtgcctgtttgtggggaccaggctgggcctaagcgannnnnnnnnnnnnnnccagcccggagcgtggagcccttgtgggggtcgggtgggatgtgcgttctccgatcgtggtgatgtcaggagctcctcggagggaacagagcggctgtgtgtgcagcctgcagg

SEQ ID NO: 12854 - DNA, 637 bp, Macaca Fascicularis
  misc_feature (1)...(637): n = A,T,C or G
gagnatggggagctnnccgcnnnnnnggagtngggtagtatgnnnaatggggtttcataaaacctccagcctgcacccctcccttctccatctcgcttgctgcccaacaccatggccctcacaggcccaactgacctgcgctggagctgctcttatctaggggggaggggggtggcacagcagcttgggtaccccccaacctccaggagctagtggaggggtgtgtaacagggtcataccccctcccttttgtccaccctacccccagggtaaggggagcctctctccttccccatcagactggatgtgcctttatcctctaatgccccaatctctctctgaacacccccattctccacctgttggtggggggtgctccttgacccacccagatttgaccgttcagggggcctcccctgctatccctcctcccatcctgtaccccccatttctggggcctcatcactgtggaagacggggatagtaagagataagtgggtgggaggcacggggaaggttttggagtagaaccaggggtgtgtatgaaggggggtgacaaggtcccccgggggaggggaccaaccttgtctggtggatgagaaggcgtatttatttttcactgnncagtattaaaaag

SEQ ID NO: 12855 - DNA, 765 bp, Macaca Fascicularis
  misc_feature (1)...(765): n = A,T,C or G
tgcnnnnnnnnnnnnnnnnnnnnnnnnnnntgaagtcatgccagacagctgaggggcctggtgaccaggaccgtgaggcagcatctcaatctaaacaatgcggnnnnnnnnnnnnnnnnnnnnnnnnnnnnnnnnnnnnnnnnnngaaccaaggatgagatcatcactaccacggttcctgaggacatcatgtccaaccgaggcaatgacnnnnnnnnnnnnnnnnnnnnnnnnnnnnnnnnnnnnnnnnnnnnnnnnnnnnnnnttcaagtggtgaggcagtggttggaggcctcctcacagctggaggaagcctcaatttacagccgatgggaggtggaagaggactggtgtctgtctgtcctccgctcctaccaggcagaacacgggcctgactnnnnnnnnnnnnnnnnggaggacatgagtgcagatggacggcggcagctggctttgtttctggctcggaagcatctgnnnnnnnnnnnnnncactcactgtaccccactcccagcccagaacttccagatgccctggnnnnnnagggaccacactgggactcattatggaagaatggggtgagaggacacatgaggaaagactcccttatttgtgattctctgtgttcatgttgctgtttatagtttgtggaaagtgggggaccatcccccttctcaccactgttcctcttgctcgtttcccctcattcatgtggctatacttaaccttctccaacatacatcttgcattacatgaatgaattatcct

SEQ ID NO: 12856 - DNA, 734 bp, Macaca Fascicularis
  misc_feature (1)...(734): n = A,T,C or G
gannnnnnnnnnnngtaggaannnnnnnnnnctgtgtggtatgcaaacagatcttgcattacgatgtttgattgaaacctatgctgccagttttgaggaaaggaatgaagaacctttagccaaacgcataaagaatgataaaacagaaaaagaaatttacactttggccaaggaaggaaatgcaaaaaatgtcccagagaannnnnnnnnnnnnnnnnnnnnnnnnnnnnnnnnnnnnnnnnnnnnnaggtgtgattggagacattatgtgggcaaagaatatttcagggctctaggccttggagcagtggaattccactatttccagcgaatgagtagttgggcaacttgtgggatgcggaaaacatctttggaaacctcaaatagtaccacaaagagacaagataatcagaatgatgatagtgaagagcatgatgatggaggatacagaatcacannnnnnnnnnnnnnnagtttgcctgggcttcttagtgttgaagaaaagaagaaaatagggcatctttgtaaattgctgattgaccaaggtcgaatnnnnnnnnnnnnnnnnnnnnnattcagtcctgctttgcagtactatacagaccctctggtgtctttggaaaatgttttgttaactgctttacnnnnnnnnnnnnnnnnnnnnnnnnnnnnnnnnnaatggaaaagaaatttnnnnnnnatctgtcttccaccaaaaaaaatttttaattata

SEQ ID NO: 12857 - DNA, 774 bp, Macaca Fascicularis
  misc_feature (1)...(774): n = A,T,C or G
gaacggcagcagatagaagannnnnnnnnnnnnnnnnnnnntcagnnnnntggcacacacccgccctgagttcaatgcatcttgctagaccatctgaacttgggcaggaggcagacggggtnnnnnnnnctggggaaggagcaggcccctctggtcagccttcctaggctggnnnnnnnnnnnnnnnnnnnnnnnnnnnnnnnnnnnnnnnnnaaggnnnnnnnnnnnnnnnnnnnnnnnnnncctggaaaccaagaggggcacttgctgacagaggcggcagccccaaaggggatgtggnnnnnnnnnnnnnnnnnnnnnnnnnnnnnnnnnnnnnnnnnnnnnnnnnnnccgggctggccttcatcgtgggactcctcatcctcctcagcagaagattccgctgtggggccaataagaagcgcaggcaaatcactgaagatnnnnnnnnnnnnnnnnnnnnnnnnaagggcctggcgtgcagtgtgtgccacaggagatcacagaggagccctggagaaaagtgagatggacaaggaggaaacaaaacccnnnnnnnnnnnnnnnnnnnnnnnnnnnnnncctgcctttgtcttctcagcctcggcagtgccacccactgcacaggagccagctgggaagccaggccctgcnnnnnnnncctccccttcttccctgggctgtagacctttgtccccgtcactgccagcgcttgagcagaaggannnnnnnnnnnnnnnnnnnnnnnnnnnnnnnnnnnnnnnctcctgcccc

SEQ ID NO: 12858 - DNA, 683 bp, Macaca Fascicularis
gaaggggctcccgttcagcaacatccgggacctttcacatccccccacctctccccgaggcccggcccgccccgccccgccctccgtgcttcgcggtagtaactgccccggggccgtccccgggcaggatgacgagggtggctcggcggctccggcattgtgatcaggacttgcggggtgggggccgggcgcggtcgcacggcaagggagggttgtggtgtgttgcgctccccccgcccccccgccgctccccttgcccggaggggcgcgcggcccctcccggtctccctcccgccgccgcggctttacctgctggcttgggggaagcggccctagaccttttatggctcggaaacgggagtgaggcgtccagcccgagtgtggctgagtgatggggaggcgttccaatcgagagctcgggatatgcgctcggtgactgcccgaggggacaatgggtgggcgccgaggtggggacgagatgggccgggccgggccgggcggagccggcgggaggtgaggcctggaaggaggcgcgtccgctttagggaagccagagttccgaggggaaaggacaaccttctctggcggagggctggagctggtcctggcagccttgacccggagacaggcagtcaggcgtgaccgcacggacccgtttctcgtaggctaggtttcctacccaa

SEQ ID NO: 12859 - DNA, 752 bp, Macaca Fascicularis
  misc_feature (1)...(752): n = A,T,C or G
gacnnnnnnnnnnnnnnnnnnnnnnnntcactcacttgttggtggcatggctgtaactgaccacctcggccaggatccactgnnngtccccatccacggccttcacccgggcagccaccttgtctccatggtctggccacatagtccnntgaggcggggatggccccacagaggggtgggggcctgtgagcagaacaaagggtcagtcccagcccctgggcaccagcccctccctcgcagctgctgccctcacttgtcaccgggcttcccgatccacaggggcagggtcnnnnnnnnntnnnnnnnnnnnnnnnnnnnnncccctctgcgcatggtcttcnngtgtgnnnnnnnnnnnnnnnnnnnnnnnnnnnnnnnngccgctgtgagaaggaagggaggcctgaggccccagggacaggtgctggccctgaccccccagcatgctgcactgagctgttggaggacccccnnnnnnnnnnnnnnnnnnnnnnnngcccgagggcccagcaggactgtgaccctatcggccatgtgtcaacacctataggggctgctgcgctgaaccacagttgagtgagagggcagcacagcgcacacccagggggaggaagcagaagaaagaaagcagtttccgaggtgctnnnnnnnnnnnnnnnnnnnnnnnnnnnnnnnnnnnnnnaagtgtgtttagttagtgaatatgtcattgaactctgcacctacatctnnngtnntnntattaatatacg

SEQ ID NO: 12860 - DNA, 720 bp, Macaca Fascicularis
  misc_feature (1)...(720): n = A,T,C or G
gggccaaaggtccagatcccccaagtccagggagggcagcagggattgggttgggggaagataactgggggaaggccagggcccctaggctacaaaaccaggnnnnnnnnnnnnnnnnnnnnnnnnnnnnnnnnnnnnnnnnnnnnnngaaggggaacacagatttctttgggggtcctagannnnnnnnnnnnnnnnnnnngagttccacagagctctgggcacctctttgcaaagccatgtttgcacggtggggggatgggtggggggagggcgtggaaatagggattctgtgtctttgtgtcataactttgatgggggcagtgagggagacagccccaacccttttctccaatcccccttccccaggttcctgggctccccttctctctaccttctccccaacgtctgtcccatccatatttgtctctctgtccacccactcctgggggggccttccccatctctcctccaggccccccggggagggggaaaggagtttggggaggattcgtggtctttatggttttatatataatatattaaaaaatcaaaagtctgtatgaaaaatatcagattgcacccccctctccccattcctggcttttgccccctttttcttgttaaaaaaacaaaaaacaaaaaaacaaaaaaccacacacacattttgtatggggcagggaggggaatggggagggggttggcanntcactaaccacc

SEQ ID NO: 12861 - DNA, 646 bp, Macaca Fascicularis
  misc_feature (1)...(646): n = A,T,C or G
caggacacaggtttggaagctggagaannccttactggatcaccacaacaagaccatccaannnnnnnnnnnncaggacccagcccctgaaccacagagtagtggaatccaacttcccaaatcaggaatatactctaggctccgaattccagttttacctacgtaagattgaggaaattcttgagtacttaagaagannnnnnnnnnnnnnnnnnntaagaggaatattcaatattaactagcttgaagtctgacctaaccagaagaggcgcctgtcccctgcagccacaccctgccctgnnnnnnnnnnnnnntgtnnnnnnnnnnnnnnnctccccctggggcagnnnnnnnnnnnnnnnttaaaagaggggaaactgtcatcctggacaggaagtgagatgctatcatcctggacaggaagtgagatgctatcatcctggacaggaagtgagatgctatcatcctggacaggaagtgagatgctatcatcctggacaggaagtgaggtggcttcagttcacgagaagggatctgagttagacatcaccagtggaaattgattggaatagaaagttaaaggaaatagaaccctaactattctcctatcaaatcatatatgttgacctgtctaaattataaacca

SEQ ID NO: 12862 - DNA, 741 bp, Macaca Fascicularis
  misc_feature (1)...(741): n = A,T,C or G
aagccatcaaggcaaaagagnnctnnnngttcctngnnccagcctagagttttgggaaagaaagaaagagaaaggaaaggtcacagtgacctaggattggaacctttttgctgttctggcttgcagattaccttctatcccacaacagctgagaaatctgtgaagctgagattctgaaggacccatcttagttnnntccatttaggcctcaattcccttccttttccaggggcagccttagttcccatggccctgaaacacacacatttcccccttcctttcccagaagccactgacccccccaaagcactcagtgcatctgttttacaagtggaagaactaggatggctttctaaagtctcctagaaatgaagttctttctctgtgcagctttaccccatggagcagagtgaagatgtttcattgtcttggggctgggaaaccacttccccaggcttctccctcccccacccccataggaaaaggatttggccttagcttctgggcctataggcttccttccctctacttcctaccacctcttctgccttcctttgagctctgttgggcttggggatcttagtttatttttttgtattatttcccagctcatttttttcttctggtcagtttttttaagggggggtgttttggttttttgtttttgtttcgcttctaagaaagcatttgcctttcttcctctcccaacataacaatcgtggtaacagaatgcgactgaag

SEQ ID NO: 12863 - DNA, 626 bp, Macaca Fascicularis
  misc_feature (1)...(626): n = A,T,C or G
agtcaggatgtnntcagtcaccctcctggctctgccctgtcccactccaccctaccccagggggaacagcagcttcaccttgttactcccagtgctctcttggctcactcttatgggcggtctccagtgactgnnnnnnnnnnnnnnnnnnnnnnnnnnnnnnnnntgcctcccttcttattccttttggctttgtggggagaggggaaggatcagggggccaggccagcagctcgggggctacagggagatggataatgtgcctgttttttaacacgacaaaaaagcctacctccaaaatcccctttttgttcttcctggacctgggcattcagcctcctgctcttaactgaattgggagcctctgccacctgccccgtgtatgctggctctcagctcatggggaagccacatagacatccctttcttcccttgcacgctcnnnnnnnnnnnnnnaggtcttcacaccccgattcctcaagttttctgctnnnnnnnnnnnnnnnnnnnnnnnnnnnnnnnnnnnnnnnnnnnnnnnnnnnnnnnnnnnnnnnnnnnnnnnnnnnnnnnnnnnnnnnnnnnnnnnnnnnnnnnnnnnngaggtgtcttttttttctttctttagt

SEQ ID NO: 12864 - DNA, 511 bp, Macaca Fascicularis
  misc_feature (1)...(511): n = A,T,C or G
gcagatgcgtagcatttgctgcatnnnnaattcagaagtataaatttgcccttggcaaatgcatacacctcatgctagcctcacgaaactggaataagcctttgaaaagaaattgtccttgaagcttgtatctgatatcagcactggattgtagaacttgttgctgattttgaccgtgtattcaagttaactgttcaccccctcgcccatttcacaccctgtacatcatcccatgagaccctggtgcacggttgtttgtcacccttggaaacgaaaaaccaagtgggaacagcagatacacaatcacagcaaggccctgcggcccaactccatttgtcaacaggggcgtgaggtcccaggaggaggccaaaagctatacggaaccccattnannacatcacggcagcctccaacacaaggcttnngagatctggnnnnntggacaagnnnggaaggcgcaggannnnnnnnnnnnnnnntccccaggctggacaggaagactgtcctttcc

SEQ ID NO: 12865 - DNA, 720 bp, Macaca Fascicularis
  misc_feature (1)...(720): n = A,T,C or G
ctactgtatgactatatcgcaatttatccattctgataatggataattattgtgtattagagcaggctgacaagagacccaagaatgtataatgtctcaagtaannnnnnnnnatttcttgctcacttaatagtctcagatatatgttcctggttggcaagcaagtggctctccttnnnnnnnnnnnnnnnggagtcaagatcccttccattttgtgttcttccatttcctagggccccatcagcatctgcatttagttggaagaagggcaaagaaagcttggaggtacacccactcaaagttctaacctgcaagtggcattcatcactccactcacattccatgggaaaggagttagctggctctccttcactagagagagtggagggatggggnnnnnnnnnnnnnnnnnnnnnnnnnnnnnnnnnnnnnnnnnnnnnncttgcagaggtgaaagtagttctctgatacatgttttcagtatttctctcttgtaaactgtactgcaataatcattcttttttgtgtctctttgtatgcctggacaagaggagtttctctgtgtatgcccaggagataaactgttaagtcttcgggcacctatcttcaactttgctagctattgccaaatcacttttgaagtgactgtaccaatttgcattccaaaccatgtatgaaagttcataatactgtcaaacttagtttatgttagtctaatga

SEQ ID NO: 12866 - DNA, 740 bp, Macaca Fascicularis
  misc_feature (1)...(740): n = A,T,C or G
cccatcgtgttgttcatannnnnctaggaacaggataaacnnnagtgttactcactcttggcattttttctttaatacaggcttttaagcctgtttttggaaaactgcttttcttctgagaaccttaatctgaatgtcatcaactttaccaaaccttctaagtccagagctaacttagtactgtttaagttactattgactgaattttcttcattttctgtttagttcagtgttaccaaggtaagcaagggaatgaagtataccaacttttttcaaagaattttaggacatatatgacagctttagaaggctgtcttgttttctagccaaggaaaagccagaacaggttttgaatactagagaaagtcatatgcttgtactattgccattttagaaagctctgatgtgaattcaaattttacctctgttacttaaagccaacaattttaaggcagtagttttactggccatttaagctctttgtacagtgtcaatttgtaaaaaagaaaaaacgaaaaaaaatctcaaataaaacatgagataacattttaagacttccaaatcagagaagtgcttcaaattattttgtttggattaatttttaaaatgtaaagcatatacttgttgcttagttcttttgttaattattttcatgcttgagttctgtgcaatattttctattatgtccgttgataggacagtggcaaaannnnnaagtgaatacttaatttagaagtgtt

SEQ ID NO: 12867 - DNA, 646 bp, Macaca Fascicularis
  misc_feature (1)...(646): n = A,T,C or G
gcagccagtgcagatgcagacatgctgannncgggannnnnnnnnnnnnnnntcccagaccggnnnaaggagccgagcagcctgctgggaggagtgcagagggcannnnnnnnnnaactgtggggtggggagcacagggacccgaggtggggggcgcattgatggcattcctcttctccacatctgctcattcttgccaagggtgcagtggtggcgtggaagccctgtcacccaaccccaggcctccctctcccaggggatgccatctctcttaactgttgctgggagcctcaccctttgtcccagctgggnnnnnnnnnnnnnnnnnnnnnnnnnnnnnnnntgctgtgggggggccttcctcagcctctggccctcttggctcagattcaatcaaatgttgcttccctctcctgtctttcccactggagccgcccaagcttgtaggtgggtggtgtgcacaggccatgtgtgccccacatatgcagggagtgccccacacagctagagtggccaggagagcgcctcctaaccaccagccattcctgatctcaggagtcatgaagggctgggctcttgccatcctggagtaaatactggcacagatttcatttgaagagaactcggccgcttggtctaagctgga

SEQ ID NO: 12868 - DNA, 567 bp, Macaca Fascicularis
atcttcatgttactcagactagttgtttagtgtatattggtgtatattatataactctttgagcctttatgggtaaattctggtatacattgaattcattataatttaggtgaatagaacaacttgaatatcgtagcaataagctggagtagtgtcttaaaaatggctaactgatgaattagaagccatctgacagcaggccactagtgacggtttcttttgtgttcctatggaaacattttgtactgtacatgctatgcttaagacattcaaaacatgaggttttgaatgaggatccaactgtgtaaaccacataattttagtacatcccaaagtatgagaatgagaagtaaaatgaacacttttgtaaattaccgatgatgctcagtttgtaattattatgaatcaattttcttttaagcatttgtatattaaaatagcatactgtgtatataatatatcaaatctcctcataaatctttcatataagtgagtctatatatgtatttgtaacattgtaaagtatggagtagtcttaattaaattgtgtcagacattatgcaaata

SEQ ID NO: 12869 - DNA, 751 bp, Macaca Fascicularis
  misc_feature (1)...(751): n = A,T,C or G
gacggctccagaagcaatcaactttggatgtttcactattaagtctgatgtgtggtcctttggaatcctcctatacgaaatcgtcacctatgggaaaattccctacccagggagaactaatgcnnnnnnnnnnnnnnnnctgtcccagggctacaggatgccccnnnnnnnnnnnnnnnnnnnngagctctatgacattatgaaaatgtgctggaaagaaaaggcagaagagagaccaacatttgattacttacagagcgtcctggatgannnnnnnnnnnnnnnnnnngggcagtaccagcagcagccttagagcacagagaaacccgtccgtctggcaggggtggctgcctcatttagagaggaaaagtaaccatcactggttgcacttattatttcatgtgctgggatcttctgccgtgcctggatcctgaaatagaggctcaattactcaggaagaacaccctctgcatgggaaagtattctgtactcttagatggatgcttcacccagttgcaacttggacttgtcctcagcagctggtaatcttactctccttgacaacgtctgagtgcagccttttgagaagaaaacacctattccctccaaaaatacacccagctagctctatgtttacaaatggacataggactcaaagtttcagagaccattgcaatgaatccccaataatatcagaactaaactcatttataaagctaaaataaccagatacatagcatgacatctcttt

SEQ ID NO: 12870 - DNA, 747 bp, Macaca Fascicularis
  misc_feature (1)...(747): n = A,T,C or G
gcaattctgatnaaaaatgggatgaccagaantctgattgcttcagtctgaatggtatgagttaatacagaaaggagtgnnnnnnnnnnnnnnnnntgggaatgttccagatgtctacacccagattatgcttttggaaaatgagaacaaaaatttaaagaaagatttgaagcactacaaacaagcagctgagtatgttactttttaaatgacattttcttatttttcttttggactaaataaagagttgaatgaagttgattatatgtaatgtaccagagccttaattttggaaaactggatttttctagttgtaaaaaatgtgagaggcttcactaccacattaattaaacagatgatcagaactatcataattgtaactnnnnnnnnnnnnnnnnnnnnnnggagttgtttaggagatggtacatttgttatataacattcacttccttatgtatttgatagtcttttcatggtttataacattttctcctgtaaagagactaatttctgaaataataattaaatttatagaaagccgagaggaaaatgctagtttattcctagtagaggaatttcggtatttgaaaattctccagaaggaataatataaactgtggactttgagtgacaatggtatgtaggttcatcagttgttaaccaatgtnnnnnnnnnnnnnnnnnnnnnnnnnnnngggaaggctgtgcatgtgtgggagtaggaggtgtatgggacatctctgtatc

SEQ ID NO: 12871 - DNA, 715 bp, Macaca Fascicularis
  misc_feature (1)...(715): n = A,T,C or G
acagtccagcaggtnnnaaggagggagtgtgggtcatccgtnnataccacattgagatnntgggagccctgtctttcgtactgagtatggaattgtagagccatccnaggtcccatcccctcttggtctaaacattgggcagcgctagatggcaggaagcannnnnnnnnnnnnnnnnnnntctcccccacagcagcagtggccccaccagtaaccaagggtacctccaggggtttgggtagcgctgccctctggcagtcatgcaccactgtctgccatagctgctctagggtcttgacagaattcnnnnnnnnnnnnnnnnctcccttgctaccttttcccttcctttttcttccctaataggaggtacagtctgcttttgtttgtcattatgtggtcattcccatttcctttatcttgtccgacaacgcagagaggagggggagctgggccgtagcttggggtgggggagggcacctgtggttgtttttaatgggaagtacctctcagagatgttcatgcaggctccctagggccccatcccagtgccaggnnnnnnnnnnnnnnnnnnnnnnactgaggctccnnnnnnnnnnnnnnnnnnnnnnnnnnnnnggtccttcagccagcatccagctccccacccccaggctggcagcagcacagctgagatgctgtatttccacccaattctgggtatatcagtgtgtctgca

SEQ ID NO: 12872 - DNA, 652 bp, Macaca Fascicularis
  misc_feature (1)...(652): n = A,T,C or G
agggnnnnnntggctggcacttnnnnnnagtggcccccactgaggcagttccagggctnnnnnnnnnnnnncccctggcctcccgggaaggcggctnnnnnnnnnnnnnnnnnggtggcccaggcaggccctgagcacgggcacccggcacccatcaccgtggcctgctgtnnnnnnnnnnnnnnnnnnnnnnnnnnnnnnnnnnnnnnnnnnnnnnnnngctaggcctggttggcgccagcgtggggaccctggaaatgtttgtggtctctagtggcagaagacaggcagataggagggtggcactccagcctcaggtgccacaaaggggcgcccactcctcagtgcccgtcccattgaccgccccacaggcagggcaggggcgggagggcatccnnnnnnnnnnnnnnnnnttcccaccagcagcctacgggagggccccgacctggacaggcctgggagcgaccggcaggagcgcgagagggcacggggggactcggaggccttggacgaggagagctgagccgtgggcagtcaggccccgcccccgcccgagctcaggctgcccctctccttccccggctcacgggagagcagagtggagaactgtggggaacgccgtgctgtttgtattggttcccttgggtttttt

SEQ ID NO: 12873 - DNA, 676 bp, Macaca Fascicularis
  misc_feature (1)...(676): n = A,T,C or G
agcaagggacattttgggacggttccacctacaaaagatacgaatatatattttttaaagcataactgaagagaatagagaataatttaaaattttaattttaatagtttattttaagagaatattcaagactttgcaatcacaaggaggctaaataatccaagttcaaatacatttacttatgtatgatcttaagctaactttcccaaaccccaagttctataatgtcctactacacagggtcaaaagtcaaatagaagacatgttagatccagcaatcccacttctaggtatttgcccaaatgttttgaaatcagtttgtccaagagagtggcactcccatgttcattgcagcactatatattaacaacagataaatggataaaggaaatgtggtatacatatacataatggaatattactcagtctttaaaaaagatggaaattgtcattttgcaacatgaatggaagttgtgagaatattgtgtttnngtgaagtaagccaggcacaaaaagacaaatacttcatattcatatagaatttaaaacaatgtaactcacagaagtagagagaagaatggtggttacagannnttggtgggggtggtgggtgcaaagaatgggcagatagtcaagtataaaaccttccaactggaggaatatggtttttttttta

SEQ ID NO: 12874 - DNA, 803 bp, Macaca Fascicularis
  misc_feature (1)...(803): n = A,T,C or G
ctgtacatatgaggagtggggcaggtnnnnnnagggacatgccaggccgggcctggggccccaggnnnnnatccacaccacacagaccccgggccccagtttttaacgatggtcccatcagtacctgatccagaacgtttccgtgccacactctgtgtcctgctgcagtgtgttctgtctgtccgtccatctctgctgtctgtaccggacactgtgtctcctcggccaggaaggggtgatgagctccagcccctaagcaacctgggcggacttgcctgccttggcctcacccgcacttctcccaaaaggcagatgactgggagttaggcatggggagctccggagggctaccagagttccagctgagggagaggtctctaggttggagtgggcatcacagccagggtggcctctgggtgtcannnnnnnnnnnnngggtgcccagcctgtgaggcactggcgaggaagggggcagatggggcgtggagaacnnnnnnnnnnngggccctgttggggaggggaggggagctcaaggtttgggtggggannnnnnnnnnnnnnnntgtgagacatttttcgtgtcactgtgggaaagccttcccagaagtctcactgcgtgtcgctctgcgtgtgttcccatgtccgtgcgtgtgttgagagcccaccaggagggcatgcatgactctggcaacgtgtgttatcttggagccacgtgtttttattgctgactttaaatatttatcccacggcagacagagacatttggtgtctttttataattcgntnngtggtcattgaatagc

SEQ ID NO: 12875 - DNA, 756 bp, Macaca Fascicularis
  misc_feature (1)...(756): n = A,T,C or G
agccccgcagggcaagctgcccatggccnngggactctggccgctgtgggttcaagacgaggaccagcccgatactgggagnnnnnnnnnnnnnnnnnnnnccgaggcagaattagagactgaggcagagggggagacagatgagcctccagaataaacgaccctgggcttgcttccgaccttactccttctcagcctctaccccgaccccgcctccccacctatagcagcggcgcttcccctacccccacttgttgcagctgttcccgcctcannnnnnnnnnnnnnnnnngtttccttcgagccccgcccatttctacctatcccgttctccagccccgtcccgcctaattcacggccccagccctgacctttctcgcccgggtgggcatcacccccgtctcgccagcaccccttcgacttctctgacctcatctcctttctctatagctcgggttcatgacgctctcgatattcctgtgcagaaacttggaccacgtctacaaccggctcgctcgataccgctaggccccgcccccgtcacgtgcgctggggacttccctgctgcctgtaaatatttgtttaatccccagttcgcctagagccctctgccttcacattcccctggggacccaggtggctgcctgccaccgctgctgtcacctctcccacgggacctggggctttcgtccggtttcctgcccccatctgtcggcctaccacctcccacaagattattttcactcaaacctcaaa

SEQ ID NO: 12876 - DNA, 723 bp, Macaca Fascicularis
  misc_feature (1)...(723): n = A,T,C or G
agtgttnnnttgattctttgcacaccaagtcttttggttgtaccatgtgacacacgctgtgcaccagtcactgtcttcacgacttcagcgctnnnnnnnnnnnnnnnnnnnnnnntctcccagcccctcacccagcacagctctgcctggacttggagagatgggaggcagaccgccaccaccatacatgctatctgtggcccctcagacatcccatttcatctcccattcatctccctcccgccactgtgtcagtttgtctgcctttccttgctgtgttgttcctcctccttaggccccagcctgggcccagaaccatcctcccagccannannnnntccagcaggctccttccctccctgtcacctccctctcaccaactgggggtctgagcccctcagtcttgaccgtccatgttctcaggagtggttgaggacacagggccccagcccagccctccgcgtcccccagcccagccctccgcgccccctcagcccggccctctgcaccccacagcccctttggagcttttctcttgttctctcaatccttcccagaannnnnnnnnnnnnnnnnnnttttgaaagtgtttttctcattctccatacctcccccaagctctcctcctgccctttccagggctcagccctgctgtcctgagcgtctcctgggccagagagaggagatgggggtgggagagacttgagttgatgttgggttttt

SEQ ID NO: 12877 - DNA, 733 bp, Macaca Fascicularis
  misc_feature (1)...(733): n = A,T,C or G
gcaatgtgtgnnntgcnggnnnnnnnnnnnncagcttcattaacagatgcaggagaggtctatgnnnnnnnnnnnnnnnnnnnnnnnnnnnnnnnnnnnnaggctgctttccttnnnnnnnnnnnnnnnnnnnnnnnacattgtttccagaatgaaaaggnnnnnnnnnnnnnnnnnnnnnnnnnnnnnnnnnttgcccagacagaaannnnnnnnnnnnnnnnnnnnnnnnnagcagactatggtcaactagggaggaagttggagacttacgaaggctggaaactagaaaagcaagattcattcctcccctgttcaagactactgaacaacatgccttnnnnnnnnnnnnnnnnnnnnnnnnnnnnnnnnnnnnnnnnnnnnnnnnnnnnnnnnnnnnnnnnnnnnnnnnnnnnnnnnnnnnnnnnnnnnnnnnnnnnnnnnnnnnnnnnnnnnnnnnnnnnnnnnnnnnnnnnnnnggccccgaagccggtgcaggctctgctgtcatcatcaggactccttgtgggctgtggggctggccactccctggccctctgccagctaccagctcacccnnnnnnnnnnnnnnnnnnnnnnnnnnnnnnnctttccccagatgccaccgaggacactgaatctcaggaagccatggacaaagagagaaactggaaggaaagacaatcagaaacttcaacccaaagccaatctgactggtccagaaatgggggac

SEQ ID NO: 12878 - DNA, 759 bp, Macaca Fascicularis
gcaaggtgtagtcaagaggttttttccccccctttttttgtttttaagcttctagacactccttgaaaggtgtgtgtgtgatggagggaaggggacagagttgaggactgaagctggggcttggggattgccactaagtacagctgatggtttctccccagacactcgcctaccaagtacccttggggtggtgctgggtcattacttctgagccccagccccaatccagagaagcgctgttgcccgccctccacccaccaggtgaacagcaggacgccctgttgggggcttcaagtctctgtgggtgggaatgcaagtgaacttgggagggggcatgggcctgtagatcagggaaagcgctgttgatcccctttctgtggctccaacccgttgctgcaaacccatgaagctggccctcagctccctggcctcctgccctaggtcatgaaagacactccccagggcaaagcaccagggagaggcctcagttgtctcctgtccccggctgggtgcctgctgtctcctgtccccagctgggtgcctgctgtccgtcccgctttcatgttactgttgcagcttgtgctgagcctgcccagttggaggagactggacacccctgcctcctgcctccggcctcccaccaccctgtctcagtccccacctctgccccctgaaatgtgtgcccttgccaaggccggagacccacagccctgaaacgagaagtgcccttaagaatcaccccagcccccgcagccctga

SEQ ID NO: 12879 - DNA, 824 bp, Macaca Fascicularis
  misc_feature (1)...(824): n = A,T,C or G
ttcctcagagaaacaccaactgaaaagagccaggaaaacccgggaatgttccaaaggtctttnnnnnnnnnnnnnnnnnnnnnnnngagagagcccactcttgtctcccagttcctggtagggtctgcctgttggaaagtgtacttggatgcttctgggctccgtttggcaatagcagtcttggctgatgggcgcagtctggctcccagctcaccccttttttttttttttttttaaagtaagaaaataattgctaccaatagagactttgccaagtccaattatcttctaggattgaaaggtgcattttccccatataaaaggcgaggaaannnnnnnnnnnnnnngtattacctcagtgagttacagccccccttggcatttagttggtactagagccagtcatccttaacaaatcttttcacattttatttctttcacacatnnnnnnnnnnnaaaaggaaaaagatttggaattttagaagaggggcaacttttctttttagcattctcatcagaaagtcacaaaaatagacggaatcatttccactgggaagattgaccttttgtatttatttgtggggtaaatgaacaagcattcctgatgcttttagcttcctgcatccaggagatgctgtgctccccgtgatgcagctggaagctgagctgcagacaggaggtgcgagtttcaggatgctccccactgagccggaggaatatctacggcagtgatgcttgaaatttttgtatgaattattttgtcgtcctacccgtttcctccaaaacaaaaattagaggattattttaatactttggattcttcc

SEQ ID NO: 12880 - DNA, 743 bp, Macaca Fascicularis
  misc_feature (1)...(743): n = A,T,C or G
cccgaccacnntgctggnnnnntatgtgttcctgggccttggggagctgcttctgtcctgcaactgggcagtggtnnnnnnnnnnnnnnnnnnnntggtggtgcccaggtgccgggggacagcagaggcacttcagatcacagtgggccacatcctgggagacgctggcagcccctatctcacaggacttatctctagtgtcctgcgggccaggcgccctgactcctnnnnnnnnnnnnnnctcagcctgcagcagagcttcctgtgctgcaccttcgtcattgccctggggggcggctgcttcctgctgactgcactgtacctggagagagacgaggcccgggcctggcagcctggcacagggaccccagacagcaaggatgtggacagcaacgacctggagagacaaggcctgctttcgggcaccgctgcctccacagaggagccctgaggtcccnnnnnnnnnnnnnnnnnnnnnnnnnnnnnnnnnnnnnnnnnnnnntagctgtgcctcgattcctctttggctgtcctcggggactccggctgaggcgcgtctgccacttttgcattcccggctggagagctggcaggaccctgtggctgggctacgaatggagnnnnnnnnnnnnnnngtgggaagcctgggcctgtgcctgtgccccactcaaggctgccccagcctgggttccccagcctggctgctgctgggcgctgaataaagcaaggccagtacaaagcct

SEQ ID NO: 12881 - DNA, 769 bp, Macaca Fascicularis
  misc_feature (1)...(769): n = A,T,C or G
aaaggttgannnctagcatgatnnctgttacactcagtgtgatcaccgggtggtggatggagcagttggagcccagtggcttgctgagtttagaaagtaccttgaaaaacctgtcaccatgttgttgtaactaactcaagaatttctaaactctcccaggtcacagtgattcattcttatcaagatatttatgttattaaacaggtggttctttttattttaaccagttatttttattattgagtctgtnnnnnnnnnnnnnnnnnnnnnnnnnnnnnnnaatttttaaaatgccgattacacccaaatattgttcacatttaataatccaacaccagatttttagctctgtactcctaattaagggacatgtggccttgcctagccctctggtgataagtacttccactaggaaatgtagaataggtagaacctaaagaaagggacataaaggtaacccggatggaaccttgaaattctgaaatttaatcacctaaaatgttctccttagatgtgagagaaggagaaatcaggaaaattaattctcgtgggggaagggcttgaattgaagctttactttagaatttaaccctggtttgaaattttccattacatgatcttggtttaccatcgatgagaagggtagaaaacttcaaggaaaataagtgaaattttcaaagtcaacattttcttagaccttttcagctgattgtttatttttctatgaatccctatacatggtgtttcccctcctcttgagataatcaaa

SEQ ID NO: 12882 - DNA, 663 bp, Macaca Fascicularis
tccgccaaaatttaattaaatgcattgagaatctggaggagctacagagtcttcgagagctggatctttacgacaaccagatcaagaagattgagaatctggaggcgctaacagagctggagattctagatatttcttttaatctgctgagaaacatcgaaggggttgacaagttgacacgactgaaaaaactcttcttggtcaacaataaaatcagtaaaattgagaacttaagcaacttacatcaactacagatgctagagctgggatctaaccgcatccgggcaattgaaaatattgacaccttaaccaacctggagagtttgtttttggggaaaaacaaaattactaaacttcagaacctggatgcgctcaccaacctgacagtcctcagtatgcagagcaaccgactgaccaagatcgagggtctgcagaacctggtgaacctgcgggagctgtaccttagccacaatggcatcgaggtcatcgagggcctggagaacaattatgaacagcttcctcctcccccattccgcactgcctgctgtctacacctgtccatgctcctcccaccctccctggcccttctcactcaggtgcaggacagcctcacatactgagtggaagtgtgctcacagagcccccaccctcctcagctgcctc

SEQ ID NO: 12883 - DNA, 728 bp, Macaca Fascicularis
  misc_feature (1)...(728): n = A,T,C or G
caccaaagatnnnnntgtggagaaatannnncgagatgcaaagattggtacgatatatgaaggagcttccaacatccagttgaacaccattgcaaagcatatcgatgcagaatactgacgtctgtaggagtgggacccctccctggtgtcactgctgtaaaattttaaactgttgtgtcttgttaggagtaagtgccttgcatgggaataaacttccacagcattcaaatattttactgaagcccttagggtcctgggggttggcctttttggttttctcttttcaggctgtttaacnnnnnnnnnnnnnnnnnnnnnnnnnnnnnnnnnnnnnnnnnnnnnnnnntttttccaaaactgtttttaaagctctatacatatatatattttttaatttgagacggagtctcactctgtcacccaggcaagagtgcagtggcatgatctcagctcactgcaacctcgacctcctgggttccagtgattctcatgcctcatcctcccaggnnnnnnnnnnnnnnggtgtgcaccaccatgtgtcactaatttttgtgtttttagtagagatggggttttgccatattgcccaggctggtctcgaactcctggcttcaagggatcacccactttggcctcccaaagtgctgggattacagggatgagccaccgtgctttgccggatatttgtattatcattctagtttcagagtatacagaaatttcatccc

SEQ ID NO: 12884 - DNA, 774 bp, Macaca Fascicularis
  misc_feature (1)...(774): n = A,T,C or G
gctgttgattgcctgccgccatcacccgttcctcaaatgggctgcgggcaaggcgggttcatcgccgtctatgtgctgaggcagatttgctgaggagaccgcccaggttagaccactggaagcagagccagaaagcagacactgggggcacagggtttacttgggggcaccccacccagattgggcaggggggcactgggtgaggccaggagtctccccctggtcccgagggagagcgggctccagggggtccaacctgggtgttggtacctgggccagttattatggcaggccccagtgtggggcaggaagcatccatgagcaactaggagctgggacggccccacatcaaagtcacttcagggagcacagccctggcccagcgcggggagaggaannnnnnnnnnnnnnnnngcagagaagtgcagggcggcaagggatggcaggagctgcccctccccaccttccaccctgagatcctgccgggacacccctcggccaggtgagcggactcagaagagtgaccagtaagaagtccccagggcccaggccggctagccaagtccctgtttccggatgaggcgactcccaggctgtgtgtggcaggcccccttcttcagggaataagaaacatcttccacattccagaaacaaagctggctgtgggtctggagagagggtgaggcagccccaggtctctgagtcaggcagacggtccctgtatgcggtgctgggcaggactgnnnnnngttcccaggggncgcagtgctcatc

SEQ ID NO: 12885 - DNA, 764 bp, Macaca Fascicularis
  misc_feature (1)...(764): n = A,T,C or G
gagtttccataaggaaaaatgaaaactccttttaaaaataaaatctgaggagtgtacagtaagcatatgctttgactttcctttgctgtggaggtttttgatttttcattgatgattaatgactacagacttagtagtggagaaatggtgtcctctagtggaagaaatagtagactcagctattcagatgcagagcactgcagcagccagcctttgggagctgactcttcttagtcatctgtggggtcatttgactttttaagctaccctgaattttcagaatgcaggttctaaagaaatctaggtgagagaaaatgtttgaaaatgatttttaaatgttttttaaaagacacatccgacatttttaaccacttagtaaaagttgaaatgaccattctgtgtagtcataaaagaaacataatgaagtatatggcctctggagttagtcttnnnnnnnnnnnnnnnnnnntgtcagtgttaacctgtcgcagatcaagtaattctttcactaggttgggtttggggagggagaaaagaggggcttttcctaggagaacggtacgaaatggaaagactccttgaagtgttgcaagggaacctcctagcactgtgaaagccagaatcgcctcagcatttccatgacacacattatgcaaacctctttagcactattttacgtttgaaaagtttaacaatgaagggggaggggaagatttccaccaactgaatcatttgtgcacgtgtatagctcaaagagcttagac

SEQ ID NO: 12886 - DNA, 729 bp, Macaca Fascicularis
  misc_feature (1)...(729): n = A,T,C or G
aaagattgtaagtgagaagggagaaaacagcaaaacaagctaaaagacctttccccaattgcagagcgtctgggatgcacactacctcagctagctgttgcgtggtgcctgagaaatgaannnnnnnnnnnnnnnnnnnnnnnnnnnnnnnnccctgaacannnnnnnnnnnnnnnnnnnnnnnnnnnngtcctcccaaagatgacatcacatgtggtaaatgagattgataacatattgcgcaacaagccctacagcaagaaggactatagatcataaggcaatgcatgaaccacagaagctgcatggttaaaatagcggcctgtgcccagtacagaaaggtgttactaaccagtcttttcaatcacttagcagcttgctgctcaacctctagtgtccctccctggattctctgaggtgtctgctgtcgctaccactgtgcacatctgaaaactcacaaccaagaaaatccattctattttcttatcttnnnnnnnnnnnnnnnnnnnnnnnnnnnnnnnnnnnncctcatgcttatgcaatgggaagaatatgggggccggggggtgatgtattaccttcaggcatttggtaactcaaagaaggctgtacagatatattttttcaaaagaacaaaatccacagatgcaatgtgagttgcataagaaacagagtagacagactaaattcagtgaaggaaaggaattcagagatttttcttaggaaata

SEQ ID NO: 12887 - DNA, 735 bp, Macaca Fascicularis
  misc_feature (1)...(735): n = A,T,C or G
ctgtnnnctgaagatgacttgctctcnctggaagactgggtgttcaacaccgaggcccacccgctcccggtgaaccactcagacagctccggcagggcctggggcagacactgacctcaccccccgccgccgccctggggccaccgcagggatgccttgccttttcaggatttgggactgttttcaaagggactgggaacgaaggccccatctcgggcagacccccagcagatgtgtcagacaagcaacttcttttcctctgtgaggagacaagacttggagacgcagcaatgtaaggccagggccatggccacactggcccacacattcctttctacagagaatttctatgaagccctctcacttgccattccagggccaaaggaccggaggtttgcaatctgccccatgtatttgatttgcttccttttggtttctcggtttttgtttttgcttgattttgtcttttctctatggtttagttttatcacaattatacatacagttttcagaattatgcgctttctaaaatgatgtcatcctgataaacaaaacccagtgtttgcacacatacaaaatcttgaccccgttatctatattttaaatgctttttgcccaacactgaccctgcattcaactatgtgtcatttaccttataatttgaggaggggtttccctttgattgggcctcagtgttacaaatcactagtgctcttttcattattattgtaagga

SEQ ID NO: 12888 - DNA, 754 bp, Macaca Fascicularis
  misc_feature (1)...(754): n = A,T,C or G
cagatagtgctatcacagagagttggttaaacggtatgaagaaaaatgggannnnnnnnnnnnnncagcaacagaaaagtctcatgtagatttatttccaaaggacagtattatctatttaactgcagattctcccaatgttatgactactttcaggcatgacaaagtttatataattgggtcttttgttgataagatgatgcagccaggcacatccctagccaaggcaaaacggctgaagctggcnnnnnnnnnnnnnnnnnnnnnnnnnnnnntacaatgggatactggtaacaaaaatctcaccttagatcaaatgatgcgtattttgttatgtctgaaaaacactggtaattgggaagaggctctgaaatttgttccccagagaaaacatactggttttctggagatttctcagcactctcaagagtttatcaacagattgaagaaggcaaagacttttaattcattttcaaaaggttctctaaatgtgtgtgcacagaagaagtggctcaaatgagannnnnnnnnnnnnnnnnnagtaaatgggttggaaatacagttctgttaatatatttcttcccaaataattcatttttctcttctaaaggtagtttttcccaactgactgcagggttgtgtcttttcccaattaaatatctgcagaactttgggattatactttgtttactgtaaaaagataataagtaaaaagaattgtccaatattgtgaacagaatcatctttaaattcc

SEQ ID NO: 12889 - DNA, 489 bp, Macaca Fascicularis
cgttgactctctctttgaatcaagtcccaaatccagccctggcccctgtcctgagaaggccccaccaccccagaagcccagccatgaaggcagctacatgatgcagccctgaagaaccatagcctatcctggagcccaggacataagtccacctcacctagagcctggaattaggatcccagagttcatccagcctgggggccagaactcaagagtctgcctgtttggagctggtcccagtggcctagagtctagcaagcctggctccaataggagctcagtggccctaaggagatgggcctggggtggaggcttatgagttggtgctagagccagggccatctggactatgctccattccaagggccaagggtcaggggctgggtccactctttccctaggctgggcacttctaggccctgtaggttggggaagcaaactggaacccattctaataagaggagggtgtccaggctgggcccctcccct

SEQ ID NO: 12890 - DNA, 672 bp, Macaca Fascicularis
  misc_feature (1)...(672): n = A,T,C or G
aaacattctcnntggagagccaggtnntnnnnnnnnnnnnnnnnnnnnnnnnnnnnnnnnnnnnncctggaagcctactgacattgcagggagtcagcctcaccccccaccccctactgtttttccaatgttttgactggannncaaaattttactactactcatgtttttggagaccagagctgccctgctggcagcctgccttttaagtgaaatagactctgtttccccactttaaccccaaattggggcttggaccaagggaggtgagaccccccccaggtcccctcccctttcaaaatccatctcattttgccacttcatgcccttgccctaactgggtttttgttcattttttaaaaccagagcacctatcccatccattttggcttcttgtcccctgtaaatagaccatgacttcgatcagtatttcttgtccccaccccaccccttcctatccccagatgtgcccccatcccctgaaggagctggccgtctcagtcctgggcccacgcacttcaccccggcagatggagggggcggaactgggtgggcggggccacttccagctgcttgggccagcggccacccctgcccagccgtctggaggactgcgtctctgtatataatatatatatgtatgtattgttccccggttttgtacggannnng

SEQ ID NO: 12891 - DNA, 725 bp, Macaca Fascicularis
  misc_feature (1)...(725): n = A,T,C or G
atggcgtgatcttggttcactgcagcctccggctcctgggttcaagcaattcttctgcctcatcctcctgagtagctgggattacaggcaccagcaannnnnnnnnnnnnnnnnnnnnnnnnnnntagtaagagacaagattttgccatgttggccaggctactctcaaactcctggcctcatgtgatctgtctgcctcggccccacaaagnnnnnnnnnnnnnnnnnnnaaccaccatgcccagcctagtggtggcacttttggacaagttgctgcacttggctactcagcagtggctcccagagaggcactgagccagtccccttagagagtggaacccagaaaattcctctgcactagccacatccctgcccaactttgaggtagatgaaaccaaagaaggcaggggcctatcagaagnnnnnnnnnnnnnnnnaagagaggaggggaannnnnnnnnnnnnnnnnnnnnnnnnnnnnnnnnnnnnnnnnnnnnnnnnnnnnnggtaacgggcgtgagcttggggctcagtgcagaggcaggctggcagggagacagagaccaagaggtacccccagaagtgtggagctctctgagggcatgggcgttgggtttcctgcctggcttgagctcacaggctcacccttcttccacattttcacaggaccggattgaccccttaacnnnnnnnnnnnnnnnnnnnnncatccggtgagaggctgc

SEQ ID NO: 12892 - DNA, 713 bp, Macaca Fascicularis
ggcaccaggacccctaagaccaagtgacaatcggaagagcctcagcgtatactcttctcctgtgattttacagcctctcatgctgctcagtgtggttctcagccctgcaagctcaaattcagttctctgaatggagtcaggtgctggaggctgtggcagcggagagtagtcagggttggggctgggggtggactggcgtgagggcagaccagggccaggtagacggggctgtttggtgtctgaaggatggcaggtgcctggcatcaggaggggccgccaccaaggggcagcagctggggcagaggagatggggtcaggggccacccccctctgctgatctccctgcctgggctggctgtgaggacaccacctttgtcccaggcccagcctcgaggcgaggaggacgcttcactgcggtgtgaattgtacgtacaggctttttatataccaaaagtattttttgactagaccattcaaagctacccgaactatgttggaaattttttttctcattaaaatacaggcccttaggctctatttttcatgtatgagtcttgtgtgtaatttatgtataaatgtgtgtatcgagtcactgatgcagcactgtagcccatcaccctggagcattgactgtacatagtgtggtgaagaaaactgaatgccattgtagagcagcccggccacaggagcgtggccactgccacccaacgctg

SEQ ID NO: 12893 - DNA, 674 bp, Macaca Fascicularis
  misc_feature (1)...(674): n = A,T,C or G
tgtatactgggggtggggtgagggtaggaggcatttacaactcagattttatttattttnnnnnnnnnnnnnnnnnnnnnnnnnnnnnnnnnnnnnnnnnnnnnnnnaaaaatatttttantgttgaaaccttgacannnnnttcatattataataatttcaacagtccaataaatgtgttatacactttgacatccaagaactcaccaagatatttttcagagatttattctagatttaactatcatagcatttaacgagtctgatttgtagttcaataaattgtgggttgaactacttatccatgtgtgaacactgaattactttctgtcactgaaactaaggtatttgggtnnnnnnnnnnnnnnnnnnnnnnnnatactgtttgggcattgtctgaattattaaaggttaaaataaaaataaagtcaacatttttcttttccattccaaaggtgtacttagagatctataatagtattcattggagatgacatagcagctcatatcatggtttattggatttatgtgttctaattatctttatataagtgtgttgactgtatgtgttttcacataaaccgctagaagttttaatgttaagacaaaaacatcttctgaagttctccattgcaaattgaatttttcagtcattttctatcttttttatttta

SEQ ID NO: 12894 - DNA, 724 bp, Macaca Fascicularis
  misc_feature (1)...(724): n = A,T,C or G
tacatactttctngatagacaccaagaactatgtggaagtgacccggaagtggtatgcagaggctatgccctttcccctcaannnnntcctgcctggccgcannnnnnnnnnnnnnnnnnnnnnnnnngagctgctgagtggggagcacatgcctgaggacgaggaagagctggagaaggagctgtaccgagaggctcgggagtgtctgaccctgctctctcagcgtctgggctctcaaaagttcttctttggagatgcccctgcctccttggacgccttcgtctttagctacttggccctgctnnnnnnnnnnnnnnnnnnnnnnnnnnnnntgcaggcccacctgcgggggctgcacaacctcnnnnnnnnnnnnnnnnnnntcctcagtctctacttcccctgggatggagctgaggtaccaccgccacgccagacaccagcaggcccagagactgaggaggagccataccggcgccggaaccagatcttatctgtgctggcnnnnnnnnnnnnnnnggtgggctacgccttgctcagcggcattgtctccatccagcgggcaacgcctgctcgggccccaggcacccgggccctgggcatggctgaggaggatgaagaggaatgatttgtcctcacgctcccaggactggtttttctactctcgtgcattccagaggcccccgtgcctcctctttgttggtacagccggacacggggtgc

SEQ ID NO: 12895 - DNA, 732 bp, Macaca Fascicularis
  misc_feature (1)...(732): n = A,T,C or G
catacagagagannctnataatgtgatgactgtggaaggactttagtcacagnnnnnnnnnnnnnnttcatcagagagtnnnnnnnnnnnnnnnnnnnnnnnnnngtcctgaatgtgggaagagcttcagtaagagttcaaagcttcacactcatcaaagagtacatactggagagaaacccnnnnnnnnnnnnnnnnnnnnnnnnnnnnnnnnnnnnnnnnnnnntcttctcattcatcannnnnnnnnnnnnnnnnnnnnnnnnnnnnnnnnnnnnnnnnnnnnnnnnnnnnnnnnnnnnagttctaatcttcacattcatcagagggtccatacaggagagaaaccttatcaatgtgctaagtgtggtaaaggtttcagtcatagctcagctcttcgaattcatcaaagagtccacgcagaagagaaacctnnnnnnnnnnnnnnnnnntataagggatttgatcataattcacatcttcacaataatcatagaagaggaaacttataaatattgttcatttagttaacagcttcaatcaaagtttacctaacctttaaaccctaaaatgctgctgataaggaaatcttataaataacacaaataatcccaagcaacatttacagtttccccatctcccactaagaattatttgcttcaaaaggagatctttagaaaaatccctatatatttaaaattattgtgtatttttctttacctactataaata

SEQ ID NO: 12896 - DNA, 749 bp, Macaca Fascicularis
  misc_feature (1)...(749): n = A,T,C or G
tcatcactgaaaatgtaattgtgantttttcacatatccagttcttagaaatgtatggtgagatgctagctgtttccaagttatatnnnnnnnnnnnnnnnnnnnnnnnnnnnnnnnnngaacaattccaagagtattttcttggaggactggatgatatggcgttttggtccactaatatttaccatctaacgagcttcatgttggagaatgggaccagtgactgcagcctacctgagaaccctctgttcattgcatgtggtggccagcaaaaccacacccagggctcgaaaatgcagaaaaatgattttcacagaaatttgactacatccctaactgaaaacattgacaggaatataaactatactgaaagaggagtgttctttagtnnnnnnnnnnnnnnnnnnnnnnnnnnnnnnnnnnnnnnnnnnnnnnnnnnnnnnnnnnnaaggacaatgttcataggtggctctcagttgtcacagaagcacatctctagccccttannnnnnnnnntnnnnnnnnnnnnnnnnncaaggcttggctgagatggggtcttgctatgttgcctacgctggtctcannnnnnnnnnnnnnnnnnnnnnnnnnnnnnnnnnnnnnnnnnnnnnnnnnnnnnnnnnnnnnnnnnnnnnnnnntgacaaaagcattaatttaatggttaagttattgtaacaatgaaatgatctccttnnnnnnnnncaaatatgtttaaatacaaggaactttt

SEQ ID NO: 12897 - DNA, 745 bp, Macaca Fascicularis
  misc_feature (1)...(745): n = A,T,C or G
gacagcacaggctcctnnnnccannnnngccctnnnnnagggtggggcctggccctcatctcgaccaaagctgctgtgtggcagctcggcctctccacgaccccatcctgctggctgcacactcttcctggcccgcacccccatccctagtccctgttccccaagaggatacagagcatggtgctggctgactcgactgtgtcccaggttcaggctcttacagagctctaccccctggggtcttacctcactgggaatgtgttttgaaaatgaagacaagccaacaaaccctgcactccaaaaaagcaaaacagatcctaatttttttgtgccaaaaactgtggacatgctggctcagcatcctcaggaccaagttgttgcttaattttaatttattgttttttaataactaatccagataaaaagttgtggggcttcagggtgacctgggcccaaaggttctgaagggcagtttcctggcagccctaggcttgctgtgggaaggggccatgccatcactctcatcattccatggggtgtgtctgcctgggtcaactccacatggagaggccagggctggggacagtccgcactctgccgccctcctgcccctcctgtgcaccccagctctgtgtctgtttgaattgtggatcgtgtagccatggttattgtggaactgtggaacctgcagccatagttatttgactatatcttgaccgagggcttgcagtgcaaagccaggcca

SEQ ID NO: 12898 - DNA, 745 bp, Macaca Fascicularis
  misc_feature (1)...(745): n = A,T,C or G
ccannnnnnnnnnnnnnnnntcacccagagcggccccatnnngagccgggccacgggccgctgcctggaggtggagatgtccnnnnnnnnnnnnnnnnggctccggctggtggtgcagaggtgctcggggcagannnnnnnnnnnnnnnnnnnnnnnnnnnnnnnnnnnnnnnnnncccgcctctgcctggacccccacggacctcgggaaggcgctgggccaagccagtgtcactgagtggccggggtatgcccnnnnnnnnnnnnnnnnnnnnnnnnnnnnnnnnnnnaggacagcagaggccaaggggccggggtgtggttgagtgacnnnnnnnnnnnnnnnnnnnnnnnnnnnnnnnnncctcctaggacaggcggctctacccaagggagggcgtctggggacagtgacgccgactcaaacacgtgccttctccacggtatctcctggccaggctgctgggacggccgccacctctgcatgtaccacagcccctacgccccacagggtggccaagccccagaccacacgccaggcggcgccccggcgtcctccacccacggcctcccatgctccaagcagcctcccccagcccttgcaaccgctcagccctccaaccgagacctaagttcacacctcacaacacagctcctcatggtctggtaagaggggtgctgggggacatggatggcgacaaacctgcagctgtgtctaggaggctggtgcgactgcctcagcaga

SEQ ID NO: 12899 - DNA, 749 bp, Macaca Fascicularis
  misc_feature (1)...(749): n = A,T,C or G
gctgctagttgtaaacctgttttctttcaccctgacttgtgtaaccaatcctggcattataacaaaagcaaatgaattattatttcttcatgtttatgaatttgatgaagtgatgtttccaaagaacgtgaggtgctctacttgtgctttaaggaaaccagctcgatccaagcactgcagtgtgtgtaactggtgtgtgtacnntttcgaccatcactgtgtttnnnnnnnnnnnnnnntcggggcctggaacatcaggtacttcctcatctacctcttgaccttgacggcctcggcnnnnnnnnnnnnnnnngtgagcaccacttttctgatccacttggtggtgatgtcggatctataccaggagacttatgtcgatgaccttggacacctccatgttatggacacggtcttccttattcagtacctcttcctgacttttccacggattgtcttcatgctgggctttgtcgtggtcctgagcttcctcctgggtggctacctgtgctttgccctgtacctggcggccaccaatcagactactaatgagtggtacagaggtgactgggcctggtgccagcgttgtccccttgtggcctggcctccatcagcagagccccaagtccaccggaacattcactcccacgggcttcggagcaaccttcaagagatctttctacctgcctttccatgtcatgggaggaagaaacaagaannnnnnnnnnnnnnnnnnnnttgagctgtagttc

SEQ ID NO: 12900 - DNA, 680 bp, Macaca Fascicularis
gacatccccaggctgtgtggccctggacacccgagcagactgaactgtccacctccgggactagatgcaagactgactcctggcagaccatcccctctaccagaaggggaatgggcccctgcagcgagctcgggtcctgggccacgtcccagcgccactccagctcccgggcattgggctgagccgtccttcccaagcgcacttctgggactcagtttccccaactggaacacacccgtgaagatggatgatcatcccctagcccttctcagcaggaacctcatacgacctgtgaccaagatgtcccacttgggactcagcacggggctcaccctgccaaccagtcccaagccccaacccctcaacactgccgtccacctggctcagggccaagccaccgatccagagctccatcaggtcatgggaataaggcggggatgtggccgatcccctcagagcaggatcaggcctggagtcggcccccaaaagtttcaggcagggccgggcagcataaaagtttccttccctggtagtgaaataaggaaaagccattaaattatctctgtaatgtaatagaaactgctggctgggcgcagtggctcacacctgtaatctcagcccttcgagaggctgaggtggaaggattgcttgaggccaggtgttcgaggccagcctgggca

SEQ ID NO: 12901 - DNA, 669 bp, Macaca Fascicularis
  misc_feature (1)...(669): n = A,T,C or G
cccccaccagagccccagctcctgtccgtgggggagccatcacggtgttcatgcagtccnnnnnnnnnnnnnnnnnnnnnnnnnnnnnacctgggagggaagggaacactggggtttaggaccacaactcagaggctgcttnnnnnnnnnnnnnnnnnnnnnnnnnnnnnnnnnnnnnnnnnnnntccctctggcctaaggtaggggaggccttcnnnnnnnnnnnnnnnnnnnnnnnnnnnnnnnnnnnnnnnnnnctcacagtccaggaggaaagagccaaggcccacttttgggatcaggtgcctgatcannnnnncccttacttcaacctcactttccctggagcacctgccccacctgcccacagagaacacagtggtctcccctgtccgggggcggctttttccttccttggagcgtcccnnnnnnnnnnnnnnnnnnnnnnnnnnnnnnnnnnnnnnnnnnnnnnnnnnnnnngagcccaggtgcactgtgtgatgatgggagggggctccatcctgcaggctggaggtggcatccacactggacagcagggaggaggggagcaagggtaacatttccatttcccttcatgttttgtttcttatgttctttcagcatgctccttaaaaccccagaagccccaatgtccccaaaccccaccat

SEQ ID NO: 12902 - DNA, 584 bp, Macaca Fascicularis
  misc_feature (1)...(584): n = A,T,C or G
caggcgcggtgcacggcgcgggnnnngaagcctggcgcagcctgctgatcgccagcagatggaggcgctcacccgctacatgcgcgcggcgctcgctccctacaactggccggtgtggctgggcgtgcacgatcggcgcgccgagggcctctacctcttcgaaaacggccagcgcgtgtccttcttcgcctggcatcgcgcaccccgccccgagctcggcgcccagcccagcgcctcgccgcacccgctcagcccggaccagcccaacggcggcacgctggagaactgcgtggcgcaggcctctgacgacggctcctggtgggaccacgactgccagcggcgcctctactacgtctgcgagttccccttctagcggggccggtcccccgcctccctgcccatcccaccagccggcctttccctgcgccgtgcccaccctcctgcgagatcgcccttccattcctgtccacggatggcagcatctcccccaccccactccaggctgggcgctcctgggagggctcttgcggtgccgggactcctccttgttagtgtccctccttgaaggggcggacaccaggcta

SEQ ID NO: 12903 - DNA, 679 bp, Macaca Fascicularis
  misc_feature (1)...(679): n = A,T,C or G
aaaatgtgaagcttaatgaagataaacccaaagaaaccaagtctgaagagaccctggatgagggtccaccaaaatatactaaatctgttctgaaaaagggagataaaaccaactttcccaaaaagggagatgttgttcnnnnnnnnnnnnnnnnnnnnnnnnnagatgggactgtttttgatactaatattcaaacaagtgcaaagaagaagaaaaatgccaagcctttnnnnnnnnnnnnnnnnnnnnnnnnnnnnnnnnnnnnnnnnnnnnnnnnnnnnnnnnnnnnnagtaaaggagaaaaggctcgactggagattgaaccagaatgggcttatggaaagannnnnnnnnnnnnnnnnnnnnnnnnnnnaaatgcaaaactcatttttgaagtggaattagtggatattgactgaaatagttcagctctaaggatattagcaacaatgataaaacttggccttgaagaaacttacataactcgttagaacttgttactatggtaaaggaagagtcaactggaaaattcaaggagttaataaaatttgtttacttgatcccagcttttgagagatgtaatcccttannnnnnnnnnnngtctaaaatactttcctacagctgtgtaaaatactggtcaaggagaactttttccttttacctcatgttgtaaactaa

SEQ ID NO: 12904 - DNA, 675 bp, Macaca Fascicularis
  misc_feature (1)...(675): n = A,T,C or G
gaagagagaggagagatttggggctgcagtagggcaagaccccatgggaggaagcagccaggaagatgcaggcannnctggggtttggcttattaacccacctttccctgtaggcaggaattgatggtgagaaggagcatgccaatgccaagaannnnnnnnnnnnnnnnngagagttctttcagattcaggtaggaaggcaggaggcagtagcagagaacaggcaccagcttcactcctcctctgcctaggaacctcatccttcctcctttgctggagagttctttcccgcccaggnnnnnnnnnnnnnnntctttggggaccccagtgtgaccggcaaagttggcactgacatccaggacaacaaatgcagctggctggtggttcagtgtctgcaacgggccactccggaacagtaccagatcctgaaggaaaattacgggcagaaggaggctgagaaagtggcccgggtgaaggcactatatgaggagctggatctgcaggctgtgttcttnnnnnnnnnnnnnnnnnnnnnnngccacattatggctctcattgaacagtacgcagcgcccctgcccccagccatctttctggggcttgcgcgcaaaatctacaagcggaaaaagtnnnnnnnnnnngcnnnnggtggggagaggaggctctcaataaata

SEQ ID NO: 12905 - DNA, 582 bp, Macaca Fascicularis
  misc_feature (1)...(582): n = A,T,C or G
tcacgtgtctgtggccaccatgaaggccancnngcagctgtccagagcccccgtcatcttcagccactcctcggnnnacagcgtgtgcgcaagccggcgcaacgtgcccgacgacgtcctgaggctggtgaaacagacagacagcctggtgatggtgaatttctacaacaattacatttcctgcaccaacaaggccaacctgtccctgaggggctggaggacgtctccaagtatccagacctgatcgctgagctgctcaggaggaactggacagaggcggaggtcaagggtgnnnnnnnnnnnnnnnnnnnnnnggtcttcgaggctgtggagcaggccagcaaccccacgcaggctcccgaggaggagcccatcccgnnnnnnnnnnnnnnnnnnnnnnnnnnnnnnnnnnnnnnntacccctccggggcctccagcctccatcgccagtgggggttcctgctggcctccctcgctgccctggtcctctgtcagtgtctcctgtgaaagctgggagaccagagccccctttagggcnnnnnnnnnnnnnngaagacctgcccatccaggactccggacgcc

SEQ ID NO: 12906 - DNA, 766 bp, Macaca Fascicularis
  misc_feature (1)...(766): n = A,T,C or G
ctcacnnnnnnttcaagtgagggtataatgcttacactgggaaaatctcaaatagctaaaagatattttcctgtatcatccatctctgtacttgaagttggactcctagaggcttctgaggcagtcacaagtttaaattcaccactgttttcatgaatatttgtgatatttctccctgttaacctctcttggtccagtgtatgtcccactcagtctctgnnnnnnnnnnnnnnntctcctaggtttcttcccagccctagacaagaaggaaacagcacagaggggttgggaggagtagtctagttctgggtataaatagcataatcttactgattcaaaagatggattcccttccaccccacatgttgaagtaagctgtctttcaaaatgttcatttattagtcataattttttaaaaaaaatcagtttggattcctttcttttnnnnnnnnnccatttttgaaaaatacagtaattcttctgtatccatttgcacctctgattctgctctacgggctgtccctggcactgggatggaacttcacccatactctgtgttctttctataagtacagagtgaaataaaaaaaagtgagaatattcaatcataactgtgtcaacagtattgtgaagtgatcatttcttgtaaaacttgtaaataaactatctttgtagataccttaaaggtgtaaagtttgcaaatttgaagaaatatcaacactgtggtcaggtacattcctaaaaactaataaatgtacattctaaa

SEQ ID NO: 12907 - DNA, 696 bp, Macaca Fascicularis
  misc_feature (1)...(696): n = A,T,C or G
ttgtgcccagcgtggtagcagccaagccagtggactgggaagagagtcccctnnnnnnnnnnnnnnnnnnnntctctgatggctctaactactttgtgcggctctacacggagccgctgctggtgaacctgccgacacctgacttcagcatgccctacaacgtgatctgcctcacgtgtactgtggtggccgtgtgctatggctccttctacaatctcctcacccgaaccttccacatcgaggagccccgcacaggtggcctggccaagcggctggccaacctcatccggcgtgcccgaggtgtccccccactctgattgttgccctttccagcagctgcagctgctgtttctctggggaggggagcccacgggctctttctgccacttgctctccttggagttggcttttgaaccaaagttccctggaccaggtcagggcctacagctgtgctgtccagtacaggagccacaagccaaatgtggcatttgaattggaattaacttaaattagaaattcatttccccacctgtagtggccagctctgtattgaggtgctcaataagcaaaagcgggcagtggctgctgtattggacagcacagaaaaagacttcactgcagaaaggttggttggcagcgctggccaaggtgatggggtatgctgcagggtgtgtgtcactgtgtggtggatggagt

SEQ ID NO: 12908 - DNA, 755 bp, Macaca Fascicularis
  misc_feature (1)...(755): n = A,T,C or G
tgacacctacnnnnnnnnnnnnnnnnnnactgctgagtggtgcttctgcttctggagggagaagcccccctgcctggcggagctggagcgtgtccagatccaggaggctgccaagaagaagccaggcnnnnnnnnnnnnnnnnnnnnnnnnnnnnnnnnnnnnnnnnnnnnnnnnnnnnnnnnnngcagcggcgactgctggtgtgtggannnnnnnnnnnnnnnnnnnnnnnnnncccgcacgcatgggagccctgactgtgatgacatcgtgggcttctcgggtgactttgggagcggcgttggctgggaggacgaggaggagaaggagacggaggaagcaggcgaggaggccgaggaggaggagggcgaggcaggcgaggctgacgacgggggctacatctggtagatgccctcaggagccggcggccggggggactcaacagcagagctctgagcagcagcagnnnnnnncgagaacggatccggaaatgcagtcagaaggaccctgctctacccggggggaccgggagtgtgagtgtgcatggcatgagtgtggcacagacggctggnnnnnnnnnnnnnnnnnnnnnnnnnnnnnnnnnnnnnnnnnnngtgcgtgtgtgtgtggcatgtgctgacaaatgtgtccttgatccacactgctcctggcagagtgagtcacccaaaggccgcttcggcctccttgtagcnnnnttctttccttttgttgttggttnnnaatacatcacaca

SEQ ID NO: 12909 - DNA, 434 bp, Macaca Fascicularis
  misc_feature (1)...(434): n = A,T,C or G
tgacgaatggtgtggcccagggccacataacagactgctgtcctgggctgcctctggtcccgagtgaattatgttccatgtgccaacaccagtggggagccnnnnnnnnnnnnnnnnnnnntcactgcaggagttgtgggcctaggagaggctttggacctgggagtcacacctagcagcaaagtctcgcccctttgtatacgttgctcccccaaaccatgagcagaggnnnnnnnnnnnnnaaccagactctggtcccctcctgcttcccttccccacttatcccccaagtgccttccctcatggctgggctggcctgacccgagacgggcagagggagggtgggacnnncctgctgcaaggcagagttcaggtccactgggctgagtgtccccttgggcccgtnnnnnnnnnnnnnnnnnnnnngagttatt

SEQ ID NO: 12910 - DNA, 773 bp, Macaca Fascicularis
  misc_feature (1)...(773): n = A,T,C or G
gagtgacagtgaggaggagcaggagcgtgggggccccgagcggnnggagaagctcaccgactggcagaagctggcctgtctgctnnnnnnnnnnnnnnnnnncagcaaagaggcgctcatccggcaccagcagctctcagggctccacaagcaaaaccttgagattcaccggcgagcccacttgtcagaaaacgagctagaagcactagagaagaatgacatggagcaaatgaagtaccgggaccgtgcagctgaacgcagagagaagtatggcatccccgagccgccagagcccaagaggaggaagtacggcggcatatccacagcctccgtagacttcgagcagcctactcgggacgggctgggcagtgacaacattggcagtcgcatgctccaggccatgggctggaaagagggcagcggcctgggccgcaagaagcagggcattgtaacgcccatcgaggcccaaacacgggtgcggggctccggcctgggtgcacggggcagctcctacggggtcacctcaaccgagtcctacaaggagacactgcacaagacaatggtgacccgcttcaacgaggcccagtgagcagcttcaagagcaacttctccacatgtcgggtgtccatcctggggcagggaaggacagagtgttggatggctgggacggagccttgctcttgtcggccagcccactccccagccagagagggcttgaccaaatcaaactgaggtggtgacttttgttggaaaattgggctggcatcatgtcc

SEQ ID NO: 12911 - DNA, 721 bp, Macaca Fascicularis
  misc_feature (1)...(721): n = A,T,C or G
cggctgcaccaagagggcacactggctccccctatactggagctgcgggagaagctgaagccagagctcatgggcnngatccgccagcagcgcttgctccgcctctgtgaggggacgctcttccgcaagatcagcagccggcggcgccaggacaagctgtggttctgctgcctgtcccccaaccacaagctgctgcagtacggagacatggaggagggcgccagcccgcctaccctggagagtctacctgagcaactccctgtggccgacatgagggcactcctgacaggcaaggactgcccccatgtccgggagaagggctccgggaagcagaacaaggacctctatgagttggccttctcaatcagctatgaccgcggggaggaggaggcgtacctcaacttcattgccccctccaagcgggagttctacctgtggacannnnnnnnnnnnnnnnnnnnnnnnnnnnnnnnnnnnnnnnnnnnnnnnnnnnnnnnnnnnnnnnnnnnnnnnnnnnnnnnnnnnnnnnnnnnnnnnnnnnnnnnnnnnnnnnngcccatccctgagcagccaccccctgtgcccccaccccccaccaacttcaacttctgctatgactgcagcatcactgaaccttgacaatgtgcctggccacgggccacagctgcggccactgcagcagccatgaagggcggagggtagaggagtgcaggcaccctgg

SEQ ID NO: 12912 - DNA, 885 bp, Macaca Fascicularis
  misc_feature (1)...(885): n = A,T,C or G
cagaaaccaggactaggacctgggccttgnnnnntaaggaatattgagagagatttttttaaaaaagattttgcattttgtccaaaatcatgtactttttctgatcaattttggttgttccagaatttcttcataccttttccacatcnagatttcacgtgcgttcgnngannngatcacnnnnnnccannnggnnnnnnnnnnnnnnnnnnnnnnnnnnnnnnnnnnnnncttgtcaaaaatattactcagtttgcaannnnnnnnnnnnnnnnnnnnnnnnnnnnnnnnnnnnnnnnntcaaagttcatattgtnnnnnnnnnnnnnnnnnnntcagaatttgtaaacagggtagcannnnnnnnnnnnnnnnnnnntgtatacaataattttttttnnnnnnnnnnnnnnnnnnnnnnnnnnnnnngttaaatcatttgcataagatttaacagcattttttttataatgaatgtaaacatnnnnnnnnnnnnnnacttaaaataatttaaaagaaaaatgttaacttagacattcttatgcttcttttacaactacatcccatttctatatttccaattgttaaagaaaaatatttcaagaacaaatcttctctcaggaaaattgcctttctctatttgttaaggatttttatacaagaacaccaatataccccctttattttnnnnnnnnnnnnnnnnnnnnnnnnnnnnnnnnnnnnnttactacctaacggatagaatttgtaaatactctaggtatctgtaaacactctgatgaaatctgtatagtgtgactaacccacaggcaggttggtttacattaattttttttgaatgggatgtcctatggaaacctatttcaccagagtttaaaaataaaa

SEQ ID NO: 12913 - DNA, 329 bp, Macaca Fascicularis
  misc_feature (1)...(329): n = A,T,C or G
ccttttttttatttttttttttttttttcaaagaaattagcttttatttgagattncttntnnnncacatgtatctttcaagaattgtatgttatatgataacctgcttatccactgtcccaataccagaatttctaacnnncaaattatacaactgcggtaggtaataaataagggttgtccttcactgattaagggactaaagttcaataaatctaacaataacaacaaaaaaatcacactttagtttttaagttttaacagatgtatttcaaatacagcatgttttacaggagttcacaaactttccatnnataaaaaaaaacttt

SEQ ID NO: 12914 - DNA, 734 bp, Macaca Fascicularis
  misc_feature (1)...(734): n = A,T,C or G
aaagacactgcctgggctgaccctggtggcagccccagcannncaacctgcacannntcccccaggcnncgaggaagatgcgccagcaacacagcctggggcctggctcgcgggacccgactccccgtgggctcccgtgttttgtaggagacttgccagagccgggcacatcgagctgtggaacgccgtgggctgcatcctttggtcctgtccccgcagccctggcagggggcacgcggtcgggcaggggctagagggaggcgggggctgcccttgggccacccctcctagtttgggaggagcagattcttgcgataccaagtatagcctatggcagaaaaaatgtctgtaaatatggttttaaaggtggattttgtttaaaaaatctcaatgaatgagtctgttgtgtgtcatgctgatgagggacgtcagactcagctcagctcggggagcctcagccgcccatcactggggacactccgcgccgtgccgcctgctgcccgtgcgctggggacgcctccaccgccgcgccaangnnagtcctcagggcagcctcccccggctcaacgggggccgcgtggtgccatccccgggggcatgannnnnnnnnnnnnnnnnnnntgatttttactgtgttttataaaatagagtgtagtttacagaaaaagacagcttttaaaaaagtgatctacatgcggaactgtagatgatgtatttttttcatctttttcgcc

SEQ ID NO: 12915 - DNA, 786 bp, Macaca Fascicularis
  misc_feature (1)...(786): n = A,T,C or G
gccagtcactttcnaccgagnnnnnnatatggttcatgatccaatggcagctctggagaccctcttaaccttgggatttgaacgagtgttgaccagtggatgtgacagttcagcattagaagggctacccctaataaagcgactcatagagcaccaggaggtggtataacagacagaaatctacaaaggatccttgagggttcaggtgctnnnnnnnnnnnnnnnnnnnnnnnnnnnnnnnnnnnnnnnnnnnnnnnnnntcgaaattcatctgttgctatgggagcctcactttcttgctcggaatattccctaaaggtaacagatgnnnnnnnnnnnnnnnnnttgaatgctattgcaaagaatatcctggtttagccagacctctctgagagacatggatatcacaggatgaaggtagaagtataatctgcaattctctgtgacacagctttaaccaccttctctggccaggacagttgcaatctttgttttaagtttcacatggccatggagaacgtgcccaagaagaaaaagaatttgaaacagagatacagtcacttcctttgcttagtcttaccagcgattgtcatcgtggttaaagctggtctatgcttcttccacagacagaagcttagtcttgttttcagtggaattaattgatgaactggaaaaatttannnnnnnnnnnnnnnnnnngagtgtgacttaagagtcaattcaaaagnnnnnnttgcattttcatttgtaaaataaaaatgtccactcttatagtatagtctctta

SEQ ID NO: 12916 - DNA, 668 bp, Macaca Fascicularis
  misc_feature (1)...(668): n = A,T,C or G
aagtgannnaaatcatggatttnnnnnnnnnnnnnnnnnnnnnnntttggacatcgcagaggagattaaagaagactctgnnnnnnnnnnnnnnnnnnntatttccagaagggaattggaaaagggcagaatttctagagaagaaatggaaacactttcagttttcagaagttatgaacctggtgaaccaaactgtagaatttatgtaaagaatttagctaaacatgttcaagaaaaggaccttaaatatatttttggaagatatgttgacttttcatcagaaacacagcggatcatgtttgatatacgtttgatgaaagaaggtcgtatgaaaggacaagctttcattggacttcctaatgaaaaagcagcaacaaaagcctcaaaggaagctaacggatacgtgctttttggaaaacccatggtggttcagtttgctcgatctgctagaccgaaacaagatcataaggaaggaaaaagagttaaaaattaataaaggtttcttttgaatccggcgtgtccttcaagtgctttccaactttcagaggaagaaattgaccacctggactatggaactgtgcgtaacagctttgaaagtgtatttaaaaattaaattgatatgcctctaaatcagtgaattggaaatatattacatgtattttaatgtc

SEQ ID NO: 12917 - DNA, 749 bp, Macaca Fascicularis
tagtgggaagaggtcctgtctcagggaattaactgtcttattgggagacaacaattgccctccttggaatacccaagaaaccttgcaaaacggtggacaacacagagcacgccctcctcctcgctgcctgcagctccagtctgattctgcctgggaatgagcagagcacgtgggctgcttcactgctgtataggacaagccctttaccccaatctgggcccatgaattcctggcttggtttatgttctgatttgacacactcatttgaatcttcgaatcatgaccactgagcgcagaagaggtggcattctgacagcaggacatacatgttggtgtggagactgggacgacactgggtagaatctagtttttaattattattaatataaaggatcaaattaatttaaatgtgattctgaagtctacagaacttttagttctgtgctgtctatatgtggacactttggtaaaatgcaaattatgatacggatgttatcgttggtctggtgagaagtttcatatttatgacagttaatttagaaattatgacttaatgctgcctctgtctatggggttctgtcttctttgatagccatctattcatctggatcacggggccctctaatccttccaccaatcaaataagctattgctattggtttggagttgagacatcagtctcagaaacttctgaaaaatgcctaagctaattctgaattacccaaggattatgtcaaatttaaaataaa

SEQ ID NO: 12918 - DNA, 697 bp, Macaca Fascicularis
  misc_feature (1)...(697): n = A,T,C or G
cccagggcannnngcagggcagctggtggtggccttggccatttgcccccagcctccagctggctggctcctgagctctgcaccggagggtttggggaccacacagctacctgccttcctagatttccctggctcacttttctgcaaacactggatctgccaggcctggggattggggggcaggacagaggcccccatccagccccctccaggccagtgtgcacagtgcaccgaggggtcacccgcacagagcgaggtgcaagcnnnnnnnnnnnnnnnnnnnnnnnacccgacttccccagtctcagatggggtgttgatttatttctgagtaactttttgggtatacaaaccaatttttttaatatatgacatatatatgtacacactcctgtgaaatatgtatacttggggggggatctatttatgctccagtgggagtccctgtcttctgtcaggactctcacctgctgctttgtgtctttggtcagattcctgacaatttagtttcctgttgtaaaggtgcttttcctggggtgaactaaacctattgatttttttttttaagatttttttcccttttgatttaatatactgagaaagaaatgggagacttttgaatgttaacaagatccattttaggagtgtttggggttgtgtattaaatagccgttcgttctggaactcaaggacagga

SEQ ID NO: 12919 - DNA, 728 bp, Macaca Fascicularis
  misc_feature (1)...(728): n = A,T,C or G
agggcaatccacttacatggatcgtgtcttcaagcagtttgtgcaagccatggttgagcatggacatgaactctcttaacatgtagttcttcgggtnnnnnnnnnnnnnnnnnnaattgtgaaggcagctcagcttagtgcacaaattttaactactgtatatnnnnnnnnnnnnnnnnnagatgggtgaagaggtccagaacgatatgcaaaaactactttttagagaaacaaaacaactttgtagcaacaaattaaatatagtattagattgttacttatgtagattttatttttactatgccttaccaagtacatccttaaagtagtatgtacatgaaattgcacttaaccaaaactattgtgtaaaaaaaattttaattcctcagggttttaatttaaactagtatttttttagattattcgttttaggtgatttaatggtactttaataactgctgagaaatgttggctatttgaatgtaagttataaggtggtacattcctaagggtatttatagttaatgatgataacatggaaactgaaataaaatacaatgcgctaaatcttttatgtattctaactttaaaagacaagtgcaacactgttagactgacttctatatgtgctcttttattctgataatattagggctaacttatgttttataatgattataatttacatgcttatttttaaaatagtatatgtggacgcatatatatca

SEQ ID NO: 12920 - DNA, 739 bp, Macaca Fascicularis
  misc_feature (1)...(739): n = A,T,C or G
cagtgccagcctgcnnnnnnntccgctgtcnnnnttcctcagagggcttcaagccaaacaaacgcnnntttcgtgtgaaacatcttcagagtgggaaaggggccacttctggctttgttagcaataactgaccttcagtttacccttctgaaggagcagggactcagcacagaattnnnnnnnnnnnnnnctgaaggagtgtccctcctctatgtgaaaagaaaattgttttattcttcattctgactttttaactgttnnnnnnnnnnnnnnntagtttgaatgaaaataataattttcnnnnnnnnnttgaagagggcagaatcctcagctctcatcattgtgatgtgtagcgtgtctgccctctgacnnnnnnnnnnnnnnnnnnactttcttctgggcatcatgcgagtgtcatgatgcccagacttggagnnnnnnnnnnnnnnnnnnnntccactaataaaatatggcaccacccattttaaaatttctttaagttttatccttaaagacaacttcagtggttaattataaaagttgtgttacttcgtcctaaattaaattgataaaaagatttaaaaatgtgttttgtttctannnnnnnnnnnnnnnnaactagggaaaggttggtatgaaaaaaatgtctttccttttttcaatgtacatagttcaactctttctttgttacatttaaactgtatccatggnnnnnnnnntgctttggactnntctgcta

SEQ ID NO: 12921 - DNA, 783 bp, Macaca Fascicularis
  misc_feature (1)...(783): n = A,T,C or G
gcaagtcgggcaacatgaagtaggagagttccgttgannttnnggggccatacttaagggaatgagctgaaacagagctctgaatacctttgctaattaaactagatgataattctcaggtattgataaacacctgttgttcactttcctcataaaaattgtcaggtctctctgacacttagatctcaaattttagcatctccgtggagctgccatccactgtataatttggcctggcaacgagactgaggggagtgtacccaggcnnnnnnnnnnnnnnnnnnnnnnnnnnnnnnnnncagagtgcccagcatttatcagaggcagcatccaagcccagagccagtgtcgactcttcggctggtgcctttcctctgaggggctattaatgtgtagataaagccctgagtaggcaggagcagtgagatccactgctgtggtcttgatacatcctcagactttcccttcccagcacagaggaatatcggctggcatgcaacctgcaaaagaaaagtgcgaagcggccgggcatggtggctcacgcctgtaatcccaatactttgggaagccgaggtggtcgaatcacgagatcagnnnnnnnnnnnnnnnnnnnnnnnnnnnnnnnnnnnnnnnnnnnnnnnnnnnnnnnnnnnnnnnnnnnnnnnnnnnnnnnnnnnnnnnnnnnnnnnnnnnnnnnnnnnnnnnnnnnnnnnnnnnnnnnnnnnnnnnnnnnnnnnnnnnnnnnnnnnnnnnnnnnnnnnnnnnnnnnnnnnnnnnnnncga

SEQ ID NO: 12922 - DNA, 727 bp, Macaca Fascicularis
  misc_feature (1)...(727): n = A,T,C or G
agcnnnnnnnnnnnnnnnnnnnnnnagcagaaggttcaacaagaagtatggggagttctttccagtgcccaagtccgttctaacatccatgaagaaggtaaaatccctccgtgatccttctgccaaaatgtcgaaatcagaccctgacaaactggccacnnnnnnnnnnnnnnncagcccagaggagatagtgcagaaattccgcaaggctgtgannnnnnnnnnnnnngaggtcacctatgacccggctggccgcgcnnnnnnnnnnnnnnnnnnnnnnnnnnnnnnnnnnnnnnnnnnnnnnnnggtggaggaagtggtgcgccgcagcgcgggcatggacactgctcactacaagctggccgtggcagatgctgtgattgagaagtttgccccaattaagcgtgaaattgaaaaactgaagctggacaagnnnnnnntagagaaagttttacaaattggatcannnnnnnnnnnnnnnnnnnnataccctgtgtgccaggaggtgaagaaattggtaggttttctataggaagtttcaacgaatcacagtaaggcttttgtgccttgcactccatgcannnnnnnnnnnnnnnnnntcctcacaagaaaaagttatagttttgggacatttaatttggtatagctgattattggctttatttgatgaatattgctttgtagctttgaaatacgacagtgttccaaaccccatcaacaaaatgct

SEQ ID NO: 12923 - DNA, 690 bp, Macaca Fascicularis
cattgtaaagtaagagagacacatatgttctggaatgatttctgcattatacatagctttataattccatgaggtatcaactctctgtttaaaatgcctaaacagattaaagaacaacctagattaaatgttcttttccagatggggagttttgaaatccaagtagcagtctgagtccatctttccatgaagagtatctttttgattgaaactgagtgagcgtaagcctatttcagcccctttggctctgggacaatattcatcttaaactttagttctataaattactaagtacttcagtgttgtttgtttcagtggttgtgagggtttcttgtttcctttagatctctaccttaggccaaactcaatttaggaaaaaaaaaaaaatggtttgaacgattctgtgttgtaatagcacatttctgttgagttaatagtgttcttcgcaccaacccctaaaaccaggttgatttgctcaatctcagtttgtgcaaccccagtaagcgcgtggaggtgagtttctactttgacttgtggcagcacaatgccggtttccagagctgtgtgtactacttgcaagaggcaagtctgctgaagaaccccttcttttaacagtggaaaatcaagaacagaaaatctgttcacacatccgtgtcttattctttatatatgttacatggtagaggagca

SEQ ID NO: 12924 - DNA, 774 bp, Macaca Fascicularis
  misc_feature (1)...(774): n = A,T,C or G
tatgaatcacagcctanctggaggcagctggcattcacaacccactgaataagatatacataacaacaaagcgcttaccctattttccaatnnnnnnntttctatttttgnnnnnnnnnnnnnnnnnnnnnnnnnnnnnnnnnnnnnnnnnnnnnnnnnnnnnnnnnnnnnnnnnnnnnnttgnnnnnnnnnnnnnnnnnnnnnnactgctcactctgctgaagcagttccattnnnnnnnnnnnnnnnnnnnnnnnnnnnnnnnnnnnnnnnnnnnctgctccacggtggagcagtgtacaagccagaagatacctgaaattcctacagatgttgtaggannnnnnnnnnnnnnnnnnnnnnnnnnnnnnnnnnnnnnnnnnnnnnnnnnnnnnnnnnnnnnnnnnnnnnnnnnnnnnnnnnnnnnnnnnnnnnnnnnnnnnnnnnnnnnnnnnnnnnacttcttcaatggannnnnnnnnnnnnnnnnnnnnnntcatcactaaaatgaatttgaaaatgaaaagaannnnnnnnnnnnnnnnnnnnnnnnnntttgctctccattatgggaaacttcagacgttctgagtaagatatatctcatggcattagttaatgtaactgatagtgtttaaatcatggtattacatgcaatttatatcatgtaaaagcagaacacatttttgtactgcctctcataaatgccgactgtaactgttatgtataaatccatttagttttatgttctaaagaactatttgtgcaactcca

SEQ ID NO: 12925 - DNA, 772 bp, Macaca Fascicularis
  misc_feature (1)...(772): n = A,T,C or G
atcccaggactccggctttcgccgagccgcagcgggatccctgtgcacccggcgcagcctgcccttggtggtctgaacggatgctgctgggnnnnnnnnnnnnnnnnnnnnnnnnnngtttcttttacaataagtcgttggaggaatgccattaaagtgaactccccacctgtgcacgctgtgcgggctgagcggttggggagatgtggccatgttcttgtgctagggatggcgggacaagagtctgttatgcaagcctgtgtgccagggatgtgctgggggtggccacccgctctccaggaaaggcacagctgaggcactgtggctggcttcggcctcaacattgcccccagccttggagctctgcagacatgatagaaaggaaattnnnnnnnnnnnnnnnnnnnnnnnnnnnnnnnagggttagatttttatgctgctgctgatggggtcaccaaaggaaggggaagaggccaggtgggccgctgactgggccgtggggagaacatgtgttcatactccaggctaaccctgaactcccnnnnnnnnnnnnnnnnngttgaatgtgtgtctcagtttccccatctgtaacctgagtcggggggaagcgtggtgattcctacctcacagggctgttgtggggattaaagtgctgcgggtgagtgaaggacacgtcatgttcagtgtttcaagtacaggcccacaaaacggggcagggcaggcctgagctcagagctgctgccctgggctttggattgttcttggagaaaca

SEQ ID NO: 12926 - DNA, 742 bp, Macaca Fascicularis
  misc_feature (1)...(742): n = A,T,C or G
tttccatgtacatgcagtgagnnntnantatgctaggtttcccttccatagattgtgcntttcagaaatgctgaggtaggtttcccgtttcttacctgtgatgtgttttacccagcacctccggacactcaccttcaggaccttaataaaattattcacttggtaagtgttcaagtctgtctgatcaccccaagtagcatgactgatctgccatttaaaattcctgtgatctgtaaaacaaaacaaaacaaaacaaaaaaaaccccacaagcacttatcttggctactaatgaagctctcctcctttttttcttttgtttgtttcattgttgattgtgtattttcttcactattggggagtactaacccaaaagtgtctgtctcttttgttctttagtccaatttgagattaatttagaagaaaggaatactgtatgtgaaattcagcttgggcttttccctaaattgcaagataaggccatgtgtaagattttccctaaaactagaatatattaatgcatgtttgagaattttaaaacacacatggtcaaaacgagaagttatattttgcatatttggactcagccatccattaagaacnnnatgttgtcctctggacatatttatcaatataatttggttttaaatagtataaaannaaaannntgtgannntatataatnnnatgtatcaccttcattgtaaattagcaggaaatgcatcacaattatgattttttttt

SEQ ID NO: 12927 - DNA, 777 bp, Macaca Fascicularis
  misc_feature (1)...(777): n = A,T,C or G
tgnnnngnnnnngannnntgggtgnntggggcactnnnnnntgacacctggccttnnnnnatccaccctgtgctgctccccttcacagcataaccttccagtctgggtcccgctgagtcgaaagctggaaggagcccctgtgggaggtaggtggggttgggtggctgctttcccagaggcctgaggcagaaccgnnnnnnnnnnnnnnnnnnnnnnnnncccaccacaaaccaggctggaacccaagcccctccctccacagctgccttcagtgggtagaatggggccnnnnnnnnnnnnnnnnnttgggtcaactgcagggcccctggcattaggggagggtttggctccnnnnnnnnnnnnnnnnnnnnnnnnnnnnggccaggccctcctctnnnnnnnnnnnnnncctacagtgggaaacaaaactaaagagaccactctgtgccaannnnnnnnnnnnnnngacacaccctcctgccgtcctcactgccccctgggcaggaggcagtggagaaccaagccccatggcctcaggatttcctnnnnnnnnnnnnnnnnnnnnnnnnnnnnnnnnnnnnnngggattatgttctctctcgcccagggtgggcctggtcctgagggcgggacagggggtttggagatgtgtnnnnnnnnnnnnnnnnnnnnnnnnnnnnnnnnntggaccgtggatggagaatgtgcagttatttattatgcgtattcagtttgtaaatgtatcctctgtattcagtnnnnnnnnnnnnnntccag

SEQ ID NO: 12928 - DNA, 764 bp, Macaca Fascicularis
  misc_feature (1)...(764): n = A,T,C or G
cagagtgagctgctgaacgcannnannnnnnnnnnnnntgcaggatnctgcattccccatctgtggaccaaataatctcaaaggcccagagaggggtagtggcccatccacagacacacagcacaggcatgacggaatctgagttgtcnnnnnnnnnctgtcactgcatccaggactctgtcagctctgctgcccacatgcacccctggcctcagcattccggttcccccagacaagagagggcaannnnnnnnnnnnnnnnntcctccctgctctacagctaagaaaacaccattccatgacttcccactgtgccctccctcctacctccctacacctctctctctgagtccccaggaacacacaggggcgcacctcacattcccttgtccacactgcccacctctccccacaagccacccccttccctgtccttccccaactccccagctcccagagtggaagaaatccccaagatcatctgggtctccctctctgcacccagaaccgannnnnnnnnnnnnnnnagatccttgccaagacttctccaccctcttcttgcatacctccagggacagagagcttactacctcccaaggcagcctcctgcctttggactgctctgactttagcatcagcttaatatacagaagaggtttctgtttttctgtggctccgtccacagcatcccacttgcctgctcttcttcctggagtgttaaggtcacacattgactcccctgagccctcttctctccagactaa

SEQ ID NO: 12929 - DNA, 750 bp, Macaca Fascicularis
  misc_feature (1)...(750): n = A,T,C or G
atcacatgtagagactgtcaaaaaaaatannnnnnnnnnnnnnnnnnnnnnnnnnnnnntcccatatgtggtgccacatgaaatttccggtgnnnnnngtttttatcctttgtactggatgacatggtgcctgaattctttcttttnnccgacacgatggcagccaaactgcagcttcaaacgcttacacttggctgggtttctacctaggttgccaggttatcatcggagccttcttgtgtcctcaaagggccacgaggcctgaaaggaggatcagaatgcttcgggactaattgggcagccatcgcagaattgtttgtgggcaaagggctgctttagcacttttcttctagcaaattaatgactctcaggcacaggggtttttaagtgaaggtattaataagaggtctggcaggtattcccatgattcacagagttacatttgcatttaattaatcttaaagaaagttgcaagataaacagctgtaattcggacaaacatgacaaacagtgaagccatctagcccataaaatgaacactgacatacttgttttaattttttttcccagtgtaaaaatagagaaatcaaaatactcctaacaaaaccagtaattttgatagaaatattgctccaaaatacttgcatctacctataaatataaccttttcaagataaatcgcttatgattccaatagtcaaactgctgtgtttgttgatgtaaagatgttttgaatagctagatggtaaa

SEQ ID NO: 12930 - DNA, 631 bp, Macaca Fascicularis
  misc_feature (1)...(631): n = A,T,C or G
ccccccacccagccccgatcccccccacctacgacgggctctcgggtgggaggcagggggcagacaaaccacaccgccaagggatttgaattaactcagccatttttggagaactttggggaacatggaaaaaaacaaaaaaacaaaaaaacatttttaaaagaaaaacggggagaaaaaaaatagcttctattgatgagttttatcatctcaattgaatctttcctttccctgatgaacgagagctggtggccgagtgcggcaaagaagccggaaggaaccggaaccccagcgcccagcacccatcaccagacacactcatatccacacacgttttcagacacacacaggagtgcttgccggttataccaaaccctactattactgcctgcagaaatcaattaaaaaaaaataataacaataaacaattttaaaaaggacaaaaaaattaatgattgagaaaagaggcatttttttctgacatttggtcctgcttgaaataacaaaagaagaaaaaaaaaaacccaccatgaccaccgattcctttgcttcttttttccttttttcctaccttgtttgaaaaccgtgggcttgggactgtgaactatcgcatgacnnnnagtcccaagcc

SEQ ID NO: 12931 - DNA, 1366 bp, Macaca Fascicularis
  misc_feature (1)...(1366): n = A,T,C or G
ccttaaattactgttccttttttgattttcttatccggctnnnnnnnngtcagacctcatcttttttaattttattttttgtttacctccctccattcattcacatgctcatcnnnnnnnnnnnnnnnnnnnnnnnnnnnnnnnnnnnnnnnnntttagaaactgtaaagtagttacaagagaacagttgcccaagactcagaattaaaaaaaaaaaaatggagcatgtgtattatgtggccagtnnnnnnnnnnnnnnnnnnnnnnnnnnnnnnnnnnnnnnnnnnnnnnnnnnnnnnnnnnnnnnnnnnnnnnnnnnnggagggagatggatgctcagttgtcacatcaaaggatacagcattattctagcagcatccattcttgtttaagccttccactgttagagnnnnnnnnnnnnntgatatactctatgttcataattgatttggctggagaattggtattgaatttatagcatcagcagaacagaaaatgtgatgtattttatgcatgtcaataaaggaacgacaaggtaatgttctactnnnnnnnnnnnnnnnnnnnnnnnnnnnntttgtattccaaaatagggtctcaaacattttgtaattttcatttaaattgttaggaggcttggagctattagttaatctatcttccaatacactgtttaatatagcactgaataaatgatgcaagttgtcaatggatgagtgatcaactaatagctctgctagtaattgatttatttttcttcaataaagttgcataaaccaatgagttagcnnnnnnnnnnnnnnnnnnnnnnnnnnnnnnnnnnnnnnnnnnnnnnnnnnnnnnnnnntatactgttgggatttgcttcattgtttgacatcaaatgatgatgtaaagttcgaaagagtnnnnnnnnnnnnnnnnnnnnnnnnnnnnnnnnnnnnnnnnnaggttgacacattgcttgacctgatttatgcagaattaataagctatttggatagtgtagctttaatgtgctgcacatgatactnnnnnnnnnnnnnnnnntannnnnnnnnnnnnnnnnnnnnnnnnnnnnnnnnnnnnnnnnnnnnnnnnnnnntttattttccaggtgcagcccctgtctaactgaaatttctcttcaccttgtacacttgacagctgaaaaaaaaaaaaacataacatgggagtaataatgggtcaaaatttgcaaaataaagtactgttttggtgtgggagttgtcatgaggctgtgttgaagtgacttatctatgtgggatattgagtatccattgaaatggatttgttcagccatttacattaatgagcatttaaatgcaacagatatcatttcaggtga

SEQ ID NO: 12932 - DNA, 757 bp, Macaca Fascicularis
  misc_feature (1)...(757): n = A,T,C or G
agttaacagactgatagaattgaggagatagctnnnnnnnnnnnnnnnnnaagagccagtttttgaaaaggtgcatgaagaagttgnnnnnnnnnnnnnnnaggctgctaaagaaaaagagttccaaagtgtacctgctggaccagctggagcagttgagagttgtgaaatctgtcaagaacaatttgaacaatactgggatgaagaggaggaggaatggcatttgaaaaatgctattagagtagatggaaagatttatcatccatcatgttatgaagattatcaaaatacatcttcatttnnnnnnnnnnnnnnnnnnnnnnnnnnnnnnnnnnnnaaccccttgaatattatgttgaacattgtcaaaaacgaattgcaggaaccctgtgaaaatcccaaagttaaggaagaacgaattgatacaccaccagcttgtacagaggaaagcatagcaacaccctctgaaattaaaacagaaaatgacacagttgagtcagtttaaataaaatcagaaaggtatgtttttcttttttaaaaaagctgctgttggatctagaaggtgaagaatttttttatgtatatatagacatatctatataaattgtctagctgaggcagggccttcagctatcatttggttaataaatacattttagtatttgcatttcctactgccnnnnnnnnnnnnnnngcttgttgtgtgaaagttctgtagaagtgtgcaaatttaacaaaatgaaattgtatgtgtaaa

SEQ ID NO: 12933 - DNA, 826 bp, Macaca Fascicularis
  misc_feature (1)...(826): n = A,T,C or G
gggagaagtnnnnnnnnnnnnnnnnnnnnnnnnnnnnnnnnnnnnnnnnnnnnnnnnnnccagannnnnncagccatccagcatgctgcggggagaaggggcaggggctcacctcnnncctggggcctttttgctttggagcctggggatggtgagaatggaggttctagaaggcgtaaggccagaacccagggatccaggagtcagctctcagctggagcttccatacctcctgggctccctnnnnnnnnnnnnnnnncaagggagctaagaccaggagggggctgggtgctgtcccttctctttcccaggannnnnnnnnnnnnnnnnnngcctataaggcttccagggaatgccatccagcctgtaggaaaccaaagatgggaagtggctcctagggggctgactcttccttccttccttctccccagtaccacatatactttctctccttctatccccagggccccaccaatctgtttacatatttattatcctattgggggcataagcaggattgagggatgccaggggaggggcaggagccccagcaccatcatttcattttgtgcttgtgtgttttagatcctcccgggggatggggatggggctaggtccagtgtactaggcctctctgtgctgagccccaggctcccagccccttacacacactctccctgtggctggtctggttctcatgtaaacccactccttgctttgtctccctggatatggatttcagtttnnnnnnnnnnnnnnnactgtgtgtccttgtgtaaataaacttgtttctggcaaaaaaaaaaaaaaaaaaaaaaaaaaaagg

SEQ ID NO: 12934 - DNA, 737 bp, Macaca Fascicularis
  misc_feature (1)...(737): n = A,T,C or G
cccagtgcgagggcagcannnntgtgtgtgtnntgcggggggaggtcccagacatccagggggacgccannnncaggaacaccacgannaaggttggcagagggttcctgggatgtgggagtcagagcgggcagggcccgtctgggccgctgttgaccataaatgagccagcgacaagcaccaccccagggagccccagccccggccctcacagctcagcggctcagcccacgcacagtcactgggactcagagctccggactggaggccagactggcagtggcctggagtgggacaccacagacatgcttgagtgccgactgtatgccagctgtcctaccaaacccactccgcagcccacatcacagagaggccaactgaggccagcgagtggcagagccagatgcagaccccgtcgtctgtgggtggcccagggctcaccctgccccaccctgagccaaagtgtcttgtccaacaaggaccttgggcccggccgccactcctcacccacacttgccgaccccagcctgggtgcctgccgcttcctcagccggctgcacagttccccgtgtgcccggccagctccctgtcaaagtacaagctcctcggggcggcctccaggcccgaccttccagggcacacgggaacgtctttgaggcggttgttgtggggtgtctgtgtcaccatctcccctggccccttcctcgccctgcgcctccccgcccctggcaaggcgt

SEQ ID NO: 12935 - DNA, 693 bp, Macaca Fascicularis
  misc_feature (1)...(693): n = A,T,C or G
cagctggacaagttnnnnnnnnnnaccaccaagcctgtgggccttctcctaagtgaaagattcattaatatccctccacagatcgctctgcccatgtaccagcagcttcagaaagaactggcggaggcacacagaaccaataagccatgtgggaagtgctacttttaccttctgattagtaagacatttgtggaagcaggaaaaaacaattccaaaaagaaacttagcaacaaaaagaaagctgcgttaatgtttgcaaatgcagaggaagaatttttctatgagcaggagcagggaaaacctgaggtgctcggaggtccagacacaagaagaggattggaacccgttccgatacagcacaatggtggttcacgggggcaagtgacagccctggtttctctgaaggctggactaattcaatcaagatcaactctaagtgatttccagggaaccttcatgactgttggaattgctctgtcataataaggcagggatatttagaaggctcatagtctcctggagggataaaacatctcagcacctagtaatggtaaattagtcaatattttttagtttcctttcagatatcaaatgctatgattttctgaggtcttagtgtcagagtttgaaataccttgttttccttttttttctaatttttatttaaaagtaatagagaatattttgtaaaaa

SEQ ID NO: 12936 - DNA, 802 bp, Macaca Fascicularis
  misc_feature (1)...(802): n = A,T,C or G
catatgtgaccatgtttcagatgcaatctgangncagatacattgttannnnngaggaagaanggnanactgagctagcccctggggctgagtactcctgcagggctggaggagcaggttcttagaagatgattcaccttggaggaagctagggaaagtggttagggagggagaggaggaagactgagaaatctctgcattcccagaactcagcaacccagctcttgtatgatgaggagaggtagccttgctcattcgtgaataggtggaggaaaggggttgcaggtgacccgcatcttcaatctagttatcaccagcttggctagaatcttattgaacgcaacttgctagttatgacagagagggccagggtgagaactaatgttcaagagagcaagattctgtaatcctcttgccctccctctcacatcacaaattctgatatgccaaacatttggcccaatgagaatgactgacagacttgctgatgtgcatgtggggggatgaggtgtgtacatacttttcttctgactggccagtgttcaggctgtcattcagattggataggaaaaagttggtgaggaaggaatggagagagcaggatccctggactccctggtccccaaactccttgactgtcacttgtaattgtatataatttttgtgtttcttgctccatttcctcatgctgtcatccttaaagtccatgtgggaaggggaaaatgctgaacaccattgtatagtttcttcaactgtcccagccatgttgtacatagatatgtcatgttattatatatataaa

SEQ ID NO: 12937 - DNA, 758 bp, Macaca Fascicularis
  misc_feature (1)...(758): n = A,T,C or G
agcacgtcagcgnnnnnnnnnnnnaacagcagcnnnngcatnnnnggagtgtgcagcgtgagaggtggggagggcaggagccggggcagtgccagcgattacaaagacgccctggggaagggttccagcctgagtgccccttccaagaaagccagtcggtagagaagactgccccgggccccgcctcattccatgacctggctctggatcccacactgtacttcccacagcccactcttagctccatctccaaactgctggtcctgctcccatgcacctggcactggccttggccacccacttctccaagcctgtgtcttcctgagcctgggaaggcctggatgaccaaacttggtgaaattcctccctgcacacaccgtattcactccttggctgcggtcccccggctacaccaccagctcaggtcctggctcccagctttcctcttctgccctgcctctggctcagttgctaactactctgctgtgttccctgggcctctgcccaaggccctgcacacactgaggcctagcatagctcctgcctatgctaggagctggttctatgttcaagaaagggaggactgaaggacaaacaatcaagagtggcccagtccccacccccacatctagctcagtctcagatctgagtgggaccaagtgcaattcaaggcctttttctctacttgcctgtacccagaagcagagaagagcaggactgttcacttttcctttattcttaacggtcttcctctgtgc

SEQ ID NO: 12938 - DNA, 683 bp, Macaca Fascicularis
tagagaagcctcggcagtaggcagtcagagatgccccctgaccctgcagagatgcagtggctaaaggtcccaaggcaaggggtgccttcctgtcttcatccttagcaacagccgagtggatggatgccatgctagatgagaactcagccgccccctctcatggccccgctgactcccgaagagctgccgaagtggcagtgagtgtgttggcctgtgatctgggaactcccagcaacagcaggcccacctaccttcaaagctgaagcctccaggaccgccgaagaaagccttgaagatattgtttggatcaaaatctgtagagcaaggcaagtaacatggaagggaagaaaaggtgaaaaattagaaatgtttgaagagaactgatgacactgagaacagatctccaaagctttcctggagagtctcactccctcctttcccaacacttcagactgcaggtgagccaacctgccccaccccgtgcaaaacatgctacctgatcccactcctaggacatgttcccttctccttccaagtgctgccccaaaggaaagctttttccgcttcagcgtgcttcgctgggctgttttctcaacaaatggaatgccatttgcacttacacaagactttccccatactctgtctccctataatgctggagcggctactaaaaaggataaaat

SEQ ID NO: 12939 - DNA, 756 bp, Macaca Fascicularis
  misc_feature (1)...(756): n = A,T,C or G
aaagagactagctccccaacattcacacacacacacacaaactttcagcaaatgaagtaccgnnaccgtgcagctgaacgcagagagaagtatggcatccccgagccgccagagcccaagaggaggaagtacggcggcatatccacagcctccgtgtgagtggctggaccaggtgagggggtctggggcctggggctggcaggccaaccactcatgctgtgcaccgcccctgcagagacttcgagcagcctactcgggacgggctgggcagtgacaacattggcagtcgcatgctccaggccatgggctggaaagagggcagcggcctgggccgcaagaagcagggcattgtaacgcccatcgaggtgagtctcaggcagtcctgtcccatcccccagcacccctcacagcatccctcaccagcctgacagagcctgcctccctcacacaggcccaaacacgggtgcggggctccggcctgggtgcacggggcagctcctacggggtcacctcaaccgagtcctacaaggagacactgcacaagacaatggtgacccgcttcaacgaggcccagtgagcagcttcaagagcaacttctccacatgtcgggtgtccatcctggggcagggaaggacagagtgttggatggctgggacggagccttgctcttatcggccagcccactccccagccagagagggcttgaccaaatcaaactgaggtggtgacttttgttggaaaattgggctggcatca

SEQ ID NO: 12940 - DNA, 675 bp, Macaca Fascicularis
  misc_feature (1)...(675): n = A,T,C or G
agnnncagcnnncacctccagccaaacacatattacacacacacacacacgtgccacacccagacacacgcacagaatcagacactacaaacacctgccttgggggtgaagtgaaggcacagcctcctcaccccactgcgccccgggggttggaggaccttgtctgtgttaggacagtgtccctccctgggaatgtgacatgctaactcacagactggggccaggctcaggggcagaggctgggacatgaggggctgacaagtgggcttcgaggccagggaagccctgagttttctggcagggctgagcagtgggagggcattgtgttgtgggtgtctgtgtgtgaggtcaccctnnnnnnnnnnnnnnnnccagccacccccctgtccctgaggacttggtctggtccctcnnnnnnnnnnnnnnnnnnnnnnntaaggacttggaaaggaaagcacaatcagagaagaaaannnnnnnnnnnnnnncaggagtggcctggcacatggaccggcccgagcgatgtgcattctgcccaagccagcctcccagggggccggatttctctctcactgtctctttttttaaaatggttgnnnnnnnnnnnnnnnnggggggccttttttacacactgcgaggcccagctttctaggggactttgcnnnnnnnnngcag

SEQ ID NO: 12941 - DNA, 776 bp, Macaca Fascicularis
  misc_feature (1)...(776): n = A,T,C or G
gcagtcatgtgccgagtttaaganncagggatgctgtgactacaagatgaaagagaatttggttgctgagacccagttaatggcctctgctacatggagctcaatggacatgcccaggaatgctcttggctgttcgtnnnnnnnnnnnnnnnnnngtaactaaagcattcgtttatgaattgacttgcgagaagggctgatctcagagtcactttgagctaagttggattagtcacactaggaagttaattccacacccttcgtctaagtctcagtattgaggcctctccagttctcatgcaccccaatcttagggttagaacatttgaccctgatacgtgcaccatgcttcatggttgcctgagctccttcttctgtttcatttgagcatccaaactacatatttggtcatattgcctgcctaccccatgcctgctgcagaaatactcatccaggtataaccttgatatacacagagatggtcttaggagaattgttaatatacgtactgtattgtcatcaaggatactgtcccttatttgaagacatctaaagagaaactgtcttcagatccaagtgctcagatctaaagnnnnnnnnnnnnnnnnnnagtggtcatgtttcccttctagttttggctgacaggaagctcaattcagtatcataactacagaacctgtcatctgtattttttgttctcacgccctgtttttgttattttgtttctggttttttatattgaggtatgtttcagatattgttacaaaaataaaatg

SEQ ID NO: 12942 - DNA, 751 bp, Macaca Fascicularis
  misc_feature (1)...(751): n = A,T,C or G
agagcaggctcaagnnnnnnnngcttgnnnnnnnnnnngaccnnnnnnnnnnnnnnnagcaggccaaaagggaggaagctctcaaggcgaagaagcatgtcaagaagagcaagggagagagttttgagagctacgaggtggcccacctccggctgctgaagctggctgagagtgggaacctaaaccagctcattgaagattttctggccaaggaggagaagaattttgctcggttcacgtatgtcacggagctcaacaacgacatggagatgatgcacaagaggacccaacgaatccaggacgagatcattctcttgcgatcccagcagcaatcgtcccacgatgacagccgctctgccctgagacagctggagccatcattgaaaagaagaccaatgacctgctgctgttggagacctataggcgcatcctggacatggaaggggcagagnnnnnnnnnnnnnnacccttcctcaaccctttctggggtggctctgccctcctcaagcccccagaacccatcaaagtcatccccccagtgctgggggctgaccccttcggcgacaggttggatgatgtgnnnnnnnnnnnnnnncacagcagccttcggcagctgattctcgacaattacatcctgaaggagaatcggagtaaggaagtgcgcggagacagcctgcctgagaaagtggatgacagcaggtccaggaagagggtaaccatgtgaggtgcatgcatggggccaccttgcaca

SEQ ID NO: 12943 - DNA, 707 bp, Macaca Fascicularis
  misc_feature (1)...(707): n = A,T,C or G
ctagacttgctggccatctactgccgcaacgaggctgggcagggggaggtggggatgccgcccctgcccgtgccacagcagccccttcntnnncttccacctcaaccnnncgcctggccccctacccacatcctgccactacccgaggggaccgcaagcaaaagaagagagaccagaacnnnnnnnnnnnnnnnnnnnnccgccagcggaagcgggcagagggtgaggccctggagggcgagtgccaggggctggaggcgcggaatcgcgagctgagggaacgggcagagtccgnnnnnnnnnnnnnnnnnnnnnnnnnnnnnnnnnnnatcgagnnnnnnnnnnnnnnnagccagaggacccgtagctgctagaaggacgggggtgtggcttctgggggctggtcttcnnnnnnnnnnnnnnnnnnnccctgcctccaccttcattccatacgcctctcnnnnnnnnnnnnnnnnnnnnatgcttgtaatcccagtactttgggaggccaaagcaggaagatcgtttgaggctaggaggtcaataccagcctgggcaacatagtaagaccctgtctctattaaaaaaaaaaactcttcttccccacaaaaccacccaactcctttctgattttatccttttattctctctctgcttttatcacctctcttgtgtatttctggattttcttccctcttctctcctcc

SEQ ID NO: 12944 - DNA, 1069 bp, Macaca Fascicularis
  misc_feature (1)...(1069): n = A,T,C or G
tcagtgttcatatagcacctnnnnnnttatatgtctgggcaactaaaaacaaacattgtgagaatgaatattttaaaggtagtaattcctagttataatagatacataaannnnnnnnnnnnnnnntctgtatttttgcttcaggtttgaaataaaaattatctagttaaattttttatgtttcacnnnnnnnnnncatcagatagcattgcttattgtgggcatttctgcagtgaatacattttccaaaacagttaaattgtcagtttggatttgctttaaagtcctgtataagagagaagaaactatttctataatacaaagcactctcatcagatatctgacataattagatataatnnnnnnnnnnnnnnnnnnnnnnnnnnnnnnnnnnnnnnnnnnnnnnnnnnnnnnnnnnnnnnnnnngttaatattgaactatttatttttctcttagtcttgttagttaattaacttcattgccgctggattctcttcagcctttaaaaatatttcttagtggtcattgctctgcagaactcaaatagaaaattgtactggttcatagatatttttaaagggttaatttattgttcagccttatcccttggcatgtgaacagactactannnnnnnnnnnnnnnnnnatgagctttgtgttgtaaaatgaaaagtgcttctataaagttttcaaggtagggagtgattttattgttgtttatatctaatatattaaagatgtgtgatactaaggtttaagtgctataattaccatgtttgtactgttnnnnnnnnntacttaaaacatctgatactgtattcttggctggacgtggtggctcgcnnnnnnnnnnnnnnnnnnnnnnnnnnnnnnnnnnnnnnnntcacaaggtcagnnnnnnnnnnnnnnnnnnnnnnnnnnnnnnnnnnnnnnnnnnnnnnnnnnnnnnnnnnnnnnnnnnnnnnnnnnnnnnnnnnnnnnnnnnnnnnnnnnnnnnnnnnnnnnnnnnnnnnnnnnnnnnnnnnnnnnnnnnnnnnnnnnnnnnnnnnnnnnnnnnnnnnnnnnntg

SEQ ID NO: 12945 - DNA, 1491 bp, Macaca Fascicularis
  misc_feature (1)...(1491): n = A,T,C or G
aaaaacaattataattcaacagctgccatactaattggtgtacttctgacttccatgttggtagctataatnnnnnnnntactttggaaatgcttaaggaaaccagttttaaatgatccaaattgggcaggtagannnnnnnnnnnnnnnnnnnaaacccctgacatttnnnnnnnnnnnnnnagagaaaatgaaatatccacaaaacatacctcagtcatttcacttacaccctggaaaccaagcaaaagcacacttttagcagatgacttagaaattaagttgtctgaatcaagtgaaaacactgaagactccaacaaccccaaaacagagaaaacaaaagatcaagcaaatggtacatcagaagatagtgctgatggatcaacaattggaactgctatttcttcttcagatgatgcagatctgcctccaccacctccccttctggatttggaaagacaggaaagtaaccaatctgacaaacccataatgacaattgtatctcctcttccaaatgattctactagtttccctccatctctggactgtctcaatcaagactgtggagatcataaatctgagataatacaatcatttccacccccgcctgactcacttaacttgcccatgccaccggtagattttatgaaaaatcaagaagattccaaccttgagatccagtgtcaggagttctctattcctcccaactctgatcaagatcttaatgaatctctgccacctccacctgcagaactgttataaatattacaacttgctttttagctgatcttccatcctcaaatgactcttttgtttttctttatatgttaacatatacnnnnnnnnnnnnnnnngtcaattttgatttttattcaggaactatctgaaatctactcagagcccatgtgcacagatgaaacattttttttaaaaagttatttaacagtaatctatttactaattatagttcctatctttaaagtatagtacattttacatatgtaaatggtgtatgtttcaataatttaatcactctgaaacaatctacatatacttattattaccccagtacagtttttttttttccctgaaaagctgtgtataaacttattgtgaataaacttttatgtttccatttcaaagactggggtggagaggaataagagactaagtatacactccaagttttaaattaatacctcaagtattaaataaatattccaagtttgtgggaatgggagattaaaatgcatgtttgagaatagagaaactttcttcttggtttcatcacgaagagtaaagcaaacatgttaaaacatcaactgaagggttgggttaaagacatttaccctgaaaaaaatatgaggatacatcataaaatgtaaatattttcctatcatgtcatggggaggcacaaattttaaaactagcatctttaaaacgtttcttctttataaacacccaaacaaaatcaagttttataaagaaaaa

SEQ ID NO: 12946 - DNA, 744 bp, Macaca Fascicularis
  misc_feature (1)...(744): n = A,T,C or G
aatgcataataaggttttatatgctcacaggtggcttntaggacactagtaagaaaatacagttgtgatctgtgttatacaccaatgatagttgccgctgattttgtcaaatctataaaagccagagacagtgaatttaccacaaaccaaggtgattgcccattgattgttcagtttgctgctaacgatgcaagacttttatctgatgctgctcgtatagtctgtccttatgcgaatggaatagacattaactgtggttgccctcagaggtgggcaatggcagaaggttatggggcttgcttaataaacaagccagagcttgttcgagatatggtgaaacaagtaagaaatcaagtggaaacccctggattttcagtttctattaaaataaggatccatgatgaccttaaaagaacggtagatctttgtcgaaaggctgaagcaacaggagtttcatggattacagtccatggaagaactgctgaagaaagacatcagccagtgcactacgattccattaaaataattaaggaaaatatgtctatacctgtgattgctaatggagacatcagaagcttaaaggaagcagaaaatgtgtggcagattactgggacagatggtaagaaataaatacttgggttcttttaattgggaagaaatgagagtggggaagtaatgttaatttgattttcatttgttttgtttaacattaagccatattttcccattgtactgtttaagcta

SEQ ID NO: 12947 - DNA, 680 bp, Macaca Fascicularis
  misc_feature (1)...(680): n = A,T,C or G
gagcagcttggggaggcagatgaggagctggcaggcaaatacacagagcnggggnactggtgcgcccannnnnnnnnnnnnnnnnnnnnnnnnnnnnnnnaagctgtgctggagaatgtgtcagaggatggcaaggaactttctggctgcctggggagacagcagaannnaggccacgcactggaggccggctggtttctgctccgtcattgcaatcggaaaggcgaccctgaacttcgagcccacgtggttgacaagttcctgttgttgcctttccgctccggatgggaccctgannnnnnnnnnnnnnnnnnnnnnnnnnnnnnnnnnnnnntctgccccacccagctggagtgggccatgaagctctggtggccacacagcgaagccatgattgccttcctcatgggttacagtgagagtggggaccctgtgctgctgcgcctcttctaccaagtggctgagtacaccttcnnnnnnnnnnnnnnnnnnnnnnnnnnnnnnnnnnnnnnnnnnnnnnnnnnnnnnnnnnnnnnnnnnnnnnnnnnnnnnnnnnnnnnnnnnnnnnnnnnnnnnnnnnnnnnnnnnnnnnnnacggagaatggtttggctacctgagccgagagggcaaggtggccctcnnnnnnnnnngaggtcctttcaaaggctgcttccacgtg

SEQ ID NO: 12948 - DNA, 758 bp, Macaca Fascicularis
  misc_feature (1)...(758): n = A,T,C or G
ctcactacanccntggtcaaccaatggccnnnnnnnnnnncgcttaatggggccgagggcaccagcaactccaagctttaccggagacacagcttcatgagcacggagcccctgtcagctgaagccagtctgagctcggactcccagcgcctgggagagggcacacgggacgaggagccctggggtcccattgggaaggaccccacgccctccatgctgggcctctgcggctccctggcctccattcccagctgcaagtcccnnnnnnnnnnnnnnnnnnnnnagtgcctggtgagcgacagtcccgagggcagcccggcactgagccccagctgaggaacggcatgggcagtgctagccccacctgccaggggccatggacacctgccacccttcttcaacaagagtcccccagtccaggctacccttgcagagaacgctgcccaccaagccagggttctctcggggaagatcccctctactcaccttagcttccttgcctgtggcagcacgggctgcggaggaaagcaggctgagccaggaggcaggggtgcccaagccgcagggacccctggggaagcctgctccattcttctggtgaccctggcactccctcactcatctccccttccccctcaggagctggtggcccagtttccacacccgcacctcccagtctctagcctgtccatctgtccctgtgtatgccctggagtcactccttcctcagcccccagggcaggagctctgcggggatc

SEQ ID NO: 12949 - DNA, 701 bp, Macaca Fascicularis
  misc_feature (1)...(701): n = A,T,C or G
gcctgcgctcnnnnnnnnnnnnnnnnngctgggctcgcggaagagannnnnnnnatgaaagccccagccacccaccaaatcagagggaaagaatccatcttcttacgccatggcagctgctctttctaatcctgaggttttcaattacggagtggaaacctacgaagcctacaagcaaaagtctctggctagcgacatcactgatgagcagaaaaaggttcgggaggctgacctagtgatatttcagttcccgctgtactggttcagcgtgccggccatcctgaagggctggatggatagggtgctgtgccggggctttgccttcgacatcccaggattctacgattccggtttgctccagggtaaactagcgctcctttctgtaaccacaggaggcacggctgaaatgtacacgaagacaggagtcaatggggattttcgatacttcctgtggccactccagcacggcacattacacttctgtggatttaaagtccttgcccctcagatcaattttgctcctgaaattgcatccgaagaagaaagaaaagagatggtggctgcatggtcccagaggctgcagaccatctggaaggaggagcccatcccctgcacggccccctggtacttcgggcaataactctgtggcacgtgggcatcacgtaagcagcacactaggagacccaggcgcaggcaaagag

SEQ ID NO: 12950 - DNA, 727 bp, Macaca Fascicularis
  misc_feature (1)...(727): n = A,T,C or G
ctccagttagggctatcttcctagcattgnnnnnntaagtagcatgggggatatatttttgctataacgtaaaaattttcctttaaccactgccctctgcttcttgtccttcaaagttctttcccctcagttttggggttgtcttactctggagatgccaagtgtattttttctttctatnnnnnnnnnnnnnnnntttacaatgtaaatcttcacattggagatatattggttnnnnnnnnnnnnnnnnnnnnnnnnnnnnngtatttgtgaaggactcaaccaccttccttcttcaccccatgcttctcaccaaatttttgtnnnnnnnnnnggcacttggataactcaagttgatatttatagctgatcaatctataggtgtcccagaannnnnnnnnnnnnnnnnatcttggctccttaatggtccttttggccccttggatagttaacagctgagtcattctaatctcttctgtgttttcattgccttaaccannnattgtggtgctttttgtatattttatgtataaatcacaaagttgaattctgactatttttaagacaaaagtctgttaaacttttttattgtaaagaatatttattatgcgaatctctattattttatggtatttattgcaaaagactgttgaaatgtactcatgtctgaatataacaaaatatcaatacttaacggaaaataagggacacgaagaaagtacacntg

SEQ ID NO: 12951 - DNA, 710 bp, Macaca Fascicularis
  misc_feature (1)...(710): n = A,T,C or G
tcgcagcctggtctgggggaggtacaggagagggagggagnnnnnnnnnncacatacgtttctgatgatgtcgctttctaaagggatgtgacatctttttgtacatcttttccgttttttgatatcaagtggttgctgtgagcaggagacacgnnnnnnnnnnnnnnnnnnnnnnnnnnnnnnnnnnnnnnnnnnnnnnnnnnnnnnnnnnnnnnnnnnnnnnnnnnnnnnntgccgtaacacaacctgtccagagcctcggccttccctgacaggcgcgcagtccttccacccaggcccggggggacccgctcacctccacagtcgggcagggcagggcagggcagcgtgtgccaggctggctgctgctgtgcatccccgaggccaggagaaagtggcatcccctccggatggcagcatggtctgtggggggtgggcatggacagcccatgggccaggctggcgtctccccacccttgcaaacctgcaaaacagatccacccctggcccaggaacggattagccnnnnnnnnnnnnnnnnnnnnnnccctctgccccggggtctctggggagcctgtgtgtgcccacggctggcccatctaccagactctgcacactggatggactggtgctttctgaagttcagtagtgcacaggatgtgcctggataatttcgggaacttgaaacattctctttatccattcttttg

SEQ ID NO: 12952 - DNA, 839 bp, Macaca Fascicularis
  misc_feature (1)...(839): n = A,T,C or G
gttgagagatgaacagttgtgtannntcaccacatgacaacagtcatnngagatgttgaagagatgatacgaccgcggaggaattctaccagtccctgggcattccttaccacatcgtgaatattgtctcaggttctttganncannnnnnnnnnnnnnnnnnnnnnctggaggcctggtttccgggctcaggagccttccgtgagttggtctcctgttctaattgcacggattaccaggctcgccggcttcgaatccgatatgggcaaaccaagaagatgatggacaaggtggagtttgtccatatgctcaatgctaccatgtgcgccactacccgtaccatctgcgccatcctggagaactaccagacagagaagggcannnnnnnnnnnnnnnnnntgaaggagttcatgccgccaggactgcnnnnnnnnnnnnnnnntgtgaagcctgcgcccattgaccaggagccatccaagaagcagaagaagcaacatgagggcagcaaaaagaaagcggcagcaagagacgtcaccctagaaagcaggctgcagaacatggaggtcaccgatgccnnnnnnnnnnnnggtccctgtttgctttcatttctgtccgctgagatctcagagcctgcccaacagcagggaagccaagcacccattcatcgccctgcccccatctgactgtggagctgagaggggnnnnnnnnnnnnnnncacacagatgttcctgtttccttgcatgggcataggaacccatcactgatgactgatgaaaccatgtaataaagcatctctggggagggcttaggactaaaaaaaaaaaaaaaaaaaaaaagg

SEQ ID NO: 12953 - DNA, 780 bp, Macaca Fascicularis
  misc_feature (1)...(780): n = A,T,C or G
aagcccagaaggaaaantncagaagaccagagacagtactgagtgtnnnnnnnnnnnnnnnnnnnnnnnnnnnnnnnnnnnnnnnnnnnnnnnnnatgtacacattcacccttcatcagtgaactatcaggtgagacactttgacagcccctacctgttgtaccacgagaagataaaaacgagtcgggtattcatccgagactgcagcatggtgtctgtgtacccgctggtcttgtttggaggaggccaagtgaatgtgcagcttcaaagaggagagttcgttgtnnnnnnnnnnnatggttggatccgttttgtagctgcttcccatcaggtggctgaattggtaaaggagcttcgttgcgaacttgatcagcttctccaggataaaattaaaaacccaagcattgatctgtgtacgtgtcnnnnnnnnnnnnnnnnnnnnnnnnnnnntnnnnnnnnnnnnnnnnnnnnnnnnnnnnnnnnnnnnnnnnnnnnnnnnnnnnnnnnngcttctagctcacnnnnnnnnnnnnnnnnnnnnctctacctccaactaaagacctgttggggctggccctggtggaggagcccagggcaggcagcccaaggcagctgaggcagtgcatatacccttagggccatttctaacaagccttggccactcccagcacannnnnnnnnnnnnnnnnnnnnnnnntaaaacccagcttgcctgtctttgtctctgtgactattccggagtgaattaagttcacctgnnacacaaaagtgaatgtataa

SEQ ID NO: 12954 - DNA, 674 bp, Macaca Fascicularis
  misc_feature (1)...(674): n = A,T,C or G
ttttcaaagcccgtgctcttaggcacagtgtcccacactccaaaggtattttacatattgtgtgtgtgcacatttgcatatgcatgtgcatatgtgtgtgcacgtgcacgtgnnnnnnnnnnnnnnnnnnnnnnnnnnnnngcaataggtggatctggaggggcgtgcggtgtgcagaggttcttaattttaaactttcaaaaccaaccattcattctaattttacgtattctcttgcataaagatgtaaaattctagcagcaaacccagtgcctggagctcaacaaacattctattaaatgagtaaatcatgaaagatggataatgctgaaaggtgggaagnnnnnnnnnnnnnnnnnnnnggggnnnnnnnnnnnnnnnnnnnnnggaaaagcaaaaagataaaagcaaagaagctgtaagtctgcctttcttcatggtctagaacacagccttcctgcacaaataactcacaatcttcctgcatgcaacttaccaccagacccttggnnnnnnnnnnnnnnnnnnnnnnnnnnnnnnnnnnnnnnnnnnnnnnnnnnnnnnnnnnnnnnnnttcagtacacagcacaagcaccatcctatacaatctccagcaagcctttgtttcctgcagtcagctcctttctcgctgacctacccactgcacccttnca

SEQ ID NO: 12955 - DNA, 788 bp, Macaca Fascicularis
  misc_feature (1)...(788): n = A,T,C or G
ggggcagcatggagctgtaactaagcatcctttagggtgctgcctctccaggcattcagccctcacattagattctagttactgtggtatggctaatatctgtccacatttggaagcaatcctgccttgctttagagcttgcannnnnnnnnnntgtcaggccatattatcaatgtttacttttttggtactataaaagctttctgccacccctaaactccagaggggacaatatgtgccaatgaatagcacccctatgcacatacacacacnnntggccagctgtcaagggtagaatgaatatatgcggtataagaaatggcgggattgtgttatgaagagctaatttactggacaaagaattccaaagcaaaacaagaacaatatgaatttgagcannnnannnnnnnnnnnnnnntttccccctaaaccaactgaagnnnnnnnnnnnnnnnnncattgtgaaccagcactagactccctctatcatggtgaaagnnttcatcaatgaggtatgttctttagtagtggtatgtaatggaatttagccatttttcaaagcaattgaaacgcattgctctggatctgttccttggcagtggactcagaaagccaacatatggctcctcccagcccatcaccagtatttttgctgcttctgaatgcaaagtggttggttttgacttcagattggacttactgtagcctcaaatgatttcccccatccacctccgggaaaaaagaatgttactgccttaataaaaaatgaaaagagaatgatgctcnna

SEQ ID NO: 12956 - DNA, 787 bp, Macaca Fascicularis
  misc_feature (1)...(787): n = A,T,C or G
cgagcacgnnnnnnnnnngcatccagagcaagacagcagcnnnnnnnnttgatccccanncaacgtgaaggtggccgnnncgacatcccgccccgcggcctgaagatggcctccaccttcatcgggaacagcacggccatccaggagctgttcaagcgcatctccgagcagttctcagccatgttnnnnnnnnnnnnnnnnnnnnnnnnnnnnnnnnnnnngggcatggatgagatggagttcaccgaggccgagagcaacatgaacgacctggtatccgagtaccagcagtaccaggacgccaccgccaatgacggggaggaagcttttgaggatgaagaagaggagatagannnnnnnnnnnnnnnnnngagccgccccagctcagatcctacaacacgcaagttccttcttgaaccctggtgcctcctaccccatggccctgagtggtgcactggtccgttgtgttggtgtcggcccctcacaaatgcagccaagtcatgtaatnnnnnnnnnnnnnnnnngacaatactttaaaatagcagagaattacttgcgggttctacccagtcagaagatcacaccatggagactttctactagnnnnnnnnnnagagaactgaggggccacgaaataaacttcacnnnnnnnnnnntgttcaagcatgtctgagaattagcaggggagttagaaacagtctttctcatcctttgtgatgaagcctgaagttgtgccgtgttgccttatatgaatatgcagtatgggactttgaaataattgattcat

SEQ ID NO: 12957 - DNA, 563 bp, Macaca Fascicularis
  misc_feature (1)...(563): n = A,T,C or G
cagcagactactttgaagggaacaatcagatgcaaaagctcttgcatgtttatttaaaatactagtgtcactttgtgagtactcgcccgttcacaggctgagtcccaggcctgtgcttcatagagccagcttcttgctcacagccacatttccatttggatcattactgcctgcacctgcatagtcactcttttgatgccctccagatgctggggaacaaaaatggtgatcatatatagactttatagccacagttcatcaccaatcccattttccaagggaaatgttaatatttgataaatctagaaaatgcattcatggctgggctcgatggctcacaccagtaatcgcagcactttgggacgccgaggcgggcggatcacgaggtcagnnnnnnnnnnnnnnnnnnnnnnnnnnnnnnnnnnnnnnnnnnnnnnnnnnnnnnnnnnnnnnnnnnnnnnnnnnnnnnnnnnnnnnnnnnnnnnnnnnnnnnnnnnnnnnnnnnnnnnnnnnnnnnnnnnnnnnnnnnnnnnnnnnnnnnnnnnnnnnnnncacaccactgc

SEQ ID NO: 12958 - DNA, 766 bp, Macaca Fascicularis
  misc_feature (1)...(766): n = A,T,C or G
tctcgttgccaggctggannnnnnnnnnnnnnnnnnnnnnnnnnnnnnnnnnnnnnnnnnnnnnnnnnnnnnnnnnnnnnnnnnnnnnnnnnnnnnnnnnnnnnnnnnnnnnnnnnnnnnnnnnnnnnnnnnnnnnnnnnnnnnnnnnnnnnnnnnnnnnnnnnnnnnnnnnnnnnnnnnnnnnnnnnnnnnnnnnnnnnnnnnnnnnnnnnnnnnnnnnnnnnnnnnnnnnnnnnnnnnnnnnnnnnnnnnnnnnnnnnnnntgctcagtctgatttatttcttaaaagttgtgtgcagaatgatttaaagtgtattaagtctgtttgttaatgaaagaaacaatatagtgannnnnnnnnnnnnnnnnnnnnnnnnnnnnnntgttactggtaatttttatttttaacatatagctgactttgcataaagatatacagttacatgaatgttataagaaagatggcaaacaggctttgtgttatcatttgtttaaaatagcaaattatgggcaagttatcttacacaaaggtagccttttaaattaattgtatcttttatattttatttagcttatattgattttcatctctcgtttaaaaacattatttaaatagtacagtgagggtacaatgaaaaaaatttcatggaatgccacgtcagaaaatacagtgtcaaaacaatttcagtaaatttttttctcaaaatcttcttcagaaataacatatnnnntttaatcctagtacagataaaaaacatgtcattt

SEQ ID NO: 12959 - DNA, 707 bp, Macaca Fascicularis
  misc_feature (1)...(707): n = A,T,C or G
agcaaggtttgctgtccaagnngtaaatattcaacgggaataaaactggcatggtacttttttcttttttttgttttgtttttttttttttttggctctttcaaagataatggcccatcaatgagcatttttaacatactccatagtcttttcctgtggtgttaggtctttattatttttttttttcctgtgggctgggtggggggttgtcatgggggaactgccctttaaattttaagtgacactacagaaaaacacaaaaaggtgatgggttgtgttgtgcttgtattgaatgctgtcttgacatctcttccctcgtcctccagtatgttctnnnnnnnnnnnnnnnnnnnnnnnnnncccatcactttggctagtgacagggctaattaatttgctttatacattttcttttactttctttttttcctttctggaggcatcacatggtggtgatgtgtctttatgaatgttttaaccattttcatggtggaagaattttatatttatgcagttgtacaattttatttttttctgcaagaaaaagtgtaatgtatgaaataaaccaaagtcacttgtttgaaaataaatctttattttgaactttataaaaagcaatgcagtaccccatagactggtgttaaatgttgtctacagtgcaaaatccatgttctaacatatgtaataattgccaggagtacagtgct

SEQ ID NO: 12960 - DNA, 745 bp, Macaca Fascicularis
  misc_feature (1)...(745): n = A,T,C or G
gtnnnggngagggctccccaaagcagggcaagatagtggccctgtcactgaccctggcctgtggtggtctgagctggggagggaaggacaccaatgaatcagcttgggacctctttaggccttccccttttcctccaccctaatgctccttagtgatgctctgaggcgtggccacgannnnnnnnnnnnnnnnnnnnnnncacctgaaaaaatcctgagaatgtctcccatctcggcctcttccgaagaaactggccaggcaaggaaagaggccggtccccagaagccagtgggcgtggggtgtgatactctctatagccactacagggcgcgcgcaggtcgcggatctccccagttgctaattccggctctgccactcaatccgatccctagttcccaagcgcgggtccccagccttgcagtctccagccgtgctgggccgggagcaggcctccggcctcccagacctctggagcccgccggtcccatctttgtactcatccaccccagccggcttgggactcagacaccgaagtctttttttttctctccgatccttggacacctctgtctgccatttattagccatgtgaacttggccgcatcacttcacctccctgagcctcagtttcctcatctgtcaaatgggggtttataaacacctacctcgcagggttgttnnnnnnnnnnnnnnnnnnnnnnnnnnnnnnnnnccnnncacaccgccnnnacacagaggcgctca

SEQ ID NO: 12961 - DNA, 792 bp, Macaca Fascicularis
  misc_feature (1)...(792): n = A,T,C or G
tcnaatggaannnnnnnnnnnnnnnnnnnnnnnnnnnnnnacagccccgagtggggcccatacagagccctggaccttcgtggtnnnnnnnnnnnnnnnnnnnnnnnnnnngattcgaaagatcattgaggaggaagaggagatcaactatatgaaaaggatgggacannnnnnnnnnnnnnnnnnnnnnnnnctgagaaccaactggattaaagagtnnnnnnnnnnnnnncctattttgattctcattttcaaacaagtacatggttttgctgcaaatggcaagaaaaaagtccactactacaatgagatcagcgtttccattgcttgtggcatcctgctnnnnnnnnnnnnnnnnnnnnnnntggtgactgtcactaccactcctctcaactgcggccctcgactgagggtgctcctgggccgccctgcacatnnnnnnnnnnnnnnnntgctccccgtggggtaccccagcnnnnnnnnnnnnnnnnnnnnnnnnnnnnnnnnnnnnnnnnnnnnnnnnnnnnnnncggtgtaggcagggccacccaagggagtggcagggagatggcgcccctgcttctccctgtgcctctcgcctgctcctctcaggtctcttggctgctctttctccgggtgtcaggttccctcattgctcttctctggtggccacactgtgtcaagaagcctctccacactctgtgggcttccagtcccataagtcccgtttcttatccactttggaaatgcatgaacacttcacaaagaacatgccctggttttaaacttaaa

SEQ ID NO: 12962 - DNA, 764 bp, Macaca Fascicularis
  misc_feature (1)...(764): n = A,T,C or G
gccatagatgataaaggaattagattttaatgtagaacnnnnnnnnnnnnnnnnaaaggtgtgtggcacttattgtagttattgatgagacgccaataaccagtagtgtttccctagatatatgcccaccctcacacaactttctccattaatgttaaatatgcatttttatcttattaattatataaagctgaaggaaaagaaagtgttcaaataatcataacttctacattacaggttctgtttagatgtagaactagagggnnnnnnnnnnnnnnagataaagagatatatagccccatgnntttaaatgcgtcatacttttgcaaacagaaaaaaagttttaactttattataaaaattcgtctgtgggtcaaagtaaacactgttacatttaacttgctttttaaaaacaattgcgatctaaagtcaaaaatctgaaatttaataatataatgagacttacacnnnnnnnnnnnnnnnnnnnnnnnnnnnnnnnnnnnnnnnnnnntataagggacaaatatttttacagtacactatagcaacagcgaaagccctctcaccctgataggaatgggtttgctgggtgtctaccaagttagattcctgctgaatagaattaggcatccttaaaagattttaatccaatactgaattgtttataaaatgctttctctattgtaatgtactgtaagtagtgaaattctgtatatattgctattttctgtccattgttgtgaacttatgtatattaggaaata

SEQ ID NO: 12963 - DNA, 1109 bp, Macaca Fascicularis
  misc_feature (1)...(1109): n = A,T,C or G
cagaaatacattttcattgtccaaaatcagcttcaacaaatggtttctggagacaaatcatttttttcattatcattgcataattagaactacaggttaatgatttattttttgactannnnnnnaatttcttatcactagataactttcagtatcagtggtggttacttactacttaaatcagaggaaggattttataaaaataataaatttaattttaccaataaatattcccataatttagaaaaggatgtcaacttgctaatttcagaaataattattcattttttaagaaccccttcttttaaagcatctacttgaagattggtataattttcataaaatgtctttttttttagtgtcccaaagatatcttggataaactattttgaacttcagatttcagatgaggcaacattttcttgagataattagccaaatttcttccatgttgaatggcacaaaatatttctgtgaaactaannnnnnnnnnnnnnnagataactaggataacttgttgctttgnnnnnnnnnnnnnnnnnnnnnnngcagaagctactaaaaaaagcaaccttttcattttcactaggagtttaaaagctattgtattattaaaaagtctttacaatgcttgtttcaaagaaccaacagaaaaaaaagctaacaaaactaagaactaacatttaaaaaattaaatttagaatgatttctttaatttgtcctttttttctttggtctaaaacattattaaatttttgtaaatattttgatttaatgtgtcttagatcctcattattttaatacaggaaaagaaaaagatttagtaatttctttttttttaaattatactttatgttctaggatacatgtgcacaagatttagtaatttcttaccatgctaatatgtaaagtttatgccatccaggcatttaagagcgatcctcatcccttcagcaatatgtatttgagttcacactatttctgttttacagcagttttgaaaaacacatactatgccaccaattgtcatattatttttagatgatgtaacataaccatcaaaattaatattaatgcctaatatttagtatgtaaatgtcatgagatca

SEQ ID NO: 12964 - DNA, 960 bp, Macaca Fascicularis
  misc_feature (1)...(960): n = A,T,C or G
agaaaatgggtgttttnnnnaaatcatttgccttnnnnnnnnnnnnnnnnnnnnnnnnnnnnnctcttgattgtatagagtcattgtgtatatttcaattacctagatattcccttgagattttgataaaatttgagggaggcagaaatctgcatttgaagaaaaaaattannnnnnnnnnnnnnnnnnnagtagcctgtggctatttttatactgattttgatatcatgtgttcttttcatagtcgtattttgccaccataaacataaaaaaaaaaagtatctccaaannnnnnnnnnnnnnnntgggttttaatagcaattttgaatttgtaagcttagnnnnnnnnnnnnnnnnnnnnnnnnnnnnnnnnnnnnnnnnnnnnagtggaagtactgatataattgttgacttttcttttactatgtgtaagaaatacgccaaacatgaaaagaattgttttgatcatatgcatgtatgtagaatatttnnnnnnnnnnnnnnnnnnnnnnnnnnnnnnnnnnnnnnnnnnnnnnnnnnnnnntacatgtaagtaagctacaattttgagtgctttataaacacttaagatatatataaattaatttcatagcaacttgtaaaaaaaaaaaaacttgttnnnnnnnnnnnnncaacatatccctaaactaagggaagaggagggaataacaactcaatgaaaagacggtctccaatttctgaatggaaaagctacagctgagaaataaaataaaatgtcgtgctgcagaatatgttatacccttattttgtgttaaggatatattttattatgtgaatggttttggttttgttttctgtttttgttttttgcttgtattgggagctagctttactggtaacttccttatttagtttttagtggtcaactcaaaatgaaactagggctgagctagttaaccctcactagccaaactgaaa

SEQ ID NO: 12965 - DNA, 683 bp, Macaca Fascicularis
  misc_feature (1)...(683): n = A,T,C or G
cgggcccccaggccnnnnnngcccttactttcgacgactgctgctgccgccagggccgcggctggggcgcccagtgccgcccgtgcccgccgcgcggagcggggtcccagtgcccgacatcgcagagcgaaagcaattccttctgggacacgagccccctgctgctggggaagccccggagagatgaggacagttcagaggaggattcagacgagtgtcgctgtgtgagtggccgctgtgtgccgcggccaggcggcgccgtgtgcgagtgtcccggcggcttccagctcgacgcctcccgtgcccgctgcgtggacatcgacgagtgccgagagctgaaccagcgtgggctgctgtgcaagagcgagcgctgcgtgaacaccagcggctccttccgctgcgtctgcaaagccggcttcgcgcgcagccgcccgcacggggcctgcgttccccagcgccgacgctgacaccgccctcggcccagacctcggtgatcactgaggggtttctgcgagctcggcctcacttctgccccgacttggggctcggacccagggacgttggggcccgcagaccctccctgcgccttgagacccgcggcgcccctaccggccccacccggttggcgggcggttgtaaggtccccggcgggcgctgtctgccttcctcccagagggtgttcc

SEQ ID NO: 12966 - DNA, 710 bp, Macaca Fascicularis
  misc_feature (1)...(710): n = A,T,C or G
aacaccnnnnnagcgttaccggaaggtttttttgacgannnngaggtagatgcaagggtgcgaaaggttgatgccccaaaagatcagatggacaaagagtgggacgaattccaaaaagccatgaggcaggtcaacactatttccgaagccatagttgccgaagaggatgaggagggacggttggaccgccagattggggagatcgatgagcagatagagtgttatcgacgggtggaaaagctacggaatcgccaggatgaaataaaaaataaacttaaagaaatcctgaccataaaagaactgcagaaaaaggaagaagagaatgctgacagcgatgatgagggggaactacaggatttgttgtctcaggattggagagtgaaaggggcattgttataaggttttaaagacccaaggtttctaacagcctctgctattgtataaaagtgctgtctctcagtagtatatcggttacttcatgcctagagatttgggtacctggattgctaaactggattgttaagataaaatgagccagtgagctacagcactttggaaaatttgtgtaaaatgtttttgaggtaaagttgtttttgaaatttctgaagtgttatataccaaaatgccaactgttccacaacagacttaactgtatactttcgttgtaaatattgtacatagttaaatctatattaagtaattctgttttg

SEQ ID NO: 12967 - DNA, 585 bp, Macaca Fascicularis
  misc_feature (1)...(585): n = A,T,C or G
tccaccaccacgcnnnnnnaattttttnnntatgtctagtagagatggggtttcaccacgttggccaggatggtctcgatctcttgacatcgtgatacacctgcgttggactcccaaagtgctgagattacaggcatgagccaccacgcccggccttttgatccttatacaatttctgggaattcaaaacagaagcctcccaattctgttcgaagctacagcatcagtcagcatggcctggaaattcttgattctgcagtgttacttcctcccccgcccactatgaaatctagagggatgttaaatattcaagctcctcttatgtgggttgtgtcatctgaaatggggatggagaaaacaaaaaaaaataaataaggcagcaaatgagggagtgctgctactctgggcaatcaaacttaaaaaagttagtgtgaattttgagacaagtcagaacttatgttaaaacacaagacnnnnnnnnnnnnnnnnnnnnnnttttcttctcgctgagtaccaagaaatcgatctcctctnnnnnnnnnnnnnnnnnnntatataactggtgatacctgacatggtttattt

SEQ ID NO: 12968 - DNA, 760 bp, Macaca Fascicularis
  misc_feature (1)...(760): n = A,T,C or G
cacagagaagnnnnnnnnnnnnnnnnnnntgaagcccaagcctgaacccacttccgtacagggccaaccagtgtccacgtcacaacctcnnnnnnnnnnnnnttctgacgtttttacaaagccctcaggccagcagactctctctccagacagacaggtgcccaggcccacagtactgccgcggaggcagcccactgtgcagttcagnnnnnnnnnnnnnnnnnnnnnnnnggacaggcttgtgnnnnnnnnnnaatgggttttattttttattgctttttttttttttttttataacacttacaggtttctttgaaaaccctcctttccttaaagcacatttttctgacataaactcatgactaatctttgtgcaatcatgaacttttgaccaataattgttgttttgtgtcagctccagccatttttgtacatgttgtatagacaattgtgccttttaggagctttatgtttagaaaccgtacagattgttgaatatctatatacataaaaatatattatatacctatatgaaaaccaggtagttacttgtgtttagtaaggaagacctgtcaaataaatcaaatgattaaattatatgttccaccgttaaatataaattttacggctatggggcagagtttctgtgtataaattagtatgtaaactccatatttattgctattcatactagtctttgaaaatgggtctgttctccttannnnnnnnnnnnnnnnntacacttcagacaagattttct

SEQ ID NO: 12969 - DNA, 830 bp, Macaca Fascicularis
  misc_feature (1)...(830): n = A,T,C or G
agaggtgcacagannnnnnnnnnnnnnnnnnnnnnnnnnnnacaaggacagagtttctatgtagttgcatgtgaaaacagagatccacgggatcctccacagtatccagtggttccagtactcctggacnnnnnnnnnnnnnnnnnnntatcagcactcctcatcatcactcatctgccaagctcctcaatcatagccaagatcccatccctccatgtaccctgggtatcagcatctgtcctcttcagtctccataccccttcaggtttcctgaactgaagtgccttgtgaacctccaacaagctgctgtgcaaattcatccaaaaatatctgtgtgtcttcgtcggccgctctgctgtcatttagcgaaactctgctctagtgatacgggtttttcacgaatctctcacacttaatatctgaccaaattccttaatnnnnnnnnnnnnnnnnnnnnnnnnnnnnnnnnnnnnnnnnnnnnaaaaaaaaaatcnnnnnnngtcaacttagcattggtctccctagccttggtatctcctctaagcaattttccatccactagcccctcccctaacaccaacctgtaacttgtgtacagatctccacttgttttagctgtattccagaattgagaccaatttgatactgaggtcccatttgatgctttatggtccaactatggtttttttgacatgatttctataccaagaaaaaaagagctgcagtgaataagctgaaaatgcacatgtttcattatgatttatgaatgataaattttgatagaattgaatgttatgatagaaaacaaaaaaaagtagaaagagtcaaga

SEQ ID NO: 12970 - DNA, 705 bp, Macaca Fascicularis
  misc_feature (1)...(705): n = A,T,C or G
acaagaacgggcacgacggtgacacccaccaggaggatgacggcgagaagtcggattagcagggggccgggacggggagggtgggaggggggacagaggggagacagaggcacggagagaaagaatgtttagcacaagacacagtggagcttgggattggctaaactcccatagtatttatggcggctgcctgcggaggccccagtccgacttgcaggccacctctagctttcttcctaccccagtcccatcctgggcaccccgagtctcccccgacccggggtcccaggtctgctcccacctccacttcctgccccactcaccacctctgctagttccagacgcctccacgcccacctggtcctctcccattgcccacaaaagagggggcacgagggacgagcttagctgtgctgggaggagcagggtgagggtgggcgacccaggattccccctccccttcccaaataaagatgagggtactaaagttgtcttggtttttattttattattatttttttctttttccagtatactagcttgtcttttaagaaaggggatattaaaaaaaaaaaaagacaaaaatgttttttaaaaaaaaagcaacacccacacctgtgtctgtatatagtcagcttatcttgtgttcagtcgtttgatctctacagagagaagtggaaaatgctgtatcaaggnnggcctagc

SEQ ID NO: 12971 - DNA, 681 bp, Macaca Fascicularis
  misc_feature (1)...(681): n = A,T,C or G
gtcaggagttgcagaccagcctggccaacatggcgaaacaaaccccatctctaataaaaaaaaaaaaaaaatatnnnnnnnnnnnnnnnnnnnnnnnnnnnnnnnnnnnnnnnnnnnnnnnnnnnnnnnnnnnnnnnnnnnnnnnnnnnnnnnnnnnnnnnnnnnnnnnnnnnnnnnnnnnnnnnnnnnnnnnnnnnnnnnnnnnnnnnnnnnnnnnnnnncaaaaacaaacacaaaaaaagaattcagcagtgttgaaaattcaacagtcctgagaaacaagaaattccccatttgggcctaaaaactcttgaggaatttccattgtttttcctggttaggggaaatttcgggtaacaaaatacagtgaacatttagtgttagcagttgctacagaagtcccaagaattcaaatggattcccttccttctaagaatgcaattgagggccatttaagcaattactttagcgtagacctatctcagataaaagtaaaaatcacacagtgcaacagatatttccaagtcctttcatataatcaatattttgacccccactccaaatgtgattcacggtggtcaaaatccaacaagcagagtaagttcagcaacttaaccagtagatttccgaattccacaagggcaggggacatgttctattcatctgtcaattcccagcacc

SEQ ID NO: 12972 - DNA, 661 bp, Macaca Fascicularis
gcagtccctgagagtcctgctgaaatccagccagtgtttttttgtggtatgagaacaggcagaaagagatgccccgagatagaaggggagcctcgtgtttctttcctgcggacatgagatgaaccactggagtgggcagaggtggcccaggaccatggcgcccttagagtgcagaagctggggggagaggctgcttggaagggcaggactggggataatcagaacctgcttgtcacctcagggcatcaccgaacaaacatttcctaatgggaactcctgcagcagagcccgggctggaggtaaattacccagggcagcccccttgtggcccaggatcatcaacattgttctctgtgcaccatgagggcctccgggagattatttaagtgtattgtatcattggttttgtgtgattgtcataacattgtttttgttattgttggtgctcttgttatttattattgtaatctcagtttgcctctactggagaatctcagcaggggtttcagcctgactgtctccctctctccaccagactctacctctgaatgtgctgggaacctcttggagcctgtcaggaactcctcactgtttaaatatttatttattgtggcaaatggagctggtttcctagatacgaatgatgtttgcaatcccccat

SEQ ID NO: 12973 - DNA, 699 bp, Macaca Fascicularis
  misc_feature (1)...(699): n = A,T,C or G
gccgcacnnngcaatannngagccagggaaacgtggtgttcaaggagtccgtgaaggtcatgacagtgaattacaacacgcacggggagctgggcgagggcgccaggaaatttgtgtttttcaacatacctcagattcaatacaaaaacccttgggtgcagatcatgatgtttaagaacatgacgccgtcacccttcctgcgattctacttagattctggggagcaggtcctggtggatgtggagaccaagagcaataaggagatcatggagcacatcagaaaaatcttggggaagaatgaggaaaccctcagggaagaggaggagaagaaaaaggagctctctcacccagccaacttcggccctcgaaagtactgcctgcgggagtgcatctgtgaagtggaagggcaggtgccctgccccagcgnnnnnnnnnnnnnnnaggagatgagggggaagtacaaannnnnnnnnnnnnnnnnngcccaggactaaggcccatggtcactgtgggctggggtaatggtgtctgaccagtgggaatattggaatgggattactctggcccagggaagcccctggttctgtccctggagactctggaaatccttttgcattaaaaggacttgacacacctgtgtaaaaggacatgggagaggagggtctgaagctgagcgctaaatgaatatccctgctccac

SEQ ID NO: 12974 - DNA, 743 bp, Macaca Fascicularis
  misc_feature (1)...(743): n = A,T,C or G
tgacaacccagatcnnngnatcatctnnattgaccctgatgacttccccctgctggtcccatactgggagaagacgtttgacatcgacttgtcagccccgcaaataggagtcgtcaatgttactgatgcggatagcgtatggatggaaatggacgatgaggaggacctgccttctgctgaggagctggaggactggctggaggatgtgctggagggcgagatcaacacagaagacgatgacgatgatgacgatgatgatgactagttgctatggcaaccatctttcaaccccactggtcttttcatactctctcctgccttcctttgtccttccctgagttcctccagagagactaggttattctccgccatagagctaactggggtctatacgttgggtgctgagaccctgatccccctcatttgatgaggaaatgagctacttttccctagacatcagcccagttctctcttatctgacttctgtttcttatcccataacttacttgtatctattatgtgtctcttccatcaccctccatactctttcttgtgattctcctctagccatatatatgggccccatctctgttctgttccctccatctacgcacagctttcccccactctctctaatcctgtatctttctgactgtcctgtccctggccagaaggaagggaggatactgtgtttgggactgtatctcagcaatcacttgttaatgtatttgggtcaaatgaga

SEQ ID NO: 12975 - DNA, 744 bp, Macaca Fascicularis
  misc_feature (1)...(744): n = A,T,C or G
tgcannntggaagannnnnnnnnnnnnnnnnnatggtgataccanctaccacgatgaggaggaggatgagtatgaagcagaggatgatgaagaggaagaagaagaaggcagaaaggattcagacactgagtcatcagatttgtttactaatttgaatttaggaaggacctatgctagtggctatgctcactatgaggaacaagagaactaggggagctgcttgtcctctagtggccgtgtgtgagaggagcaggagtgggtgtgtgcgcttgatgaattgtgggtggatgttcaaaaaaaccttagccacttagccttgtnnnnaaggcaagttacntttaacgggccaagcgataggatgtagcgtttttatagaactgataatcaagcttacggcataagaaaaatgaatttcaaatgtaagatgtttattgatcgaaccaattgaagtatcatggattggattgttactgatttcagtaaagtagtatgttttgccaattagatacatatatacaggataaaggaataggatggtaatatatttgtttgaaattaaattactgcttttattaaaaaatactgcttcattcatttgtttgattttgtaaaatgtaatgagtaaaatgaattactgtatttttccttttatgtccacagaatgaaagtcatatnnnnnnnnnnnnnnnnnnnnnnnnnnnnnnnnnnnnnnnnnnnnnnnaaaaaaaaaaaaaaaaaaaaagg

SEQ ID NO: 12976 - DNA, 755 bp, Macaca Fascicularis
  misc_feature (1)...(755): n = A,T,C or G
tggccgagctggaccgagagatgagcaggagcnnnnnnnnnnnnnnnnnnnnnnnnnngctcatggctgcctctgtctatctccacgaccagaacccggacgccgccctgcgtgcgctgcaccagggggacagcctggagtnnnnnnnnnnnnnnnnnnnnnnnnnnnnnnnnnnnnnnnnnnnnnnnnnnnnnnnnnnnnnnnnnaagagaatgcaggacctggacgaggatgccaccctcacccagctcgccaccgcctgggtcagcctggccacgggcggtgagaagctgcaggatgcctactacatcttccaggagatggctgacaagtgctcgcccaccctgctgctgctcaatgggcaggcggcctgccatatggcccagggccgctgggaggccgctgagggcctgctacaggaggcgctagacaaggacagtggctacccggagacactggtcaacctcattgtcctgtcccagcacctgggcaaaccccctgaggtgacaaaccgatacctgtcccagctgaaggacgcccacaggtcccatcccttcatcaaggagtaccaggccaaggagaacgactttgacaggctggtgctacagtacgctcccagcgcctgaggctggcccagagctgtcaggaccacgaagccaggacagaggccaggagccctgcagccctccccgcctggcacacaccccacatcccctctgggggcaggagcccgcccccagcactcccatctgtga

SEQ ID NO: 12977 - DNA, 723 bp, Macaca Fascicularis
  misc_feature (1)...(723): n = A,T,C or G
gtagtagaaaaactttcatacttaactgagacattttgtcaaggctaaaaaaaagtcttgcaaaatggggcagcagactgacaggctgacatagaaaataaactgcccaatcacaacttgtgcctcccatccctgactactggctggcaccagtaagaaggaatctctttgaatccattactccatgccctcctgaggtactactgaagaactctcannnnnnnnnnnnnnnnctggttctggtacatatggatcgtaagtccatttggggaaaactcgtttatagaggttcatcagtactgtgtcttgagattttagcttcccatcaaagctgcatttcatgnnnnnnnnnnnnnnnnnnnnnnnnnnnnnnnnnnnnnnnnnnnnnnnnnnnnnnnnnnnnnnnnnnnnnnnnnnnnnnnnnnnntcctctctgttgaagaacatgtaacgtactactgccatcttagtaaaaattttgaaaggatgaccgctcaaaacgactctcttgatgaccattctgtctggatctactgacataagatggcctgtagcaatgaggctgtgcattccattgcttttctgcttgaaaagcagcannnnnnnnnnnnnnnnnnnnnnnnnnnnnnagactgtcaccaccagggccatgtcagcannnnnnnnnnnnnnnnatttatgtttgtccgctgcagtgtgctgnnnnnataaaggtgaggctcg

SEQ ID NO: 12978 - DNA, 728 bp, Macaca Fascicularis
  misc_feature (1)...(728): n = A,T,C or G
tcnnnnnttnctngggactgatggctggagccctggcactnnngctctggctgaggatgagacggggcgggaaggatggatccccaaagcctgggttcttggccccaatgattccagtggacaggcgtccaggtgtcttggatcagtgctgggtcccctccctcattcctaatgtgcctgggcccacagctaggtccactcccttatcttcagcgtgttgaagagcctccctcagagctgggctcctctactcatcttcagaatgttaagcttagaactgagtcacctccttcattctcagggtgtctgggccaagatccagtcctactgtctttcctgatttgcctcctgcttcttttaggannnnnnnnnnnnnnnaggacccaggagggcttcggcagagtccacttataattctgtcttgctggtgtggatggatggacagtagatccctatggttgggtctcagctggaagttctgtttggagcccatttctgtgagaccctgtatttcaaatttgccagctgaaaggtgcctgtacctctgatttcaccccagagttggagttctgctcgaggaatgtgtgtaatgtgtacatctgtgtccatgtgtcaccatgtgtctgtgaggcagggaacatatattctctgcatgcatgtatgtaggtgcctggggagtgtgtgtgggtccttggctcttggcctttccccttgcaggggtgcgcagg

SEQ ID NO: 12979 - DNA, 1257 bp, Macaca Fascicularis
  misc_feature (1)...(1257): n = A,T,C or G
ggaactgggctcatccacgaatgctnnnagacagttacaaggatttccattttatggtaaaccaatgcgaatacagtatgcaaaaacagattcggatataatatctaaaatgcgtggaacttttgctgacaaagaaaagaagaaagaaaagaaaaaagccaaagctgtggaacagactgcaacaaccacaaacaaaaaacctggccagggaactccaaattcagctaatacccaaggaaatacaacaccaaatcctcaggtccctgattaccctccaaactatattttattccttaataacttaccagaagagactaacgagatgatgttatccatgctgtttaatcagttccctggcttcaaggaagtgcgtctggtaccagggaggcatgacattgcttttgttgaatttgaaaatgatgggcaggctggagctgccagggatgctttacagggatttaagatcacaccgtcccatgctatgaagatcacctatgccaagaaataacatttgggacagtcgtctttaaaggacttggtgttatttatagtgtttgttttgataacatttggctgggtcattttaatagttagagattagggggagtaaaagtgaaatttttgtgaaggacttaaattatccagtgtttctttagccttggtgaactatgaaatacgaagaccttaattttgtacaataaactttgtattctgtgtatataatgctttctttattgactcattgccctatcatcaaatgactgttctggtctagaacacacttaaggtttataaaattgtgtaataggatgcttttctagtgttattttgatggnnnntaatgatacaacatcattgaaccattttaataaaagttaagtagaattagatcacagaagttagtaggtgactgttgtattaatggtaacaatgattgttctgggtattagaagaaaatgagatccaggtgggatctaaatttgatctttgtatccttttaagaaatgaatatattattttgctggtagtagggattccacaggttttcttcattcagtattnnnnnnnnnnnnnnnnnnnngtttactgagaaaannnnnnnnnnnnnnnnncttcaaactgcatttaatgctctttccttcgtgaggcaggactgttttgaagttaatgcccaacctctttagtgaaagacctccagggtaaaaatgttactatctatagtcttttttttttccnnnnttaagacaaataggctga

SEQ ID NO: 12980 - DNA, 782 bp, Macaca Fascicularis
  misc_feature (1)...(782): n = A,T,C or G
gctcactgcnttttanttcgagatatacgtaggaggggtaagaataaagtggctgctcagaattgtagaaaaagaaaactggaaaatatagtagaactagagcaagatttagatcatttgaaagatgaaaaagaaaaattgctcaaagaaaaaggagaaaatgacaaaagccttcacctactgaaaaaacaactcagcaccttatatctggaagttttcagcatgctacgtgatgaagatggaaaaccttattctcctagtgaatactccctgcagcaaacaagagatggcaacgttttccttgttcccaaaagtaagaagccagatgttaagaaaaactagatttaggaggatttgaccttttctgagctagtttttttgtactattatactaaaagctcctactgtgatgtgaaatgctcatactttataagtaattctatgcaaaattatagccaaaactagtatagaaaataatatgaaactttaaaaagcattggagtgtcagtacgttgaatcagtagtttcactttaactataaacaatttcgtaggacaccatttgggctagtttctgtgtaagtgtaaatactacaaaaacttatttatactgttcttatgtcatttgttatattcatagatttatatgatgatatgacatctggctaaaagcaaattattgcaaaactaaccactatgtacttttttataaatactgtatggacaaaaaaatggcattttttatattaaattgtttagctctggcaaaaaacaatttaagag

SEQ ID NO: 12981 - DNA, 745 bp, Macaca Fascicularis
ctatgttcatcgactggttgccagtaaaacagacggaaaaatagtacagtatgaatgtgagggggatacttgccaggaagagaaaatagatgccttacaattagagtattcatatttactaacaagtcagctggaatctcagcgaatctactgggaaaacaagatagttcggatagagaaggacacagcagaggaaattaacaacatgaagaccaagtttaaagaaacaattgagaagtgtgataatctagagcacaaactaaatgatctcctaaaggaaaagcagtctgtggaaagaaggtgcactcagctaaacacgaaagtggccaaactcaccaacgagctcaaagaggagcaggaaatgaacaagtgtttgcgagccaaccaagtcctcttgcagaacaagttaaaagaggaggagagggtgttgaaagagacctgtgaccaaaaagatctgcagatcaccgagatccaggagcagctgcgtgatgtcatgttctacctggagacacagcagaagatcaaccatctgcctgccgagacccggcaggaaatccaggagggacagatcaacatcgccatggcctcagcttcgagccctgcctcttctggcggcagtgggaagttgtcctccaggaagggccgcagcaagaggggcaagtgaccttcagagcaacagacatccccgagactcttctccctggcaccgtgagggtgtgctgggaccttcagctaaatgtgaggg

SEQ ID NO: 12982 - DNA, 689 bp, Macaca Fascicularis
  misc_feature (1)...(689): n = A,T,C or G
gcagagggagctcaagtgtnnnnnnnnnnagntgnntcgntttcagannncccacnnnnnnnnnnnnnnnnnnnnnnnnatggttgcgaaggtgctgatcaagctgcaggcnnnnnnnnnnnnnnnccagataagccaggaggaacacagccagctgcaagagcannnnnnnnnnnnnnnnnnnnnnnnagaaagacctgaaggaagagctggatgcnnnnnnnnnnnnnnnnnnnnnnnnnnnnnnnnnnnnnnnaaaagcccgtggccccccagaacgacaagaatgagtcatcccctacccccgatccccccatcttctccttgcctcttgtaggcctggtggtcatctcggctttgctctggtgctggtgggctgagacgtcgtcctaatgcagaacatgtttgggttgtggaagcctatgnnnnnnnnnnnnnnnnnnnnnnnnnnnnnnnnnnnnnnnnnnnnnnnnnnnnnnnnnnnnnnnnnnnnnnnnnnnnnnnnnnnnnnnnnnnnnnnnnnnnncgcgagggcagatccccagtggccaccaccctcagctttgggcaggacacactgtgccagaaccctccccatatgttccatgtgtccccgtctcctcagcctcagtcacccaggctggaaaggcttgtggggagcnnnnnnnnnnnnnnncctgccttgtgta

SEQ ID NO: 12983 - DNA, 712 bp, Macaca Fascicularis
  misc_feature (1)...(712): n = A,T,C or G
ttccaaaccagagcccacagccggagagtccaggaagacttacgcactcagagcagaannnnnnnnnnnnnnnnnnnngnctcgcagccgcgccagtcacccttagacactggctgtgaccgggcgtgcaggcagcggcagtgcacagtggccagcactaaccctccctgagaagataacnnnnnnnnnnnnnnnnnnnnnnaagacgcgtcgtagcgagtaggcacaggcgtgcacctgctcccgaattactcaccgagacacacgggctgagcggacggccccgtggagacagagaagagctcttctgaccacatccttcctaacacctgctgacatctccttttgctcctccctccctaacctactgacccaccttttgattttagcgcacccgtgataggccttccaaagagcccnnnnnnnnnnnnnnnntccccgaggacgaagatgaggagtagtcagcgtgatgccaaaacgcgtcttcttaatcccactctaattctgaatgtttcgtgtgggcttaatatcatgtctattaatatatagcctcgaagatgagagggttannnnnnnnnnnnnnnnnnnnnnnnnnnnnnnnnnnnnnnnnnnnaagcactctgcgtcgctgagctgaggtcggctctgccatccatacgtggccgcacccaaacagcacgtgctgtgacgaggctgaacggaaagtgtacac

SEQ ID NO: 12984 - DNA, 1130 bp, Macaca Fascicularis
  misc_feature (1)...(1130): n = A,T,C or G
tcagttttcccattctggctgnngaaggagttcggcccccgatggatgtactggtagagcaggggctactggataagcccgtcttctccttttacctcaacagggactctgaagcggctgatggaggagagctggtcctggggggctcagacccggcacactacatcccacccctcaccttcgtgccagtcacagtccccgcctactggcagatccacatggagcgtgtgaaggtgggcccagggctgactctctgtgcccggggctgtgctgccattctggacacaggcacatccctcatcacaggacccactgaggagatccgggccctgcatgaagccatcgggggatatccccttgccggctggggagtacaccatccggtgctcagaaatcccaaagctccccgcagtctcactcctcattgggggggtctggtttaacctcacggcccaggattacgtcattcagactactcgaaatggcgtccgcctctgcttgtccggtttccaggccttggatgtccctccgcctgcagggcccttctggatcctcggtgacgtcttcttggggacgtatgtggccgtcttcgaccgcggggacacgaagagcggcgcccgggtgggcctagcgcgcgctcgcactcgccgagcggccctgggactgggcgagaccgcgcaggcgcagttccccgggtgacgcccacgtgaagcgcatgcgcagtgggtggtcgccgaggttccccctgcccagtaaaaatccacatttccatnnnnnnnnnnnnnnnaggtggcttcttttcatagcgtatttgttaaagagaaagctttgtgaccgggcgtggtgtctcgcgccggtagnnnnnnnnnnnnnnnnnnnnnnnnnnnnnnnnnnnnnnnnnnnnnnnnnnnnnnnnnnnnnnnnnnnnnnnnnnnnnnnnnnnnnnnnnnnnnnnnnnnnnnnnnnnnnnnnnnnnnnnnnnnnnnnnnnnnnnnnnnnnnnnnnnnnnnnnnnnnnnnnnnnnnnnnnnnnnnnnnnnnnnnnnnnnncaaggtgcagagaccgcaccattgnnnnnnnnnnnnnnnncaacgaaacaacgaaactccgtctcaaaaataaataaataa

SEQ ID NO: 12985 - DNA, 715 bp, Macaca Fascicularis
  misc_feature (1)...(715): n = A,T,C or G
gtgctacaacgccctggagggctccccggcccctacataaagtggtttctggagaagttaaagcctgannnnnnnnnncagctcttgnnnnnnnnnnnnnnnnnnnnagcctacgcgctctgcacgtttgcactcagcaccggggacccaagccagcccgtgcgcctgttcaggggccggacctcnnnnnnnnnngtggcacccagaggctgccgggactttggctgggacccctgctttcagcctgatggatatgagcagacgtacgcagagatgcctaaggcggagaagaacgctgtctnnnnnnnnnnnnnnnnnnnnnnnnnnnnnnnnnnnnnnnnnnnnnnnnnnacttctgcggctgggggaggcccctcaggccggggatctggggagggctagcctgaaacctcccgcatcaggcaggcacccctggaagtacttccttcagggtttccccttcctgggggtgtcgagtagccnnnnnnnnnnnnnnnnnnnnnnnnnnnnnnnnnnnnnnnnnnnntctgggcaagtggatgccattctcttgcccttaggattcactgctctctcctacaacctccaggcctgggatcctgcaaggaccttgggtggtaaagctgcacttggtgggagtgagggcttggggaggaaccatgcaaatcacctcccatgttttttaaatgcaataaataacacttcnngatgagac

SEQ ID NO: 12986 - DNA, 719 bp, Macaca Fascicularis
  misc_feature (1)...(719): n = A,T,C or G
tcagtagtggtctaaataagtgtgttatacttgctttggtgattnnnnnnnnnnnnnnntttggacatttctatggcacaattcagattcagaagcgtcnnnnnnnnnnnngaaagatacatgaagatgaattgaatgatatgaaggattatctttcccagtgtcaacaggaacaagaatctttcattgattataagtcattgaaagaaaatcttgcaaggtgttggacacttactgaagcnnnnnnnnnnnnnnntgaaactcagaaaacgnnnnnnnnnnnnnnnnnnnnnnatttaagaatatctctggagaaggaagaaaaggccttatcctcattacaggaagagttaaacaaactaagagaacagattagaatattggaagataaagggacaagtactgaattagttagagaaaatcagaaacttaagcagcatttggaagaggaaaagcagaaaaaacacaactttcatactcaaagagagactnnnnnnnnnnnnnnnaagatgctaaagatggaactggagagagaacgactagtaactacggctttaaggggggaactccagcagttaagtggtagtcagttacatggcaagtcagattctcccaatgtatacactgaaaaaaagaaaatagcagtcttacgggaaagactctctgagctggaacagaagttanaccttcgaacagcagcgttctgatnnnnnnnnaga

SEQ ID NO: 12987 - DNA, 693 bp, Macaca Fascicularis
  misc_feature (1)...(693): n = A,T,C or G
cctaaatattgannncccatttaaggactttccactctattgcaactgacaccactatatttgcctagcaacttgcagctgcttcctnnnnnnnnnctcatgtatctttaagaatgtttcaacaatgcgttggcaagagatgtgggatgacaacaggaacatacaagatactgtgaatctagatgttctgacctaaannnnnnnnnnnnnnnnnnncagcttgtggtccaatccatctgtctctggcatgtgccctcatgtagnnnnnnnnnnnnnnnncccctttgtgagatgctgtgggtgctaaaacctcagagctgtcctcttctctagagtggaggttttcannnnnnnnnnnnnnnnnnnnnnnnnnnnnngctggaaatacaaattctcagaccccaccccagacctaccnnnnnnnnnnnnnnnnnggttggcacagcattctgatttaccaaaccccccaagtgattttgatgtattctaattttgagaccatctctagaaaagaattgctacctcttgtatggaggtacaaannnnnnnnnnnnnnnnncgaggaacttcctttcccagagctcctcatggaatcaggctgaagtcagtcttcttctgagagcacattcttacttaatttttttttttttttcnntgttctannnctgcttccctcactccccttctcctaag

SEQ ID NO: 12988 - DNA, 717 bp, Macaca Fascicularis
  misc_feature (1)...(717): n = A,T,C or G
cggagtgaggttagttctgtgtgtctgtggggtggagtcagcctgctcctgctacctgtgagcatcctgcccagcagacatcctcacccggctttgtccctccccacttcctccctctgcggggaggacccaggaccacagctgctggccagggtaggcttggagctgtgctccggaggggccacctgagggagcgagaagaaggaagatcttgagagctgccgaggcaccctggagagctcaggatggtccaggcgagaagaggacactcgctcgccaggcctgggcctcctgggaaggagggagccgctcagagcgccgcatgacaactgaaggcaacctggaaggttcagaggccactcttcccccgtgtgcctgtcacgctctggtgcagtccaaggaacgccttcccctcagttgtttccaaaagcagagtctcccgctgcaatctgggtggtgattgccagccttggaggattgtggccaacgtggacctgcctacggagggtgggctctgacccacgtggggcctccttgtccaggtcnnnnnnnnnnnnnnnnnnnnnnnnnggactgtcagctgagcctgagctcccctggagccagcagggctgtgatgggtgagtcccggagccccacccagacctgactgcttctgagagcaaagggaaggactgacgagagatgtatatttaatttttttaactgctgcaaaca

SEQ ID NO: 12989 - DNA, 677 bp, Macaca Fascicularis
  misc_feature (1)...(677): n = A,T,C or G
aaaaggaaacatcggaatgaccagttaacatctacaacttccagccctggggttattgtcccagaatctagtgaaaataaaaatcttgaaggagtcacccaggagtcatttgatcttatgattaaagaaaatccatcctctcaatattggaaagaagtggcagaaaaacggagnnnnnnnnnnnnnnnagcacttaaggaaaatgagaaacttcataaagaaatcgaacaaaaggacaacgnnnnnnnnnnnctgaaaaaggagaacaaagaattggcagaagtagcagaacatgtacagtatatggcagagctaatagagagactgaatggtgaacnnnnnnnnnnnnnnnnnnnnnnnnnnnnnnnnnnnnnnnnnnnnnnnnnnnnnnnnnnnnnnnnnnnnnnnnnnnnnnnnnnnnnnnnnnnnnnnnnnnnnnnnnnnnnnntatcttcctctacggatgcaaagccatgtctatgaaatgcattaatatttgactgttgagaattttactgccgaagtttacctccactagttctttgtagcagagtacgtaactacataatgccaattctggaatcaagcttccttgtttgaatcctgggaccctattgtattaaagtacaaatactatgtatttttaaactatgatggtttatgtaaataggattttc

SEQ ID NO: 12990 - DNA, 680 bp, Macaca Fascicularis
  misc_feature (1)...(680): n = A,T,C or G
gtgcctgtgtnnnaatttggagannnnnnnnnnnnnnnnnnnnnnnnnnnnnnnnnncagggtccagctagcgctgctcggctccagaccctgactttgcagggtcagatgctgttctgacctcaggaatgcatccacccgagaggctcttgctctcaggccctcagccactcccttctccccgccttggccccgcgtagccccagctgtctgcaggcaccaggctgggatgagctgtgtgcttgtgggtgcatgtgtgtgtatgtgtctccaggtggccactggtctccccctgtgttcaggaggccacctacacagccccttccggccacacctgccccagctctggggcctgctgagtggctgccctgggtacccagttccaggcggcacagatgtggggtatccccagaaagactccatcccaggaccacgttcccctgggtgcccttcgagagggtgtcagggagcggactgcaccccaagctcctgactgcaagtcccctgatcgtggggcctgtttcccatgggattcaagagggacagccccagcttcgtgtgtgtttaagcttaggaagcgcctttagggaaagggctgcttgggagtcagctgtcttgtctggttttcttgagaccgcacgatgtgtgttcagcagggctgaannnnnnnnttctttaat

SEQ ID NO: 12991 - DNA, 754 bp, Macaca Fascicularis
  misc_feature (1)...(754): n = A,T,C or G
cccctatacacagtgtagccgaaatgaaatcgctgagnnnnngatccactctaagacaggaaggaaagtgaaggtggagtgggcaggtaagagagggatatacaaggtcacgtttcagacacccacccggcataccctgctgtactgcnnnnnnnnnnnnnntctttgtagatactnnnnnnnnnnnnnnnggattccctcacaatgtattttatttgctagacttcggttgggagggaaaaggacattaatttgaagtttnnnnnnnnnnnnnnnnnnnnnnnnnnnnnnnnnnnnnaggtcttgattacccataaaagtattagaggcagcnnnnnnnnnnnnnnnngaggcctcnnnnnnnnnnnnnnnnnnnnnnnnncaaacttgaacctggaagggagggttcccaggctgcaggtgctctttcctcttggtcccaagcatctgtgcagggtcatgggagccgcagttagagacttgtgtgggccagacgagcttcatgccaatgcgctagtcccttggtttaatttgtgnnnnnnnnnnnnnnnnnnnnnnnnnnnnnnnnnnnnnttattcaacttgtgatttttttttctttctcactttaacttaaagagaattttatatgtcatggaaatttaatcattaaacgttttcagtatcaattggtgtttttgttaaacgaatgaataatctgttcatgcatgctgtactttgatattatanccntatgtcacatatgttaaaaatc

SEQ ID NO: 12992 - DNA, 728 bp, Macaca Fascicularis
  misc_feature (1)...(728): n = A,T,C or G
accatccgtgaggagctnngaactnncaatgnnatgacgatcacaatggtgggtgacctgaagcacggacgcacagtacattccctggcctgcctgctcacccagtatcgtgtcagcctgcgctacgtggcacctcccagcctgcgcatgccacccactgtgcgggcctttgtggcctcccgtggcaccaagcaggaggaattcgagagcattgaggaggcactgcctgacactgatgtgctttacatgactcgaatccagaaggaacgatttggctctacccaggagtatgaagcttgctttggccagttcatcctcactccccacatcatgacccgggccaagaagaagatggtggtgatgcacccgatgccccgtgtcaacgagataagcgtggaagtggactcggacccccgcgnnnnnnnnnnnnnnnnnnnnnnnnnnnnnnnnnnnnnnnnnnnngctctgttagccaccgtgctgggccgtttctagggcctggcttcctcagcctcttctctttaggcccagctgctgggcaaggaattccagtgccccctacgggggcagcnnnnnnnnnnnnnnnnnnnnnnnnnnnnnnnncacatgtgctgaccacacttcaggctctggattggagctctctggcatgggggtggagcctcagatgctggggcccagtctgccctatcttcattcctgcaccttaaacctgtacagtcattttt

SEQ ID NO: 12993 - DNA, 700 bp, Macaca Fascicularis
  misc_feature (1)...(700): n = A,T,C or G
cacannngtaggtggaagttcctagtgcggtgttcatgtgatggctgtgcgtatcgtagattcggcctggtgaaatccttctcaaagcctctttttgtatttttatgactaaatggaggaagtcttcagaagacctcgctttataacaaatttgtgcaaaacactgctagagtcattttgaagctcaagcattttcactttgtttcttacatgtgtatttttgtttactggtgaaaatggccatctttaagcatatttattttctgccacttctatttatttaaaggcaagcaatattttcttgatcataatattttgtaatgaaatacttcctctttcccagggctttgtatgcacttgtataattacattgagggaaatgtagagtttgaatttcagtctgtaaatacttttttggaaaatagaaatttttattgctttaaagttttggatatgggtggttttcttttcgggtcttggtagaaagtcatttgagaacgttaaggttctctttttaactgctggtaaaatgtggatttttgtatattagataaaatgagtaaatgaaattccccagaaattaatagtaagtggggtctttgtgggttgggaagtagttttaatgtagaaagacatttacaaataagtctgtttaatttcaaaggagtttgtgaaaaaaaatccatggtgaaaataaaac

SEQ ID NO: 12994 - DNA, 715 bp, Macaca Fascicularis
  misc_feature (1)...(715): n = A,T,C or G
gcaggggtgcccttgcccanncccannnntgagtgcccaccagggccatgctctgtgactggggctgatccctgccctctctgggcctgtagtaccnnnnnnnnnnnnnnnnnnnnnnnnnccggccagcaggcatcttcttaacaactgtgccctctgtatttagcatgttccttgtcagctgctgggccggccctgccttgcactagcagagcctctcctggcagcttctcaggcttccctaatggagacaccaggctactaggacactggctggggccaccccctcctgcctaatacctcaccttacagctggggaaactgaggactggaatgcccagagtcaccgaggcaaagttggggctggtcccagcctgaggctccagctgatgccctcagctccctgacaggaggtgccccatctagcggggtgtggtggtcattcttgtcagctcagggccctgtgcccacctgcctgtgcccctgcatttgtgcctgcacatccagaactgcctttttgccgctacctccaggaagcccaccttgaaccagagccaggagctacagcgctgcccctgataggacacgcctgcccccactgctgctcttgacttacagccannnnnnnnnnnnnnnaatctttctgtttattaaaagaaagcccaacattaaagggttttcattgcaaaaaannnaaaaaaaaaaaaaaaaaagg

SEQ ID NO: 12995 - DNA, 775 bp, Macaca Fascicularis
  misc_feature (1)...(775): n = A,T,C or G
ggaagaaacagaattcattnnnaaccaaggtccaagaaactggagacattgtcatttcaaatgcnnnnnnnnnnctggcaacaacatctgatacttcagctaagacaccctctgagggtgggaagcttcagagtacgctcgtatttgaggaaataggacgccgcctaaaggatgttgggcctgaggtggtgaagaaagtaaatnnnnnnnnnnnnnnnnntataaccaaaggcggaaatattggggctaagtggactattgacctgaagagtggttctggaaaagtgtaccaaggccctnnnnnnnnnnnnnnnnnnacaacaatcatactttcagatgaagatttcatggaggtggtcctaggcaagcttgaccctcagaaggcattctttagtggcagactgaaggccagagggaacatcatgctgagccagaaacttcagatgattcttaaagactatgccaagctctnnnnnnnnnnnnnnnntattaataaaaatgggataattaaatactctcttcacgcaaatatgcttgattgttctgcaaaagtgattagagctannnnnnnnnnnnnnnnnnntaacattttcagatatcagataactgcaggttttcattttctactaatttttcatgtatcattatttttacaaggaactatatataagctagcacgtaattatcctcctgttcttagatctgtatcttcacaataaaaaaatttcacctaagtccaatttccttagaatttgcgatagcattgataagtgaa

SEQ ID NO: 12996 - DNA, 762 bp, Macaca Fascicularis
  misc_feature (1)...(762): n = A,T,C or G
agnnnnnnnnnnngttatttcgctccgaggcactattctnnntgctctccaacttcacaggnnngaagcttcannncttggccccttcggaagaagagatgaatgacaaaaaagaggnnnnnnnnnnnnnnagcactgaagaagggactagccatagtcctcctgagccagagaataatcagacagccatcagcaacaacagccaacagaacaatgaccagacagacccagagccagaggaaaatgaaacaaagaaagaatcaagtgtccccacatgccaaggggaactgaggcgttggaagaccggtcactacactttaattcatgaccatagcaaggctgaatttgccctagacttaattctnnnnnnnnnnnnnnnnnnnnnnnnnnnnnnnnnnnnnnnnnnnnnnnnnnnnnnnnnnnnnnnnnnnnnnnnnnnnnnnnnnnnnnnnaatccagaaaacaattctttggcattggtctacagagatagagagactctgaaatttgtcaagcatattaaccacnnnnnnnnnnaacaaaagaaaaccttcccaaacagaacaggtttctgggacttttcattcatatattnnnnnnnnnnnnnnnnnncaaagctgaacannnnnnnnnnnnnnnnnnnnnnntgggaagtctggaagagctaagcatggagtcaaggagagctacatggtagcttgcctgacagtgttcttaaaactggttgtcttttactaggactcataatgactgtcctcaacc

SEQ ID NO: 12997 - DNA, 679 bp, Macaca Fascicularis
  misc_feature (1)...(679): n = A,T,C or G
gaggccaccnnnnnnnnnnnnnnnnnnngacggaagccgcgggaactccggagttgccaagccatagctgggaagcctggtggttttcctctcccagtgataaaatgggttcagggtcttatccttaggtactagctctagaaaagtcccagaagcagcagaaggtgaagcaggaagcacttggttttctcctccctgatacagtcacctgatggaagttttaaaatttcctcaacaggccttaagtttactactgcattagggtaccagattttaacttaccatgactttgctcccctctttcctgagaaaatatttccactggattttttccaccagtccccttacaaccctcattgttttaggaatctctctctcaggttttctatgacctaaaccagcaggaggtcgtcctgggctgtgagcaccatcacttgcttttttttttttttttttcctgatttcacaagtgtggtgttttcccaaggctcccttcccaagctcagtgcaaacctctcactcccaagtttctttgaggccacttgcccccannnnnnnnnnnnnnnnnnnnnnnnnnnnnnnnnctatttggccttttacaagtgtaatgccaatttcattgatttttgtttctttttgcctggtttgtatctccagaatgcatttattcttgaaatat

SEQ ID NO: 12998 - DNA, 670 bp, Macaca Fascicularis
gcagaatacagagatatggaatcagattattcaggacagggagttgaccaactacaaagagtgattgacaccatcaaaaccaaccctgacgacagaagaatcatcatgtgtgcttggaatccaagagatcttcctctgatggcactgcctccatgccatgctctctgccagttctatgtggtgaacagtgagctgtcctgccagctgtaccagagatcgggagacatgggcctaggtgtgcctttcaacatcgccagctacgccttgctcacgtacatgattgcgcacatcacgggcctgaagccaggtgactttgtacacactttgggagatgcacatatttacctgaatcacatcgagccactgaaaattcagcttcagcgagaacccagacctttcccaaagctcaaaattctccgaaaagttgagaaaattgatgacttcaaagctgaagactttgagattgaagggtacaatccgcatccaactattaaaatggaaatggctgtttaggatgctttcaaaggagcttgaaggatattgtcagtctttaggggttgggctggatgcagaggtaaaagttctttttgctctaaaagaaaaaggaactaggtcaaaaatctgtccgtggcctatcagttattaatttttaaggatgttgccactggca

SEQ ID NO: 12999 - DNA, 767 bp, Macaca Fascicularis
  misc_feature (1)...(767): n = A,T,C or G
gtggcattcatgagctactttttacaggcaagggttgatgcctgcctagagctcttgattagaactggacggctgccagaagctgccttcctggcccgaacttacttacccagtcnnnnnnnnngggtagtgaaactctggagagagaatctctcaaaagtcaatcagaaagcagcagaatcccttgctgatccaacagagtatgaaaacctattccctggattaaaagaagcctttgttgtggaagaatgggtgaaggaaacacatgctgatctgtggccagccaaacagtacccacttgtcacgccaaatgaagagagaaatgtcatggaagaggcaaaaggctttcagccctcaagatctacagctcaacaggaactggatgggaaacttgtttttcttattccagttattgtggcttcccacacagccaacaaagaagaaaagagtttactcgaactagaagtagatttggataatttggaattagaagatattgacacaacagatatcannnnnnnnnnnnnnnntttggatgactgactgtaatgctttccatttacctgactaaacagatcattattatatataggtattgattgctaccctgaccacagtgctttggactatgagacatttcttacatttttatatgtaaatactgtggaccactgggagcataatgcccacatnnnnnnnnnnnnagtttatgtgcagcatttaaatcactgtgttttccttgttaactaaaacagacatgggctttg

SEQ ID NO: 13000 - DNA, 739 bp, Macaca Fascicularis
  misc_feature (1)...(739): n = A,T,C or G
tggcattcaggccnntatatnnnntgtaggaaaaatcgttgagaacactttttttatataggtaattttaagaccatcattacgctgtgcgtaaagaatgtacagagaaatttgtaggtatttttggaagaacattaatttgttaatgatatgtagctatttaatttttccctttcctattgtaatcattcattttttgttgttgtttgggaaaaaaaaaaagttgatctttttttttgtcgtagatttgtctgtaaaagtgcaggaacacagttattctatgagaacactgcatctgcattcatagccactagtttgttattgctacaggctactgagnnnnnnnnnnnnnnnnnnnnccactgctgaccggctcggtggaggacactcctgggacaggtctctctgtcagtgaacaagggcgtcactctgggagggtcggcggtgctggtggccggtcccctggtgcactgacctatctgggataggcagtaccctggagggggccttgggcagagggggcagcagaaaaccaaacatttcactgagaaagagcccccttccccgctctaagaagggctnnnnnnnnnnnnnnnnnnnnncacgccagcctgcagtgcgctctgagcgtctactccagtgtgtaaatctgtaatataccattctctgtggcctgtttttcctgnnnnnnnaaaaaaaggttggcaggccatcttttttttgtacttaaaagtcagcc

SEQ ID NO: 13001 - DNA, 788 bp, Macaca Fascicularis
  misc_feature (1)...(788): n = A,T,C or G
gacagatgacatcatgattcancnnncacccgnngtggacaganctgctggtatcagaagccgggtgtgggtttggatgccatcaatgatgctatcctcctggaagcatgtatctaccgcctnntgaagcttnatggccgggagcagccnnnnnnnnnnnnnnnnnnnnnnnnnnnctgcagaagttcnnntcagactgagattgggcagaccctggacctcatcacagccccccagggcaatgtggatcttggcagattcactgaaaagaggtataaatctattgtcaagtacaagacagctttctactccttctaccttcctatagctgcagccatgtacatggcaggaattgatggtgagaaggagcatgccaatgccaagaannnnnnnnnnnnnnnnngagagttctnnnnnnnnnnnnnnnnnnnnnnnnnnntctttggggaccccagtgtgaccggcaaagttnnnnnnnnnnnnnnnnnnnnnnnnnnnnnnnnnnnnnnnnnnnnnnnnnnnnnnnnnnnnnnnnnnnnnnnnnnnnnnnnnntgaaggaaaattacgggcagaaggaggctgagaaagtggcccgggtgaaggcactatatgaggagctggatctgcaggctgtgttcttnnnnnnnnnnnnnnnnnnnnnnngccacattatggctctcattgaacagtacgcagcgcccctgcccccagccatctttctggggcttgcgcgcaaaatctacaagcggaaaaagtgannnnnnnnntgcnngggtggggagaggag

SEQ ID NO: 13002 - DNA, 669 bp, Macaca Fascicularis
  misc_feature (1)...(669): n = A,T,C or G
agccctccccannnnnntgnnnnnncagagccccactaaccagacctcacccatcagccctacacatccccattccaaagtcccccaaatcccaagggaagatggccccagtcccaagctggccctgtggctgccctcagcagctcccacagcagccccaacagccctgggggaggctggtcttgccgagcacatccagagggatgaccggtggcttctggtggcactcctggtgccaacgtgtgtctttttggtggtcctgcttgcactgggcattgtgtactgcacccgctgtggcccccatgcacccaacaagcgcatcactgactgctatcgctggnnnnnnnnnnnnnnnagcaagagtccaacggaacccatgccccccaggggcagcctcacaggggtgcagacctgcagaaccagcgtgtgatggggtgcagatccccctcacggagtagggggaaagggtgtgcactggacacatggctggggctgcaccagggacccacaggggctgcccagctggacagatggcttcctgctcaccaggcccagccagggtcctctctcaaccactagacttggctctcaggaactctgcttnnnnnnnnnnnnnnnnnnnnnnnnnnnnnnccaaagcccttaagacctcagggggcgggtgctggg

SEQ ID NO: 13003 - DNA, 790 bp, Macaca Fascicularis
  misc_feature (1)...(790): n = A,T,C or G
tccccctccnnnnnnnnnnnnnnnnncaagtnnnnnnnnnnaaaagctggagaagtgagagcnnnnnnnnnattctctggagatcagtnnnnnnnnnnnnnnnnnnnngagatgtgaagagtgagttggttaaggaaatgcttaccatcccccaccccaaccaagttcttccagactaaagaattaaggtaacatcaatacctaggcctgagaagtgaccccatccttgatgggcaactccctgccttgtcctgcatgaacagagttgatgaaaggggggtgtgggnnnnnnnnnnnnnnncttgcctactttagtcacccaacagtggctactgcctacagtagccactggagctggccgctccagcccagccatggtgcatgactcttccataagagatacctactttcatgcaagaaggccctgttgccacagattatacaaccattaccccagccactttgacaatttcccccagttccagcaatgcctagagacatgctccctgccctttccacagtgctgctccccannnnnnnnnnnnnnnnnnnnnaccccagagaggnnnnnnnnnnnnnnnnnnnnnnnnnnnnngcccctgggccctggcttaagccaacactcctgacctctctgttcactctgagggctgtcttgaagcctgctacccactctgaggctcctgggaggtaccgtgcttcccactctgggtcctgcccctgcctagcagtctcccagctcccaacagcctggggaagctctgcacagagtgacctgagaccaggtaca

SEQ ID NO: 13004 - DNA, 830 bp, Macaca Fascicularis
  misc_feature (1)...(830): n = A,T,C or G
agtcagatangtctgcttttgtacctgctgggccccagttgggcagttagtcacatttttctctctgtccctctcatttgaaaatgtaaaataaaaccaaaaatagataacttcttcttcagccattccagcatagagaacaaaaccttatggaaacaggaatgtcaattgtgtaatgattgttctaattaggtaaatagaagtccttacatttgtgttacaagaattccccccacaacatcctttatgacttaagttcaatgacagtgtgtgtttggtggtaaaggattttctccatggcctgaattaagaccattagaaagcaccaggccgnnnnnnnnnnnnnnnnnnnnnnnnnnntctcatggatcttgtgtccagggacatggggtgacgtgcctcgtatgtattagagggtggaacggatgtgcttggcgctgcgtgggatctggtgcctctcttctggattcgcatccccacccagggcctgcttttactaaccgttctgccctagcttggttcaaggcggtcatctaactgacttgatcaagtggaattgggatgtatttgatacacttttgcctaacagcatggaagagggttttcctttccctgcaagctacatcctgctactttgaacttccaagtatgtctagtcaccttttaaaatgtaaaagttttcagaaaaatgaggattgttttccttgtatcgctttttatcttgactacctgaattgcaagggatttttatatattcatatgttccaaagtcagcaactctcctgtaggttcattattgaatgtgctgtaaatgaagtatttgcaataaa

SEQ ID NO: 13005 - DNA, 705 bp, Macaca Fascicularis
  misc_feature (1)...(705): n = A,T,C or G
tgagcccctgtnnnnntcacacnnnngcnnnnncctcnggagacaagttccatgggactggtcngaagcagaggcaggagaaacagttctgatggcatggcacagaggaaggggccccctgccannnnnnnnnnnnnnnnnnnnnccctcagggggcagagagaggaagcccacccaggggaggaaagagatctcgctgatgctctttcgttccttcccagatcgaagaggttcctggtgagctcatgcaggaagacctggctacggatgatgtcatgattctggacacatgggaccaggtctttgtatgggttggaaaggattctcaagaagaagaaaagacagaagccttgaattctgctaagcggtacatcgagacggacccagccaatcgggatcggcggacacccatcaccgtggtgaagcaaggctttgagcctccctctttcgtgggctggttccttggctgggatgatgattactggtctgtggatcccttggacaggaccatggctgagccggctgcctgaggaggggcaggacccacccatgtcaccggtcagtgccttttggaactgtccttccctcaaagaggccttacagcgagcagagcaactctgctatgagagtgtgcctacccctcccccaaccaactgataagctgctccctcccccagcaagctcagcgccaggtgctcctgcctt

SEQ ID NO: 13006 - DNA, 712 bp, Macaca Fascicularis
  misc_feature (1)...(712): n = A,T,C or G
ccctcccaaccaacgtccaggtggaggtcatcaccattgagagcaccaagagtggtctgaagtcagagaagtcggtggaacagctcactgaatacagcacagacaaggaccagcctccgaaggacgtctttgatgaattatttaagctggctccggagaaagtgaatgcagtgactttgtcaaccagaagctggaccgcctgggcctgtctgtgcagaatctggacacccagtntgcagacggggttcatcttactcctggtgattggacaacnnnnnnnnnnnnnnnnnnacttaaaggaattgtacctcactcccaactctcctgcggaaatgcttcacaacgtcaccctggcgctggagctgctgaaggatgagggcctgctcagctgtcccgtcagccctgannnnnnnnnnnnnnnnnnnnnnaagagcacactgcgggtgctctatggcctgttctgcaagcacacccagaaagcacacagggacagtacgccctgtggagccccgaattgaccctcactgcccccaaagccnnnnnnnnnnnnnnnnnnnnnnnnnnnnnnnnnnnnnnnnnnnnnnnnnnnnnnnnnnnnnnnntgtttnnnnnnnnnnngtgacccgcttccctcccaccctgtctcctgtctccatcatcagatgatctatgaacccccttgtgtggatcattttgagctgcctggcctgct

SEQ ID NO: 13007 - DNA, 745 bp, Macaca Fascicularis
  misc_feature (1)...(745): n = A,T,C or G
ttggaaaagtgtctcgtgatgctgtcaaaatcccaaagtggtcacctttgtcagaaatgcaccctgtagattattactcttcttatacaaaaaactgcactggaagatttacagaaaaagaaattaagaatattagagcattttattatgctatgtgtgctgagacagatgccatgctcggtgaaattattttggcccttcatcaattannnnnnnnnnnnnnnactattgtcatatacttctcagatcatggagagctggccatggaacatcgacagttttataaaatgagcatgtatgaggccagtgcacatgtnnnnnnnnnnnnnnnngggccaggaattaaagtcgaccttcaggtatcaaatgtggtttctcttgtggatatttaccctacnnnnnnnnnnnnnnnnnnnnnnnnnnnnnnnnagaacctgagtggatattctttgttgccattatcatcagaaacatttaagaatgaacataaagtcaaaaacctgcatccgccctggattctaagtgaattccatggatgtaatgtgaatgcctccacctacatgcttcgaactaaccactggaagtatatagcctactcggatggtgcttcagtattgcctcaactctttgatctttcctcagatccagatgaattaacaaatgttgctgtaaaatttccagaaannnnnnnnnnnnnnnnnnnnnngcttcgttccattataaactaccctaaagtttctgcttc

SEQ ID NO: 13008 - DNA, 726 bp, Macaca Fascicularis
  misc_feature (1)...(726): n = A,T,C or G
cggggtttnnnnnnnnnnnnnnggctagtttcgaactgctgacttcatgtgaggcacgcatcaagtannnnnnnnnnnnnnnnnnnnnnnnnnnnnnaagatccagaaccagccctaccccgtctagaggaaaggacgaacattaggcaagcacttggaatcgtgcgaagtgcacgccatcagatcaccttggtgagtgaaccgccaagcccgaaacannnnnnnnnnnnnnnnnnnnnnnnnnnnnnnnnnnnnnnnnnnnnnnnnnnnnnnnnnnnnnnnnnnnnnnnnnnnnnnnnnnnnnnnnnnnnnnnnnnnnnnnnnnnnnnnnnnnnnnnnnnnnnnnnnnnnnnnnnnnnncaggaagaggcnnnnnnnnnnnncatgtgtatggcggnnnnncgggcgggtacatggcgggctctgtgggactggcgttgtgcgggcnnnnnctggtggtgcggggcggcagccgattcctggccacctccacagcaagcaggtgagggggccttggtcttggaacagggcgcccaggctgcgggcgcgcgtcgggtcctggcggccccgcttctccggcaccgcttggtcgcacctgctctggagtgacctcggggaaccccgctccatcctgcgagccctccgccgcagtctccgcctggccgcgtgtctgcgcctggagggtgcgttttcggcgctccctccccggccgctggcgcgctcctt

SEQ ID NO: 13009 - DNA, 746 bp, Macaca Fascicularis
  misc_feature (1)...(746): n = A,T,C or G
caggnnnnnnnnnnnnnnnnnaagaaggagatgccgcccaccaatcccatccgcctgggcctggcnnngaacttttcngtcttccactacgagatcgccaacagccccgaggagnnnnnnnnnnnnnnnnngaccactttcgatgaggccatggctgatctgcacaccctcagcgaggactcctacaaagacagcaccctcnnnnnnnnnnnnnnnnnnnnnnnnnnnnnnnnnnnnnnnnccgacaacgcgggggaagaggggggcgaggctccccaggagccccagagctgagtgttgcccaccaccgccccaccctaccctgcccccttcagtcccccaccctgccgagaggactaatatggggtgggaggccccacccttctcccccaggcgctgttcttactccaaacggctccgtggagagggactggcagagctgaggccacctggggctggnnnnnnnnnnnnnnnngcagctgttgagcgcacctaaccactggtcatgaccccagcactgctctccgcaccgcttcctcccgaccccaggaccaggctacttctcccctccctcttgcctcactcctgcccctgctgcctctggtcgtaggaattgaggaatgtcccgccttgtggctgagaactggacagtggcaggggctggagatgggtgtgtgtgtgtgcgcgcgcgcgcgccagtgcaagaccgacanngaaggaaagcatgtctgctgggtgtgaccatg

SEQ ID NO: 13010 - DNA, 747 bp, Macaca Fascicularis
  misc_feature (1)...(747): n = A,T,C or G
tacgacactgagaaagatgagtggacgatggtaagccctttannntgtgcttggcaatggagtgcagcagtcgtggttcatgactgcatttacgtgatgacactgaacctcatgtactgttattttccaaggtctgactcatgggtagaaatggccatgagacagactagtaggtcnnnnnnnnnnnnnnnnnnnnnnngtgataaaattttctatattggagggttgcatattgctaccaattccggcataagactcccctctggcactgtagatgggtcttcagtaactgtggaaatttatgacgtgaataaaaatgagtggaaaatggcagccaacatccctgctaagaggtactctgacccctgtgttagagctgttgtgatctcaaattctctatgtgtgtttatgcgagaaactcatttaaatgagcgagctaaatacgtcacctaccaatatgacctggaacttgannnnnnnnnnnnnnnnnnnnnnnnnnnnnnnnnnnnnnnnnnnnnnnnnnnnnnnnnnnttcgatgcactgtggggaaactctatccatcctgccttgaagagtctccatggaaaccaccaacttaccttttttcaacggatgggacagaagagtttgaactggatggagaannnnnnnnnnnnnnnnntgtatannnnnnnnnnnnnnnnngtgcacgcctgagttatgtgctttgtcattttctttgctaaacaaaagaggctatgaaagaa

SEQ ID NO: 13011 - DNA, 708 bp, Macaca Fascicularis
  misc_feature (1)...(708): n = A,T,C or G
ccacatgcattgaatttgcacagctaaaattgcagcatnnnnnnagctgggctgtcccaaatgttaccatttgagatgctcccaggcatccttcgagaatccaccctctctggccctgggacattgcaagctgctacagataaattctgtgttctgttgacaatagtgtcattgccaagtgcacatcagtgagcctcttgaatccatttagtctcctttttcaacaaagaagtgtgttcagaaaaggagagagaggctgagatcactcaggagttttgttgggcggtaagcatggagcttcttgcacaaattctgggtccataaagaactcccaaactccctgcagatccagtagccctggagtctccccaagtagggaaaaccagaggtgccagccttcctgaggggccagataatttagcctggatctcctctttcacctgctaggactggaaagagccagaaggggggtggcctgaagccctctccctgcttggggtattgccctgtgtggaactgcgtgctcatgggctggcctcatgtcagtctgggagttatttttgatatgtggaatgccagatcttccaaattaggctaaatgcaatgaaaacctcttaggattgtctgtggagcatcagtttgggaagaattattgaattatcttgcaaggaaaaagtgtgtctccgtttttgttaatgttgcttgcct

SEQ ID NO: 13012 - DNA, 724 bp, Macaca Fascicularis
  misc_feature (1)...(724): n = A,T,C or G
agagccacatatggaaaagcaagataaacgagccagctaagnnngtggaatgtgcatcatacctggagtcaccattatccctggaattagaaaagtctgcaaaatttatagagcccacagaaaccctgaaggctgtaataaacgtggagcccccggactctcctgagctcacaaaaccctctcagttcccacacatcccttacactcattctccattgaataggggtttactctcagacctagtcttagagcctctgaagacaaactttgcaattggttgtttgactaaaccagaagaaatctgtgccaccctgggaaggtgtcaaaagaaggaaagatatatgtgacaatgtgaatcaagtccatcagcaagttgcttttgagcgcctactgtgtgccagtacctaagatacacctacaagagcaccaggctttcaagccttcatatctggatggaatcccaacttcagtgcttggtagctgtgtatctttggacaaaatctttcattccccaacctttaaacatcacatgacccatacctgggtggagagcgggtgaaaagtactgttcagagatgcagatgagaaaaaacatgacaatgggccctgaaggccaagattcattggagctttatcttgtaggaccttatcctgactcccttagaatgtaagttccaagagaacagggactttttctgccttgttttctacttttatcaccagc

SEQ ID NO: 13013 - DNA, 891 bp, Macaca Fascicularis
  misc_feature (1)...(891): n = A,T,C or G
gatgcagagaatctcaatacnnnnnnnnnnnnnagtattctcttcccattgtatggatgagaaaactgaggcccagaaggggggtgtgatctgcctcagtattttggcagcagagcagagctagtacctgggtctctggacacatctttctgtaatttcttatttccctgtttctgcgggtctttgtccacatccagctnnnnnnnnnnnnnnnnnnnctccacaccnnnnnnnnnnnnnnnnnnnnnnnnnnnntcatctatacccgcatcaggtacgtcctgggtcccccaagggtgaaccatgcatgtggcctcatcctggccaactgcaggcctgcctaggttcnnnnnnnnnnnnnnnaggggcacctgggtcccctaaggacagagggggcactgggcagacagtgggtgcaagagagagtccagggccaccttctggctgagccacacagagtccattacccccaggggagggatggtatgccgcatctggagggccatcttggcacagcgagcaggatccacgccagtcacccctggnnnnnnnnnnnnnnnnnnnnnnnnnnagaggccagacagatccaaggatggatgaatggagaggacaaaggcagcttctgacacaccagccccaggacctggggtgactggaggaagccaggcaaatggggaacaggacttgctccagtgagaaaaaccaaccacagcctcccaagcactaccagacaaaatctgcctgcctcggcctcctgagtagctgggactacaggcatgtgacaccaccacttacagctaatttttaaaattttgtagagatgtggtcttgttatgttgctcagactggtcttgaactcttgggctcaagtgatgcttctgcctcagcctc

SEQ ID NO: 13014 - DNA, 750 bp, Macaca Fascicularis
agtatatataatgcgtcagcaacctctgtttttcataaacactgtgccattcatgtatttccttgggaccaggaatattttgatgtagagcccagctttactgtgacatatggaaagctagttaagctactttctccaaagcaacagcaaagtaaaacaaaacaaaatgtcttatcacctgaaaaagagaagcagatgtcagagccactagatcaaaaaaaaacgaggtcagatcgtagtgaagaagatgagaaggcctgtgtgctacaagtagtctggaatggacttgaagaattgaagaatgccatcaaatacaccaaaaacgtagaagttctccatcttgggaaagtctggattccagatgacctgaggaagagactaaatatagaaatgcatgccgtagtcaggataactccagtggaagttacccctaaaattccaagatctctaaagttacaacctagagagaatttacctaaagacgtaagtgaagaagacataaaaattgtattttattcatggctacagcagtctactaccaccatgcttcctttggtaatatcagaggaagaatttattaagctggaaactaaagatgggctgaaggaattttctctgagcatagttcattcttgggaaaaagaaaaagataaaaatatttttctgttgagtcccaatttgctgcagaagactacaatacaagtaatagcatattattgaatatttaataaaatactatttgttacatag

SEQ ID NO: 13015 - DNA, 666 bp, Macaca Fascicularis
  misc_feature (1)...(666): n = A,T,C or G
tcgtgccgcagccagacntgcgctaccttttcctgaacggcaacaagctggccagggtgccagccggtgccttccagggcctgcggcagctggacatgctggacctctccaataactcgctggccagtgtgcccgaggggctctggacatccctagggcagccaaaccgggacatgcgggatggctttgacatctccagcaacccctggatctgtgaccagaacctgagcgacctctatcgttggcttcaggcccaaaaagacaagatgttttcccagaatgacacgcgctgtgctgggcctgaagccatgaagggccagacgctcctggcagtggctgagtcccagtgagacctggggctggggttgagggtggggggtctggtagaacactgcaacccacttagcaaataatcctgcctttggccaggtgcggtggctcacgcctgtaatcccagcacttcgggaggccaaggcgggcggatcacgaggtcaagagattgnnnnnnnnnnnnnnnnnnnnnnnnnnnnnnnnnnnnnnnnnnnnnnnnnnnnnnnnnnnnnnnnnnnnnnnnnnnnnnnnnnnnnnnnnnnnnnnnnnnnnnnnnnnnnnnnnnnnnnnnnnnnnnnnnnnnnnnnnnnnnnnnnnnnnnnnnnnnnnnnnnnn

SEQ ID NO: 13016 - DNA, 826 bp, Macaca Fascicularis
  misc_feature (1)...(826): n = A,T,C or G
cannnnnnnnnnnnnnnnnnnnnnnnnnnnnnnnnnnnnnnnnnnnnnnnnnnnnnnnngtgtaaaaggaaaggttgttattgatgccttcagattgatcaaatgctaatatgatggtcttaggacatgaaccaagacaaacaacttcaaatctgggtcacttaaacaagccatctatccaggcattaattcatggactaaacagacattattactccattactattaactatcggaaaaatgaactggaacagaagatgttgctaaatttgcataagaagagttggatggaaggtttgacacttcaggactacagtgaacactgtaaacacaatgaatcagtggtaaaagagatgttagaattagccaagaattnnnnnnnnnnnnnnnnnnnnnaagataagatgacacctgannnnnnnnnnnnnnnnnnngttggcaagcaggaccccaaacgtcatttggaggaacatgtggatgtacttatgacctcaaatattgtccagtgtttagcagctatgttggatactgttgtatttaaataaagcaacgaaaaacgctattgatgatgctttcagtgtatattcctctgttgttcctaatgctcaaaatcaagggacctctgaaggtgtnnnnnnnnnnnnnnnnnncatctgnnnnnnnnnnnnnnnnnnnnnnnnnnnnnnnnnnnnnnnnnnnnnnnnnnnnnnnnnnnnnnnnnnnnnnnttgcagattctaaagttatacatgagtacatcaaagtggacaaattttgttaagatcccgatttaatatttgaaaaaatcagtagcannaaatatattt

SEQ ID NO: 13017 - DNA, 774 bp, Macaca Fascicularis
  misc_feature (1)...(774): n = A,T,C or G
gcaannnnnnnnnnnnnnnttatgtggtnnnttttggtaggtcgtagttnnntatacacagacacctannnnnnnnnnnnnnntttttttccctaaaaaaaatgggattttagttcttattctatggtaactaccctcctcatatattggaaggaaccaatatttggaccttattttgactttgtctgtctcaaagaaaaagaaaataaaatatatacacagggttccttaaattgacatttttcccgagaattgtgagccaaagcctatagtaattacaggcaacaaatgattcccgatctctaaaaggctctctcagatgaaaagggagtaaaggaaaaaagaggtcaacnnnnnnnnnnnnnnnngcacttgagtttcattgttcttttagtgtttattcttataaaaaatgtttacagtctgcagattgatttttttttagtactgtggctttgttttcctattttatgaaaaaaatgataatctttttgtaaaattgtctgtgaaatatgaacattaatatataaagaaaaaccttgaagtgctgtatagtgaagtataaattaatgttttcttgatttgtgaagaacttaagactattatataattatcttgctgtatctattttatgcatgaccttttaacctttgactttgcttatttcccactacgaaggggaaggtagattttatgaatgattttaatagcaaatatattttataaaatgaaaatccagtgtggaggtaacaaagcatatatctgttctgaatc

SEQ ID NO: 13018 - DNA, 751 bp, Macaca Fascicularis
  misc_feature (1)...(751): n = A,T,C or G
attttgataaagcactggaggtcttattgccaaactgatnnnnatgaggcactaagggtgaaaacattgtacatgttgtgaagaaagtatttaaatccaacttttgaacagatttaacaaacatgaggaacttcttttttatttaaaagggtaattttgaaatgaagatgaaaatgtattcatcttaattgttttttcaaatttaagggaataatttataccatcttttgagacaagaatgtacagcaaaaatatggggaacagtagtatactgagagtgtgtgtatatatcatgtatgcctttccaagcttgccagtctttttggcttttaacagttcccaccagccacagtcattactgttccccaacccacaaccagcttttaagaagtcttatgttcacagtgaaaggaatgttgactttgaaattatggatttatattaatgacactataaaccaatggtaatggtaatttttaaacaaacttgctaaatattgagagactaaactactaagttaataaattatatatagcagtgtagctgttctctctagatggtgtctcacaatggatttctgttgcttgactattttcctagtgaatatttatactaaggtagtgactgagatttggtgatctggctgagtattttgaaacacattttgaataatatggcttagtgttaacggggaattaaatatgatttttttcttactcatttcaccttccctgtattgtatgttggaatg

SEQ ID NO: 13019 - DNA, 701 bp, Macaca Fascicularis
  misc_feature (1)...(701): n = A,T,C or G
tttgggaggttttnnnnnnntatgtttnnaanntgnaattggtaaatgctttatagatgtattttatccaagtgccactccaatttgtgtatgtaataaaattatttatattaaaagtgggaaataatttgtcaacatttttttgagtatagatttattaggggtggcaacaaagagtgctagttagcagttttccatgtaaagttgtccttgactgatttgtccacatgtcagttgtaactcccccactccctacaaaaggaattatttctaacccagatatatcacttgaaactttttaaaagcaaaataatcagggaagttcctagaaaggtgtttggctttttggtttttccttgaggattggggtaaagacttcccccaaaactgtcagcacaaaacagggtattgatttttaactctgatgtttctattggagttgaaataataaataaataatgagggaaatacgtttctaataaaattccctacattctagaacatccctgttttaatttttttacctaaatctttttgtgctttatgtgtaaagaaaaaaatgtactgagttacaatgcattttattaacactatgtacataatagctgctttgtgttcagaatggtagcagttgctctgtatattaaagtgatccttgtgaatttgtgaaatattgtcataaagtgctttttcttactgta

SEQ ID NO: 13020 - DNA, 733 bp, Macaca Fascicularis
agatttgtagtgacattaggcagaaatggccagtcaaacacatagcagtgttccatagacttggcttggttccagtgtcagaagcaagcataatcattgctgtgtcctcagcccacagagctgcatctcttgaagctgtgagctatgccattgatactttaaaagccaaggtgcccatatggaaaaaggaaatttatgaagagtcatcatcttggaaaggaaacaaagagtgcttttgggtatccaacaattaatcacttagcttttagagcctgcaatcttaactttgttaaactatgatcattgatcacattttgatttttttctctccacattaggatagtttactgaagcacagtctcttatgttatactagtgggacaaaaggaggaaaaaggaagcaagataaatggatatgtaggatgaagggttatttgaaatggaactaaagatagaaggaggactgtaggaaagaaatggaataatttaaaagtgaggaaagatgtctgtggtagacatgtccttccatgactaatttctaattgtaactcaaactcacattgaggtatgggccctcctcagtgactttaactgactcagaaagatactcccccaccagccccacttcaccaccgccgtccgggttcagggagagtgttattatcaaggatgcatgacaggaatgttggcagaactggaaagtattaaaaaatcattatcagacagtcttgat

SEQ ID NO: 13021 - DNA, 690 bp, Macaca Fascicularis
cagtcatgaccacaccagatctcacaaccgaaacaccacttcagacgacaaccactgccgtcttcacaacagcaaacacgtgcccttcaccaaccccaagcacccttccagaggcagccacaggtcttctgactcctgagccttctaaggaagggcccatcctcactgcagaatcagaacctgtcctccccagtgactcctggagtagcgccgagtctcctgcagacactgtcctgctgacatccagagagtccaaagtttggggtctcccaccaacatcccacgtgtcgatgtggaaaacgagtgattcagtgtcttctcctcagcctggagcatccgatactgcagttcctgagcaaaacaaaacaacaaaaacaggacagatggatggaatgcccatgcccatgaagaatgaaatgcccatctcccaactactgatgatcctcgccccctccttgggatttgtgctcttggcattgctcatggcgtttctcctgagagggaaactcatggaaaccaattgtttgcagaaacacacaaggctagactgcattggagatagtaaaaatgtcctcaatgacatgcggcatggaagggaagatgaagatggactttttaccctctaacaatgcagtagcatgttaaatggaggatggcggcatgacaatcaagtgtcaaaataagtcttag

SEQ ID NO: 13022 - DNA, 701 bp, Macaca Fascicularis
  misc_feature (1)...(701): n = A,T,C or G
tgcagnannnnagcccaacatnnnnntgtacagatgctcctgaaagtcactttcaggttctcgggatattcacaaaactgccttccctggaggtcccctcctctcctagcttcccgcctccgccccctgtgaacacctgtctgcagtacccccgctcctgcccctcctactgcaggtctgggctgccaagcttcttccccactgacaaacgcccacctgacctgaggccccagcttccctctgccccaggacttaccaagctgtagggccgaggctgctgcctgccagcctggggtccctggaggacaggtcacatctgatcccttcggggtggggggtccagcccggagcaggcactgagtgaatgccccctggctgtggagctgagccccgccctgctgtgaggatttcctccccaggcaggcaggaggccacggggagcacgtggaaagttggctgctgcctggggaagcttctcctccccaagatggtcatggggcggcctgcagaggacagtggacgtggaactgtggggtgtgaggactgagcnnnnnnnnnnnnnnnnnnnnnnnnnnnnnnnnnnnnnnnnnnnncatagaagtgccgcccagaggcaagcgggctcctgggcatcacccccctcacccagggaacaagtgtgtctcaaggggcatttgtgagctttgctgtaaaacagattc

SEQ ID NO: 13023 - DNA, 716 bp, Macaca Fascicularis
  misc_feature (1)...(716): n = A,T,C or G
tggtttgcatgtaagatagatgacatcgtaaaacnnngaagctgttataacttnntnnncntgatcagcaggatatctgtgnnnnnnnngacgtcatacattctgtatctagtagtcttaaaatttctgcctttctcctaaagaatgtgttcttgcattttggttgaaataacctacagtgttaacaatcagatacctcctttagtgaccagtttaatttttaatagctatagatagccccnnnnnnnnnnnnnnnnnnnnnnnnnnnnnnnatatgacatggaaatgctctgtgtatactaaacaaaataaagtccctctttgcatttaaaaccaaagtcaaaacannnnnnnnnnnnnnnnnntaattaactttacgccttcccatgactcaagttttgttaaataggcccaaaaactttgattggcagtttctttggttaattattcctatagaatgtattttaagaaatctatacaaattggatatatgcttggtaattccccagtttctaggaggtacctgtttctaccgtttcaagtgataaagtgaaaataatttacattcgacagtgttactgataacaaacctactttaagagatatgttgctttttacttaagggatagtgttgatagataaattagaatgtatagataggtttgtctcggtctaaataatggctgtatagatatgtatatatggttcacatatct

SEQ ID NO: 13024 - DNA, 726 bp, Macaca Fascicularis
  misc_feature (1)...(726): n = A,T,C or G
ggcaaggtgaaacaggagagtggnnnnnnnnnnnnnnnnnnnnnnnnctgaaagaagaaatcccttgcagatacttcatttttaaatgttgaatatttaataatctctttggttactagatactagccagaaaccttctgaacagtttttatgtgatactggccagttgtcnnnnnnnnnnnnnnnnnnnnnnnnnnnnnnnnnnnnnnnnnnnnnnnnnnnnnnnnnnnnnnnnnnncacccagacctgggccaagtcagcgtcaacttccatacacctggaaacacctctcctcactgccctgtcctcctgtatctctcaggtgcctacatgcagccaggcgcgcgggagaacattgcctatctcacccacacggagcggaggaaggacttccagtacgaggccatgcaggagaggcgggaggctgagaacatggcccagaggggcattggtgtggccgccagctctgtgcccatgaactttaaggacctcattgagaccaaggctgaggagcacaacattgtcttcatgcccgtcattgggaagcgacacgaagggaagcagctctacacctttggccgcattgtgatctacatcgaccggggagtggtctttgtccagggcgagaagacatgggtgcccacctcactgnnnnnnnnnnnnnnnnnnnncaagtgaactgtggcaggcccagagccagccagagacttgcccctgagagggat

SEQ ID NO: 13025 - DNA, 742 bp, Macaca Fascicularis
  misc_feature (1)...(742): n = A,T,C or G
caacaaagtttgaaatccatatagtggctcagtttgataatcataattctcaggtctggcgagtgagttggaatataacaggaacagtgctagcatcttcaggagatgatggctgtgtaagattgtggaaagctaattatatggacaattggaagtgtactggtattttgaaaggtaatgggagcccagtcaatgggagttctcagcagggaaactcaaatccttccctaggttcaaatattccaagtcttcagaattcattaaatggatcttctgctggcagaaagcacagctgagtacaagctaactggagtagatttgctgttttgctgcttgttgcatgcacacaggaatggaaagcgagatccttgtccccttccccagagcagtttgacctacatacccaagaatacaccagcagcctgcttaataataaaagcaatcataaaggcctttaaaaatacagagtatattttaatgtaatagtcaagatatattgaaacaatattagaaaattttgaaataataaaaagagaggcatttaaaaagaggcattgtacaacaaaaaaactatatgaaatatacctgaaactaatttgggtttaaagattaaaagggttgttaccattcttatctaagtagttgggaggaggggnnnatatcactttacttcatttggaaaatatagacatatttcttttgctttcttaaaacagcttaaaatgaacttttataattttaa

SEQ ID NO: 13026 - DNA, 686 bp, Macaca Fascicularis
  misc_feature (1)...(686): n = A,T,C or G
aggaacccacnnnnccgggtgagcnnnnctctgaagagactgtcctcgggcctcctctggaatangcactgccagaggacagggctcctcctgcttgcctcaggactgcctggcttgtgtggcattggacttcgggaattgctggtagataacatgctctggtctcacctggtggcaagctttgccagccctggccagggtttggctccagtggtggcacatatggcctccgtggtatggacctggtggcttctgcatcccaccgtggcctccgtggtatggaccaggtggcttctccatcccaccgtggcctccgtggtatggaccaggtggcttctccatcccaccgtggcctccgtggtatggaccaggtggcttctccatcccaccgtggcctccgcggtatggaccaggtggcttctccatcccacccaaggtaacagtgtctcgcttcacccacgggctgctagtgagggagcccctgggacttttctttggggcagcattttgttttgtctttcgtggcagggaaaggatgtgatgatggggaggacagttcttttggaggttggaggggccaagccaaggacaggagcgagcgtgccctcattttgtttctactttaatttctgtgtgtcggccatactgaattatgagactaacagatgtctacaatacagtacctg

SEQ ID NO: 13027 - DNA, 1061 bp, Macaca Fascicularis
  misc_feature (1)...(1061): n = A,T,C or G
acacacacacacacacacatacatacacatactcatgcacattttccttcatttccatatcctttatttcagggcagcccattttcctctggattcattgataaatacaaatacccacacctttgaccagtattgttggttacctgcaggttctgtgtatgaggcctnnnnnnnnnnnnnnnnnnnnnnnnnactagggaagcatttgtcagagtcttcagactgggttctagagaggcagagtcatttcttctggaaggtggagctttacccaaagtgaaagttagccttgctcaaagatgtgttttgtggtagttggtaaaaaagaaagaaagaaacacgtattggaggtaattnnnnnnnnnnnnnnncagtagttctctattcaccattttaaagcccattcagnnnnnnnnnnnnnnnnnnnnnctgattgctgtgtttacatgaaatgacgattgattggagtcagatggtctgttttaaagatttccatgacagcctcttttcctgagttggagagattggaggtggtccatccgtacgaagtggnnnnnnnnnnnnnnnnnnnnagtagctaaagaagccatgtacttacagtgtttttctcagaatatcaactcatgttcttcagatgcttttctttttttaatgatgagggaaaatgtgtaatttgggattccacagtgccttgcatatggtaggcgcccaataaatacttgttgaagcaaaccaagtttcccaagtcctcatctcttacagtgaccaagacatctttctcctctgaaggggttggcagttgtggctaaaaaataagcagtgtcattatttgcttgaaatcatatatacagtttgtatgaatttcagtatgttgccaagacatgctctttttcttattgtattttcnnnnnnnnnnnnnnnnnnnnnnnnnnnnnnnnnnngcaaagtgtaaatatgaaggtgtacccgtgccccttgcctcctgtgtttcatcttcgtcggttagggaagaaggtccagaggtttgtttgtatttatgccgatccttgtccagaagccca

SEQ ID NO: 13028 - DNA, 724 bp, Macaca Fascicularis
  misc_feature (1)...(724): n = A,T,C or G
ttttttttttaacatgtattcagattgagaaatatgattttaatgctttaatctcatgtagtttgtttttaatttcaagcaaaatcttattgtacttgaatgtgccctgttttgttagcacacctagacttgctgtaactgtactcatgtcccagtatgtacgttctttctatgaaagagaaaacactaatcttaaattatatccagcaatgtttctggtatcctttaagaaaagttaagactattattttcttcccttccctgtgcagcattcaaaatcacccctagaaaaagtgagtgttttaatgagacttcctaggaagggatgcactgtaaaacaaaagtattcttgtaactcagttttgtgaaaggtaaaaaaactactatgttttaaagtacactttagaaagtctcttcaaaacagtcctgtatttgaactctgttcatagtttttttttgaacagtttagacnnnnnnnnnnnnnnnnnaaacaatttcctgcattaagctgagacaagtatatatacagccctatacagtttcctagctttccctcccccatttatgtgtattggtgacagtgggtataaaacagcctgaaagtgtatgcatgtaccataacatctagacttaatatattgtggagtattcaataaccattatgtagaaggtagataagaattaaaagggtttaatttcctagaaagaaaannaaaaatggtca

SEQ ID NO: 13029 - DNA, 659 bp, Macaca Fascicularis
  misc_feature (1)...(659): n = A,T,C or G
gaacaacccaagagncggcgccactgcctgctgatgtgtgcctacgtggccgtctttgtcatttgnnnnnnnnnnnnnnntgtgaccctactgctgctcacactgcatgggaaccacatttccctccactgccacctggtccacctgctctacttcttctatgatgtcatcgactgcttctccatgctgcactgtgtcatcaaccccatcctttacaactttctcagcccacacttccggggccggctcctgaacgctgtnnnnnnnnnnnnnnnnnnnnnnnnnnccagggcagacgcacactcctcctcttcctcctgttccacccagcattccatcatcatcaccaagggggacagccagcctgctgcagcaaccccccaccccgagccaagcctgagctttcaggcatcccctttgcttccaaatacttcccccttctttccccctcagcctcttacatccagctgaggtagaggccaggctcctccaacagtgaaggaaaagacacaggtgagagtataggtgggagatttggggggatgtagaggggagggtcaaatttgtgtctatcttaaaatacagaggtatggagagggagacagggtcgggagggatagagagcaggccctcagtgttgtactatttgtcttggtcct

SEQ ID NO: 13030 - DNA, 667 bp, Macaca Fascicularis
  misc_feature (1)...(667): n = A,T,C or G
ttcccagcactgttcttcagtctttaggactaannnnaggaggcagcagagagagatatgccaaaagaacttgggaatcagtgaaacgtacaaccaggaaagagcagactgcggatggtgtcnnagtcannnnnnnnnnnnnnnnnnnnnnnnnnnnnnnnnnnnnnnnnnnnnnnnnnnnnnnnnnnnnnnnnnnnnnnnnnnnctgcatagagttccccgcaggtctcatagacgacggtgaaaccccagaagcagctgctctccgggagcttgaggaagaaaccggctacaaaggggacgttgccgaatgttttccagcggtctgtatggacccaggcttgtcaaactgtaccacacacatcgtgacagtcaccactaacggagatgatgccgaaaacgccaggccgaagccaaagccaggggatggagaatttgtggaagtcatttctttacccaagaatgacccgctgcagagactccatgcgctggtagctgaagaacatcttacagtggacgcnnnnnnnnnnnnnnnnnnnctagcgctgaaacacnnnnnnnnnnngccatttgaagtgcccctcttgaaattttaaggcnnnaatgtgacactggccacttttgtaagcaagaccgccaggccctctccactaagactttgtgttca

SEQ ID NO: 13031 - DNA, 506 bp, Macaca Fascicularis
acaggcaaagcacctgtgttatgtctcataagaaacttagcatatgtccttatagcagattcttgtctccacaggatggagaagatgtcattcatttgatggaaaccagtgtttgttaaaaccattttctacccccaaagcaaacacactaaagagaaggagcggtatttacataaatttctgcctacccacacaccaccattatgtcccattgaagtgtagataagatatacgggctaggaatcaaagagtaatgtatttcaacctaaagtctgaatactgtatatcatacatcatcaagactttgttattgttaagtgctgtaaagaaaaagtagagaaagtagaggtgggcagtttgtctaacaggcatcttaacactggtccccatcccagtggaacaagcaatgccatgtgtaccaaatgcaattccagattgctaagttagaaatgtcattgccagccattacagaagaggcaaaagtccacagggggtgtatgccaaaa

SEQ ID NO: 13032 - DNA, 330 bp, Macaca Fascicularis
ccccccagaaatgctcgcggagtaactgcaagatctcctagcagggacgggcagagccgcctgtgcagatgctgggagggctcgagctggacgcttctggctggatgccgggccagtgccacctgcgtggagactggccacgccagctgcctcagaagcactgggctttcctcacacctgagccgggtgcgaggagcagcatgcacggagcacgtgcggcaggcgggaggagggggcgcggctgggctgctggtgcttcttggtgtgaaacaagccgggcctccccagctgcctgggctcgaccggcggggagcctgctcgccttctata

SEQ ID NO: 13033 - DNA, 770 bp, Macaca Fascicularis
  misc_feature (1)...(770): n = A,T,C or G
acagcgacgctggatggctgtgcttggccgagcgggccgaggggacacgttctgcccgggnnnnncactgtctgaggacagggagatggaggaggcaccggtggctgctttaggagccactgctgaaccccccgaatccccccagacccgagacaagacctagagggtttggggcaaactgggagcccccaccccacactctagctgcccatgtctgatcgggggctctagccccttccctcccagctcagtcaatacttgaactcccatcacgggcactttcaatcccgaatgctgggtcttgggttttttaattcatcttttcacaaaacgtgggcttttaaaaaatatattcctacagtgatgttaatttttattaatccctgtccccagagagggtgggagccattgctagacccacctgaattaggtcgtttttctccctcatccctcaataccctagcacagatcctgcctccacccaattccccacaaagcaccagaggtaggagacctggattcaactgccagctctgccactgaccatggggccccgacccacccctgcctcatcagccagtgtattcacaagtacaactccacgtggggtggcaaatagacctatcatgcatataccaaggattacagattagacccggccccaaggatacccaataatttatagtccagacccaaggcagggccaccgggcaggacaggggaacggggggaagacaatggatactcgttttttttgttttttttttttt

SEQ ID NO: 13034 - DNA, 563 bp, Macaca Fascicularis
  misc_feature (1)...(563): n = A,T,C or G
tttttccttttctttnntaaagtannnnnnnnnnnnnnnnnnnnnnnnnnnnngggggatggggggcagaaacctgaggctgctgcccctttatctgccttcacagtactgtccccttcccccagctcctccctgaccccatgggccaggcctcagaccttccagctaaccgcttcccatgagccactactctgatgtcagcctataaccaaaggagctggggggtccaggcctggtgaccaacctttctcagcccactcaatcagggtgctccccacctgcaggcaggaggcaacaccctatctgctaccatcagccccttccagagcccatctgccccgcnnnnnnnnnnnnnnnnnnnnnnnnnnnaccctgctctgccctatcttgggggtgccctgctcagggatgggctggcagggctgcacccagcctccctggtaagcagagactcaagaaacctctggggtcctgttttctggttgtgtgatcccaggggtgcacatgggccccttgggtgtctgaacagaagggtatgggagggagggccgcacccctgcagt

SEQ ID NO: 13035 - DNA, 747 bp, Macaca Fascicularis
  misc_feature (1)...(747): n = A,T,C or G
agaacaacgccagncnnnttgatgcaccctgtcgcaccaagaacatcgcccgggagatttccattcagccctggtacaagtctactgtcatccacatgactgttggaggcttcctgcctttcagtgccatctctgtagagctgtactacatctttgccacagtatggggtcggnnnnnnnnnnnnnnntacggcatcctcttctttgtcttcgccatcctgctgagtgtgggggcttgcatctccattgcactcacctacttccagttgtctggggaggattaccgctggtggtggcgatctgtgctgagtgttggctccactggcctcttcatctttctctactcagttttctattatgcccgnnnnnnnnnnnnnnntggggcagtacagacagtagagttctttggctactccttactcactggttatgtcttcttccnnnnnnnnnnnnnnntctcctttttttcttccctaannnnnnnnnnnnnnntctatgttaacctcaagatggactgagttctgtgtggcagaagtattgctgttctctccctttcttcatgcctccttgagctctcctaccagcttctcttctgattgactgaattgtgtgatggcattgttgccttcccctttgccctttgggccttccttccccagagagggcctggaaattataaatctctattacataaggagtatatatttgaaatttttaagttgcctttagttttggtcctgatttttc

SEQ ID NO: 13036 - DNA, 792 bp, Macaca Fascicularis
  misc_feature (1)...(792): n = A,T,C or G
gcnnnnnnnnnnnnnnnnnnnnnnnnnnnnnnnnnnggatatannnnnnnnnnnnnnnnnnnnnnnnnnnnnnnnnnntcctgtcagatgactgtaaggattggtgatattatagnnnnnnnnnnnnnnnnnnaatgctcttaatacatgcaaactctaattccnnnnnnnnnnnnnnnnnnnnatatctcattgtaaacatggggaaaccgaggcccatacagggtgggtgacttggccagggttgcagacagccaagatgaaacgtaggannnnnnnnnnnnnnnnnnnnnnnnctgttcttcagggtgcacaccttaccgccactttgtttggtaaaatagaaatatgaaggactcataagatggtgaatgtggctgttatgcagatggcaagaaaaggagcccccgaggaaggggcagataggacaggcaggtgaggaaatgaaggttacctgaagctcnnnnnnnnnnnnnntcttctccataaatactttcaaataaattacgtgttttattactctatatcctccacaagagagtgcaaggaatcaattctgcttggaatgtggtgccaggaaaaaatgtctgtcaagtgataannnnnnnncctgttatgttttactgtctgctcagagagccaaattaagtgctcaactgttataaaacttaactctggtttctggtctaattctctcctgtttcctctataaagaaactatttctttttactttattttaatttcctggtatagatgcatctttgatttggggaagcaggnnnccccactag

SEQ ID NO: 13037 - DNA, 776 bp, Macaca Fascicularis
  misc_feature (1)...(776): n = A,T,C or G
gacagtgatagattaaggcattaatattgtaatccataataactgtagaaatggccctaaagcatgctgcataattaataatttatattttcattattatgtttatatgaatgatcttgcatttgattatatcaaattcgttatcattttatagcaacagtattgttttctctgtttttcttctctaacttctctgaaatcatctcctattaagggatagaaattgttactagaagagaatcacatgttctctgnnnnnnnnnnnnnnnngtgtaaattattttatcaatgctagatagagttcacatgctgactccctggatacctacaattaagaagaaaatgacagacaactatttttcctttaggttaaaataatgnnnnnnnnnnnnnnntaaattataagttaatgtatttgaaataagatcttggaaacaagcatttaaatggtgnnnnnnnnnnnnncaacagggcttcagtatattcacacctaatacgttcatatgtacatttcgatgatggtttttcttgataacatattaacattgattttattttttcagacatactgtaatttaaaaataaatgtgagcgtttgttttaagttcacagaaaacttaatgataattcagattctcaggaattaaggactaaccataacattgttgtcagttctaattacattttgtaaaagatggcaagtttgttacctcacttgagtggggtttccctcttcacccaattctaagagaatataatgtgtatactaaaacata

SEQ ID NO: 13038 - DNA, 745 bp, Macaca Fascicularis
  misc_feature (1)...(745): n = A,T,C or G
tccactgtgagggcattgttaattgctactcaacttgagggaaagacagggccttggtcagagagagaacactctgaactctgctaaggacatagagtcagcccatggtgatttagctccttgctgttcacctcctctttcctgatgtctgccttgctctacagcacaacctcttgagtgtggacagggagaaagatgatggtgtcagaggtaaaaactattgtatatgacagggcacaagatggtctgtgatctttgcacagatgaatggaagttgatgtgcaccaatannnnnnnnnnnnnnnctttctttctcaatattaactggaatgctgcctcttgggttctcacatgcatggatgctttgagttggacgtgctactgtccatagtttccagaggattacctgnnnnnnnnnnnnnnnnnnnnnnnnnnnnnnnnnnggtttgtttccccatccactgagtgtagcatcctcagaggtagataagtttgcttctagggagttagatgtaggtgggatattgggatgaggaaaggaaaatcaggtagacggtgcttttttcccccaaatctaagtattctatgtcatggttttaaactttgacatgaactcctgggctttgggggaaaagaaagttccattcatttaaatgaataaggtgttgaaagagtgcagggggttgggaggaagcatgtaagagagtgaacatttccttagatgtcacccagatggttctggggg

SEQ ID NO: 13039 - DNA, 506 bp, Macaca Fascicularis
  misc_feature (1)...(506): n = A,T,C or G
cacagcactgnncanctggccaaacnnctgtnntnnaaacacatgtaannnnnnnnnnnnnnnnnnnnnnnnnnnnnnnnnnnnnnnnnnnnnnnnnnnnnnnnnnnnnnnnnnnnnttgaaaaatatgcaacaaatatgggatgtaatctggatggccgcttctgtacttaatgtgaaatatttagatacctttttgaacacttaacagtttttttgagacaatgacttttgtaaggattggtactatcattccttatgacatgtacattgtctgtcactaatccttggattttgctgtattgtcacctaaatnnnnnnnnnnnnnnnnnnnnnnnnnnnnnnnnnnnnnnaacactcttggtcacatgtttttccacccccaacccactccaccccaccacatgggttctctccttctnntgaacttctttaggagtcactgcttgtgtggttcctgtgacacgtaaccaatgccttctggtactgccattctttttttgtttt

SEQ ID NO: 13040 - DNA, 734 bp, Macaca Fascicularis
  misc_feature (1)...(734): n = A,T,C or G
aaaatacaaaatacacatnnnnnntggatgcagcaatctgaaatcatctctagtcttgctttcacttgtgagcaattgtcttctatgatcccaaagaatttttctaagtgaaaggaaatactagtgaatcacccactaggaaaagccactgccacagaggaggcgggtccccttgtgcggcttaggcccctgtcaggaaacacatggggacctctctctccannnnnnnnnnnnnnnncctcggtacccagcggggagggcaataatttatatattttccacagtcagggaaggactctcacttatttnnnnnnnnnnnnnnnttttataaaacatttttaaaacnnnnnnnnnnnnnnnnnnnnnnagatttacccgtgtgctatctgtatttcccttgtacagaacttttacatttttgaatattcctattacttttgattgtgtctgatgggaactgagttgttggcctttgtgaaatgaaactttggctcttgagaaagaattcttatgaattgtatgcgaattttatatatttaaagagggagatctggggctgttatttttaaacactttttttcataatacatattctgagtagatatttataaaatatatgtttctttcattatgtgtttgtaaaattagagtttaaataaatatgctttgatgcatagttttgaactaatgtaacatgatttttcttttttaaaacagcctgaaaatgtnnnnng

SEQ ID NO: 13041 - DNA, 136 bp, Macaca Fascicularis
  misc_feature (1)...(136): n = A,T,C or G
agttttaacagatgtatttcaaatacagcatgttttacaggagttcacaaactttccatnnnnaaaaaaaaactttcaactacttgactgttccattccgccccagacaatcctcncagagagtgaactacttcat

SEQ ID NO: 13042 - DNA, 701 bp, Macaca Fascicularis
  misc_feature (1)...(701): n = A,T,C or G
agaatagcccctcatcctcctttcccttctagttgatccttttcacctccctgatccacttcatttcttcactgcggttcctcatcataggggttctcactctgaaccttccctctctactacccatggcaggaacttagtacatacagctctcccacccagggccttccaccctcggctcctgtgctgcgagaaacttccaggcgtggacagcccagcctgaggcattccagtgcctggggcaacnnnnnnnnnnnnnnnnnnnagctttgccctcacttccgagaacggacacaggggccctttccttgcccctttagctggtacctcagtggggaggcttccttaccgggaatgagttcctccaacccagagccagagatgaggacaacttaggggaagacagggttttaggtggagccaggggcaaatcttaatgggaccagtgggggataccccagagcccgtggcctgactgcacagctctgccctcccnnnnnnnnnnnnnnnnnnnnnnnnnnnnnnnnnnncgtgcaggggggccaaggccaatagtttggggttaggagtcccgtagcgtctcagaagaccgggctctttggagtacagggtccccggcctctcctttaagattctcttcccagctggaaggccgatgactgggtggttgggagggagacccatctctcctttctgtcccg

SEQ ID NO: 13043 - DNA, 776 bp, Macaca Fascicularis
  misc_feature (1)...(776): n = A,T,C or G
acagccagggggtggtacagctgtgaagctcgggctgnntnnnanncnnncccagaaggttggccagaggggtgacccagtattcagtcttcactataactcttaagagttgagacgctaatgttcatgactcctggccttgggatgcccaagggatttctggctcaggctgtaaaannnnnnnnnnnnnnnnnnnnnnnnnnnnnnnnnngtcctacaggtggaactgcaggagctcagcacagacccagctctctggggcctgttcacttggtgatttcaatgatggcatccaggaattagctgagccaatagaccatgtggacagctttggccagagctcccatgtggcatctgggagccacagtggcccagccacctggctcgggctagttccaaattccaaaagattggcttgtaaaccttcgtctccctctcttctacccagagatagcacatacgtgtgcacatgcatgcacacacacacattcagtattttaaaagaatgttttcttggtgccattttcattttattttattttaattcttggagggggaaataagggaataaggccaaggaagatgtatagctttagctttagcctggcaacctggagattccacataccttgtgtattgaaccccaggaaaaggaagaggtcgaactgaccctgcggaaggagcatggtttcaggagtttattttaagactgctgggaaggaaacaggccccattttgtatatagttgcaacttaaactttttggcttgcaaaata

SEQ ID NO: 13044 - DNA, 759 bp, Macaca Fascicularis
  misc_feature (1)...(759): n = A,T,C or G
agagcggccgagttatagacagcagcagcattctcatgcaaaattagttttannnnnnnnntgtgggcatcggtaccttttgcctgggtgatatggaagaatttttgaggatttagtatgctctccatagagacagttcagccagtcatttctgcattgtagagacttctcatactttctttgaagagtcatagaaagcgggatccagagcttttgaatccttaattagcatagtagaaattagctttctatgggaatgctttagtgttagcagttgacaattaggcccatattcaatctgaatgggaacaaaagtaaatgcaatgataatatactgctagttagagaaacatgttagttgattatacctgaaatggattatctatctcatcagcaagtattatttgaataaaatgagaaatgcttaagaagaattgttgctctatagtaatttggttttgaagaatggaatggtaactatttttttccatcgttcttccttttgagagaagaaagtgtggtgactgatgatctggaaaagcccatttctgattgcacattgactggaattctttctttgtgtctgtggactagtgatgctgtttgcaaaatgaagattcgggactggctcctatcttgttatctaactagatgtcagatcttgaaatctgtattctcgaagcaattctgccacttgatcgtattcacaagggccctgataggctccttttagaaggcccaattctgttcctagagcta

SEQ ID NO: 13045 - DNA, 760 bp, Macaca Fascicularis
  misc_feature (1)...(760): n = A,T,C or G
agggatcatnntctcctcatttaccacatccnnnaggttgaaccacgggaccgtgactttagtatctctcatggggctgtgagtgctactccgccagcccccaccctgatctcaggtgacccctggtacccatggtacaactggaaacagccaccagagagagaactgtcacgccttcgccggctttaccagggtcatctccgagaagagagtggccccccacctgagtcaatgcccaagatgccccctacagcaccagcggaagcctccttcactgggcagacagaccctcagagtgctctgtaggagccgtagactgggaagagaggccaggcatggtggcttacaannnnnnnnnnnnnnnnnnnnnnnnnnnnnnnnnnnnnnnnnnnnnnnnnnnnnnnnnnnnnnnnnnnnnnnnnnnnnnnnnnnnnnnnnnnnnnnnnnnnnnnnnnnnnnnnnnnnnnnnnnnnnnnnnnnnnnnnnnnnnnnnnnnnnnnnnnnnnnnnnnnnnnnnnnnnnngagccagagggactaggagatatgtgtatgtaggtttatatgatgggatatcaccctgaagagttgtgtcttttgtagccaatgacaaatccaggaaataatgttgctgatagggataaatcttgaggctgagggagggcaggacagatgtgtatgggaaaccccaacccctatatattgtaaatagatgggctgggctaaacattgttgctgtttcagacttataccaactcagct

SEQ ID NO: 13046 - DNA, 730 bp, Macaca Fascicularis
tccccagcagaggacaaaaagcctctcactcagatgacaggacaccaagctctcatcaaccaggtgctcttctctcctgactcccgcatcgtggctagtgcctccttcgacaagtccatcaagctgtgggatggcaggacgggcaagtacctgggttccctacgcggccacgtggctgccgtgtaccagattgcatggtcagctgacagccggctcctggtcagcggcagcagtgacagcacactgaaggtgtgggatgtgaaggcccagaagctggccatggacctgcccggccacgcggatgaggtatatgctgttgactggagtccagatggccagagagtggcaagtggtgggaaggacaaatgcctccggatatggaggagatgagaaggcctgcagttctctctgccccccacctggactcggcctctgccagccgcctttcctgccagagaacaaagactcgggtggcagcgcacacacccttcccaccagtggggacctgagaatgcgcgtggcctgctgtcctcgacagacccgagtggggtcttcccacagatcccctgcttgtggcacaccccagagccagaaatcgaaggtcacaggaagttgtcaccgaacttggcctgtgtctgctactctataccttactggtacagacgagggtggtgggcggccaggctctgtgagtgggccgctaagtgtcaactctgtacagggtcagacc

SEQ ID NO: 13047 - DNA, 757 bp, Macaca Fascicularis
  misc_feature (1)...(757): n = A,T,C or G
gatagagtagaaaggaatatggctagaataacattgccaaacattaggctttattgttttgttatgtttgtgttttcgttgtataattatgaacatgcacaagtttctgcatgaaaatatattaatatattaatcacatgtatgtgccttttggttacatgcattaaatctaacagagttaaattatttcagtggctcttttggcctcttactagggggaatagtcttgtttctagcttaaacaatttttttttgcacaagatttcatttttaagaaaagtagtatcttttgactgagttattgttttgaaaatgttatataggtttccaataggtcaataaccatgtgtaaatggtttttataaatttctcaatttggggacaagatttttttgtggtctaaattgtgggcttaagattcttttctttatatatgtacatataatttttttttctttgccacactggagcacaatgtttctatgtaaagaattattttcattctttatccatgagcaccaggctttgctcacttaaaaaaaattaagccacattaaggagtgagtcttcttttttacaataatgtaaaaatgaaactgtttacatttttttaaagcattgtagtttttaaaaattaagctgttttgttttgtgttgttgaannnnnnnnnnnnnnnnaatatcgatataatgtaccaatgaaataacatctggggcaatgaaaccctgatcatgttgttgatggttagcatatgtt

SEQ ID NO: 13048 - DNA, 799 bp, Macaca Fascicularis
  misc_feature (1)...(799): n = A,T,C or G
ccctgggagcagaactcttgtcatctatgaggggtccttctgagaaagactcatttttttcctggagttcttcccatcgaggtcctaggatttcacaccactgtcccataagagctttcctgcctaatgaaaggaggtcttgtgtgtgtctcctctcatctctgtagttctcgagttggcccccattgcagccccaccctgtgggtagtcttccagaagtgatgcagtggtgtgagatgccctacaccttgttatttgggagactttgagaatcacttccatggtgaccagtgtttgttttgcctgattttgtattctgtgttgcatttctccccactccctgccctgctttaataaatggcaaaccaatgtctaggaagaatgactgaagggcagtattgggtattggccccatggcaggagcagccacttgcatctggtcccggtgccacactgcagtgcttggtgtggttgtggagcctgtccctgcacgccttgctcccgttgagccacgctgtttggtgggtgattctctgccctgagccactactctggactggcccagtctccagagctggcacaccctgcctgttttctctttttagacacaacagccgcagtttggccagccactaagtcccaccagctgaggtccgaggaaagcggggtgactcatttcccttgtccagggccccaggagagtgaggtgtccagcctgcaaagctgtcccagnncctcggtgttggtttgcaataaatcggtattaaagcaaaaaaaaaaaaaaaaaaaaaaaaaaagg

SEQ ID NO: 13049 - DNA, 698 bp, Macaca Fascicularis
  misc_feature (1)...(698): n = A,T,C or G
gagtgggccagggatggggcttgaagtgaatgannnctgggtggaagtttgnnnnngagacatccaggagctgggggattggttgggctggagctgttggacttaggtctttccttacggctccatgctcctccctccctcccttcnnnnnnnnnnnnnnnnnnnnntgatggcctggagagtaatccttacagaagccggaagcaacnnnnnnnnnnnnnnnnnnnnnnnnnnnnnnnnnnnnnnnnnnnnnnnnnnnnnnnnnnngaccnnnnnnnnnnnnnnnnnnnnnnnnncatctctctggagcagggaaagaaggagcggatagagaggctgggctacgacccggaggctaaggcnnnnnnnnnnnnnnnnccaaagcagaagggccgcagctccacagcaagnnnnnnnnnnnngaagaggaaggtcatggatgaggaacnnnnnnnnnnnnnnnnnnnnnnnnnnnnnnnnnnnnnnnnnnnnnnnnnnnnnnnnnnnnnnnnnnnnnnnnnggccaagtccacgggggcccgnnnnnnnnnnnnnnnnnnnnnnnnnnnnnnnnnnnnnntccagggttgcctgggaacagtctctccccgagatcacctgtagggaaaagagtgttccctggaacaaggaggtggggcactgtggtcctttccccaactgggggggacagctggctc

SEQ ID NO: 13050 - DNA, 727 bp, Macaca Fascicularis
  misc_feature (1)...(727): n = A,T,C or G
atgcacatccagtnntaccagnnngcttccaggagcctagagtgggaaaggcacctgggggagccctggtgaagggctggacctgactcgtggcggcaggaggaagacctggctttcttggtttgtccagctctggggagcagccttccctactcactttccccttgcggcaccaaatggtcannnnnnnnnnnnnnnnnnnnnnnnnnnatagcaagccagaacccccattcccatccacatgggtctgtggctgggtgcaggccatgaaaacggacaccacgagacagaagtggggactgcctggccacccagcgccttcccactccttaagcaagcacaaagaagataaggcagagaactgtcagagctgaaagttcctttgnnnnnnnnnnnnnnnnnnnnnnnnnnnngtggcagccaggcagcggagccctactagactgccagtctcatgcacccagacctgtggccagactgtggcctctggctgcctcaggcacttgcctctttgcatcgggttttcctccattagtaactacagctgaaacagacatcctccacattgtgcacactggttttgcctttgtcctcgagagtnnnnnnnnnnnnnnnnnnnnnnacttgtgggtgtgggaggatggagagagaactctaacacaaaacatcttattaaaattgtacttgagagattaaaaaaaaaaaactcctgttgtatttgacagaa

SEQ ID NO: 13051 - DNA, 741 bp, Macaca Fascicularis
  misc_feature (1)...(741): n = A,T,C or G
ccnnnnnnnnnnggcaggagatagacatgccnnnnatcaagcactacaaagtgatgagtgtaggacaaannnnnnnnnnnnnnnnnnnnnnnnntgtaacactcccaaaccttttcagcgtcattgattattttgtgaaggagactcgaggaaatttaagaccatttatatgttcaactgatgaaaacactggtcaagaacccaatatggaagggagaagtgaaaagttgaagaaaaatccacacattgcatgaaatacaatnnnnnnnnnnnnnngtgtatcttggtaatttatattttcaaaatgaagttcttacttttaaagagaattatctatattctactgatcctgtttaccaagtcattcacctgaacaccagaattagaattaaacattgtaccatacaatttcattatcttatcagaatggaaccaattcacagggaaactagagactatggctgtggtggtaacctgcagatatacacattcccatgcactgacataagccgaaaacacatactactttctagatggaatttttttctttaggcctcaatgaaatacatttcccctatataattcccacagcagtttctctagttctaaatcctaccaattcccagaaaacctaagttttgttgaaatctgatttgaccaatttatcaaatacgtcattttaattacctagctggaagtcagagacatgaaatgtactagagaagcccttttccaatggaa

SEQ ID NO: 13052 - DNA, 780 bp, Macaca Fascicularis
  misc_feature (1)...(780): n = A,T,C or G
atcagcaaacactgctcataatgggaaagttaatggcttatgttttacaagtgatgggcttcacctcctcactgttggtacagataatcgaatgaggctctggaatagttccaatggagaaaacacacttttacannnnnnnnnnnnnnnnnnnnnnnnnnnnnnnnnnnnnnnnnnnnnnnnnnnnnnnnnnnnnnnnnnnnnnnnnnnnnnnnnnnnnnnnnnnnnnnnnnnnnnnnnnnnnncnnnnnnnnnnnnnnnnnatctcagaggtgtacccagctgtgtgaggtgaactatggaaaagtttgtaataacagtaaaaaaggattgnnnnnnnnnnnnnnntgtggctgnnnnnnnnnnnnnntttttnnnnnnnnnnnnnnnnnnnnnnnnnnttatacagtttactcaggagaacagataactatgcttaagggacattataaaactgttgactgctgtgtatttcagtcaaatttccaggaactttacagtggtagnnnnnnnnnnnnnnnnnnnnnnnnnnnnnnnnnnnnnnnnnnnnnnnnnnnnnnnnnnnnnnnnnnnnnnnnnnnnnnnnnnnnnnnnnnnnnnnnnnnnnnnnnnnnnnnnagcagtgatgaagaaggatgaannnnnnnnnnnnnnnnnnnnnnnntctgctgaaactttttaaatgagaccgtatgtttttttcaactgtacggtctattctctgacagctaaattagccctaaatgtgggtaatttttttccnnnntgtnnaaaatgagg

SEQ ID NO: 13053 - DNA, 701 bp, Macaca Fascicularis
  misc_feature (1)...(701): n = A,T,C or G
gtcaccgtcaatggggtaagaatctttttagcnnncagcttgacactcatagtcccatggagtcagggatggaccagacagagggaccagggataaaggagcccagacannnnnnnnnnnnnnnnnnnnnnnnnnnnnnnnnnnnnnnnnnnnnnnnnnagagcaaaacttgatggctttgcatatggaaaagaggcattggggctggagttttgaaaagtgagtaggannnnnnnnnnnnnnnnaaagtatgtattaattcgaagtggtaaacattgatagccacccccgctgggacaggtgtgccactgattcgcgaggcaggaggcgggggccagacttgggaacacgtgcagccctttctgggctggaaccagggtgcatgggttggggtagctgctgggagtgtgtgacctctgtcttgctttgtgcagaaacccttggaagatcagagccagctcctgaccctcgtctgccagttgtaccagggtgagaagccggatatctgccctccctcaacccactccctcaggggtgtctgcttcaagtgatggccggtgcgctgtggagagctgatgcaaggcaagtgggaacccggcttcctgcctttttttctgatccggaccctcggcacctgcttctcaccaactggaaaatttctatgcatcccatgaagaccagatacacaaaattccacccca

SEQ ID NO: 13054 - DNA, 717 bp, Macaca Fascicularis
  misc_feature (1)...(717): n = A,T,C or G
cacgtggccgagggcatggagtacctggagagcaagaagctggtgcaccgcgacctggccgcccgcaacatcctggtctccgaggacctggtggccnnnnnnnnnnnnnnnnnnnnnnnnnnnncagagcggaaagggctggactcgagccggctgcccgtcaagtggacggcgcccgaggctctcaaacacgggaagttcaccagcaagtcggatgtctggagttttggggtgctgctctgggaggtcttctcatatggacgggctccgtaccctaaaatgtcacttaaggaggtgtcggaagccgtggagaaggggtatcgcatggagccccctgagggctgtccaggccctgtgcacgtcctcatgagcagctgctgggaggcagagcccgcccgccggccacnnnnnnnnnnnnnnnnnnnnnnnnnnnnccgggagctgcgcagcgcgggtgccccggcctccgtctcagnnnnnnnnnnnnnnggctccacctcgccccgaagccaggagccctgaccccacccagtggggcccttggccccagaggaccaagagagtgggcagtgcggcgtggggacaccggccaggcccaaggagggtccaggtcggcaaggcatcgtcctggtgcccacggcaggggctggcccgcgtaaggggctctgggcggcccgtgaacaccccagacctgcgaaggcgaaggatgatcgcccc

SEQ ID NO: 13055 - DNA, 781 bp, Macaca Fascicularis
  misc_feature (1)...(781): n = A,T,C or G
ggccattgatgtgaattcatgaaggcnnngcatcannnnnnnnnnnnnnnnnntatcctggctaaggcagacacactgacacctccagaagtggaccgaaagaaacgcaaaatccgggaggagattgagcattttggaatcaagatctatcagttcccagactgtgactctgacgaggatgaggacttcaaattgcaggaccaagccctaaaggaaagcatcccatttgcagtaattggcagcaacactgtagtagaggccagagggcggcgagttcggggtcgactctacccctggggcatcgtggaagtggaaaacccagggcactgcgactttgtgaagctgaggacaatgctggtacgtacccacatgcaggacctgaaggatgtgacgcgggagacacattatgagaactaccgggcacagtgcatccagagcatgacccgcctggtggtaaaggaacgcaatcgcaacaaactgactcgagagagtggtaccgacttccccatccctgctgtcccaccagggacagatccagaaactgagaagcttatccgannnnnnnnnnnnnnnnnnnnnnnnnnnnaggagatgctacacaaaatacaaaaacagatgaaggagacctattaactggctttcagccctggatnnnnnnnnnnnnnnnnntnnnnnnnnnnnnnnnnnncccctcccagcaccagctttgctcaggccccttcagctactgccacttcgccttacatccctgctgactgcccagagactcagaggaaataaa

SEQ ID NO: 13056 - DNA, 768 bp, Macaca Fascicularis
  misc_feature (1)...(768): n = A,T,C or G
acatgagaacatggatgctatctctcaaaggccatggaaatagcatctcaaagnnnnnnnnnnnnnnnnnnnagccaagatcatgtggatgaagaggnnnnnaagcgagcatatattcctagaaccttaaatgaagtaaaacattatgagagggatatggacctaattatgaaattgaaggaagaggacatggccgtgaatgcccaacaagataatattctataccaaactgtcnnnnnnnnnnnnnaagatttgtcaggagttcagaaggtccctgcactcctagaaaatcaagtggaggaaaggacttgttttgattcagaagatactggaagctttgagtgctnnnnnnnnnnnnnnnnnnnnnnnnnagaccatgcccgccccaagaaacacaccacgggccctgacgttgttaaaaaagaaagaaaaaagatggtcaaggaagcccagagagagaaaagaaaaaacaaaattcctaaacatgtgaaaaaaagaaaggagaagacagccaagacgaaaaaaggcaaatagaacgagaaccatattatgtacagtcattgtcatcagttacttttctcgnnnnnnnnnnnnnnnnnnnnnnnnnnnnnnnnnnnnnattttaaccaaattgtcatcatgtctgtctgtgaagacggattcagtgttttcatgtaattatgtaaaaaactctaagctctagagtctagatccagtccctgactctggtgtgacagaggatttattaagctattatttaataaagaa

SEQ ID NO: 13057 - DNA, 762 bp, Macaca Fascicularis
  misc_feature (1)...(762): n = A,T,C or G
gtgggatgggcagggcgcctttgactttgctcaggtctnnnnnnnnacccagcnnnnnnnnnnnnnnnnnnnnnnnnnnnnnnnnnnnnnnnnnnnnnnnnnnnnnnnnnnnnnnnnnnnnnggggcatcacagcagaggtgatgatgggcnnnnnnnnnnnnnnnnngagtggtatctgcatggactcgggaggctttcgcaccacggccagcatggtgtctgtcctgccccaggatcccacacagccctgcgtgcactttcttactgccacgccagacccatccaggtctgtnnnnnnnnnnnnnnnnnttggggtgggggtggcccaggccccccaggtgctgtcccccacttttggagcacaggaccctgttcggaccctgnnnnnnnnnnnnnnnnnnnnnnnnnnnnnnnacaccctctatcgtggacaccaggcagccctggggctgatggagagtgatcaggatcgagggcagcagctccagcagaaacagcaggatctggagcaggaaggcctcaaggccacacaggggctgctggccagtgagtgggccccatccctccnnnnnnnnnnnnnnnnnnnncaggcctttgtgaagagnnnnnnnnnnnnnnnnnnntcagcttcatagcttctgctggcctggggtgggcccagaacccctcggnnnnnnnnnnnnnnnnnnnnnnnnnnnnnnnnnnnnnnnnnnnnnngctcctaggccattncgagcggccagcttggccnnnnnnnnaa

SEQ ID NO: 13058 - DNA, 783 bp, Macaca Fascicularis
  misc_feature (1)...(783): n = A,T,C or G
accagaggaaannnnnaaagcattagttgctcaaactgttcaacatcagggagttttatattggagaaaaaccctgcaaatgtaataaatatggaaaaacattttttttaaaaaactacagcttggaaaacagttcattctaaaatatatttttgcagatgcagtaaatatgaaaaatatttaatccaaaattaagtctatgtaaatatcagagaattcacagtggaaatcataaggcataaggcactgacacttcagacattacactaaattagagtgttgggtataggaaattcaaaactagaattgttaaataagttatttatatataactttaaaagaagtggaagattttttggagatttataattacattcaaagtatacttttttcttgaaaaaaattacagattttttgaaaagcaattaataatgtaatttaactctcaaattcatgtttttcttcattcctattgtattcacatgtgaaatcaagtgatnnnnnnnnnnnnnnnnnnngatatgagagattcttttttaaaggtgggcattatttatgcccctttctatggaagagtaagaaaattaaaatataagatgcatgaggaaaatgtagagatgctctttgtggttaacttagaatattaagtgctgcttgaggtacatgtttagactaatattcttttgcagtatagtgagaaaacattttcagttagaattagtgtataattttgttgattgtgcttttatgtaataaaatgcagtactttaaaaaaattgattg

SEQ ID NO: 13059 - DNA, 747 bp, Macaca Fascicularis
cccaggatttctggtactctctttttggtactttcttctatctattcttacttaccttgattagtatcttgaaccaagaacttcctgggtctctattccaatacctttttcttaagaaacgattccctcacctttcttattgacagaataaagaaagagagcttttatttgcttttcctcttctctcattctccttcctggatttctggttaagaagaataaatcagaataagcaaaaaagttttgaggtaggacatatattttaatgattaactcaatcaaggtctgtgcagctttattctagagactgattcctcttctcaagttgtgtatattacagtaaaggtgaatggatacccccccacacacacacacatatgtatttgtatatgtgtgcagaggatgttttcttaagaagaaactagatcatagagtgctttaaaatcagttaatcatttagcatgcttatgaatctggttagtgggatgtttgcattgaatattctcaagttaatgaggtattctaaattaattttaacttctgagtctccaggaaagctttcagaatttatacttactacccaggtgagaagttgcagtagagtaaaagggaatctttcccaaacttgtggaattttagagtcggaacgggccttagaaattccagtgcttcatttgccacatgagaaggctgatatctgaaccaaacagataacttcagaacctctggataccaaactatgaagct

SEQ ID NO: 13060 - DNA, 777 bp, Macaca Fascicularis
  misc_feature (1)...(777): n = A,T,C or G
acggctggcagannnncaagaactgcaccagagtgnccgggcagctgctgaagagcccgcagggaaggaggaggtctataaacagctggtgtcagagctggagactctgcccagagatgtgtcccggctggcctacacccagcgnnnnnnnnnnnnnnnnggcaacatccggaagcagaaggaagagatcaccaagatcttgtctgacacgaaggagcttcagaaggaaatcaactccctatctgggaagctggaccggacgtttgcggtgactgatgagcttgtgttcaaggatgccaagaaggacgatgctgttcggaaggcctataagtatctagctgccctgcacgagaactgcagccagctcatccagaccattgaggacacaggcaccatcatgcgggaggttcgagacctcgaggagcagatcgagacagagctgggcaagaagaccctcagcaacctggagaagatccgggaggactaccgagccctccgccaggagaacgctggcctcctgggccgggtccgggaggcctgaggagctgccggcagaggtctctccccagcctcaggcagggatttggggtgctagaggcagtggccaagcacatgccctagctacttcctccactgcccagttccttctgctgcagccttggacccagacccctgcccactgaccgcagcccttatatggggtgatagtccagcatgtggggagctcggctgcagtttattggggatggtactgtgggttgggggcctgaatcccaa

SEQ ID NO: 13061 - DNA, 766 bp, Macaca Fascicularis
  misc_feature (1)...(766): n = A,T,C or G
caggnnnnnnnnnnnnnnnnnnnnnnnnnnnnnttccataaatccttgatgattagcaacacccatttttctttttgccaacccaagagttttgggagttgtagttaatcatcaaaagactttggggcttcctagttgtttgggccaaggacctgagannnnnnnggttgactttacccatttgggtgtgagtattgagcatctgttcccctttagatctctgaagccagaaatgggatgcttgggaagacccctagctgtccttttccctctccnnnnnnnnnnnnnnnnnnnnttatagtcatatatatcacccagacataaaagaaaagacacattttttaggaaatgtttttaataaaagaaaattacaaaaaaaaaaattttaannnnnnnnnnnnnnnngtgtgctccccattctgctccttccttccccatcgnnnnnnnnnnnnnnnnnnnnnnnnnnnnnnnnnnnnnnnnnnnnnnnnnnnnnnnnnnnnnnnnnnnnnnnnnnnnnnnnnnnnnnnnnnnnnnnntcatttctcatccacataccctgacctggccccctcagtgttgtcaccagatctgatttgtaacccactgagaggacagagagatataagtgccctctcccgccctcttcctactggtctctctatgcctctctacagtctcgtctcttttaccctggcccctctcccttgggctctgatgaaaaattgctgactgtagctttggaagtttagctctgagaactgtagat

SEQ ID NO: 13062 - DNA, 1179 bp, Macaca Fascicularis
  misc_feature (1)...(1179): n = A,T,C or G
ggnnnnnnnnnnnnnnnnntgtggtactacagtgaagaacgaaagctnnnnagcattgttcatggttgccgggcnnntcgacagaacggacgcgatcctcccgatccctatgtgtccctgttgctgctgccagacaagaaccgaggcaccaagaggaagacctcccagaagaagcggaccctgagtcccgaatttaatgaacggtttgagtgggaactccccctggatgaggccctgagacgaaagctggatgtctctgtcaagtctaattcctnnnnnnnntcaagagagcgtgagctgctggggaaggtgcagttggacctagctgagacagacctttcccagggtnnnnnnnnnnggtatgacctgatggacgacaaggacaagggcagctcctaggagctggcgagtcccagcctgactctgctctgtcttcctgccttcgtctcgctctgtcaccgcctcaatgnnnnnnnnnnnnnnntangtccaannggcagagnnngtgcnnntcagccctttcacctaacaggcccatattcgggcctttgaccaaagagaagaaccgtatgttccctttactgcacggcctttatccttctgggcccctggggtgtggacctgagctggctgtttcctgctctgcctgcacattgttctcccttcctcccaactcctcagggcctccagtatctgtgcctggccactggcagcactagcagnnnnnnnnnnnnnnnnnnnnacagctgannnnnnnnnnnnnnnnnnnnnnnnnnnnnngtcaccttcttccgtaccacacatgggtgggaannnnnnnnnnnnnnnnnnnccagctgtgagtctcttagactactgcatgtagcaaannnnnnnnnnnnnnngcccccatgtccagttctgtccccactcttcnnnnnnnnnnnnnnnnnnnnntactgctctgatggctggggccagtctcttgtcactttggaagctggggacacttggattctacccaagcctccaagtagtggcatatcagttttggagctcctagctggtgatacacagagggctttggaggacttgggacagctgggccaattttttttgcccaagtgcctaggctgctaactcactgactagaactgaatctggtactctttagttttgcaccaannntgccnnnccact

SEQ ID NO: 13063 - DNA, 727 bp, Macaca Fascicularis
  misc_feature (1)...(727): n = A,T,C or G
gcctgacaaacacgatggtgannannatcncatggaaagtgataattcatttgatctgtttgattcctnnnnnnnnnnnnnnnnnnnnnnnnnnnnnnnnnnnnnnnnactnnctgagaatgacacggactccctctcctgtgacagtggcagctcggcaactagcactccgtgtgtgtcccgcctggtcgctggccacnnnnnnnnnnnnnnnnnnnncggccgccacgtcctgggcctgattgaggactatgaggccctgctcnnnnnnnnnnnnnnnnnnnnnnggctccttgccgaaatggacattcaaacccaagaggctcccagctacacaagtcaagagctgggaacaaagggtccacacccagcaccactgagcaagtttgtgagcagcgtgagcacagccaagctgaccctggaagaggccnnnnnnnnnnnnnnnnnnnnnnnnnnnnnctcagtccccgaagatggccagtgcccccttcactgtgagcagattggagaaatgaaggcagaggtcaccaaactacataaaaaattgtttgaacaagaaaagaagttgcaaaacaccatgaagcttttgcagctgagcaagcgccaggaaaaagtcatctttgatcagttggtcgtaacccacaaaatccttcggaaggccagaggaaacctggagcttaggcccgggggnnnnnnnnnnnnnnnnnnnnnnnccagcagaccaggc

SEQ ID NO: 13064 - DNA, 694 bp, Macaca Fascicularis
  misc_feature (1)...(694): n = A,T,C or G
gaagcagcatgagatccggaggctgggagagttggtgaagaagcnnnnnnnnnnnnnnngctgcacccaggttgtagacgtgggctcaggccagggccatctctcccgcttcatggctcttggcctggggttgatggtgaagagcatcgaaggggatcagagactggtggagagagcccagcggctggaccaggannnnnnnnnnnnnnnnnngaaagaggagaagaggaacccgcagatatgtgcagcgggggctacagcgagtggggctggacccccagctgccactgnnnnnnnnnnnnnttcaggcccaccaggcccaggagaaccgtgtggtggccttcttcagcctggctctactgcttgccccactggtggagacgcttattctactggaccggctgctgtaccttcaggagcagggtttccatgctgagctcctgcccatcttcagtcctgaactgtctcccagaaacctggttctggtggccaccaagatgcccctgggtcaggctttttctattctggagactgaagacagctgatgcagcctgaggacacatctcagaccccatcatctgaaagtgcccagatagcacagtggcagagtacacctcatacagagaagcagcatcctgcatcctcctgagtcgtggttccttcagtttcatcccctttctctccctccatggat

SEQ ID NO: 13065 - DNA, 710 bp, Macaca Fascicularis
  misc_feature (1)...(710): n = A,T,C or G
gannnnnnnnnnnnnnnnnnnnnnnnnnnnnnnnnnnnnnnnnnngagatcatcaacgagatggacatgaggagcaggggtgtgtggggcccnnnnnnnnnnnnnnnnnnnnnnnnnnngcggcatggatgggagttccccccgcacactactgaggccacctgcaacctttggtcagtctacgtgcatgaaacagtcctagggatccccagggctcaggcccacgaggctctgagccctccagagcgagagaagagaatcaaggcccacctgggaaagggagcccctctgtgtggctggaatnnntggacagccctggaaacatatctacagctccaggaagccttcgggtgggagccattcacccagctctttgctgagtaccagaccctctctcatctccccaaagacaacacnnnnnnnnnnnnnnnnnnnnnnnnnnnnnnnnnnnnnnnnnnnnagaagaacctggttcccttctttgaggcctggggctggcctgtccaggaggaggtggctgacagcctggcctccctaccagagtggcaggaaaaccccatgcaagtatacctccgtgccaaggagtgaaggatgccccgcaaggcgggagagaaaaagcagggtcacgccggcaactccaccactaggctttggccatgtgtgctcagtatnnnnnnnnnnnnnnnnnnnnnnnnnnnnaccactagatg

SEQ ID NO: 13066 - DNA, 709 bp, Macaca Fascicularis
  misc_feature (1)...(709): n = A,T,C or G
tcaccacatagtgtgctttgattgtattttggcttnnnnnnnnnnnnnnnnnnnnnntgggggaggatggaggcaactgacctctccaattgctgtgttgtattcctacccaatttcctgggcagttgannnnnnnnnnnnnnnnnnnnnnnnnnnnnnnnnnnnnnnnnnnnnttggaagaattgttcatctcttaggctttcatttggatgggnnnnnnnnnnnnnnnnnnnnnnnnnnnnnnnnnnnnntcttttgtttactgtttataccccttaattnnnnnnnnnnnnnnnnnnnnnnncttactatattaacctttcttgagatgcattgtcctgctaacccacaaacctgtttggaaataaacatggaagaatatctggcaggcaggcttttagaagacgacaaatcggtaagacttattcatggtttattgccaagagcagatnnnnnnnnnnnnnnnnnnnnnnnnnnnnnnnnnnnnnnnnncattgtattgtgatccaataacactttgtatgaaattnnnnnnnnnnnnnnnnngttgtgaaggggtagaagatctctgaaacttgtcttgagattgaactcattccctgttccacaaacccatatgtatcctttcctctaccaccaatttatttccaccatagtatgatgttttgggttgtatatttgttaaaannnattaannnaatttatgag

SEQ ID NO: 13067 - DNA, 551 bp, Macaca Fascicularis
aaaaaaaaaaaaacgatcatagtcttaggagttcatttaacccataggaactgttcacttatctcatgttagcattaccagtcagtgattaagtagaactacaagttgtataggctttattgcttattgctggtttatgaccttaataaagcgtaattatctattaccagcagggtgtttttaactgtgactattgtataaaaacaaatcttgatatccagaagcacatgaagtttgcaactttccaccctgcccatttttgtaaaactgcagtcatcttggaccttttaaaacacaaattttaaactcaaccaagctgtgataagtggaatggttactgtttatactgtggtatgtttttgattacagcagataatgctttcttttccagtcgtctttgagaataaaggaaaaaaaatcttcagatgcaatggttttgtgtagcatcttgtctatcatgttttgtaaatactggagaagctttgaccaatttgacttagagatggaatgtaactttgcttacaaaaattgctactaactcctgcttaagg

SEQ ID NO: 13068 - DNA, 714 bp, Macaca Fascicularis
  misc_feature (1)...(714): n = A,T,C or G
acgttgagannaagaagggcaagcaagagatgtttcatgctacggtggctacagagaaggaattcttctttgtaaaaagtttttaatannnnnnnnnnnnnnnnnttcattccaaagagaatgattataatatcaagatattatcagcacagtggtttcttagaggtaaatagcgcctcatgtgtgttagatgctaaatctgaccaaaaggttgatgtcccgctgaacattatcagaaaagctggtgaaaccccaaagatcaacacgcttcaaactcagccccttggaacaattgtgaatgggttgtttgtagtccagaaggtaacagaaaagaagaaaaatgtattatttgacctaagtgacaagactggggaaatggaagtattggcggttagaaacgaggacaccatgcaatgtaaggaaggagataaggttcgacttacattcttcacactgtcaaaaaatggagaaaaaccacagctgacatctggagttcatagcaccataaaggttattaaggccagtaaaaaaacatagagaaataaaaaggaccaattcaagccaactggtctaagcaggatttaattgaagaatacgtgatacatcttcttcaatcagattgtaagttacctgagagcagcagttcacaggctcctctctccaccaaattaggataggataannnntggataaacaaattcagaatatcaacag

SEQ ID NO: 13069 - DNA, 747 bp, Macaca Fascicularis
  misc_feature (1)...(747): n = A,T,C or G
cgtgatgctgacggaggtgcaggagagnnnnnnnnnnnnnnnnnnnnagtattggccaaccgagggctcagttactcatggagaaatannnnnnnnnnnnnnnnnnnnnnnnntttcagaagccatcagtatacgagacttcctggtcactttcaatcagccccaggcccgccaggaggagcaggtccgagtagnnnnnnnnnnnnnnnnnnnnnnnnnnnnnnnnnnnnnnnnnnnnnnnnnnnnnnnaggcatgnnnnnnnnnnnnnnnnnnnnnnnnnnnnnnnnnnnnnnnnnnnnnnnnnnnnnnnncactgtgcactgcagtgccggagctgggcgaacnnnnnnnnnnnnnnnnnnnnnnnnnnnnnnnnngcgagtaaaagccgagggacttttnnnnnnnnnnnnnnnnnnnnngagtttacgacttcagagaccacatatggtgcaaaccctggaacagtatgaattctgctacaaagtggtacaagattttattgatatattttctgattatgctaatttcaaatgaagattcctgccttaaaatattttttnnnnnnnnnnnnnnnntattttgtaaaaatcatgttaatttatttcatagttgacattaatatcttccctaatttctttgtatatattttgttatgccttaaaggccacttgctataaagttgttaaatcttaaatatgctttttaaaaattggaataatgtattaaggtcaaataatatctca

SEQ ID NO: 13070 - DNA, 662 bp, Macaca Fascicularis
  misc_feature (1)...(662): n = A,T,C or G
ctgccttcccgctccaggagctgccctgnnnnntgccggcagctgcagccaccgcaaggtgcgctggccccgaggccacctattccaacgtggggctggcggccctccccggggtcagcttggcggccagccctgtggtggctgagtatgcccgcgtccagaagcgcaaagggacccaacgcagtccccaagagccacagctggggaaggctgaggtgaccccggccgctcaggtggacgtcctgtactccagggtctgcaagcctaaaaggagggacccaggacccaccacagacccgctgaaccccaagggccagggagcgattctggccctggcgagtgacctggcctacgcgaccctcccgctcagggcnnnnnnnnnnnnnnncagccccctggaaaacgtgtatgagagcatccgggagctgggggactctgctggcaggagcagcacgtgcgggactcggacgccccctgcttccagctgccccagcctagggaggggctggagacccctccctgccccgaacacnnnnnnnnnnnnnnnnnnnnnnnnagagaggcccgtcccccgccccgccccgcctcacannnnnnnnnnnnnnncccaggtcccgggctgccagcccgtgaggtccgtgaggtcctggccgctctgacag

SEQ ID NO: 13071 - DNA, 702 bp, Macaca Fascicularis
  misc_feature (1)...(702): n = A,T,C or G
caggcgcacgccaccacaccncagctacctttttgtattttagtagacacagggtttcaccatgtcagccaggatggtctcgatctcctgaccttgtgatccgcctgcctcagcctcccaaagttttggcattacaggtgtgagccactgcaccgggcctgttccgtttttctagttaagggaactgaagctcagaagtgtcaccagcaggtgtacattcccgtgccagccttgccacccggcttttcccaggcaggctcctgtgtatccgctggccccagcccagtcctctgtctctaggctgcttccctcctgctgtctctcctgactctggccctgcttacagggccactacttgctggtgcctccataacaagcctctggcattgagcccccggcatgggaggggctgtggggtctgggtttccacaaggcttagccatggcagaacctcattttaactctttgcccctacaagcagcagtacttgccagaaccattcttgggattcaggagctctggcgaccaccttggcctctggccgtactcaggagggtggggttggatttgtgtagctgccagggccacacctgccagcagggggctgactggatccatgctttactgtgtttaacgggggtagcggggtccctacagccctcccagctaaacattggaacaaaacaccagccctttgtagca

SEQ ID NO: 13072 - DNA, 769 bp, Macaca Fascicularis
  misc_feature (1)...(769): n = A,T,C or G
tagtgacattgatacaaaaaaaaaaaaggaaagtaattaccttgtgttcccagaacactataattggagtgtatcttaattcagttaaatattattagtagacctggattttcccccttgaccccatcagtctattaaggttaaactgcaacttttatgaaatggtctttaatatttccacaataatcctgtgctatatttgttttaagaaacaaagtaactctatacacttcaagactttacaggnnnnnnnnnnnnnnnnnntgttggatcaattaataaagatgcaaaaaactttttatagagatgtaaaaacaaaagtataatggatcccctatttttctttaaattcaaaaaaaaaaaggtaaatgaactattctccttgtaaagctaaattccccattctgtctaataaaggaagactgaaaaaaggttttaaagaacataaatggaaagatacaaatgctttgaaggaataaacgaaacattaaaacagggtcaatccatttgaagaaaaagttggacaaaataatcagcattgctccctcttttatttaatatttgggtactgattatatccacatggaagtagaaggtaaggagtttaggaaaatattagaatctgcttacattcttgtttaagtgtttacacagtttggttcaattataaacatttggccttttactatgttatttttattttgtatgaatacattatcctccttatttatttttgttacatttattacttatgttattttgttatgca

SEQ ID NO: 13073 - DNA, 699 bp, Macaca Fascicularis
  misc_feature (1)...(699): n = A,T,C or G
cagccagtaggtaaagtcatctactgttctaatttntatgctgagggacaatgttgggtgttgggagccagaaggcttttttgacaggtcagaaataagattgacttgtgtgttgtatttcatctctctccagactctaggtatgtttccaactttatatatcacagtatttaaaaagacatgtttgcattgagaaattaaccctaaagggtttttgataggagggtgtagacctccagtacctttgtaactaaagtctgtctagtcattgtaaatatttatctgtcagttttgacagattggggccagcttgatgttttaaatcttcagcccggtatgaaaacttaaaggtatatattcaattttttaccattttattgaaaatatttaaaatctgtttttacagggtttttttttttttgtaatctgtgccatgaaatttgaaaaccaccaaaaatcaagggaacttttatatattcagttcattttctggtgtaatgttaaagttgtatagattattaatgcatgcccactgaatataaccctggttttgtgataaaactgcttagattttgttgatgacgttagattagtagttgcattaaataactaaattcccattgtgattattaattgaaattttgtctttaagcagagacttattcgtgaatataagctttgcgcctagagaatgtatgt

SEQ ID NO: 13074 - DNA, 765 bp, Macaca Fascicularis
  misc_feature (1)...(765): n = A,T,C or G
gccaagattccatactatnnntatattagagggacgtgtcaagnnnngaaggagcccatgtggttggataaaatcaagaaaaggctgaatgagcacagttacccccaagtggaggggtttgtacaagacatgcgcctcatcttccagaaccacagggcctcttacaagtacaaggattttggccaaatgggacttagactggaggctgagtttgagaagaatttcaaggaagtgtttgctattcaggaaacaaatgggaacaattgactggattagtggatgctgaaggcattcagcaaataacaccccaaaatatgccactggtttaccacttacaaaaaataaggtcacttgagcacagcacatgcagagaggggcttttctctgagcctccctcatctgcccaaagacaaatcctcaaaaggaaattcaatcatcatgannnnnnnnnnnnnnnatctcatcagtcagggaagagtaagtgcgatcacaggggaggatattggagttgacaccatcccatacagactctcacctctcctcctgagggctgctcnnnnnnnnnnnnnnnnnnnnnnnnnnnnnnnnnnnnnnnnccagccaagctttattcaggagactcttcttcccttcactctcccacttccgtggccacctccatgtagaagccccaagcccccgttctttttcatagctcaggatggtgtatggtgtatgagactcttcttggagtctcnnnnnnnnnnnnnnnnnnnnnnatannna

SEQ ID NO: 13075 - DNA, 761 bp, Macaca Fascicularis
  misc_feature (1)...(761): n = A,T,C or G
ccgcctgcctatagcttcaagtnnnannnnagatgaagaagaacaaatnnnnnnnnnnnnnnnnnnnnnnnnnnnnnnnnnnggggatcagttggaaagaaagctgaagaaagataaggctttgatgggccacttnnnnnnnnnnnnnnnctactctgttttcaagaccatcacagaccaggtcctaatgggtgtggacaccaggggagaatcagaggtcaaagctcagggctttaaggctgcccttgcnnnnnnnnnnnnnnnnnnnnnnnnnnnnnnnnnnnnnnnnnnnnnnnnnnnnnnnnnnnnnnnnnnnnnnnnnnnnnnnnnnnagaacttctcaccatggatccagcagcacggtggatgggaaaaaatacttgggatatcacatgaagaagtagactgaaatagcagatttgtcgtcaggaatactcatcgcctactgtggccctgtgtgcactggcctcagatggactacaggagattacaatgtacaaggcagagggagcactgnnnnnnnnnnnnnnnnnnnnnnnnnnnnnnnnnnnnnnnnnnnnnnnnncttgttcgtctccagctcatagaacgtagcagcgtagtccttgacattgatgtttttcaggccctccattgagtgcctgaggaaatctataaagataagtggcgatgttgttccaaacactcagaacagataccatcatcctgcctttgttagctgctgtagggaaagtgtgttacagatgtctgctgacctcaca

SEQ ID NO: 13076 - DNA, 626 bp, Macaca Fascicularis
taacatgttcaggcctttcctgacctaagcaaaagtctcaaagaggagcatatctgctggccctgcaccctgtcccgtcttgccccaggcagctgcgcagaagatggagctgtcgcaagcacgccatcgacgcagagtccaggaggaggaggaggctgtggggagaacacagcggcccctgggcaggaaggcgccgggaagcgcccgcatcaggagtcacgtgggaagacggcaggaagcacggctgtttcagcaaaggctgcacagcggccccattatgcggatgcttctcatccccacgagacccctctgcagggcaattcaggctctctgttcctgggcccccatctggccggaaaccagagcccagggaaagcgctgttcaggatcatccaagtttggacgcagccactggaggggccctgagggtctccaagtgctggagccacgtcacgggggccacttcccacaggaccggctgctgtgttcaccccacgtgctggctccgaggagtcggagctggggatctcccctctcctgcggcctcaccgttgggaaaaccaccttgcaggactgcagggtttcaggaggacgcggcactgccctggcctggcaggaactcagca

SEQ ID NO: 13077 - DNA, 560 bp, Macaca Fascicularis
  misc_feature (1)...(560): n = A,T,C or G
cattctgggctcctcacatcttcccaagcattnnnnnnnnnnnnnnnnnnnnnnnnnaaggctggaggtggggtgagggctgagagcctgaggaggagtcttcaggagctgcctacttggccagccccatgggctccccacacgctgcacagcccccctttcacagcccactcccaagggacccatagcttcctgcctcctgcttgccnnnnnnnnnnnnnnnnnnnnnnnnnnnnnnnnnnnnnntcttgagtagctcttgctcctggcttgggctcctgatggcctgccagcaccctctctagtccatgccaggctgcccactgcctgccactgctcacctctccaatctcccctaaaccccacccccactagggtgacagaactggttcagcaggtgacaggccaggtacttgctcctgggctgcgggtgttggtgctggagctgagctgtgagggtgaagaggaagacactgcctttccaccnnnnnnnnnnnagctgtgacaaggcagccaccccatcacctagctcaatggagccctggatcccaagcactgca

SEQ ID NO: 13078 - DNA, 619 bp, Macaca Fascicularis
  misc_feature (1)...(619): n = A,T,C or G
agtgcgaggaagaagggtttagcatttgtgtggaagtgaacggcaaggagcagacgatgtatgagtgtgaggcgggcgctctgagatgcagagggcagagcatctcggtctccagcataaggccttgtgctgcggaaacccagtaggctcctggaagccctggtcgacttgctcagaatccagcaggcagctggggctgagtgaaaatatctgcacagctgggcactggacagatttccttcttctccagtatctactttccccctcagctcccagccatctgtaaaaacacaaccctttgttctcccaaatatgaatcaaattactcttttgcctcctttttaatgtcagtcaggatatcagcctttgcacaggctggctgcgtgttcttgaaaaacatgttaccttctgtgagccttggttttttcaaatctgtaaaattagaggattgcgctaaagaaacttgaatgctccatttaggcctatcattttattaagtatgattgacacagcccatgggctagaacacactctacaaaatgactaggaaaacagaaagaatatgatttcctgattagagaggttgattttcctcaattgaaaccanaatacaaggagg

SEQ ID NO: 13079 - DNA, 695 bp, Macaca Fascicularis
  misc_feature (1)...(695): n = A,T,C or G
cagctgtagctgcacccccannnnntgctctggctcccaggctctcccggctgggcgctgcgtggccttgcccctcccgctggcagctcctcaggggaacaggggccaccagaggctcatttctcccctctcctgggccgggggagggtattttccctgcctcctgcctctgaggcccaaagcagcatcttccagcactttccatcgaggactcgggtggcagagtgtgggtgcagcctggctgttgctcacccaagtgctagctgtgcactttgtgtccgctgagagcgaccagaccttccgtgtcctcgggcagctgcaactccccccaagaccccgcggctgggtgggaggaacaaacaacgcagaccacgagcgagtgcctgggagggaggggcccagagaggttttggagccatcacgggtgagggtgaagggccaccgaggtcccgcgcacccccatccatcnnnnnnnnnnnnnnnnnnnnnnnnnnnnnnntctccactcaccagcaggcggtctcgtcttcagggattgtgccggcgtcccgcttggctccctgggggaatggcccaggcgggctgcagttcctcctcagggtcttctcccgacaaggagtcccccgggtggctgctgcattctctgcttccctagtcgctgggcttcgccccacctgggaagggcagtgtgctct

SEQ ID NO: 13080 - DNA, 720 bp, Macaca Fascicularis
  misc_feature (1)...(720): n = A,T,C or G
gcagcgagcagggcagcccaagcacnnnnngnnctggggagttggggttatggcgagctcnnngagtcaagaggtgtggaaaacatgtactctactcctgcttacccagatgccacagtgcacagacaactcctggctctggtggaagggaaggatggcagagacattgaatcagaaaatccgtgttgccgacgtgctggaagatgaccccggctacctacctcacgtctacagccaggagggggagtgtggaggggcctcatccctcagctctctggccagcttggaacagggactgccgcctgatttgctggactctctgggttcaaaagcgactccgttggaggaaatatgttcagagtcaggtggtccttcctaaagaaatgtgtattttggagaattgaaataattcatggaggggaatcactattcatgggtttttcccctctgctcttcttttccctccttaaaaaaaaaatcaccttctagtcctagatgaggacacactattagtttgaattaaatgctttggtattctgagaccagccatcttgaaccaaagcaaaaccacaagttgtgcttttttaaaatttgatttgtcatattttctagagaaacttgaatttaattgtgttattcttagcttccactgacagcctaactttgagggtaaatgaaaatataacccattggttacccagccacttgggaacagcaggt

SEQ ID NO: 13081 - DNA, 739 bp, Macaca Fascicularis
  misc_feature (1)...(739): n = A,T,C or G
cagaaagagctcgggaccccaatgctaacaagcgtcacacggcaatgagaggcctgggaaccannnnnnnnnnnnnnnnngacaaggtgagaaagcataagaaaattgtcctcnnnnnnnnngtgtacggattgtatgaccctgtgagttnnnnnnnnnnnnnnnagagtatgaagactctgaccgtcgttctgggcaagatccaggggaaaggtttgggttccttcttcatagacatcacacttcagaccaggactttattagatgatgagaacgacagtctgagatactcggcctttgttttgtttgggcaattggctgcctttgccgggaggaaatggaaaaaatttttcaccggtcaggttaagcagacacgagattccctcctgatccatttacaggacagaaacccccaggttgccaaggcttgcaaaacaacatttcgagcctgttctccatatctgaaactaaggaaggaatacagcttccagagcgaagaagatcaaaggaacactaagctctaccggcagctgagccattatcatccagagatcctgcagttcttctacgcaaataaaattctgtaagcgcagagcagcagggaaatggttctatgtgagggcattgctgagccatcgtgttcccctgttttatctcactggatgcctcttctccttgcctcttgggattgtaatggaaaagagggtgctgggagagcaatcaaaggcaaaaataatac

SEQ ID NO: 13082 - DNA, 754 bp, Macaca Fascicularis
  misc_feature (1)...(754): n = A,T,C or G
tgcacttgcagttcccctggctggggaggcctcacaatcatggcagaaggtgaaaggcatgcctcacatggcggcagacaagagaagagagcttgggcaaggaaatttccagttttaaaatcannnnnnnnnnnnnnnnnnnnnnnnnnnnncaagagcagtgcaggaaggacctgcccccatgattcagttgcctcccaccgggtcccttccacaacatgtgaggcttcaagatgagatttgggtggggaacagccaaannnnnnnnnnnnnnnnnnnnnnnnntttgcatcattaaaatgtcagcacagctacttccccttcatagtggccaatagagttgggctgggagtggcagtggtaaacacttacctcatactatnnnnnnnnnnnnnnnnatggtgtgtattcacaacagtatgagtaacaataaatgagaagttttcagtcacagatgtnnnnnnnnnnnnnnnaaattgataaatatacatgtatacttacataggcaacagaatggaagcactgatagaaaataagacacacatacaactttgggagaagctaaaagtattttcagctagaaaagatataattggggaaaattattttcctaccagttgaaagaacaaatcttcctttcatactcttgattgtgcatgtatatggtgtctatttgcagggtttgtgtacttttctatagatactgtggaattctcttaacagattttggttgcaccatacttgattacataca

SEQ ID NO: 13083 - DNA, 778 bp, Macaca Fascicularis
  misc_feature (1)...(778): n = A,T,C or G
acagacaatgctcagaaatnnatgctgactgtacacaagaacctcacataagaaataccagaatccaactttgatactgagagacatattgatatcattattatatgtaatccaattctgaactgtgtgtgtatatatagagagataataaattcaaaattatgttctcatttttccccaggaactcaaaaattcatttcactggctctttgtcgagagtactagacgttaaattaataaataatgcatttaatgaggcaacagtacttgaaagtttttcattcatcgtaagaactttataggcattaaataaggcattaaattggcaaataagatctggaagcagaaaagcaaaaaaggtattgctaaaatgaggcctccatgcaaaacacatacttctgctcccctgtataatattcctcccatttatttaacttttttctgctcccacctatggggaccaaagggccttttccttcggaagtggagatacgtggccatctccccctccctttttcctctccttctgttcttcccccatagaaagtactttgaaatagcacagtccatccttgcacgtgcacaagctatcatttgagtaaaaatatacacggagtaaaaatcacattaagcatcagattcaacttatattttctatttcttctttttcctttcccttctcccaccttctactgggcagaattatatcttaatcaaatttgtatcctatgccatagatggaaatgtgcaacatatgatatttgttaaatacatttgt

SEQ ID NO: 13084 - DNA, 744 bp, Macaca Fascicularis
  misc_feature (1)...(744): n = A,T,C or G
attgaaagcatggtttgtacacaacatttttggaaggacatataaagtgaatacaaccaaatatattaaaatggtttcaattaccagcattgaaacagtgcaaaaaaaaagccaaatacaattgcacagatagtggactcccttagatcttgaacgtgaacttgattcctgacctctcccattatcattccaagtgaaaaatgaaagtatggggctctcttagcttcttggttagtatgatacatcgtgttcatctgagcaaaatcacactagcatcacagtagaagtgcccatttcagccaatctggtaaaaattgcaagttggcaccaagtgaaccaatggataccctagggcgctgacaattctcagagaatacatagaaatgcttgagggttgtgtcggttcccctggccagtttgtcaggttgtttatccagatgccccatttgtaaagtagactgaaatctcggtttagggctgaccccaagaaacagtctggtccgtgctttggtatggcagactccagtgtgcatagcagctgctatcttgctacaagttactcagcttaagttcagactgtgattggtggctcatttcagaagttttgagattgtactgattgatcttggcattttcaagtttggatttcatgtccagtggcttttcaaaaaagttgactaatgnnnnnnnnnnnnnnnnnnnnnnctaaatatgttcnnnnnnnnnagtccagtccgcttgtgc

SEQ ID NO: 13085 - DNA, 744 bp, Macaca Fascicularis
  misc_feature (1)...(744): n = A,T,C or G
agcagatcatgnntnnggaaagccnnnaaaccaaaanagaaaactaagaagagaagacacaagtcgaacagtcctgagagtgagacagaccctgaggagaaagctggcaaggagagcgatgagaaagaacaagaacaggacaaggacagggagctccggcaggcagagctccctaaccgttccccaggctttggaatcaagaaggagaagacaggctgggacacgtcagaaagtgagctgagtgagggtgagctggagaggcggcggcggacactcctacagcagctggacgatcaccagtgacccgatgagctgttctctgcctcgggtctgtgtgaggccgtggctcctgggccaccctcaccatctgcctcagacttcttccttagtctggtctgtgtccactttttctaaagtaaccccacccccagcacaccattgttggcacctctcaaggttgctgttggtgttcaaggttcccctactccctggactagtgcagtccttgccctcagccccagaccagagatgggtggtatgtgccatgtggggtgggtgatgccaatagataaaagtgtgagagaaggggtctccagggaagagtgacaggttggtggacacagcctgggtggcagagggcagggtcgtcaccctctnnnnnnnnnnnnnnntcctgcctgccctggtcctgaggctccaccacttcttcctccacccaggacctaatgtacgtgtgttttgttt

SEQ ID NO: 13086 - DNA, 737 bp, Macaca Fascicularis
  misc_feature (1)...(737): n = A,T,C or G
acnnnncactgcagnnnnnnnnngcggtgagactcagatgcccgcgtcgaggctgctgctacgtggtattactctctggagcactccacggacgactacgcctccttctcccgggcannnnnnnnnnnnnnnnnggactactttatcatctgccctataatcgacatggccagtgcctgggcaaagagggcacgaggaaatgtcttcatgtaccatgctcccgaaagctannnnnnnnnnnnnnnnnnnnnnnnnnnnnnnnnnnnntttgcctttgggcttcccttctacccagcatacgaggggcagttttctctggaggagaagagccnnnnnnnnnnnnnnntgcagtacttttcacaattcatcagatcaggaaatcccaactacccttatgagttctcacggaaagtacccacatatgcaacccccaggccagatttagtaccatatgcaggtggagagaattacaaggagttcagtgcactgctccccaatcgacagggcctgaagagannnnnnnnnnnnnnnnnnnnnnnnnnnnnnnnnnnnnnnnnnnnnnnnnnagacggagccaagggcgggcagtcggcagaaagtgaagaagaagagttgacggctggatctgggctgagagaagatctcctaagcctccaggaaccaggctctaagagctacagcaagtgaccagcccctgagctcccnnnaaaactccacccaaggctacccactatggt

SEQ ID NO: 13087 - DNA, 692 bp, Macaca Fascicularis
  misc_feature (1)...(692): n = A,T,C or G
caaggtgaagctggtggtgtctcgaggcnnnnnngtgnntgtggagctgccttttgttcttatgcaccccaagccccacgaccacacccccctccccagaccccagtcagctgctccggagacagacgtccccgtggacaccaacctcattgaatttgataccaactatgccacagatgatgacattgtgtttgaggactttgcccggcttcgnnnnnnnnnnnnnnnnnnnnnnnnnnnnnnnnaccaactctgctaggaagcagggcgggaagaagggaggggatggggttggaagaggtgaagacaggaccaagatccccactgtcactgggggattgtcccagcctctcttcccttcccctccacctggaagcttcttcaaccaaccccttcactctcccccgcaccccccaccatgatacgcactggaccctctcttgctgaatgtgggcattaattttttgactgcagctctgcttctccagccccgcagtgggtggcaagctgtgttcatacctaaattttctggaaggggacagtaaaaagaggagtgacaggagggaaagagggagacaaaactcccactcaacctcacaccaacacctcccatgatcactccgtctgcccccattccttcacgaggagaccctttgtggacaaggctgtttctttgtttctgagcataaaga

SEQ ID NO: 13088 - DNA, 661 bp, Macaca Fascicularis
  misc_feature (1)...(661): n = A,T,C or G
gacatccagtacactgtttgtagaaatgtgagcgtgnnnngctggctctcttctgtcatgaaccctgccgccccctgcatcaattggctaccgactccaccttctccctggtgagtcctaggacgggaaagtcggcggggggggggggcggtggtggctgccgggtctcaccctcaacctatgtatgtatatgtgtgtctttgtgtgtgtatgtgtgatctctgcctgtaggaccagcccggtggcaccctggatctgaccctgatccgcgcccgcctgcaggagaagttgtcacctccctacagctccccacagnnnnnnnnnnnnnnnnnnnnnnnnntgttcaagcaattcaacaagttaactgaggacaaggcagacgtgcagtccatcatcggcctgcnnnnnnnnnnnnnnnnnnnnnnnnnnnnnnncttcggtgacaccaagttctctgctgtgctggtggagcccccgccgatgagcctgcctggtgctggcctgagttcccaggagctgtctggtggccctggtgatggcccctgaggctggagcccccatggccagcccagcctggctctgttctctgtcttgtcaccccatccccactcccctggtggcctgactcccactccctggtggccccatcccccagttcctc

SEQ ID NO: 13089 - DNA, 819 bp, Macaca Fascicularis
  misc_feature (1)...(819): n = A,T,C or G
gaagttattgtantccaagannnntaagcataaanntaaaagnnggaaggaaggaagagaggtagagatacaagatgaaatcctgtnaaaaaattgaaggaaaaccagaaactgagagtgaaccaaagcatgaggaagagccaaagcctgaggaaaagccagaggaggaggaggagaagctagaggaggaggccaaagcaaaagcaacttttagagaaaggctgattcaatctctccaggagcttaaagaagatatacacaacaggcacttaagcaatgaagatatgtttagagaagtggatgaaatagacgagataaggagagtcagaaacaaactcatagtgatgcgttggaaggttaatcgaaaccacccttacccctatctaatgtagtttaccttgacttttatctgatattaacaataccatatagcttgctttttattagcatttcctgatattcctttgtccatatttctacttataacctgttcctattaatggttttagatgtatctcttgttatctgcatctcattgtttattgtattttgaaccaatctacaagtctctgtcttttaataaaagaactttactcatttgtaaaaaagaggttcttggtaggatataaaatggaaaaaaggctaagtaatatgtgaatatcatatttttgaaaggtaaaaagtacatttgcatattacatatacggacataacttgtgaaggatgaaagaaagtatagcctctccgtggtgggattatgaatgatttttctccttttgcttatttgtattttctatattcctaaannnaacacacact

SEQ ID NO: 13090 - DNA, 745 bp, Macaca Fascicularis
  misc_feature (1)...(745): n = A,T,C or G
aaggctcattgctcaaaggtatttatgcaagtatcaggagccgataccttgtgagcagttggttacagcactgtgtgatatcaagcaagcatatacacaatttggtggaaaacgtccatttggtgtttcattgctgtacattggttgggataagcactatggctttcagctctatcagagtgacccaagtggaaattacgggggatggaaggccacatgcattggaaataatagcgctgcagctgtgtcaatgttgaaacaagactacaaagaaggagaaatgaccttgaagtcagcacttgctttagctatcaaagtactaaataagaccatggatgttagtaaactctccgctgaaaaagtggaaattgcaacactaacaagagagaatggaaagacggtaatcagagttctcaaacaaaaagaagtggaacagttgatcaaaaaacatgaggaannnnnnnnnnnnnnnnagcgtgagaagaaagaaaaagaacagaaagaaaaggataaatagacaaaattggagattttattactcatttggggcaccatttcagtgtaaaagctgtcctactcttccacactaggaaggctttgactttttttaactggtgcagtgggaaaataggacattacatactgaattgggtccttgtcatttctgtccaattgaatactttattgtaatgatgatggttactcttcatggacatcttaatcttccacacacatcctctttttt

SEQ ID NO: 13091 - DNA, 763 bp, Macaca Fascicularis
  misc_feature (1)...(763): n = A,T,C or G
aggggtcctgaggtgagtcaatggtttcnnnntccccaaagtcactcctgttttgtttttatttgtttttctttggggattttgtttgtttattttggggactggcaatccaaaacagaaaatctgatcctttgaggctctgcaggaaaatcagctgcctctaccaatcaccctctatcagcagtggcccgggaaggagatcaaccatcttcggccaatattgaaacatgggcagcttccttcaggatgatcaccgaggctcccgtgactttgaactccctactgtccagaatccaggggccacgatggggactgcggaattacgagggctgnnnnnnnnnnnnnnnnnnnnnnnnnnnnnnnnnntgactgattcatgggaaagggctttgaaggaactatttcagtgcacacgcaaggtacgaacctctcaggcctttagaagaactttagtaactcatgcaagcccagttctgaagatcgacgtatccatctagagacctacaggaagaacgcgattgggttcctctggttcttgcctgcttcactgtggatgggaagaggtgacaacctcagtctccctttgggacctggccaagggtaggcaaccaccttcaccttcacacagattgaggagacactggactttttacccattttctttaatcttcaatattaatgttgtgtttacattgatgagaacgagagttaatgccctaccctctgctgggctgtttgtattgagttgcaatgtgaccagcga

SEQ ID NO: 13092 - DNA, 751 bp, Macaca Fascicularis
  misc_feature (1)...(751): n = A,T,C or G
ggcatgatgagcgccaatgtgtactactacacccggatgatgtcacagctcttcctagacacccccgtgtccaaaacagagaaaactaattttaaaactctgtcttccatggaagacttctggaagttcacagaaggctccttattggatgggctgtactggaagatgcagcccagtaaccagactgaagctgacaaccgaagtttcatcttctatgagaacctgttgttaggggtaccacgaatacggcaactccgagtcagaaatggatcctgctctatcccccaggacttgagagatgaaattaaagagtgctatgatgtctactctgtcagtagtgaagatagggctcccttcgggccccgaaatggaaccgcttggatctacacaagtgaaaaagacttgaatggtagtagccnnnnnnnnnnnnnnnnnncttatagtggagctggctattatctggatttgtcaagaacaagagaggaaacagctgcacaagttgctagcctcaagnnnnnnnnnnnnnnnnnncgaggaaccaggnnnnnnnttattgacttctcagnnnnnnnnnnnnnnnnnnacctgttctgtgtggtcaggtgtgtactgaggacacgcatccctcctatttttgtgtatttgtatgtacatcctatcctggggnnnnnnnnnnnnnnnnnnncctgccgttaactaaataaggatgccaaggacccagagagatagcaagggaggggtaaaaactgaa

SEQ ID NO: 13093 - DNA, 712 bp, Macaca Fascicularis
  misc_feature (1)...(712): n = A,T,C or G
aaagagaaacntnnncccntgcctgcataccttgaaaagcagccttcccaccatcctnngcggaccaagaagcagttgttcccagacctctatagcaaagaatggaacgaggcagtgcctttctgtgagtcccaaaannnnnnnnnnnnnnnnnnnnnnnnnnnnnnnnnnnnnnnnnnnntaaggtctacagatgaagagtttatctctctaaaaaccagggaggaaattggtttagggtcccccttggtacccttgggagatgatgatggaggtccannnnnnnnnnnnnnnnnnnnnnnnnnnnnnnnnnnnnnttctcccccgtcccacagcagcaagggcacccctcatcttgctagtgaattcagggatctagcactcaaataccttctgactccagtgaacttattccaggcagggtattcttccaggagctttgaccagcaagtggaaaaataccataaaccctgctgaagacagagtacagaaggacaacgttgagcccacactgccatttggaagatagtaannnnnnnnnnnngggaaagagtttgttttgggggcctgcttttctatctttacaagactcttacgggccnnnnnnnnnnnnnnnnnnnccaaaacttgttcattggggtcctcgtgcctatggaatccttcattttataattgattatgtttaagaaatacgttttgttttaaaatcttt

SEQ ID NO: 13094 - DNA, 732 bp, Macaca Fascicularis
  misc_feature (1)...(732): n = A,T,C or G
gagcagcatacaggctgcannnnnnnnnnncagtcaggcnnngatcaagcatgtggctcagatctggaaagccaacgggacttcctcaacgcattgcagtcacccattgagtaccagagacgggagagccagaccaacagcctggggcggccaggagggcctggagtggggagccctgggagaattcggcttggagatcaggcccagggcagcactcacacacccatcaatggctctctcccctccctgctgctgtcacccaaagaggaggtggccagagcccccttnnnnnnnnnnnnnnnnnnnnnnnnnnnnnnccctcaggctccccatgactctcctccagtctctccaactccaaacacccctccctgccaagccagacttgccaagctggatgaagatgagctgtaactggtgaaaaccatgggggtggtgctgactcagctgcctattccccaagaagcttcagggcagtccttctggcacnnnnnnnnnnttcttccttcttggtgtgtctggaggaagggtgggcaaggctgggagggatatcaacttggaggagagcacctnnnnnnnnnnnnnnntttctgcccaaggaacacagtttccttcagctcccacccctatgcatgcatcatggttcccccaaaaggaggacatgtgggtgggtgggagggctggggcaagggccagatagaaattattggtttcgttttttaattttgtttt

SEQ ID NO: 13095 - DNA, 752 bp, Macaca Fascicularis
  misc_feature (1)...(752): n = A,T,C or G
gctatagagaggagagatgggacaggagaaacgcctcaantnatcagggtcttattgtnnnctattcgtgattcaaacagnnnnnnnnnnnnnnnnnccttgacactgtttcnnnnnnnnnnnnnnnnnnnnnnnnnnnnnataaaacatttgtgacttatactgtctatgtnnnnnnnnnnnnnnnnnnnnnnnnnnnnnnnnnnnnnnnnnnnnnnnnnnnnnnnnnnnnnnnnnnnnnnnnnnncagtctnnnnnnnnnnnnnnngtatctgttttcactctatgaatgccgttactctgttttcttccaatcattagcggttgtggaacaggaaatgaaaaaggactggctttttgcccctcattatcgatactatgtaagagaaatgagaattcannnnnnnnnnnnnnnnnnnnnnnnatacaggtcattaacccttggctatnnnnnnnnnnnnnnnnnnnnnnnnnnnnnnnnnnnnnnnnnggaactgtccaggtttattgctgctgggagactacactgcaaaatagataaagtgaatgaaatagtagaaacnnnnnnnnnnnnnnnnnnnnnnnnnnnnnaccaagaaactatcaagaaaggagatctgctactaaacagagttcagaaactttccagagtaatcaatatgtaaagccatgtaacaaaggatttcctttagagataattatttggaatttttatagcttacttcactatgtgcccannnnnnnnnnnnnaa

SEQ ID NO: 13096 - DNA, 757 bp, Macaca Fascicularis
  misc_feature (1)...(757): n = A,T,C or G
cttcgcaggcctcattctttgaacatcaannntgaagttcgatacagataggggcttggtaaagctgtgttcccctctcccctctgactagctaaaatcaatacctaaatatagaagcctnnnnnnnnnnngggcctttagtctgggaagggcctagatgggaagagagggaacatgaatctggacagggagggagattctacagaaaggagaacactgcccactttgcaagccagtgacctgccttttgaggggacgttggacggggcaggggtgggtttgagctacagnnnnnnnnnnnnnnnnnnnncgattcttaccaactccccaccccacaaaaaaaataacggggaccaatatttttaactttgtctatttgtttttgggtgagtttccccctttccttattctgtcctgagaccacgggcaaagctcttcgttttgggagagaagaaaaactgtttggaaccacaccaatgatattttcgtttgtaatacttgaaatttatttttgtattattttgatagcagatgtgctatttatttatttaatatgtataaggagcctaaacaatagaaagccgtagagattgggttttgttgttaattggtttgggagccttctatgtgtgacttatgacttctctgtgttctatgtatctgtctgaattaatgacctgggatataaagctatgctagctttccaacaggagatgcctttcagaaatttgtatattttgcagtgccagaccaataa

SEQ ID NO: 13097 - DNA, 742 bp, Macaca Fascicularis
  misc_feature (1)...(742): n = A,T,C or G
aaggaggaaaaagaactaggagtaaaacgtgataaaaatgggaagatcattgatacaaaaaaacctctatttactagctttcaagaagagcacaaaatcatcccactgcctgctannnnnnnnnnnnnnncgattatggatgtttctgagaatattagagcaaaaatttatgctatattgggcaaactagattttgaaaatttacnnnnnnnnnnnnnnnnnnnnnnngtcaccctctgtatcatacatagatatcttgattttaaaatacaggccacacacaagcaaagagagctggctaataaatcatgggaaaatttcttggctagaacatcaaatgcaaaaacgttaaagaaagcaaaaaggcttcaagaaaaagctatagaagcctccagataccataaacgaccacannnnnnnnnnnnnnnnnnnnnnnntattaaaggccttaacacaacggtgccctctggtggggtagtaacagtggaaagcactcctgcccgattagtaggaggacctctggctgatacggatattgctcttaaaaaactgcccattcgaggaggannnnnnnnnnnnnnnnnnnnnnnnnnnnnnnnnnnnnnnnnnnnnnnnnnnnnnnntacgtaatatattctagagactttttgaaataaaatcagctcgtaattttttagttgaatatatctttatacatatgtaaagccanatattttagaataagtatttgagtataaatatt

SEQ ID NO: 13098 - DNA, 743 bp, Macaca Fascicularis
  misc_feature (1)...(743): n = A,T,C or G
gcatcagcaattatcagacccaagcacattctcccaacatcaaccaatggagagagatgattctggaatggtagccccctctaacatttttcatcagcctatggcaagcggttttgtggatttttctaaaggtctgccaatttccatgtatggaggcaccataataccctctcatcnnnnnnnnnnnnnnnnnnnnnnnnnccctctgtttaatggacttcacaacccagatcctgcttggaaccctatgataaaagttatccaaaattcaactgaannnnnnnnnnnnnnnnnnnnnnnnnnnnnnnnnnnnnnnnnnnnnnttggaaacatgcatctcaaatatgtcaactaagttagaaggtctttactctttagccttgtttaagaaacctatgaccttggaagaaccatggggatttttttttaatgtgcctaagaaattttctctgaggctttagcaatggaaatttgattgcccattgtataagaacaaattgatttcctatccacctggttatgttctctggttagtttagccattttgaacttaagatcatatgaccttagtgcttttggctaaacatactgaatactacttgtatgcagaagagaattagttgattacatgtttcaaccttttagggtgataaatacatgtataattgtttacatacttaaaaggaaaaagttgagtaaatttcttgtcatatagtggctctacgtaatgtagcctgtattaa

SEQ ID NO: 13099 - DNA, 676 bp, Macaca Fascicularis
  misc_feature (1)...(676): n = A,T,C or G
acagatcaagtcnaatatcgatgcnttgatgagccgcttggagcagatcgctgcggagcaaaaggccaatccagatggcaagaagaagggtgatggaggtggtgccagcggcggtggtggtggcggtggcggcagcggtggcggcggcggaggcggtggcggcggtggtggcggtagcggcagccggccaccagccccccaagagaacacgacttctgaggcaggcctgccccagggagaagcacggacccgaggtgacggcgatgaggaggggctgctgacacacagcgaggaagagctggaacacagccaggacacagacgcggatgatggggccttgcagtaagcagcctgacaggagcaatggccaccagcaggtgaagggcatcgctgccccaggcctcaagccgggcacccaaccctggatgccaccccccagcgggtaccagaggaaagctggcagcaggtgcctcctcccccaacgcatcccagccagtgccatatcctctgcaggtggagttactggcctactccttccccatgagccctccctgtctgcactgcccaggccagagggtagagcacaggagtttccccacactgcctcccctccccaggacactcccaggcttgggttttttctataggtttggcggggggccacagggaggggacc

SEQ ID NO: 13100 - DNA, 756 bp, Macaca Fascicularis
  misc_feature (1)...(756): n = A,T,C or G
tgtacaggtcaatccgctggctggaccggtgcattgcagcccatcagcagccggacaagcagaannnnnnnnnnnnnnnnnnnnnnnnnnnnnnnnnnnnnnnncgggccacctgccttgaagagatgaccaagcgggacgtgcctggcttcgccatcgggggcctgagtgggggtgagagcaagtcgcagttctggcggatggtggcgctgannnnnnnnnnnnnnnnnnnnnnnnnnnnnnnnnnnnnnntggnnnnnnnnnnnnnnnnnnnnnnnnnnnnnnnnnnnnnnnnnnnnnnnnnnnnnnnnnnnnnnntcttccccacacggacagcgcgctttggctctgccctggtgcctactgggaacctgcagttgaggaggaaggtgttcgagaaggacttcggccccataaacccgnnnnnnnnnnnnnnnnnnnnnnnaaagcacannnnnnnnnnnnnnnnnnnnnnnnnnnnnnnnnnnnnnnnnnnnnnnnnnnnnnnnnnnnnnnnnnnnnnnnnnnnnnnnnnnnnnnnnnnnnnnnnnnnnnnnnnnnnnnnnnnnnnnnnnnnncgctttccggacttcgtgcgggacnnnnnnnnnnnnnnnnnnnnnnnnnncaccctctgtcccaccnnnnnnnnnnnnnnnnnnnnctctgtgnnnnnnnnnnnnnnnnnacctggcattgggagagggagggagagagggagggaggggccggaagatattggaggattcttttgga

SEQ ID NO: 13101 - DNA, 748 bp, Macaca Fascicularis
  misc_feature (1)...(748): n = A,T,C or G
atgatcatgnnnntannnngtactacatatatagcctgtgaaactactcaaaaagtagtataatttttttctctaacatannnnnnnnnnnnnnnnnnnnnnnnnnnnnnnnnnnnnnnnacctatttgtgagcattctattctgcatattaactcccatttagttattcaatatatataaaagatgcttgagatttcaggaaagatgagaattgagcttgttcttatactgtgactatctgtgtgtgtatgcttatatatataatatcaaaagtctaatgcacatcatttatgagaaataaaatgaaattgttataaaatgtattacattacaacatacagaattttgtcttaattgaacataaaactatttggaatgcaggaagagcgaaccannnnnnnnnnnnnnnnnnnnnnnnnnnnnnnnnnnnnggaacnnnnnnnnnnnnnnnnngaaaaatacaaagattgtgatccacaagtcgtggaagaaatacgccaagcaaataaagtagccaaagnnnnnnnnnnnagatggactgataacatatttgcaataaaatcttgggccaaaagaaaatttgggtttgaagaaaataaaattgataaaacttttggaattccagaagactttgactacatagactaaaatattccatggtggtgaaggatctacaagtttgtgaatatgtaaattttaaactatttaactaagtgtactgaattgtcatttgcctgtaactgtatt

SEQ ID NO: 13102 - DNA, 682 bp, Macaca Fascicularis
  misc_feature (1)...(682): n = A,T,C or G
aagtatcactactgcccccgtgacctgtgtaataacatatttgaacacacaggacacatccggatttcagannncggtttggccatggagatcccagaagggcagatggctcgaggaagagttggaacagtcggctacatggcacctgaagttgtcaataatgaaaagtatacgtttagtcccgattggtggggacttggctgtttgatctatgaaatgattcagggacattctccattcaaaaaatacaaagaaaaagtcaaacgggaggagatcgatcaaagaatcaagaatgatactgaggagtattccgagaagttttcagaggatgccaaatctatctgcaggatgttactcaccaagaatccaagcaagcggctgggctgcaggggcgagggagcggctggggtgaagcagcaccccgtgttcaagaacatcaacttcgggaggctggaggcaaacatgttggagccccctttctgtcctgatgaaagtgaaaccttcgcatcagccgtgtgactgaggccagcgctgtgtgtcgcagggctgcctgaccgtggtccccagtgagaaggaagtggaacccaagtgatgctgagcatccccctgcagaccgcagagcagaccctggcgccaggagggagcaggtgtgnnnnnntcctcccaactggaattgtaataa

SEQ ID NO: 13103 - DNA, 783 bp, Macaca Fascicularis
  misc_feature (1)...(783): n = A,T,C or G
cnnagcaggcacactgctcnnnaaatgaagccttaaaaagcaggcagagagtgctagtgaggcggccaagaagtacatggaggagaatgaccagctcaagaagggagctgctgttgacggaggcaagttggatgtcgggaatgctgaggtgaagttggaggcagagaacaggannnnnnnggctgacctgcagaagctaaatgatgagctggccagcaataagcaaaaattagagaannnnnnnnnnnnnnnnnnnnccatgcggaagcagtttgagggcnnnnnnnnnnnnnnnnnnnnnntgctggaggaacacgcaaagctgcaggctgcagtagatggtcccgtggacaagaaggaagagtaagggcctccttcctcccctggctgcagctggcttccacctggcacgtgcctgctgcttcctgagagcccagcctcttcctccagtacttctgtttgtgcccttctgcttcccccattcccttccacagctcatagcttgtcatctcggcccgtccacactctcccagcacatttcaggggacctgattgctacacgttcagaatgcatttgcnnnnntcctgtttgggttggcctggccaggcctggcgcagccctggcttccacgcctgagcgtggagggcacgagttagttgtagtctggcttgcggtggggctgacttcctgttgggttgagcccttttagttttgccctctgggtgttttctttggtcccgcaggagggtgggtggagcaggtggactggagtttctcttgag

SEQ ID NO: 13104 - DNA, 735 bp, Macaca Fascicularis
  misc_feature (1)...(735): n = A,T,C or G
gcatctcataatttattgcttnntctcctggatgannnnngtcatgctcccaaatgcagcttcaggtgagccgaggggtctgctcctgtggcggtgnnnnnnnnnnnnnnnnnnnnnnnnnnnnnnnnnnnnnnnnnnnnnnnnnnnnnnnnnnnnngtaggccctggtctggctttggaaagccccatgagaggaaaccttcacccagcacccatgcccnnnnnnnnnnnnnnnnnaggaagggagacctgaggggcagattggttcatgcctggggcggaggctgagcctggacccacagtcagggcggggctggccagctgtgccggaacacagcccacacctgcagtggttctccgtccctggtgtccctgcctggccctnnnnnnnnnnnnnnnnnnntcccctcaggcttggggatgcccttcttccatttccagannnnnnnnnnagggtgcagggaccaagatnnnnnnnnnnnnnnnnnnnnnnnnnnnnnnnnnnaccccnnnnnnnnnnnnnnnnnnnnnnnnnngtttcgtgttctggcctctgggagaagggcannnnnnnnnnnnaggaaaaaggcccatagacagacccagggtgatgttcaagcctggcctagtgagagtgaggcccccgcacgcaagccnnnnnnnnnnnnnnnnnnntttgcagtgtctttttaaccttctcagaaaatntctcaatctatgtgatttgtgtaatac

SEQ ID NO: 13105 - DNA, 757 bp, Macaca Fascicularis
  misc_feature (1)...(757): n = A,T,C or G
gccnnnnnnnncgggactgacnnnntnnncgtgcttgcctgcagnnccgagtcagggcccaggtgcagctctccagtggacacagaacgcagccgggctgagggcagccggagccaaggccctgagaaagccttcagcccagcttctccatgtgcctggaacgtatgtgtcaccaggaaggcccccnnnnnnnnnnnnnnnnnnnnntcctctgggggctccgacagcgaggactaccagaaggcagcgagtgccgtggatgccgtgagcaggagtcctggccgggaggcccccccgcggcccacaggggccaggacagaggaggctgtcggcagggccgtgtgtgccaacaaccggctgttagaccctgcctgccccgcgccaaaggaagtgaccgctgccccagccatggctccgccccccgaggctgctgtggccatcaccacagcactgagcaaggctggccccgccatacccagcccagcagtctcttctgcagtggccgtggcggtccccctagggcccatcatggcagtcacaacagccccagccatggtggccaccctggggacagtgacaaaggacgggaagagagatgccccgccggaaggagctgccttaaatggcccagtgtgatgctgctgccgcccggccacggcccgccctggtcaggctgcatccttaatcgagaaaactacctggtgatgcaatctttttttttttttaatttaatttaattttaaaataaatgctgcat

SEQ ID NO: 13106 - DNA, 735 bp, Macaca Fascicularis
  misc_feature (1)...(735): n = A,T,C or G
aaaaacgacacagtagtagcagttcccaaagtagcgaaatcagtactaagagcaagtctgtagattctagccttgggggtcttcnncgatccagcacggtggccagcctcgacacagattccaccaaaagctcaggacaaagcaacaataattcagatacctgcgcagaatttcgaataaaatatgttggtnnnnnnnagaaactgaaactctctgagggaaaaggccttgaagggccattagacctgataaattatatagacgttgcccagcaagacggaaagttgccttttgttcctccagaggaagaatttattatgggagtttccaagtatggcataaaagtatcaacatcagatcaatatgatgttttgcacaggcatgctctctacttnnnnnnnnnnnnnnnnnnnnnnnatgatggtctcggggcgggaaaaagcttactggctctgaagaccacagatgcaagcaatgaagaatacagccnnnnnnnnnnnnnnnnnnnnnnnctggaacaagcacaagccatttgcaaggttttatccactgcttttgactctgtattaacatctgagaaaccttgaatcctgcaatcaagaagtnnnnnnnnnnnnnnnnnnnnnnnnntttcaatctgcggnnnnnnnnnnnnnngcaaataatgaagtgatcccttgctctaggttttctgaagaagatggattgtgtaaaatgctgatcatctgttataaa

SEQ ID NO: 13107 - DNA, 793 bp, Macaca Fascicularis
  misc_feature (1)...(793): n = A,T,C or G
tgagagcgctgcaggtgcgactgggaaagttcaggcccagtgacgagcaccatccggaagtgaaggctgatgggtacgtggacaaacctcgaagaggcggtggacatgctgctgcagcacacggacaagtgacagcctcctgggagagccctgcttcctccacccctgcctctcctccacccaccccagtgcccagaccacccaaggccctgacagccctgccctctgccctgctgcacgggcaggcatttgttccctgcctgggtggcctgctcccctgcctgggccttgacttcagctcactgtagtgaagtccaggagggtgggacagacctgtcaggcctctgggaatctcccaaaccccagaactcactcacccaccatgcgcacctggtcctttaaatgcgggaaactccacctaaccagattcagaggcaccggccccgctgccttctcttcagactctttgcatttcagtgaagagcctggaagaaacccaggggcctcctatgcacagatcttgcagcccagaaccaagtcagcctcctgcgactgcctaggcacactgcccaccaccccacccccgaaacaatgccagcccgctgcttttcctgtcctcccaggcacctttgcaaagaccaggggcagctcctgagnnnnnnnnnnnnnnnnnngtgccacacagcaagaactgcagcctctgcgcccaaggcacacagggtactttctggnnnnnnnnnnnnnnnnacttaaaggtgtcatgcctggtgtgtgcaggaggaaactaacagtc

SEQ ID NO: 13108 - DNA, 781 bp, Macaca Fascicularis
  misc_feature (1)...(781): n = A,T,C or G
tggcatggcaaagagtccgtgtggccaatatgatggcagatagtggcaagaggtgggcagacatcttttcnnnnnnnnnnnnnngcacctataacaatcaatacatggttctggannngaaagaaggtaaagctgaaccacagcctgacannnnnnnnnnnntacattgtggagcaaattcctacatatgtagaatattccgaannnnnnnnnnnnnnnnnnnnnnnnnnnnggccctcctacaatattcctttccatgaaaagatctacaactggagtggctatccactnnnnnnnnnnnnnnnnnnnnnnnnnnnnnnnnatgatttagcgccacgagccaaaatcttccnnnnnnnnnnnnnnnnnnnnnnnnnnnnnnnnnnnnnnnnnnnnnnnnnnnnnnnnnnnnnnnataagaaggatccttacagtaagggtgacccctgtaataccatctgctgccgtgaggacctgaactcacctaacccaagtcccggaggttgttatgacacgnnnnnnnnnnnnnnntacctagcnnnnnnnnnnnnnnnnnnnnnnnnaagtggccccacagtacaaggtggcctccctgtttttcactggaaccgtttcaacaaaactctacatcagggcatgccagaggtctacaactttgattttattaccatgaaaccaattttgaaacgtgacatgaaatgaaggagggagatgacagactagaaggctgtaaataagaaaccaaaggcactattttagctatgtttttcccatcagaatt

SEQ ID NO: 13109 - DNA, 724 bp, Macaca Fascicularis
  misc_feature (1)...(724): n = A,T,C or G
tggagcccccacccttgtacctcatggaggattacgtgggcaaccccgtggtggcgaacagaacatcacggcggaaacggtacgcggagcataagagtcaccgaggggagtactcggtatgtgacagtgagagtctgtgggtgaccgacaagtcatcggccatcgacattcggggacaccaggtcacggtgctgggggagatnnnnnnnnnnnnnnnnnnnnnnnnnnnnnnnnnntatgaaacgcgatgtaaggaagccaggccagtcaaaaacggttgcaggggcatnnnnnnnnnnnnnnnnaactctcagtgcaaaacgtcccaaacctacgtccgagcannnnnnnnnnnnnnnnnnnnnnnnnnnnnnnnnnnnnnnnnnnnnnnnnnnnnntcctgtgtgtgtgccttgtcgagaaaaatcggaagaacatgaattggcatctctccccatatataaattattactttaaattatatgatatgcatgtagcatataaatgtttatattgtttttatatattataagttgacctttatttattaaacttcagcaaccctacagtatataagcttttttctcaataaaatcagtgtgcttgccttccctcaggcctctcccatctgttgaaacttgttttgtgatctggctnnnnnnnnnnnctctgtaaaatctgtgtacaccagtattttgcattcagtattgtcaaggccatgact

SEQ ID NO: 13110 - DNA, 705 bp, Macaca Fascicularis
  misc_feature (1)...(705): n = A,T,C or G
ggagcacgccagcatagatgcccagtcgggggcggaggcccctaaccccagcacttcagcttcccccaggaagtccccgccacctgccaaggacgaggccaggacaacagagagggagaaaccacagtgacagctgcatctcccagacgcgacaccaagctcctcagggacagctgagccccagccaggcctggccccgtcttaaccggcagttcttatctggggagcttagaacatccccaatatcttaccactccctccccaaaactggggttccagcaaccctgcccccccaaccccagcaaatctctaacacctcctagagaccaaggcttgaacaggcatctttaccagccccactatctctaaccgcaccagggctaaggagtaacctccctcatctctaactgcccccccccccggggccagggctaccccagaacttctaactcttccaggacagggagcttcgggcccccactctgtctcctgcccccaggggcctgtggcnnnnnnnnnnnnnnnnnnnnnnnnnnnnnntgggtgtgggcctctgaatataacccacacccagcatagggggagtctgagccggaagggctcccgaggctctgccttcagctcccaaagtggctggcgggcccccttcacataggacccacttcccacactgagcagaagacattgcttatggagacaaataaa

SEQ ID NO: 13111 - DNA, 722 bp, Macaca Fascicularis
  misc_feature (1)...(722): n = A,T,C or G
ttttcaatcacagctgatggacagcgaagccttccccgtagagacccgtgctccaacttgggcctggggcactgctcgctgctcccaggaagggggtggcgccacaggcaggaacctgcgaagtccagagtccagggtggagagcgctagcctcagccagagcagccacggcagccacagtgnnnnnnnnnnnnnnnnnnncccacttccagcttgcttttgggcacacggcaaatgcagttcgtcccgaagttggtgtcccttgtctgaatgcnnnnnnnnnnnnnnnnnnnnnnnnacccttgctttttccattttgcaatcaggtttttgtctgcatagccttctttaatacaatattcatagagttctctgctgatggctttccgcttgtaaaagaggtcaaagatgtagcgggttttctggtggtggatcctgaagatggnnnnnnnnnnnnnnactttcctttttccctcatgcggttctgtttcagcttctctcatcttttgatctaattcatnnnnnnnnngctcaatcaactcccagccatctgggggtgctttccggcttcttttgactttaggcattttccttccaccggataatttgcaaagatcttaggatgtgcttcccaagagtatagatagcagaaannnnnnnnnnnnnnnnnnnnnnnnnnttggattcttgtccagctctaaaaaattagtctgtgactttga

SEQ ID NO: 13112 - DNA, 773 bp, Macaca Fascicularis
ttaagaaactttgtaatgtgcaaaggataaattttttgacctgactattttacggttctaaatgcaataagatttagttgagttattccacaaacacattataaagttcagatgtttcatcaatgcagttctcatgaaagtatttactttttaaaaataactgagatattcttttaaatttcttttattaatacatatatcggggaaaattattttgacatgacgtgataaaatgtgaaaaactaatgtgtctcaggctcaagtttttagttattaaatgtttcaaaacagacaagttttgtttcctcattggtgttaagaaccaaactgctatttcaatgagttattcaattagaccaattactgcacttttaaacagcaccaccatttaatttcatgtatatctgacttcgaatatatctgtaaagataatcgaagcaaaagtaattacttaaaggcacaaataggatgtactgttgaaaaaagataaagagtgcggtgcagtttcattcaatacatttttaagatgcatgtctgccaaaatgtaacatacgggaagtttatttcctgacagcaggtgtacacatgccaatacttaaccattttatggcacctatttctttcttggagtgccaagtttacaaatctgcagtttttaatttagtagatgacaaatattctgaatcaccaattaaaaaccctttggggagggatggggaaaactataaatgtttgacaaacacaattctaggatgaacaaatgtatactaatg

SEQ ID NO: 13113 - DNA, 626 bp, Macaca Fascicularis
  misc_feature (1)...(626): n = A,T,C or G
accatgcatagctaatntattttttgtagagagagggtctccctgtgttgactaggttggtctcgaattcctgggctcaagcagtcctcctgccttggcctcttaaagtgctgggatcacaggcatgagccactgcgcccagcccactgctagttcgactttttatacttgagcctcctggctatgccttgagatcagcgctattttgtaaaccgctgaggtgtggataggaatgagtagatcagacctcttgaaaatgcttattcttcctcccttttattttttgtctcttttaagatggtaaaatgggtctcagcgattcctgccgatgctttaaattattttctcctctccgtggtatcagtgttcatttccccagttcttgcacaccactttctgttttggcagttctgccaagcaagccctgtattccttgggactggttttgctgtggttggatacagataccagctcgccttgatgggatcagtattgctgtgtgcttccagccacagattctcacactcaattccaaagccctcctattgggcgaattccctcaaactctatttgacccaacagccacacgtattcccctctggtagccacagacatgctgtgtttac

SEQ ID NO: 13114 - DNA, 901 bp, Macaca Fascicularis
  misc_feature (1)...(901): n = A,T,C or G
tagcctcgttgctatggcatctcaaagacaggctaaaatagagagatacaagcagaagaaggagttggagcataggtnnnnnnnnnnnnnnnnngctgtggaaagtggtcaagcnnnnnnnnnnnnnnttcgtgaatattatcatcttcaccttcagaggtggattgatatcagcttagaagagattgagannnnnnnnnnnnnnataaagatcctgagagaaagagannnnnnnnnnnnnnnnncaacttctaacnnnnnnnnncnngaaaggcctccagtgaaacccttcattctcactcggaacacggcccaagccaaagtatttggagatggttatccaagtgtggcaaatatgacggtgagtgactggtatgagcaacatcggaaatatggagcattaccggatcagggaatagccaaggcaacaccagaggaattcagaaaagcagctcagcaacaggaagaacaagaagaaaaggaggaagaggatgatgaacaaacactccacagagcccgggagtgggatgactggaaggacacccatcttagaggctatggcaaccgacagaacatggggtgatattcccacaacacgacaggagtgcagggtgcacagctcccccgccaagaaaaaccacgcagtcttcccgtccctgggctcccgcttcagctctgtacaacgaaggcaaagatgctaaatcttgctttgcattcaataaagtgtcaagtgattaagtgtgtatttgtaccctagatgatgtgagccagcagtcttgttttggcatcatcttcatcacgttgtattccagtttcttaagtggagagaaaagagtgctgagaaatggctctgtataatatacggctatctgaattctctgaaaaaacacataaaagctcc

SEQ ID NO: 13115 - DNA, 965 bp, Macaca Fascicularis
  misc_feature (1)...(965): n = A,T,C or G
atgtaacagttgtgtcataaattacacaataaagcagtcctgttcaaatttttttttaaatgtggcttgtagaattttttaaaaagtgatcttnnnnnnnnnnnnnnnnnnnncagatgggtgctatcagagcctctcccacaccactatagtgtaataatgttattattactctacactgaaacgtattcagagttagatgttattttagccttagttgttcttagaggctttcaaatgtaccgatgatactgtttcttgcactgattatataaacactccacagtgtttatattgggaagatattgggaaggaaatatatttgtaaaagatgaaggctgtatgtattttttttttctttttaaactggttcacttaaattctttagaggatgggatgtatttttcttgctgaatgttcagtgctttttccttttcatttgttgttctgtggtcacactatgaccttagctacatagcagactttcccagatgtattgattacaaataaacagttgttacttagcaagacctgaaaatatgtctgcaggtttctccttgaagcaaatgtgtgggatcattgcatttccagaaatctgcctccttcaccctccgttgacagtatatgtcatgcctcactttcttctagctgagctttaaatcattagagcttaaattgtcagatcgttcattgcctttccagggttatttagtaaagtttgttcaaaacaaaaatgccttttctgggttcttttttcagttttattttgaaggtccagcttcctgattaaatgtctgacatattaatgaatgaccagcagcagctttcagctcttaaaaagacacttatattatgattttacatgctggttacctgttccattgttgtcaaatgcccactctccatcagatgtgttcctctattttcttgtccacaaagtactcctcacttttcaatttgtcacg

SEQ ID NO: 13116 - DNA, 699 bp, Macaca Fascicularis
  misc_feature (1)...(699): n = A,T,C or G
ggcgaccagatcntgaacttcaccatcctgcagatcttccctttcacctacgaaagcaaacgtatgggcatcatcgtgcgggaaggttgtgtccctgttttgttttcgtggcgtacaagatgttccgatgccttctcctccttcccacgtggagccacgggtttggatcgtggctgtagatcatcatagcactgtcactgctggactaagagaggcctttgagcaggtgccagatgccgaccacagtgggaaaagatgaggcccccaaacaatgccacacagccggccgatctctgtaaatttatggcgtaatcttgccataatatgagaacgaagtaaacttgtgatgaactccgtgggaggaagtgactcataggctgagatcgtcgatgcggtatttatattggacagaacttctgaactcgctcgagcccttttcatagtgaggaagctgggctgggagcatcatttcctacagccatgttgttgagcaccctttggttgtgagggggaaggaaaaaataaaaactctgatgctttaatgtgcagaccccacagctctctttggcctgcgtcaagagcaggcatagctgcagtctatcaaagataaagtgtgcagttgaatgctttacaacgcgggtgcctgtcttggcctgggggtgcttttatgagtcagcatgttgttctaaaagattgtcg

SEQ ID NO: 13117 - DNA, 753 bp, Macaca Fascicularis
  misc_feature (1)...(753): n = A,T,C or G
aaggtgtggcctcactatcaccaagaatctggctgctttnnagatcaggctttgcccgtgtggagtccaaagtccttccctnnnnnnnnnnnnnnnnngggtacagggaaggagaaagactgggatctcagagaccagctgcaaaagaagactttgcagctccaggccaaggaaaaggagtgcacagaactgcattcagaattagacaacctnnnnnnnnngtatctctcctgcctgcgtaagctgcagcactgtcgagaagagctgaaccagagccagcagctgcctcccagagtaagagggtctctccttnnnnnnnnnnnnnnnnnnnnnnnnngattccttccttaaccaagatttgcagataaaatatatcagcccacgccaacaactggccatcctgtcccactgtgcttggtttataacatactgacnnnnnnnnnnnnnnnggaaaaaacactggactcgtgcatcaaagcccaactttcatggaactctcaatgccagaaggaaagactcactcttagctaaaaggcaatgtgggcgatggctcccaatgctgatggtggtgattgctgcagcactggcagtgttcctggccaataaagacaacctgatgatctgaataatttgtgacaactgtctcgggtgaaaatcagaaggaagcaactcaacaaaannnnnnnnnnnnnnnggtacattacagcttgggctttccaactgacttaggatttctgactttttgttattttc

SEQ ID NO: 13118 - DNA, 764 bp, Macaca Fascicularis
  misc_feature (1)...(764): n = A,T,C or G
cacaggtgcacaggctgagtttcgnnnnnnnnnnnnnnnnnacacacagagagagtggcccagcctcctgtcctccctggggtttttgcagactcgaagtctcactgcaccagtgtcttcgatggtattggggtgggtgatggtgcccaacactgacagttttagtggcctgtccttgacataccgtggtnnnnnnnnnnnnnnnnnnnnnnnnnnnnnnnnagatcaacgtgctgatggtaagtagactaggctcccccaggcnnnnnnnnnnnnnnnnnnnnnnnnnnnnnnnnnnnnnnnnggccccattcacagacgtgggagactctgctcaggcctgtgaagctggacaggccttcaccagagttcggaggagcagtggagcagtgtgtggcgccacctcccagctggccatacccacacagnnnnnnnnnnnnnnntggcctcatccgggccagcttggactctgcttcctccaggagcagcagggaagcctgggctgcctccctggatagcaggaacttgccctgccatgtgtgccctgccttcctggccagctgtgcttgttatcttccattatcatgaactgtttgaagcaatagaaaaaagaacgtgtgttttctttcctggtatacatacatgaccccatctgccaaactccattctccttccctcaactctgctctccacagagctatggggaannnnnnnnnnnnnnnnnnnnnnntgaagactgataaaggtctcatcactgctcctca

SEQ ID NO: 13119 - DNA, 762 bp, Macaca Fascicularis
  misc_feature (1)...(762): n = A,T,C or G
tcagagcaagcnccctgaagnnnnnnnnntgctgccggagaaggcaaacccattttgagtgaagaggaaagacaggaacagactaagaggatgttggagctggtggcccagaagcagcgggagcgtgaagagagagaggaacgggaggcactggaacgcgaacggcagcgcaggagacaagggcaagagttgtcagcagcacgacagcggctacaggaagatgagatgcgccgggctgcagaggagaggcggagggaaaaggccgaggagttagcagccagacaaagagttagagaaaagatcgagagggacaaagcagagagagccaagaagtatggtggcagtgtgggctctcagccacccccaccggcaccagagccaggtcctgttccctcttctcccagccaggagcctcccaccaagcgggagtatgaccagtgtcgcatacaggtcaggctgccagatgggacctcactgacccagacgttccgggcccgggaacagctggcagccgtgaggctctatgtggagctccaccgtggggaggaaccaggaggaggccaggaccctgtgcagttgctcagtggcttccccagacgggccttctcagaagctgacatggagcggcctctgcaggagctgggactcgtgccttctgctgttctcattgtggccaagaaatgtcccagctgagggcctttgtcccatcgtccctctgtgaccccttcatctttgataagcactgacattccttcctaataa

SEQ ID NO: 13120 - DNA, 968 bp, Macaca Fascicularis
  misc_feature (1)...(968): n = A,T,C or G
gcagaccttggaagcacaccaatcaaaagttagcagtttagcctctgcatcccaaaaggatcatgtcttggatataccaaccactcaacgacaaacggcttgtagaactgttggcaaacagtgttgcctctatnnnnnnnnnnnnnnnnnnnnnnnnnnnnnnatacaacatctatatgaaatatccgagaacctgaagaatggaccgttttttgattgggaaggcctatttgcaaaagtgggagactggttcagatcatggggctatgtgcttttaattgttcttttctgcttattcatctttgttctaatctatgttcgtgtctttcgcaaatctcgcagatcccttaactcccaacctctgaacccagccttatctccacagcaatcagcacagctccttatcaatgaaacttcatgtcaagtttcaaatagggcaatgaaggaactaacaacccatcagtatgacacaagtctactttgagaatatctgaacaaacagcagctgcagaaaaaaagccttagctaaactttgatgagtaaagcaggccttactgagaattcagctgccaaaaccctcctccgagtgttcctcttataagggcacttagcactaggatctcccaaggtattgtaaataagccttatcagaacttttcatagtttcactctgaagccttaagacacataccannnnnnnnnnntgtaaacccttacnnnnnnnnnnnnnnnnnnntactctgnnnnnnnnnnnnnnnnnnnnnnataataaacgtgttttctattaatctgttaatttgcaagcccccaaacactggaactaagttgggagcaggaaagtttctcccaacagcactttgtagacttctcgatagatgaaagagtgtgtttgaatagataagagaattttgttcccttgattttggttgaagtcgtagaagaatccaatgtacacatatacaagacta

SEQ ID NO: 13121 - DNA, 993 bp, Macaca Fascicularis
  misc_feature (1)...(993): n = A,T,C or G
agagannnannnnntcatacatgaatacatcagcggatactacagagtgtcatcttatnnnnttggaaaactgtnanctgatttattacccatgaggatgttaccaagtattatatttacctgtatagtgtacttcatgttaggattgaagccaacggcagacgccttcttcattatgatgtttacccttatgatggtggcttattctgccagttccatggcacnnnnnnnnnnnnnnnnnnnnnnnnnnnnnnnnntagcaacacttctcatgaccatctgttttgtgtttatgatgattttttcgggtctgttggtcaatctcacaaccattgcatcttggctgtcatggcttcannnnnnnnncattccacgatatggannnnnnnnnnnnnnnnntaatgaatttttgggacaaaacttctgcccaggactcagtgcaacagtaaacagtacttgtaactatgcaacatgtactggtgaagaatatttgacaaagcagggcatcgatctctcaccctggggcttgtggaagaatcacgtggccttggcttgtatgattgttattttcctcacaattgcctacctgaaattgttatttcttaaaaaatattcttaaatttccccttaattcagtatgatttatcctcacataagaaagaagcaccttgannnnnnnnnnnnnnnnagtttttttgttgttttctgttcccttgctgtcacactgttgcacaatagcagtgnnnnaagagatacatttttagaaatcacaacaaatggaattaaacatgaaagaatccaaaaaaaaaaaaaaaaaaaaaaaaatcatctcctcagacagtaaccatggggaagaaatctagtctaacttattaacctaaaaaaggagaattgaattctggaaactcctgtctctggcatttgtttcctcatctttaaaatgaataggtaggttagtagcctttcagtcttaatnnnnnnnnnnnnnnnnat

SEQ ID NO: 13122 - DNA, 622 bp, Macaca Fascicularis
  misc_feature (1)...(622): n = A,T,C or G
aannnaagggacagccatcacacccctgagacagtgggtctgggcggcaccactggcaactctggacttgagcgtgtttgcctcttccttgggtatgaatgtgtgagttcacccagaggcctgctctcctcacaccctgtgtggtttggggttaannnnnnnnnnnnnnnnctcctcacggatggcaagtgcctactcttcagggaatctcccagcatgggcgatgccaggcgtgagctgctgtaaacaatttgtggctgtgctgcttgagtgacgtctctgtcatgtgggtgccaagtgcttgtgtagaaactgtgttctgagcccccttttctggacaccgnnnnnnnnnnnnnnnnnnnnnnnnnnnnnnnnnnnnnnncgcctagccagggccatgtcttagacgcagctgtgctgcgggtcggctgagccacagtcccagaaccaagctctcggtgtcnnnnnnnnnnnnncatccaccttgggctgaccccacctcctccatggacagtgtgagccccgagccatgcgtcctgctcagtgtggcatgggttcccagggccgagcccgccccgctgcttcagtgaatgtacagtgcccggcacgagctgaacctcat

SEQ ID NO: 13123 - DNA, 791 bp, Macaca Fascicularis
tgaatgagtgggctgtagtgggccaaaataaatgagctgtggaagaaaagaatcacagtactttccagcagtcagtccctggttcctagatgtgttctaagcaatgcaaatgtctaattgtcccccagtgggcatagtcagtgtcgtttatattgtagcagttacagctctgtagtttatgatgcaaatctgccaagagagatgtatgtgtcactgcatggcttctgaaggcaggatggattttctgcagctgtttcaaagttgggctctgtccttgaatcctctattaattactgtgtgtgagccagagggagctgtggtaagggttgggcccccagcctgcagggaactttctggactcctgctctttgaattgatacaggcatttggtctcactacttgaccattctcaccctgtgaaacgtcccacactttgaagcaaatacaattcacagcacagtacacacaaaaaccttggcataagacagagaaggttcttcttattttgtgggctggttgctgtagaaacacataacaaagggcagccctccacttctggtataattgtgtagccgcttttctctgggcttgacacctgtcttgaataagagtgattagagccgcataatgtccctctcttggctattgaccatgtggttcacgtacaaaactgtataagttgaaggaaaatgttcatgttcatatgtacttgtttgctatgactacattttgaggttttgtaaaactgttatttttttttttcacaatgtgaaactgaaggtcaataaata

SEQ ID NO: 13124 - DNA, 720 bp, Macaca Fascicularis
  misc_feature (1)...(720): n = A,T,C or G
gcccgctggtgaagatgcggctnnctgtgccctgccgggcagagacctgcgcccannnnnnnnnnnnnnncgccgtcttctacctgcagatgaatgagaagaagcccacctggatgtgccccgtgtgcgacaagccagccccctacgaccagctcatcatcgatgggctcctctcgaagatcctgagcgagtgtgaggacgccgacnnnnnnnnnnnnnnngtggacggttcgtggtgcccaatccgcgccgaaaaggagcgcagctgcagcccgcagggcgccatcctcgtgctgggcccctcggatgccaatgggctcctgcctgcccccagcgtcaacgggagcggtgccctgggcagcacgggtggcggcggcccggtgagcggcgtggagaatggaaagccgggcgccgacgtnnnnnnnnnnnnnnnnnnnnnnnnnnnnnnnnnnnnnnnngaggaggaagaggaagaggaggaggaggaggaagaagaagagggcccccggcccaagcgccgctgccccttccagaagggaatggagccggcatgatgaccccggccgcacacnncgacttnnnnnnnnnnnnnnnnnncagaggggcgcgggccagcctcaggcacagagggnnnnnnnnnnnnnnnnnnnnnttttcttgtcgttccttttgtttttccacccctttgcctggcnnnnnnnnnnnnnnnctctggactct

SEQ ID NO: 13125 - DNA, 918 bp, Macaca Fascicularis
  misc_feature (1)...(918): n = A,T,C or G
atggtagaccaaaaggaaccaaatctgtagggtgaaacnnngagacctagactctataaaaataatccgagtctttcnnnaggggtcagttcctcacagtggttctgtaccaagacttgccaaattcctccatggccaagtgttaaaacctgtttttgaaaactagcgaattaacctaagacacagaaggcagactgggtgaggagacccagcatgccgtattggcagtgatcaggagnngcatcgcactttcccctgctctggatcgaagtcctaattccttcctttaattctactttggtaggtggaatcagttaatgttttgagaaacttgcccgggctctgcccttagtcaagacatctcgttgagccagacccactctgttccttggaacctagagctggagtgaggactagaggtctccggctattccagaaagaaaagtgagccacatgcannnnnnnnnnnnnnnncacttccagaatgtatggaaatggtccctgtcctggcctgccactgaccctgtctgtattttctcggaggtggcttttctccttctccttcccaggaaggtcttcgtatgtcaaatccaacgcactcaagtttggccaagggactccacagcacccagaaggctgcatgccacaaggtttatgtcactcctctgctgnnnnnnnnnnnnnnnnnnnnnnnntcagggacctttggaaataaaacctgttctgtcccaaataaaatcagcctgtgntgttnnnnnnnnnnnnnnnnnnnnnnnnnnnnnnnnnnnnnttctacagagtgttcgactgttcatacctcgttcagagtcgggggttgggagactgggggtgttnnnnnnnnnnnnnnnnatgcccacggtggatttaataatatataatttataagtcatagcctat

SEQ ID NO: 13126 - DNA, 755 bp, Macaca Fascicularis
  misc_feature (1)...(755): n = A,T,C or G
gcactgtgctgctagttacagcataggcaccccagcccagcagcccacatgtgtcagnnccctccctgcccaccccctccctgccgtatcgatcaccagcaccagggtggcccgtgtgtgnnnnnnnnnnnnnnnnnggctgcccagcctggctctgtctgcactggccgagtctctggctttgtctgcactggccaagtctccgactgtctgtgctttcacttccacttctcttgccaccccctctccccgcttactcagacctcagccggcgccagacccggcagggacatctgggcagcaggagggaagggcgcagcatcccctccttcagaggaggctccgggtggggcctgctccccatccccccgagctcacccagcacactcattgctnnnnnnnnnnnnnnnntttaccagcctcaatctggaggctccatcccagcacagaggcctggggcttggcaggggcccggctggggctggnnnnnnnnnnnnnnnaacctcaccggtaccgcagtgggccccgggacctggccgcgcagctggtggactgtaggggcttctgactcggaggagctcccagcttttgtccacagtcagcagggtgggcgctcgtgtatatagctggggtagggggcaggccccccttgtgcagagccaggggtctgagggcacctggctgtgttcccggctgagggagggctggggcgggggccgggctcggaacggtgtacgatacccctcataggacca

SEQ ID NO: 13127 - DNA, 1199 bp, Macaca Fascicularis
  misc_feature (1)...(1199): n = A,T,C or G
catgcagtatctcannnannnnnnnnnnnnctgcttgtttaccctttgggaaccctggggtgaccgaggtttggaaagccacctaagaccacttcatagcaagggaaggctttaagcagttactagaaagagatggggatttggcccctggctcctccatcctgaattagctattatccactgtccacgttcctcatcagtcaaatccaaagtcaaaggatnnnnnnnnnnnnnnnnnnnnnnnnnnactcacagcacctgacccgccgaggttgggaggattgtacactactctcatttaaaggggaaagttcggtaatatggaattaatatgaatgagatgcattaataagaaactgagcatgctgagagttgcaattgttggttttctggtttgattgatttccttttttcttagaaacatcaaagccaagaaagatcgttttaccnnnnnngacccagctgtaaatatgtacctagactgtttttaaatgtctttcttcatgaatgcttcacnnnnntccaggaagcctgtatcacctgtgtaagttggtatttgggcactttatatttttnnnnnnnnnnnnnnnnggatcctgtactctaataaatcataagtttctttttaaaaattttccaaaacttttctccattttaaaaagccctgttacaaaaggcgaactttcactatgttaaaatgttaaatatttggatatagcaacttcttttctcttcaaatgaatgccaagannnntttgtannnnnnnnnnnnnnnnnnnnnnnnnnnnnnnnnnnnnnnnnnnggcctgcccaatttcgtttcaggacagaannnnnnnnnnnnnnnngagtagaatgtgtctcacctctcttcggatctaaatatgaaaagtatgttctgctgaannnnnnnnagcannnnnnnnnnnnnnncctacctgtaaaccannnnnnnnnnnnnnnacgttcattttatcagctcactagtaacctttgagaattatctagttgtcatgcaaagattgcactttttgaattatgttaagttacacatgttgtaaaatgnnnnnnnnnnnnnnnttgaaagaaaaccaggttctttgtgcgttctgttgccgttgatttgaatggctgcgctgtnnnnnnnnnnnnnnnnnnnnnnnnnnnnnnnnnnnnnnnnnnnnnnnnnnnnnnnatta

SEQ ID NO: 13128 - DNA, 1263 bp, Macaca Fascicularis
  misc_feature (1)...(1263): n = A,T,C or G
aggaagaaatctagctgggatgtaggctttttttgtttttgcttttgtttttgtttttgtttttttgtttgttttgctgtttagcaataacatggtcaaaaaaggcaatcagaagttttaaatgcagttaatggatacatttgtcaagaatttcccccccagggttttccatggtgtactttgcaagaaataagcattctaatttttaaatctctttagcaaatattgtattttatgacagtggagttctggaaagcagcatctgtttttcgttgcgtgtttccattttaaagtgagttctcaaattggaaagaaaaattccttgagacttactttaaaatctaaagtgtgaaagaaacagcannnnnnnnnnnnnnnncattgcacctttgatgtctgcatagatccagaagttggacattttacctaacaacatcacttttgttaaacattccaactccaaaacgatccccagtcactttaatctcagaatgttggaatgatgtctgttggaaaacccaggactccacatacaaaactgctaagattttgtttcccatctctttctaggtgtttgcaatgtacaaataatacagctgtgctaatctcacatttagccatgatagatgatggttctagagtatacttccatttgtaagtcctcctgataatcttaagcgctttcttgtttatcactatgtacatctgaaatattttgtacttcatttgtttttatccattctgaattttcaaagcataaaaatgtgaaagaaaaattgagataaacattttgttcactattatnnnnnnnnnnnnnnnnnaatgagaatgatattaaattacgactaaaatttaacaaatagtattttcttatagaagcaatgtattaaatgattagaacacaggacagttcacagcaaattgtttacttacgtggcataattgaaatactattatttggaaagagttctatattgcttaccttagcaaaccagaattgttcatagacttgtgataatatggtgttatgggaaaacatttcgtgcgcatgatgaagagagcaccgttaatctagtcttgactgcccctggtggaacatttgaaagcccctgggaccccaggagagaggtttttgcagcatgtatgcctggaacacacttgtgagttagcaagaccctgctgtgattacgctgttgtacaggtcttcaaagtatattgcctaatataagtcatgttatttctagattggattttaagtaagta

SEQ ID NO: 13129 - DNA, 782 bp, Macaca Fascicularis
  misc_feature (1)...(782): n = A,T,C or G
ccagcagtgctgagaatgggaaggaaagatacaacttccccaacccaaacccgtttgtagaggacgacatggataagaatgaaatcgcctctgttgcnnnnnnntaccgcaggtggaagcttggagacgatatnnnnnntattgtccgttgtgnnnnnnnnnnnnnnnnnnnnnnnnnnnnnggggaagtgtccttcatcnnnnnnnnnnnnnnnnnnnnnnnnnnnnnnnnnnnnnnnnnnnnnnnngactggcgtcagaagctggactctcagcgaggggccgtcatnnnnnnnnnnnnnnnnnnnaacagctacaagttggcnnnnnnnnnnnnnnnnnnnttgctggctggatctgaatacctcaagcttggttatgtnnnnnnnnnnnncgtgaaagactcctcacgccacgtcatcttgggcacccagcagttcaagcttaatgaattggccagccagatcaccctgagcgtggagaattnttggggcattctacgctgcgtcatcgacatctgcatgaagatggaggagggcaaatacctcatcctcaaggaccccaacaagcaggtcatccgtgtctacagcctccctgatggcaccttcagctctgatgaagacgaggaggaagaggaggaggaagaagaggaagaagaagaggaagaaacttaaaccagtgatgtggagctggagtttatccttccaccgagactatgagggcctttgacgcttagtggaatgtgtatctaacttgctctctgacgttagcagagaaataaa

SEQ ID NO: 13130 - DNA, 683 bp, Macaca Fascicularis
tgtgtgcatgggtgcataagggttatgagcagggtgcgcttgccccctctggctactgtgtgcagcatggactatgggggacaagaataggtgagggagaccaggagaggctgctgcagtcatcccagtgccttagacaagagtagggggcaggggtggcagcaggctggaggggagagaagaggaaacacatcctcaatgtatattattctccctgattagaccatcaagagtccagagtgcctggcagagaggcacagagtaggcatctcattgatatttgctacttggatgttgaaagaagagaggttggattccattcgctccattcctctcaggttgaattccctcctcagtcaccagcagagctgagagcagaagctgggcatgacccaggccttccccctcagcactcacacatccacacatccacctgcagctcccaggtgggggccccgccttcccggtcctctcctgcctgctgtctctcctcccactagagtacattggagaagctcaagtcctccggatgcattcaagccagaacacagaggagaagacatcgaagccgagggcagagagctgaggagccctaacaccttcccctgtcttgctcaagagcagccctaagggttcaggggtgtttctgtctccaccaccttcatagcagtacctgattccct

SEQ ID NO: 13131 - DNA, 730 bp, Macaca Fascicularis
  misc_feature (1)...(730): n = A,T,C or G
tgcccaggccatcnnnnnnnnnnnnnnnnnnnnnnnnnnnncttatattgggtggagaganttgatctgggcatgttctgtttcttcatcgnnnnnnnnnnnnnnnnnnnnnnnnnnnnnnnnnnnnnnnnnnnnnnnnnnnnntttatcacttttaatgaatttggtgtgatttgttgtagatttttaaatttcccttttggagagaaaaaccaaaaaaactcgtccccactggtaaagcatgggtcttggtccaagcccctgctcagcccctcccagtttttagcttgaatgagggtggggtctctgggaccctnnnnnnnnnnnnnnnnnnnnnnnnnnnnnngtgtgtgtgtgtgtgtgtgtgcgcgcacgtatgccctgagacccaggacagaagctgcagtcctaagagctggttttatcctcgtcattctgcgtgccctcccacacaccgcctgtgtcagggctcagggttgcctgctttatacgagcccccctcctttnnnnnnnnnnnnnnnnnnnnnnnnnnnnnnnnnnnnnnnnnnnnnntctgcccttgcactactttgtctgtccccccgtcccgtgtcccccgtcccacagcctggcacctgcctgatagctcctgtgtccccatgctggtcctcctggcccaggctacaggagccagcctggggaggcctcctacccccccctcgctgcgtgtgggtaattgtgttttggggaa

SEQ ID NO: 13132 - DNA, 714 bp, Macaca Fascicularis
  misc_feature (1)...(714): n = A,T,C or G
aacatgnnnnnnnnnnnnnnnttggtgtcagataccttttcatcctgagctctctcacctacctgctctctcttctagagcaggatactggggtactttaagaagggtgctcctttcaagatgcccagaaagactgtatttaactcttgctatttgtaacttggggatggtctcccctgccccagggcacataagagcaaagggtccaatggtcagtggatgactctgcaaaagtgaccccctgtgccagaagctatagccctctccccgacaggactctcttgttggccagagggcccgcttcccatgggcattgcaagtgccaccgtgcggggcctggctctgcacacccaggaaaagtctgcagacccccagccctccgcaataattcaccagaccagaagccactgatgtacagagaacactttaaaaaatgtattttatgtgaaaaaaaaagttaaaactctgtatactgtatcagcagctttgtgtaaaaatggcaatcaagagagtctaatatatttaaaacttttttaaaaaaaatcttcgcggatctttgatatcgtattgaagtaacttccaggtagcccctcgccacgcggcaccggtgggcctcgggtccaaaaccgtgggtcagccacatcccaaagggggcacatgtccctggagttgcttccagatgccaaggcctgtgacggaattcgctgttaagag

SEQ ID NO: 13133 - DNA, 644 bp, Macaca Fascicularis
  misc_feature (1)...(644): n = A,T,C or G
agggcaggccnannnctcannnagaaggggaggcccctggcnnnncngggttcagtcctaggacgcaggntcagcctcaggttgatgggggataatgtgctcctggggcctgcctcctgcacggggctccacggagcccagctcccagacacgctaataagtgcctagggttgcccgctgtggcctgctccccgggagcaagaggccaccaagcagaggcccatggggctgaggatggagccgcccccagccgactccaagcccgtagcgggcagaggccaccctggactactctccctgtccagccgggcctcgctggcctactcctaccttccaggcccactgcactcctgtctgggaggccctgatgagggcagcccagcccccgcacccacccccaaccagagaagcacagatcttggggagctgccccacaagccccgctggccaccgtgggctgcagccactgcgctgctggcttctccccaccatccctgccacctccactgtgatgtatgtctgctccctcgtctgttcccccaggatctcgaagtgactccgggctgagcagtggtgcggctgggggaggggtgacgattctcctcaggcttggccctgcaagcaaacccacatatctgctctgt

SEQ ID NO: 13134 - DNA, 650 bp, Macaca Fascicularis
tatgagcatcctgagaggctgcggcagttgcagcaggagctggaggcctttcgtggccagctgggggatgtgggggctctggacactgtctggcgggaactgcaagatgcgcaggaacatgatgcccgaggccgttccatcgccatcgcccgctgctactcactgaaaaaccggcaccaggatgtcatgccgtacgacagtaaccgtgtggtactgcgctcaggcaaggatgactacatcaatgccagctgcgtggaggggctctccccatactgcccgccgctagtggccacccaggccccactgcccggcacagctgctgacttctggctcatggtccatgagcagaaagtgtcagtcattgtcatgctggtttctgaggctgagatggagaagcaaaaagtggtacgctacttccccaccgagaggggccagcccatggtgcacggtgccctgagcctggcattgagcagcgtccgcagcactgaaacgcatgtggaacgtgtgctgagcctgcagttccgagaccagagcctcaagcgctctctcgtgcacctccacttccccacttggcctgagttaggcctgcccgacagccccagcaacttgctgcacttcatccaggaggtgcacgcacattacctgcatca

SEQ ID NO: 13135 - DNA, 576 bp, Macaca Fascicularis
gctgcatccctgttttacaatgcaaaatttaagcgcggttattgcccgtggtgattaaagtgtggttatgggcaggaagacagactgtgtgaaaaaggaatgacatcagggctcctcctcttcttcatcagcaactaccataaccagtttgcaagtcaaatggcatatttcctaacggcaggcacggcggcccctgaaagacaacagctccctttctgcttcagacaccactcaaacatttagacacggctctgtccgttttcctagctagagaaggtgataccttcttccaccactcagagatgttgagacgttttcagaatttcttgttgaaatgaaaaacatcaagataaaggacgcctttcaggcattagctaaacttctgcttcataactttgggtgagacatggtgagcctcctggtttagagttcttttgtctttttgtgtggaatgactttttgctgtgattgttttgaatgttgggtttctgctgtctgcttagtacccatacctgaattttttgagactttaaatattgagggagttagatgatgttatgacatgattgtagactt

SEQ ID NO: 13136 - DNA, 752 bp, Macaca Fascicularis
  misc_feature (1)...(752): n = A,T,C or G
gaaatgattgctgagcccggggtgggggaattgcatctgcaggaaagagatgcagcatgctcctcactnnngagtgctcacctgtcctgcttctctgcaggtgaaaactctgggggatgctgatcaatagaccttggtcccaagctctactgggcccttggaggtagcaaggccactgggttgccacccgttttctatcctcttgctcatgaccagtcatacggtgaggctggggaattaacatcctcaggcaggaactagcagttgtttatccagcaatgcctcaaggatgttgctttgctcctaggagctggctattgggtgtgtcttgtgcagtcagtcagcatcacagacacgcagatgctcaccaacctggctcagctgtgacctaaatcttctggtggaaagcttttcactgaggttccttccctgcaaacgttgaatctagcctaattcacaactacacagaatatcctggctttcaaaggcttgccatgtgccccatctcattctatactcatagcccatggaggtggggattttcatttcttttctctagacttggaagctgagattcggagaggaagcgtcccttgtgcaagatcacatagttaggaggtgacacagtgctaagacttgaacccaaggctctaagaggatttcttcttttcagagtctcttctctgtccatttctgtgactgagctgtgcagaagttgacagcagggaaagctacattgattttcatccttt

SEQ ID NO: 13137 - DNA, 618 bp, Macaca Fascicularis
tggtaaagtggtgtccaccctgccctccaccatcctgggcaagggttcccttcaggcaccccctgccagctccccagcctccccactgcttgggggctacacagtcttggcctcctccggctccacctaccccagcacagtggagatccacccggatgcgtccagcctcacggtcctgagcacggccgccgtgcaggacggtagcacggtgttcaaggtggtcagcccgctgcagctgctcaccttgcctggcctgggccccaccctgcagaacgtggcccaggcctcgcctggcgccagcacaattgtgacagtgcccacaggggctgcccccgggcccgaggagcacacggccaccattgaggtggctgccgtggcagaggaccacgagcggaagtagccgacgggagggcgaggcccctgggacggacggggctggctgcctctcagctgcggcagcagggaacgggcagaggccgcagggctggctcgggcaggtgcgtcacgtgggctgcagaaccaaagagaggaatcgccaaaacaaatcacgagaagagagaaggggacagaacagcgagagcaacctggaaatcggtcttcaggtcccacgttcccccc

SEQ ID NO: 13138 - DNA, 755 bp, Macaca Fascicularis
  misc_feature (1)...(755): n = A,T,C or G
aagttagcatattgnnnannnatgaatttgaaaccagggtttttttttttttttttggatgatgtaaaaccaactccttgccaccaaaataattaaaatagtcacattgttatctttattaggtaatcacttcttaattatatattcacactcttaagtatcaaaatttgccatttctcatgctcacctgaaagaggtatgcttccttaggaatacagtttctagcattaaacaaataaacaaggggagaaaataaaactcaaggagtaaaaatcaggaggtgtaataaaatgttcctcacatttcccccccccttcttttttttttgcctttgtcttggagagtcagagcttctgcattttctttactattctctttaaaacaagttttactgtgtagagaatacatatgtataaacataggtcaaatatatgtcttcattaggaaaataatcggaaaacatgttctagaactatttacaaaaataatttaagatgaaatctctaatatttataaaactagctaaataaatgcataattaaaaatatatttggacataatagacttggaagcagatgatacagacttctttttttcataatcaggttagtgtaagaaattccagtttgaaaccatccattttgtaactgaaccttgtgaaatatatgtatttcttgggacgtattctctagcacagtctgagcaattaaatagattcataagcataaaaaaaaaaaaaaaaaaaaaaaaaaagg

SEQ ID NO: 13139 - DNA, 717 bp, Macaca Fascicularis
  misc_feature (1)...(717): n = A,T,C or G
actggcccagcgctccagcttcctttccctgcctcttgccccatggagtgggaggccaggtgagtggagcnnnnnnnnnnnngcccttgacccctgggggcctgggaagtgtaggatctttctggactgggtcctggatcccggggctattccctggaggnnnnnnnnagttatgggataaggtcccttgggggtctccattttctttccaacaatttcatgttcactactggactcttacgggctcagtatctctccctnnnnnnnnnnnnnnnnnnnnnnnnncttcccttccctggagctgctttgcctttctaaagtatttatttnnnnnnnnnnnnnnnnnnnnnnnnnnnnagcataaggaatgggatgaggaggaattgggaggcggtctcctacctagagctcttccctggannnnnnnnnnnnnnnnnnnnnnnnnnnnnnnnnnnnnnnnnnnnnnnnnnnnnnnnnnggagcagggatgcagagaggcaggttggggagacaagggacccatcctaggccnnnnnnnnnnnnnnnnnnnnnnnctctacagccaggggcctgcccaggccagtggaggagccagagctctgggnnnnnnnnnnnnnnnnnnnnnnnnnnnnnnnnnntgtcctgttaggagagttcagtaccccgtgctttctttacactggagaggaactaaaagnntctccgtgnctatggaga

SEQ ID NO: 13140 - DNA, 839 bp, Macaca Fascicularis
  misc_feature (1)...(839): n = A,T,C or G
ccttgtgggaaaccagccccgcttttnnnnnnnnnnnnnnnnngtcagttatgnnncatccccactggttccctagaggctgtggccaggcagttaccccttcattttccccctatcccctgagatgtcccagatggctgtggaggcaaagtttgtccaggacaccctgaaaggagacggtgtgacagaaatccggatgagannnnnnnnnnnnnntgaggacaatcttccagctggagaggagtaaccatccctaggacttgaggatagccagcagaagcactgttggagtcagcaggcctctgtgctccctctgccctccagaactcagtgactcttgaacatggatgttatatattcttataacctgtttccattctccattcaaataaagagcagactgtggtacagtccatttaccccatgtgtgcacattcaggagcgacagtctctgctccctttcccttgagaggggccagatgtaatcaccctttgttggactagaaagagctcaaaccttttacattcctgtttgaatnnnnnnnnnnnnnnnnnnnnnnnnnnnncattaaaaggcaagcctggcacatctatccctgggcctttaaaaagccatttgcctcaaatggctgtagggttgtggggtggagggaggaagggctgggagggagtggggaggagctgctagctgtagtgtgacacactgtagtgcttgcaggaaaggagccagtcnnnnnnnnnnnnnnnnnnnnnnnnnngccacccagctctcattcctccctgctgttcggaggcaacatctcctctttttacagagggcacatcctttttcttacaaa

SEQ ID NO: 13141 - DNA, 758 bp, Macaca Fascicularis
tgctttgtgtatgttgcctcatatattctcactgtcatcaacatcctcattttacaggtgaggacacggaggctcagagaggttaggcagcttgcctgagatcacacagtcggtgagaggcagagctggaattcaaactccgggtgtgtcccagtgggttaaggtcgggactgatcctgggagagctgtctgtgtcctgtctgtgccaggggcatgtgtgtgccctcaaaagaaagtctccaccattagccatcacgcagagacccgagagtacagtgggcgggtgtggccccaaggacccgggctttctgaattttgatggtgtcatgtgagagggcttggggtgacggggtgaacaccagcacccctaagctggacctgtaccccccaacaccccagttctcagacacagccaggcagaccttatgctctgggtgatgggggccaatggggcccctcccaaagggtctccccacccagctcagtactggcccacggaaagggcaccccctcaggtgacacagggagggacaccagcagggaccatctgcatccagctcttggcacccaggtccccatctcagggatagtttcacaagcaggggcttcccaacctcttggccacacctagaacactcctgaaagagggaggcggtgcgcaaggccagcccctgctgtgcccacccattttccctactaaggcaggtgggaagggtctgcctggtgtcaccacagcgatcctgtccatgtctctctct

SEQ ID NO: 13142 - DNA, 904 bp, Macaca Fascicularis
  misc_feature (1)...(904): n = A,T,C or G
tccagagcccttcctacacgcagccctatgaaggctcctccgtgacgctgtccactgaggcttttctctatgtgggcaccatgttggatgggggtgacctgtcccgatttgcactgctcatgaccaactgctatgccacgcccagtggcaatgccacggaccctctgaaatacttcatcatccaggacagatgcccacagactaaagactcaactgtccaagtggtggagaacggggagtcctcccaaggccgattttccgtccagatgttccggtttgctggaaactatgacctagtctatctgcactgtgaagtctatctctgtgacaccnnnnnnnnnnnnnncaagcctacctgctctgggaccagattccgaagtgagagtgtcatagatcaatcccgtgtcctgaacttgggtcccatcacacggaaaggtgtccaggccacagtctcaagagctgcttttagcagcttgggactcctgaaagtctggctgcctctgcttctctcggccaccttgaccatgacttttcagtgactgacagcagaaagccctgtgctccgtggctgccgcctcacttcctgccgggcagggggcacgatgtaggccagtgctccagccacagaaaagaaagttcatgctttggtcagcctgccttcttttctccccttcatnnnnggctgtcgcagaaacaccctgtgtctttaaatgctgctgttctcaaaatgggacttgtgacggtgtacccgatcccccatctcctggcaaaataatgagttttaaatctcagtctttgaagtcatccattcattcaacaagtatttattgaactctaccatgtaggcacaatgtatggtnnnnnnnnncccatggtaggaaaacatagccccccaccctgtcct

SEQ ID NO: 13143 - DNA, 672 bp, Macaca Fascicularis
  misc_feature (1)...(672): n = A,T,C or G
gagcagcggggncnnnnnncagagggnnnnncnnagnnnnnnnnnnnnnnnnnnnnnagaatttctgcagatgcatacccaagggcccagctcccgggagaccacaccacagaatgaatcagcagcccaacccatcgggggatccttgaactccaccaccgactcagccctctgacagctacccaacagtccaggacagctgcatggcacccggcgggccgagcatgccacgggtccgctctgcatgccctgtctgtgccatgagtgtccctggccccttcctgccatgggcaggcccgcaggaagagccggtaggggtggaaaggggactcagatgagacacaccccacagccaccaccgccttgtcccacaacaagctcacccccagccccttgcagccaggccacagtgggggaggtgagtctagcccctnnnnnnnnnnttgcccaacacggagggatggcgttggcagtgccagcctccccagcannnaccaagtttcaacaggggcaggaggaggggccggcccctcctcagggagctggtatgagtaaggcctgagggtgcaggcaggcagccctgtaccccacccacatagactatactgtacatacagattttgcagtaggcttggggcagctgggtttgtccttgatgtatgatactgttat

SEQ ID NO: 13144 - DNA, 768 bp, Macaca Fascicularis
aaacgcgagagttctagggagaacagcaaatggagccattccgattctgacaaaaagtccagaagccgtcatcatagcccagagaagagaggctctgaaagaaaggaggggagcagcagaagccatggcagggaggaaaggagcaggagaagccggagcagaagtcctggtagttacaagcaaagggagataagaaaacggccacagcgaagtcccagtgcagagcaaagcagaagaaatgacaccagaagccatggcacagatgtgtacagaggagaaaaaatgtacaggagatatgcatactaaagtgacacagaatgaggcagaagtagagaagaaagactgtatgtgacaattacctgggaataaaaatatctccacttttttattgaatacttatagcaagggctaaattatgtactattgtctttctaataaaaaagctcaattttaatttttcatctctgtaaactgtcaagtacaaaactacatgagtactataagaatgaattttgcaaatatttgtaagtaagctattttggggctgtagaaatattttctgttggtaactgtttattgtgccccataccagataaaaaccgcatataactctgtgacattttctttgttctgaaacattgttaaaagaatgacagtacattgaatgggtataatttaattttttcaattcaaatttgttattcaaggatttgaatttgcttgaagtgaattgtaatcattatccaaattcactagtataaataaaca

SEQ ID NO: 13145 - DNA, 1046 bp, Macaca Fascicularis
  misc_feature (1)...(1046): n = A,T,C or G
gaagngnnnnaatcccaatctgctgaaatatgggaaaaattgaattttggaaacaaggaccaaaatgtcaaatttaggaagttgatgggtattaagagtgaagatgaagctgggtgtagctcagttgatgaagaaagttacaagactctgaagcaacaggaagaagtatttcgaaatttagatgctcagtatgaaatggcaagatcacagacccacacgcaaagaggaatgggtttgnnnnnnnnnnnnnnnnnnnnaggaatggatgcagnnnnnnnnnnnnnnnnnnnnnnnnnnntgggacttatagacttcttgttctgatgtcaggtccttgttcaccaaacagnnagcattctagcttgcatgggtgttgcattgactttaatttattgaaaaatacaaatttttgtaaatatcagatcagtgatactggtgttagtgttgtaatcaggttaaacccacttccattaaacttgacaggactatagaaggacaatattttttagttcatgaattctacttttcaaatatataaaagctgcaggtggggataaaatctcatacatggattttttcgtgtccgctgtcttgtgtacttttgtacttaaccttgtacagttattttcatctcttgaaacatgaaagaaatgttatgtagatgttctttagaagatctggccatttggtacataatccagcacagataagctgggtggtgatgacaataaaaatggttttctcaaannnnnnnnnnntttaagttacctgggatgtttctttgaatttgttttatggtttctgtnnnnnnnnnnnnnnnnnnnnnnnnnnnnnnnnnnagaaatcacccccaccccggccctttttnnnnnnnnnnnnnnnnnnnncaggcaataccatggtgagcaaaaatgtaaaaggtgggaggagaaaacttattaaaatagtatgttttcctattataagggacagacttggtattcagtgtttgtcaaatattacatgtgttattcaggaaatagattaatgcattaaagggatgtaag

SEQ ID NO: 13146 - DNA, 322 bp, Macaca Fascicularis
  misc_feature (1)...(322): n = A,T,C or G
ccagctacctctggatgacgccttgctaagnnnnnnnnnnnnnnnnnnnnnnnnnnnnnnnnnnnnnnnnnnnnnnnnnnaggttgtggtggctgagtccgagctacagaaggaactaaagaaggtaaagacagcccacggcaacgatggggactnnnnnnnnnnnnnnnnnncccctgagccttatacctccagcacagggggtgccgtgagacttcaaggcttggtccttcttgaccacggcagcctcctatcttctaggagctatcacgggtctacaagaactgggccgtggggcactcctagccagtgagtcatggtc

SEQ ID NO: 13147 - DNA, 414 bp, Macaca Fascicularis
ggcgactgtgtacactgctagacagccccgcgtggggagtgcaggtggcttcggttgtggccgtcgcgtcccgggagcgtcgctgcctggtgaacgaatgggtactaggaaaaaagttcacgcatttgtccgtgtcaaacccaccgatgactttgctcatgaaatgatcagatacggagatgacaaaagaagcatcgatattcacttaaaaaaagacattcggagaggagttgtcaataaccaacagatagactggtcgttcaagttggatggagttcttcacgatgcctcccaggacttggtttatgagacagttgcaaaggatgtggtttctcaggccctcaatggctataatggtaacttaattaattaactgttgtcttatataagaacctgaagagtaagagatgcaaa

SEQ ID NO: 13148 - DNA, 1175 bp, Macaca Fascicularis
  misc_feature (1)...(1175): n = A,T,C or G
accatggactcgaggaccgaggagtacgagctcaacggcggcctgccgccgggcacacccggctccccggacgcctcgccggcccgctggggctggaggcacgggcccatcaatgtgaaccattatgccaacaagaagagcgcagccgagagcnnnnnnnnnnnnnnnnnnntgatggccaacgcgtcccagctgaaggccnnnnnnnnnnnnnnnnnnnnnnnnnnnnnnnnnnnnnnnnnnnnnnnnnnnnnnnnnnnnnnnnnnnnnnnnnnnnnnnnnnnnnnnnnnnnnnnnnnnnnnnnnnnnnnnnnnnnnnnnnnnnnnnnnnnnnnnnnnnnnnnnnnnnnnnnnnnnnnnnnnnnnnccacgggccnnnnnnnnnnnnnnnnnnnnnnnnnnnnnnnnnnnnnnnnnnnnggggtccagaagcccttgatggacatggcgccccagcaatagggcacccaggaccctggatgctgcctgccctgcagctcagccgcccgaccccaggagccgccgtacctgtgaggtgtccacctccctgcatgtggcactccccagactgccagagcccaggccggcctcatctgcaccatgtccccggaccagcgcttgctctgactgcgaccaagcgccatgcaggaggccactcttgtctctcggcggctgttcccaggaggcagctccctcctggcacatggggctggccacaatagcccagagggtcagaactggatagccacagagacctgtgcccagagaagggtctcgacccacccaaggacacacagcaggtccgtggatgggctggaagagggaccagggccagcctctgtcttaggacattccagaaggacgaggaggtgtctctccctctcgcgaagcaccagcgtccccacctcgcgtgggccctgtccgggttgnnnnnnnnnccccagcctctatccacttcctaacccagggaccctgcacagccagaactgcctttggccctactaatgnnnnnnnnnnnnnnnnnnnnnnnnnnnnnnnnnnnnnnnnnnnnnnnnnnnnnnnncaagcctgtgagggccatagaccctgtatataccctgcaccagcagtgaccaggcagagcccagccccctccacgggggtcccagcgcccacttttctaatcatgaatgacc

SEQ ID NO: 13149 - DNA, 695 bp, Macaca Fascicularis
  misc_feature (1)...(695): n = A,T,C or G
agcannnnnnccgcannnngagtgagaaaggggtctctgtgaagattatggactacgaagattttaaatattgttgggaaaagtttgtgtacgatgatggtgagccattcaagccttggaaaggactaaaaaccagctttcgatttctgaaaagacgcctnnnnnnnnnnnnnnnnnnnnnggtctccccgggcctcatgagttttgctctnnnnnnnnnnnnnnnnnnnnnnnnnnnnnnnnnnnnnnnnnnnnnnnnnnnnnnnnnnnnnnnnnnnnnnnnnnnnnnnnnnnnnnnnnnnnnnnnnnnnnnnnnnnnnnnnnnnnnnnnnnnnnnnnnnnnnnnnnnnnnnnnnnnnnnnnnnnnnnnnnnnnnnnnnnnnnatgcttgctcnnnnnnnnnnnnnnncaggtgatctgcctgtcttggcctccccaagtgctgggattacaggtgtgagccactgtgcccgcctgggatcatatnnnnnnnnnnnnnnnnnnnnnnnnnnnnnnnnnnnnnncacctacatgaatattcatagctcctcnnnnnnnnnnnnnnnnnnnnnnnnnnnnnnnnnnnnnnnagcataaagctcctgccccaacccctcctgcttctaaatgtctgtatctggtgtttcccagaggctgcnnnnnnnnnnnnnnnnnnnnnnnnnnnnnnggctatc

SEQ ID NO: 13150 - DNA, 763 bp, Macaca Fascicularis
  misc_feature (1)...(763): n = A,T,C or G
agggacctaggacaaatcccagccagttagtattcatnntgctcctgtttcctcagctgaaaaaggaagttggttatgccacnntcttggccttaatggcattaaatgaaatttataggaagaaggtttttgctcagtacctggcacgcaacagacaatggataaatgttagttggatccagatatacacagaaaaatacctgcttcctgccagactggataattgttgaatgggcacttgtccatagtctagaaagcctgtgcttctaatccctaagccagatctttgactaccttttcagttgcttctttagcactctttgttgcttctctgtgtgtcctagtttaaattcatttcctctccagcaaaagtgagcttaaatcatttgtccaaactaaagctcttatgcttttggaagggctgcctttgcaagtgagttttctgagaaatgactgttgttcccaaaacaagagggagctggctggaagcaccactattcttctttaggcatcttgttacagagagaggcaggatcttcactgacatattaaatcctgttccctgaaccagcccctccttcttctgctccacttcctcacctctgcagagtcattttcaggtgtcaaccttactgatttgcactgatctgtttgttccctgagctttttaaatgccctatgaaaattttctttcctccgtcggtcatcatgcatccaattgcggggaaatgtttgtcaaaccagcctgcgaagcagcatggtg

SEQ ID NO: 13151 - DNA, 873 bp, Macaca Fascicularis
  misc_feature (1)...(873): n = A,T,C or G
tttaaatatgtgaagacctttaannnnnnnnnannnnnnngacttccgagaaatcatcctgaaagctaccattcttatatgtggaataacttttttaagcatattgatatagatcctaataatgcacatatccttatggggaatgctgcagatttacaagcagaatgtgatgcttttgaaaagaaaataaaggaagctggaggaatagatctttttgttggaggaattggtccagatggtcatatcgctttcaatgagcctggatnnnnnnnnnnnnnnnnnnnnnnnnnaaagactctagcaatggataccatcttggcaaatgccaaatattttgatggagatttatcaaaagtgccaactatggctctaactgttggtgtggggacagtgatggannnnnnnnnnnnnnnnnnnnnnnnnncaggggcacacaaggcatttgccctgtacaaagcaatagaagaaggagtcaatcacatgtggactgtttccgctttccagcagcatccccgaactatttttgtatgtgatgaagatgctactttagaattaagagttaaaactgtgaaatactttaaaggtctaatgcatgtgcnnnnnnnnnnnnnnnatccactattcagtatgaaagatggaaattgaaggagattggagcaaaattctgcttgaatgaacagagnnnnttttactaagtagtagatgaattttcagctatgcaatatgataaaacatggggaattttgaagactgtcattttttcatttgagtatctatgttaaacattccataatttgaatatttatatcttgtacttgggtttaagagaannnnnnnnnnnnnaagattggctattataaagtatgaagtcac

SEQ ID NO: 13152 - DNA, 1153 bp, Macaca Fascicularis
  misc_feature (1)...(1153): n = A,T,C or G
ggataaagagatcaaggatgtgaaagaaatgttaannnattccaactgcgggnnnnnnnnnnnnnnnnnnnnnnnnnngggagagcagactccttctgggacttcgagtgccttttccagttatttcaacagcaaagttggcattcctcaggagaatgcagaccatgatgactttgatgctaatcaactatnnnnnnnnnnnaatgaaccaccaaagccagcacccagacaaatttccctgccagttaccaaatctgctgacaatgcatttgagaaccctttctttaaagactcttttggttcatcacaagcctctgtggcttctcctcaacctgtatcttctgagatatatagggatccatttggaaatccttttgcctaaattctgaacttggtctgcagaccatccggaggaataaaaaggttggccttagtagtcannnnnnnnnnnnnnnnnnnnnnnnnnnnnnnnnnntgcctttgttccagcnnngacatattatctgttgccttatttctcgttgcctcttctacctgtaaaatgcttttcactttctgtctaggttaaagctaaactgaatctatggctttaattaaattaagatcctaaactctctagcttaagtgtaaatgaagtacagtaattttcctactgaaccctgcctattgtgtccctggaacattatagaacacctgccttctaccctctggttgggagacgcagccaccacatcccttcatctcatagtgttttgaataaattttcaaatccttattgttcaaagttgttcgggggttctgtttcagagcataaaacctaaaggttatagtagaacaaggcaccttcttaaaagaaatcttgctttagactgtcagttacagagaatttctaaagtacaattgaagcaactacaacttctccttagacactttggannnnnaccactgacggacctttttaaaaagatagcttctcttctttctgaagatcagtttctcccaaggccaagattgtccttttctcccatctcctgctagccattgcaaatgagggaagagcattattcatctctcctctcgttttcttcctgattcttttttcagtcagttttgctcctgggttcaagtagcattaccactcttcacaagcaac

SEQ ID NO: 13153 - DNA, 612 bp, Macaca Fascicularis
  misc_feature (1)...(612): n = A,T,C or G
cgccaggcagctgtagccccagcnncagccccagctccaacagaagcagcccggccacccactccccgtgaccgcccgcgccacatggacacaaccctcgccctccgccccggcttttctctgcctttctaccgaccatgtgacccctgccagccctgcccccacctgtcctcccgggcagcactggggaccttccctgggggacggggagggaggaggcagcaactccttggacagaggcctgggccctcagtggactgcctgctcccacagcctgggctgacgtcagaggccgaggccgggaactgagtgaggccctggtcccgggtctcaggatgggtcccctgggggcctcgtgttcatcaggacnnnnnnnnnnnnnnnnnnnnnnnnnnnnnnnnnnnnnnnnnnccaggacttggctcccccatcctcagaactcacaagccattgctccccagctggggaacctcagcctcccccctgccttggttggtgacagagggggtgggacaggggcggggggttccccctgtacataccctgccgtaccaaccccaggtattaattctcgctggttttgtttttattttaatttttttggttttgatt

SEQ ID NO: 13154 - DNA, 1263 bp, Macaca Fascicularis
  misc_feature (1)...(1263): n = A,T,C or G
aatgatgagnanngctannanntatgnnnnngataagtatagagaccaatacaactggttcttccttgcacgnnnnnctacgtttgctatcattgaaaacctaaagtatttttgttaaaannngatccatcacagcctttctatctgggccacactataaaatctggagaccttgaatatgtgggtatggaaggaggaattgtcttaagtatagaatcaatgaaaagacttaacagccttctcaatannnnnnnnnagtgtcctgaacagggggggatgatttggaagatatctgaagataaacagctagcagtttgcctgaaatatgctggagtgtttgcagaaaatgcannnnnnnnnnnnnnnnnnnnnnnnnnnnnnnnnnnnnnnnnnnnnnnnnnnnnnnnnnnnnnnnnnnnnnnnnnnnccaaccaggtagtagaaggctgttgttcagatatggctgttacttttaatggactgactccaaatcagatgcatgtgatgatgtatggggtataccgtcttagggcatttgggcatattttcaatgatgcattggttttcttacctccaaatggttctgataatgactgagaagtggtagaaaagcataatacgatcattgtataagacatgtgttgtcattatttgtagtagtaactacatatccaatacagctgtatgtttctttttcttttctaatttggtggcactggtataaccacacattaaagttagtagtacatttttaaatgagggtggtatttttctttaaagcacatgaacattgtaaatgtgttggaaagaagtgttttaagaataataattttgcaaataaagtatatattaatatttatgtgataaattctaaattatgaacattagaaatctgtggnnnnnnnnnntgctgattggttaaaaaaattttaacaggtctttagcattataagatatgcaaatgatatctctagttgtgaatttgtgattaaagtaaaacttttagctgtgtgttccctttacttctaatactaatttatgttctaagcctccccaannnnnnnnnnnnnnnnnnnntcaaaatatacaactaagcaactgaagaaaattaaagtgaaagttgaaaaatatccctaagaaaaaaaaactgaaaattacttacaaaattgagtaattttcctggaagctaatttagtgtcattcctcagagnnnnnnnnnnnnnnnnnnnnnnntctgtnnnnnnnnnnnnnnnnnnnnncatt

SEQ ID NO: 13155 - DNA, 751 bp, Macaca Fascicularis
  misc_feature (1)...(751): n = A,T,C or G
tgtcagggcatgtgtgcatacaagcagattcagcactgcctaccaggctctcctgttaccttgcctnnctgcttggagggggccccctttgctcacccccagcgtgccccccacccagaactgataaggatgagaatggtggtggcagcttctgagggcctgcttggcctcctgggggcaaagcccctctgcctgaagcaataacaacagcagcaaaagcagccccagggagctgccggggtgtctgtctctgttctccttggcgtttccttcatggccctgaatcccagctcacccatggatggaagaccccccccccttcaactgaaagcctttctgcctgccttcctgtggctgttgctttctcaggcttggactgtcccctggttcaccctgtctttgggatgtggtccctgagctgggcaggctccttgggtggattagagagctggccaagctataagcacctgagctacctgcaagggtgcccagagtggagcttggcctgagggcatgttgtagccctggcccccccagtccacagaggcccccaggaacactgcctttcagtggacagggtagggactggtgggaggggccccatgagcctagcttctgctgccctctgctgtctgctgagatgccaagctagtggagagggagtgggcaggggtggccctgccctgtgcccaagtggtgtgatgctctttgtggcaggataccagggtactggggggcaatgctatgatca

SEQ ID NO: 13156 - DNA, 732 bp, Macaca Fascicularis
  misc_feature (1)...(732): n = A,T,C or G
ctgtatnnnnnnnnnnnnnnnatgtgacttacaagttgtgaacaaggaggtannnnnnnnnnnnnnnngtctagaacaggtagaacgatgtatgtaaaactgaagattatcctgcttaaattttttttttttttgtaaagttaaaattaaatnnnnnnnnnnnnnnnnnnagtatggacagggaatagcaactcttacttcttccccttgttagacatccttcttttttcctaaaggaagaagatcctaacagtgcaatggataaagagagacgaaagtctttaataaaaccaaaattattgagactgcagagagacattgaaaaagcctcaaaagacaaggaaggcctggaacgaatgcttaaaacatactccagcaactcctccttctnnnnnncaaagagccagaaagacacagcagnnntaatggatgagaacaatttgaaactagaccttttggaagcaaactcctacaaactgtcatnnntgttagcagaacttgagcaaagacctcaacccagccatccttgcagtaactccatcttcaggtggagnnnnnnnnnnnnnnnntgattatacacgagaaaaaagaagaaggatggtggtttggnnnnnnnnnnnnnnnnnnaggccattttcctgccgcttatgtggaggagttaccttcaaatgctggcaacacagctacaaaggcataaaacaagactctgaacatactaccttcacactctgt

SEQ ID NO: 13157 - DNA, 760 bp, Macaca Fascicularis
  misc_feature (1)...(760): n = A,T,C or G
gggatcagcaaggaccgaattcttataaagctgtcatcaacctgggaaggaattcaggctggaaaggagctcgaggagcagcacggcatccactgcaacatgacgctactcttctccttcgcccaggctgtggcctgtgccgaggcaggtgtgaccctcatctccccatttgttgggcgcatccttgattggcatgtggcaaacacggacaagaaatcctacgagcccctggaagaccctggtgtaaagagtgtcactaaaatctacatctagtacaagaagtttggctacaaaaccattgtcatgggcgcctccttccgcaacacgggcgagatcaaagcactggccggctgtgacttcctcaccatctcacccaagctcctgggagagctgctccaggacaatgccaagatggtgccnnnnnnnnnnnnnnnggcggcccaagccagtgacctggaaaaaatccacctggatgagaagtctttccgctggttgcacaacgaggaccagatggctgtggagaagctctctgacgggatccgcaagtttgccgnnnnnnnnnnnnnnnnnnnnnnnnnnnnnnnnnnnnnnnnnnnnnnnnnnnnnnnnnnnnnnnagtgcaatcctgagggtggactccagatctgcaccgtcggccagctggggtctgactgcacatggcttctcatgaatcttgcgttttttacaaattggagcagggacagatcatagatttctgattttatgtaaaatttgccta

SEQ ID NO: 13158 - DNA, 705 bp, Macaca Fascicularis
ctggatgtgacaagagccaccaataagcagatgagggaggaggaccaggaggaggccgccaagaggaggaaaatgagccagaagggcaagagaaagggaggccggcagggacctgggggcaagaggaaaggggggccgcccagccagggagggaagaggaaagggagcttgggaggcaagatgaattccgggccgcgtggcttgggtgacaagagaaaaggaggacagcgcccaggaggaaagaggaggaagtaatagtttctcaccgtcggacccgactgaaaaccaaggactataaatactaagtgttaagttctaggtacttgtacggggactcagaaggacctggccgctgccttcattgagtttaaagggacaggattgcccttccctcaagagagtatgtaagtgttggactgcagaaattaatgtttttcccacaaccgagactttggctggagattaagaacttatttgaggatttaagaattagggaaataatttggtggaaaccaggaatgagttctattcttaaacagccttttttatttttaactttggatatggggtgaggtagagttggccatatttcacacttaaattgacgtatatgtttctgcattatttttacaacaagcttgtgtatcagagcggggggtgcggggaagggaaagaaaacagtttcagaattggataggcaagtga

SEQ ID NO: 13159 - DNA, 664 bp, Macaca Fascicularis
  misc_feature (1)...(664): n = A,T,C or G
gaggtgcggtggcttnnngatacgnnnnnnnnnnnnnnnnnnnnnnnnnnnnnnnnnnnnnnnnnnnnnnnnnnnnnnnnngggggcccacaatatcaaggaacaggagcggacnnnnnnnnnnatccctgtgaaaagagccatcccccacccagcctataatcctgagaacttttccaacgacatcatgctactacagctggagagaaaggccaagcggaccnnnnnnnnnnnnnnnctcaggctacctaggaacaaggcccaggtgaagccagggcaggcgtgcgatgtggccggctggggacagacgacccccgatggaaaatactcacacacactgcaggaggtgaagttgacagtggaggaagatcaaacgtgcaaatcccgcttagnnnnnnnnnnnnnnnnnnnnnnnnnnnnnngcgtgggggacccagagattcaaaaggcttcctttaagggggactctggaggaccccttgtgtgtaacaaggnnnnnnnnnnnnnnnnnnnnnnnnnnnaaagaaatggcaagcctccacgagtctgcaccaaagtctcaagctttgtacgctggataaagaaaaccatgaaacgccactaactacagaaagcaaactaagcccccgctgtgatgaaccaccttctcagagccgagtccaga

SEQ ID NO: 13160 - DNA, 727 bp, Macaca Fascicularis
  misc_feature (1)...(727): n = A,T,C or G
agaggctggaccgcacagcnnnnnnnnncacgannnnnnnnnnnnnnnnnnnnnnnnnnnnggagcgtggcgtgaagggcgagagtgtgctgcagcgtgtgcagagcgtggccggcaacnnnnnnnncggcgattgtggccagtcggacccccgctgggccnnnnnnnnnnnnnnnnnnnnnnnnnnnnnngagtnnnnnnnnatccacaggagcctgggtgtccactgctccaaagtccggtccctgacgctggactcgtgggagccagagctgctaaagctnnnnnnnnnnnnnngaaacannnnnnnnnnnnnnnnnnnnnnnnnnnnnnnnnnnnnnnnnnnnagcaggaaacccacagccagcagcccccggcaggacaaggaggcctggatcaaggacaaatatgtggaannnnnnnnnnnnnnnaaggcacccatggcaccagccctggaggccccaagacgctggagggcacagaagtgcccacggccccacagctctccccgcgtccccactgcccgccgcaaggtccggcttgagcctgtcctgccgtgtgtggctgctctgtcctcaggtgggaggccatgccccggcagggctgagaggggcttgcctgggtcggggatggactccgttaaggggttgggggcaggggctctgggtgcacctcaggctccacagactcccactgtgacaatggggttctctgccacaccccgggc

SEQ ID NO: 13161 - DNA, 194 bp, Macaca Fascicularis
cccctccccttaaaaaatccatctcattttgccatttcatgcccttgccaaaagtgggtttttgttcattttttaaaaccagagcacctatcccatccatttgggttttttgtcccctgaaaatagaccaagatttagatcagtattttttgtccccaccccacccttttatatcccgagatgtgcccctatcc

SEQ ID NO: 13162 - DNA, 718 bp, Macaca Fascicularis
  misc_feature (1)...(718): n = A,T,C or G
cccaggaacaactgcacttgnnncagacactctcaaagctccctggagaagcaagaactgaagaaagtgaactggaacctccaaaatggcatctccagtttctcctactggcaccaatacacacagcgtgaggacttcacagttgtggtccagcctttcttccaaaacacactcataccactgaacgagagaggggacactgacctcaccttcttctccgaggactgttttcacttctcagaccgtgggcatgccgagatggccattgcactctggaacaacatgctggaaccagtgggccgcaagactacctccaacaacttcacccacagccgagccaaactcaagtgcccctctcctgagagcccttacctctacaccctgcggaatagccagctgctcccagaccaggctgaagaagcccccaatgtgctctactgggctgtgccagtggcggcgggagtcggccttgtggtcggcgtcatcgggacagtggtctggaggtgcagatgaggtggccggagggaagatcctccagtgagcctgcgcactgtggccctctaggcccaggggtgggtcctccctagccactctcctcactgccctccgccccagccactcccagccaccaggacatgcttcgacacctggtgccataggaagccccaggggatagtcacaacttctcggggcctgggcttcttccaggcctatgctc

SEQ ID NO: 13163 - DNA, 598 bp, Macaca Fascicularis
aaagaagggaaaagatgcacctatcaaaaaggaatcactgggccactggagtcaaggcttgaagatttctatgcaggaccgcaaaatgcaggtttacaaagatgagcaggtggtggtaataaaggataaatacccgaaggcccgttaccattggctggtcttaccatggaccgccatttccagtctgaaggctgtgaccagggagcaccttgaactcctcaagcatatgcacactgtgggggaaaaggtgattgtagattttgctgggtccagcaaactccgcttccgattgggctaccacgccattccgagtatgagccatgtacatcttcatgtgatcagccaggattttgattctccttgccttaaaaacaaaaaacattggaattctttcaatacagaatacttcctagaatcacaagctgtgatcgagatggtacaagaggctggtagagtgactgtccgagatgggatgcctgagctcttgaagctgccccttcgttgtcatgagtgccagcagctgctgccttccattcctcagctgaaagaacatctcaggaagcactggacacagtgattctgcagggcctgagctgct

SEQ ID NO: 13164 - DNA, 705 bp, Macaca Fascicularis
  misc_feature (1)...(705): n = A,T,C or G
ttctatgaagcaaaccactgtagctttagctgggttcggtcatatgactcactgttagtggaatgcctagtttttcatcttatatgcagtctggggagtagatgggtacataatttcttatgtattcgtgtgtccattagtgaatagttcaagtctgtttaagaatgttttgagatgnnnnnnnnnnnnngttnnnnnnnnnnnnnnnnnnnnnnnnnnnnnnnntatggtttaaacatattcttagctaaattttttccattagtttttgaaattgatggcagttgtctgatccannnnnnnnnnnnnnnnnnnnnnctctggagtgtgtgtatgtgtgcatgcatgtgtgtgttggagtgagtgagtgagagaatgtnnnnnnnnnnnnnnnnnnnnnnnnnnnnnnnnnnnnnnnnnnnnnnnnnnattttgagttttaaaagaannnnnnnnnnnnnnnnnnnnnnnnnnnnnnnnnnnnnnnnnnnnnnnnnnnnnnnnnnnnnnnntgtgaaaatcctaagaggatttcatattgaatatgtgtacacaatcttaactattgtggtggaaaacatactactataatttattattatatcttccagataatgttattcatttagaacaaataaggtatattttttagaatcaactttgtaagcactataaaatctttaataagttataagatctatgatg

SEQ ID NO: 13165 - DNA, 731 bp, Macaca Fascicularis
  misc_feature (1)...(731): n = A,T,C or G
aaaaagcgagggcacaaaaataagtgcccaagcacatacgtttcctgggaagaaccaagtcaacattttggtgaaaatcagtagacccactttcaattttctccaactggctgttcaaaagtccgatgtctctgcaatacgttttaacgatctgttgaagagatgaggcttttcttagctgtgaaattatgtccagctgcttttaagctagatggcatcagtccaactgatgacattttccacaaggctacagagaggaaatgctggaagagaatggggttatctgactctgggctggaggttgtgtatttctagggaaggaagggcagacagttggtctgcggctgctccatcattctgcagctgtggattgcagagtgagggtgattattcagctcgttcatcgagcttcactttgaccaagtgtttttgtaacctttccattcccagaataatcctctaagagaggcctagagatttatgcttctatgcaatgcaaaacgnnnnnnnnnnnnnnnnnnatgacagagctgtggccangnnnagctcgaaggctacctctctgcccannnnnnnnnnnnnnnnnnnnnnnntgaggaatcttgtttccatgttgaggattccagcaaggtcaagcagcnnnattgcaatgatagccccagaagcataccagctccctaactccccctgcacctgttaactgtctgagcccctcaatccccatgtgaagt

SEQ ID NO: 13166 - DNA, 724 bp, Macaca Fascicularis
  misc_feature (1)...(724): n = A,T,C or G
gaagcatccnnnnnnnnnnnnnnnctgagtacaagnnnnnnnnnnnnnnnnnacctggactgcnnntcgagataatagagatgctgcagtctgaagagactnnnagcacctctcannnnaatgaatnnatgatggcttctgagtcaactttactggctcaggaaccacgagagatgactgcagatgtaattgagcttaaagggaaattcctcatcaacttagaaggtggtgatattcgtgaagagtcttcctataaagtaattgtcatgccgactacgaaagaaaaatgccctcgttgttggaagtatacagcggagtcttcagatacacnnnnnnnnnnnnnnnnnnnnnttgtcagtggaaaatagtattaacagctcacttgagcaagaaccctcctgacagtactggctagaagtttagatggattatttacaatattggaaagaaagccaagatttaggtaatgagtggatgagtaaatggtggaggatggtcaaaatcagaattataaaagaagtatttcctgtaactatagaaagaattatgtatatatatatatgcagaaatatatatatgtgtgtgtgtatctgtggatggatatatatatatcatcttcctatatatatccataatggacttattcagaacatagatatgtattcagcttgtcttcaaatatggccgagcagaaaatgttttatattttataaatcttttgact

SEQ ID NO: 13167 - DNA, 739 bp, Macaca Fascicularis
  misc_feature (1)...(739): n = A,T,C or G
gtnnnatgacctctttgtcaattcntnnncagnnnnnnnnnnnnnnnctcctgtcatccagcttgtgctcttcatcatccaggatattgcagtcctcttcaacatcatcatcatattcctcatgttcttcaacaccttcgtcttccaggctggcctggtcaacctcctattccataagttcaaagggaccatcatcttgatagctgtgtactttgccctcagcatctcccttcatgtgtgggtcatgaacttacgctggaaaaactccaacagcttcatatggacagatggacttcaaacgctgtttgtattccagagactagaagatacgtttgcnnnnnnnnnnnnnnnnnnnnnnnnnnnnnnnnnnnnnnnnnnnnnnnnnnnnnnnnnnnnnnnnnnnnnnnnnnnnnnnnnnnnnnnnnnnnnnnnnnnnnnnnnnnnnnnnnnnnnnntccccatcggtctccagtgcagcatcccttccttgcctcctacatccgttccaccccctttccttcctttcctctctgtaccattcattctccctgacccgcctttcttgctgaggattctgtggctcttacccttgtgaagctcttcctttagcctgggacagaaggacctcccagccccaaaggatcnnnnnnnnnnnnnnnnnnnnnnnnagtgatagttacatgctactgaccgatcacaccgcagacacttagatttttataaccacaggcacttttaa

SEQ ID NO: 13168 - DNA, 738 bp, Macaca Fascicularis
  misc_feature (1)...(738): n = A,T,C or G
ttcatttagctgcnnnntattaatactnnnngtggactgagcattttccctctgtaatttcttccctcacatttattttaactcctgtagtattgttgttaatttacaagtttaaaaatattaggtactattagtaatggttaaaaatagaaaaatgcatatttttgtataatcaaatgtagtaaaatagttttatttttgctggacagttgttatatcatgattattgtgccacattttattgtgcatannnnnnnnnnnnnnnnnnnnnnnnnnnnnnnnngccagggtaaagctgcttaccacctccgccgtcagagggactcgtggttgacagcagtggtgtggccgcacacagcacactggagagagcgcagcacccccgctgcccaccagcagagcccctgctgagggaacgccgtgcagatgctgatgtgctgggtgaaatttctagtattggacataaaggtgtacagtgtcttgctgttatttnnnnnnnnnnnnnnnnnnnnnnnnnnnnnnnnnnctaactttatttaaggaaaggatactaatttgtactaacagggtgaaagctattcacatctgtcaacaaaatctgcttgctgcagtagtaactcaagtggttcaaacttgatttcctgagaaaactaaaacctttgtgcctaaaactgatgacttgagttcaagtgggatgagcaagaagatgtgttatcttgttgtcaacagtaanntgaa

SEQ ID NO: 13169 - DNA, 579 bp, Macaca Fascicularis
  misc_feature (1)...(579): n = A,T,C or G
gagttgattgtcttggctagatctgtcattttaagctctagtcatagcactttttcagagcannntaggcaccattnnnnnnnnnnnnnnnnnnnnnnnnnnnnnnnnnnnnnnnnnnnnnnnnnnctttgttaaacaaaaccctttggtactgttgtggttttctattcttccagtttactctctctgtcctaactttattcaaaagtatctttgctnncttgggccttttcttttacctttctttttcttttgttttgttttgtttttttctaatcctgctttcatactagccagtgtggggaaaaggtacaatatgtcaaagagatgagagtgtgttatttgttgggcaattttctattagtgtttcttattttggacagttattttatttatgtcctnnnnnnnnnnnnnnntggggggccagctagccttctggcctttagcgtctttgaaggagaccagacatgagtgaatacctaggagagtgnnnnnnnnnnnnnnnaaaattggcagagaccaagccccgctgcagattgctcaggccaggtgaaagggccaggcagttgcagctgatga

SEQ ID NO: 13170 - DNA, 757 bp, Macaca Fascicularis
  misc_feature (1)...(757): n = A,T,C or G
tccagtgtgccgnngtgaggggtacctgactccaaactannngcnggttggccacagtgacgtggttagcatcctgtcccctgggcaggctttgtacaacatcatcagcacctggcctcatttcaagcactgaaggaggccccactccctctgagactgccctccctcccctgctgggtctctccaatcctcaccagacaccctggctcagcaccttgtgtccccctcccctgccagcccatcctttctcaggttcgaatggtcatgccctttcctgccaacatcctccaggagcccctaaacctcgcagctgggcattcacagccctcctggtctgagtttagacttcctctctcctcacctacctctcccctgggcacctacctcttcagtcgggtgagacaatgggctggtccttgtggcatttctctctctctctccccaacccctgtcttctctctctctctctctctctctttgtctgcctggtgagccttccctgttgtctgcctggaagctcccacccttcacccctcacccatgacccaggtcagtgtgcccacccctcctctctgctcacacatggactggtacatatttggatgcagcccttacttaagggtgtaattttttatagatatgtccgtcctctcctctgggttgtaagtttctccaagggaggaattctattttattcatctctgtcctcagttcctcagcagtgtttggagtttagtaggttctgcagatgttgtaa

SEQ ID NO: 13171 - DNA, 711 bp, Macaca Fascicularis
  misc_feature (1)...(711): n = A,T,C or G
cagagatggcnnnnnnnnnnnnnnnnnnnnnnnnnnnnggcnttggagtacnnnnnnnnnnnnnnnnnncagacgaatgaggaagannnnnnnnagaaggtcagagctgagtgacgtttggaatccaccccatttattggagaactgggggttcagagnnnnnnnnnnnnnnnnttgaggccacacagtgaggtccggtgggtgaaaggacccaggaacgaggcgttcaggaaagcaggttgtcggagctatgtggggtctgtgggtggcaggggcagccgctccagcctttgaagactttgaaagccagagnnnnnnnnnnnnnnnttggacttcctgggagctcctccaggtacccaggagcatcggagctgcctgggtgttccatggcccagggnnnnnnnnnnnnnnnnnggacaggcaagaccagataccnnnnnnnnnnnnnnnnnnnnnnnnnnnnnnnnnnnnnngatgaagaattcaagacagtgacaacattacatcatacctggggacagaggtcagcctaaggtgacagccggggactnnnnnnnnnnnnnnnggctccttgtgtcctggaggagaagagcactcgagggggccactggacaagctcccaactgcagggtgccagcgctggctggggcagggccccggcctggaactcagcatttctgatatgccttaagaaatcatnnnttgtacaat

SEQ ID NO: 13172 - DNA, 676 bp, Macaca Fascicularis
  misc_feature (1)...(676): n = A,T,C or G
gagtcattggctcctattcggtggtnttagccgttggcagttacttgtccacaagcctttcctacatcactttgaatgtactcaagagagcgctcaacaaggatttccacagagctttcacaaatgtgccttttcaaactaatgactttattatcctggcagtatggggcatgctggctgtaagtggaattacgttacagattcgaagagagagaggacgaccgttcttccctccccacccatacaagttatggaagcaagagagagagcgccgagttacgaacattctggaccctagctaccacattcctccactgagagagaggctctatggccgattaactcagatcaaagagctcttccagaaggagcagccagctggagagagaacgcccctgcttctgtagatgtccaggggtttggttagtgtgcctcagctttggagttcatgcctggagtgattcagcagtctctggtgcaagtctaataagagatcaggcatatagatctgtgctttgcataatattatggtgcccttattgatatatggtaagggtatactaggggattaggatgattctaagagaatgagaaagatggccaaaaggttggtggtagggaggcttttccttatttccaaatacttgagaaattaccttttggtttacaaatctat

SEQ ID NO: 13173 - DNA, 771 bp, Macaca Fascicularis
  misc_feature (1)...(771): n = A,T,C or G
atcctagcccagnnngaagaagacgtgannangtcagcggaaactcacctgtcagggaaaattggagctaagaaactgcggaagctggaggagaaacaagcgcgaaaggcccagcgtgaggcagaggaggctgaacgtgaggagcggaaacgactcgagtcccagcgcgaagctgagtggaaaaaggaggaggagcggcttcgcctagaggaggagcagaaggaggaggaggagaggaaggcccgcgaggagcaggcccagcgggagcatgaggagtacctgaaactgaaggaggcctttgtggtggaggaggaaggcgtgggagagaccatgactgaggaacagtcnnnnnnnnnnnnnnnnnnnnnnnnnagctacatcaagcagtccaaggttgtgctcttggaagacctggcttcccaggtgggcctacgtactcaggacaccataaatcgcatccaggacctgctggctgaggggactataacaggtgtgattgacgaccggggcaagttcatctacataaccccagaggaattggccgccgtggccaacttcatccgacagcggggccgggtgtccatcgccgagcttgcccaagccagcaactccctcatcgcctggggccgggagccccctgcccaagccccagcctgaccccagtccttccctcggactcagagttgatgtggcccacctggctnnnnnnnnnnatcccttcccaccatcctgaggaagtgacagagtgtggccaggcagttatagataaag

SEQ ID NO: 13174 - DNA, 810 bp, Macaca Fascicularis
caaaccatatagagtatactgtgatatgaacacagaaaatggcggatggacagtgattcagaaccgtcaagatggtagcgttgactttggcaggaaatggaatccatataaacagggatttggaaatattgcaaccaacacagatgggaagaattactgtggcctaccaggtgagtattggcttggaaatgataaaattagccagcttaccaggatgggacccacagaacttttgattgaaatggaggactggaaaggagataaagtaaaggctcactatggaggattcactgtacagaatgaggccaacaaataccagatctcagtgaacaaatatagaggaacagccggcaatgccctcatggatggagcatctcagctgacgggagaaaacaggaccatgaccattcacaatggcatgttcttcagcacatatgacagagacaatgacggctggctaacagcagatcccaggaaacagtgttctaaagaagatggtggtggatggtggtataataggtgtcacgcagccaatccaaatggcagatactactggggtggaaaatatacctgggacatggcaaagcatggcacagatgatggggtagtatggatgaattggaaggggtcatggtactcaatgaagaagatgagtatgaagatcaggcccttcttcccacagcaatagtccccaatacgtacatttttgctcttctctatgtgacaacatttttgtacattatgttattgtaattttctttaatacattatattcctctaaaactctcaagcagatgtgagtgtgacttt

SEQ ID NO: 13175 - DNA, 784 bp, Macaca Fascicularis
  misc_feature (1)...(784): n = A,T,C or G
cactaaaagtagttccattgaantatccttcttnnnttttttcttcctatttttgtttgtttatacaaatatctgatnnncaagaaaaagtgcatgggaggggttttagtggtttaacgaatttttaattaagaaagggtagtttggtagtctacttaaaaatgtttctgggaaattcactagaaacattaaccaataggattttggtgagcttagcttctgtattcctactgccgcccggaaaaggggcagggctctgcagccgccaggacagatgagcaccccatgcctatacctccctccccganntgagtcccagggcatnangggccttgcctggagactgggctagctctgtaggctcggagagcctggggagggtgccaaccccacctctagtattttgggagatagggaaagtgaacagacttccccttcccatacccctcagggtggttccctaccagccaggcttactactagaagagagcagagcgccagggagtgagactgcatccctgggcttggaagtgaaggagaggagacttgtttagtattttgccatgggcacaaggaaaaccaggagagagtctgcctccaggactctgagccttctgcttcgtatgttcagaaggtggataggtcttcccactccagcatggcttgaactcttaggggtctgcagtgctccatctccattgnnnnnnnnnnnnnnnnnnnnnnnnnnnnnnnatttcctnnngnnnnnnnnnnnnnnnggcagaannnnngaaaaagtgaaaag

SEQ ID NO: 13176 - DNA, 740 bp, Macaca Fascicularis
  misc_feature (1)...(740): n = A,T,C or G
cggtttatgtgcagctggagaaggtgtgcaggggaaaccctgctgacntcaccgaggccaggctgtcntnntactcgggacactcttcctttgggatgtactgcatgctgttcttggcgctctatgtgcaggcccggctctgttggaagtgggcacggctgctgcggcccacagtccagttcttcctggtggcctttgccctctacgtgggctacacccgcgtgtctgattacaaacaccactggagcgatgtccttgttggactcctgcagggggcactggtggctggcctcactgtccgctacatctcagacttcttcaaagcccgacccccacagcactgtctgaaggaggaggagctggaacggaagcccagcctgtcactgacgttgaccctgggcgaggctgaccacaaccactgtggctacccgcactcctcctgaggccggaccccatccaggcagggagcggctgtgagtccagctgaggcccacccgggtggtccctctggccctggtcaggcactgagggctctggacgggctccaggaaccctggggtgatggcagcagtgagctggctctgctgcccccgcccagcactggaccaggggtctgggggtgccgggtagcctcagcatttggagggggacctgttcccatcggtccccaaatatccccttctgtttatgtggttaaggaagggaccgagagatcagatagttgctgttttgtaaaatgt

SEQ ID NO: 13177 - DNA, 695 bp, Macaca Fascicularis
  misc_feature (1)...(695): n = A,T,C or G
gaaagtattggcattcannnngacagcagacannntgaaagaaaatgagagcagaaagtaagcatttccagcctatctaatttctttagnnntctatttgcctccagtgcagtccatttcttaatgtaaaccagcctactgtactatttaaaatgttcaatttcagcaccgatggccatgtaaataagatgatttaatgttgattttaatcctgtatataaaataaaaagtcacaatgagtttgggcatatctaatgatgattatggagccttagcggtctttaatcattggttcggctgcttttatgtagtttaggctggaaatggtttcacttgctctttgactgtcagcaagactgaagatggcttttcctggacagctagaaaacacaaaatcttgtaggtcattgcacccatctcagccataggtgcagtttgcttctacatgatgctaaaggctgcaaatgggatcctgatggaactagggactccaatgtggaactcttatttgctgcattcctttttcttcacttacaagaaaggcctgaatggaggacttttctgtaaccaggagcattttttaggggtcaaagtgctaataattaactcaaccaggtctactttttaatggctttcataaaactaactcgtaaggttaccgatcaacgcatttcatatggatatagacctagggc

SEQ ID NO: 13178 - DNA, 766 bp, Macaca Fascicularis
  misc_feature (1)...(766): n = A,T,C or G
taagaaatggtacagtattttaancnngttacttgactaagagtgtgaaggtagtactttttagnnnnnnnnnagtgcactttacatctttatttaaatttttttgacatcttttgtttacaggcttcctgtttcatgaagatagcaatggaaaacnnnnnnnnnnnnnnnntcttattaccagatgagatgttagtattgtttctggaaactnnnnnnnnnnnnnnnnnnnnnnnnnnnnnnnnnnnnnnnntttatgtttgtgtgtatatattttccacaaatgttataatttatatagtgtggttgaacaggatgcaatcttttgttgtctaaaggtgctgcagttcaaaaaaaaaaacaaaacaaaaccttttctttcaatatggtacttagtggagtttttttttttaactttaaaaacattaacaattgttaaaatcattgtgttatctagtagcttataatgatcagcttatatttctccatggtcagaactgacatttaattcacatttgtctcaccatacttctgtaacatagttctgtcgcagaatgtaaaagaaaggtaatgataattagtttatataagnnnnnnnnnnnnnnntgatgctaaatatattttatgcaattaagggcttacagaacatgttaaaacttttttacttttatcggtaataaggaatgtttgcacctccaccctgtattgcttctggatgcgaaaccatgctaattatttctgctgttatataaggtgccatacttta

SEQ ID NO: 13179 - DNA, 755 bp, Macaca Fascicularis
  misc_feature (1)...(755): n = A,T,C or G
acagaaacccaattacatcaagaggtttgcatcaggtggctgtgacaacctcatcaagctgtggaaggaggaggaggatggccagtggaaggaggagcagaagctagaagcgcacagtgactgggttcgagatgtggcctgggccccctccatcggcctgcccaccagcaccatcgccagctgctcccaggacggtcgtgtgttcatttggacctgtgatgatgcctcaggcaatacgtggtcccctaaattgttgcacaagttcaatgatgtggtgtggcatgtgagctggtccatcacnnnnnnnnnnnnnnnnnnnnccggtggagacaataaggtgaccctgtggaaggagtcggttgacgggcagtgggtgtgcatcagtgatgtcaacaagggccagggctccgtgtcagcgtcagtcacagagggccagcagaacgagcagtgacaagacaggtggggcctggctccctacccgccagcgccaggactgccccttcctgggccaactgaccaaacaactgggaagagcccccaactccaacaggattgttttcccaggaggagttacagatgnnnnnnnnnnnnnnnnnnnnnnnnnnnnnatcggagatgctttgtaatctgctgtccagctgaaagcgctcatgttatgaggaagaaactgcaaatgaagttcaaatctattttaaactattttgggccatttttatgtacctttgggttcaggcattatttggggggttttgttc

SEQ ID NO: 13180 - DNA, 647 bp, Macaca Fascicularis
  misc_feature (1)...(647): n = A,T,C or G
tgcgtccacttnnncgtctcctccccaccgatcgctgttccccacatctggggcacctttgggttggcaaaccaccccacactgggaatagccaccttgctcttgtggaatccatccgttcattcacccatccgtccatccatccatgtccccattgaccgcccggcaccactagctnnnnnnnnnnnnnnnnnnnnnnnnnnnnnnnnnnnnnntggcagccttttccctgcctccacccccatcctacactcccccagggtgtgcagggctgtgcagactggggtgctaggcatctcctccccacctggggtgtccccacatgcagtactgtatcccccccatccctcccttggtccactgaacttcagagcagttcccactcctgccccatctttttgtgtctcgctgtgatagatcaataaatattttattttttgtcctggatatttggggattatttttgattgttgatgttctcttttggttttatttttgtggttcattgaaaaaaagagaaatttttttttctgattgggggagctgtatccccagtagaaaaatcattttaatcactctgatataactctggatgaaacacaccttttttttttttttaataagaaaannngaattaactgcttcag

SEQ ID NO: 13181 - DNA, 755 bp, Macaca Fascicularis
  misc_feature (1)...(755): n = A,T,C or G
atggctttggtcgcacagtgtacccggaggagcgcagcagatggagggacagatccaggacgaggtcgcggagcagaaccccctttcgcttaagtgaaaaagatcgaatggagctgttagaaatagcaaaagccaatgcagcgaaagctttaggaacaaccaacattgacttgccagctagtctcagaactgtgcatgtagccaaagaaacaagccatggaataggtgtatcaagtaatggtgcaaagcctgaactgtcagaaaacgtaacagaagatggacctagaaatcnnnnnnnnnnnnnnnnnnnnnnnnnnnnnnnnnnnnnnnnnnnnnnnnnnnnnnnnncaaaaccaatacaaaaatcagctaaagctgccacagaagagacatcttcaagatcaccaaaaatagataagaaaaaaagtccatatggactgtggatannnnnnnnnnnnnnnnnnnctaatggctaagtttgcatgaaaactgcactttattgcaagttagtgtttctagcattatcctatccctttgagccattcaggggtacttgtacatttaaaaaccaacacaaaaagatgtaaatacttaatactcaaatattaacattttaggtttctcttgcagatatgagaaatagcacagatggaccaaaggttatacacaggtgggagtcttttgtatatagttgtaaatatattcttggttatgtaaaaatgaaattttttagacaccagtaattgaactgtatt

SEQ ID NO: 13182 - DNA, 720 bp, Macaca Fascicularis
  misc_feature (1)...(720): n = A,T,C or G
gcaaggcagcggccacgggcagcggggactggaataccacgctggcctgcttcgtggccatcctcattggcttgtgtctgaccctcctgctgcttgctgtcttcaagaaggcgttgcccgccctccccatctccatcacgtttgggctcatcttttacttctccnnnnnnnnnnnnnnnnnnnnnnnnnnnnnnnnnnnnncctcccatcagctctacatctgagggacgtggtgcgccacaggccgcaagctgcctggaattttcactggatgtggttgtatagttttacactctagtgccatatatttttaagacttttctttccttaaaaaaaataaagtgcgtatttacttggtgaggaggaagcagaaccagctctttggnnnnnnnnnnnnnnnnnnnnnnnnnnnnnnnnnnnnnnnnnnngcgcctcacttcatggacaggaagcacagcgggtttatccagatgaactgagaagatcagatcagggcgggnnnnnnnnnnnnnnngaggnnnnnnnnnnnnnnnnatgtgcctctgttcgggaccaggactgagtgctcgggagtggcgcctggcacctgggtccnnnnnnnnnnnaggaaaagccagttccctacgaggagtgttccaatgctttgtccgtgatgtccttgttattttattgcctttagaaaccgagtcctgttcttgttatggcagtcacactgctggg

SEQ ID NO: 13183 - DNA, 756 bp, Macaca Fascicularis
  misc_feature (1)...(756): n = A,T,C or G
tgcgtccttaagtnncgacggcggggcagccgccgacagcatgcagagcaagttaggaaaatccaagtccctgtgggaagagcaacggcgggctccagccaggccctcctcacagcctcccacaagacctggggctcagggcagctgcttccccacccagcacagcagcagagggtccctagagcctccacagaaaggactgtcccagcctcaggaggcaagagatagctccctccggacgggcctcatccaactccgccctggagtgtagctggaaggaagggacaggaaacggccgtcccagcccaagaagacagtttccactgggaagttaggtccggcggcagcgcttcctctggcagggccggggctctcgactgctggggtgggccgaggtcgctgcctggggatcagacactggggccttgcttcggctgcaactcatgctctggacccatcccagcttgttgtgtagcacctgcttgaggcctggcggcaggggcaggccctccagcgtgtcccccgagtctggccgcagctggcgcaggcggtggcagcagaggtactggaggnnnnnnnnnnnnnnnnnnnnnnnnnnnnnnttcttgntgcttcgggctgccgtggagcacaccatcgggtagaacctcttgttctgcagcttggtggctgccacgcctatgcacttcctgttcttgannnaggtgagcgtgccgtgccaggtgtccaggtgcacaccgatgatggagccctggc

SEQ ID NO: 13184 - DNA, 923 bp, Macaca Fascicularis
  misc_feature (1)...(923): n = A,T,C or G
tgtannnaaaacatttcatgtannnnnttagaacaacataaaatttaacatctgcagtgttctgtgaatagcagtnnnnnnnnattatgttatgaaaaccctcgatgttcatggaattggtttaaacttttatgcgcaaatacaaaatgattgtctttttcnnnnnnnnnnnnnnnnnnnnnnnnnncatttgtgtcagcatgtctcagattgaccttaccaagttggtcttactttgttaatttatctgttgtcgccctcctctcctctgccctcccttcttgtgcccttaaaaccaaaccctatgccttttgtagctgtcatggtgcaatttgtctttggaaaattcagataatggtaatttagtgtatatgtgattttcaaatatgtaaactttaacttccactttgtataaatttttaagtgtcagactatccattttacacttgctttatttttcattacctgtagctttgggcagatttgcaacagcaaattaatgtgtaaaattggattattactacaaaactgtttagtcatatctatctaatcagatcttcttttgggaggatttgatgtaagttactgacaagcctcagcaaacccaaagatgctaacagtattttaagaagttgctgcagattcctttggccactgtatttgttaatttcttgcaatttgaaggtacgagtagaggtttaaagaaaaataagtttttgttcttaaaaatgcatttaagttgtaaacgtctttttaagcctttgaagtgcctctgattctatgtaacttgttgcagactggtgttaatgagtatatataacagtttaaaaaaaagttggtattttataagcacagacaattctaatggtaacttttgtagtcttatgaatagacataaattgtaatttgggaacataaaaact

SEQ ID NO: 13185 - DNA, 729 bp, Macaca Fascicularis
gacagatcaaggagtgtttcaaccagttccgggtggtctaagccaacaggaacaggaagtggagtccactttgcgcaggaagtacaccctcattgacaggaatgactttgcagccatttctgctgtccagaaggcggggcttgtggatgttgatggccacctagtgggtgagcctgaaggacaaaactttggactcggagttgcccctttctctaccaaacctgggaagaaagccaagtccaagaagacattcaaagagccccttagctccttggcaagaaaggaaggtgccagcagccctgtgaatgggaaggacttggattacgtttccacctccaagacccagctggtcccatcctccaaagatggggatgtcaaagacatgctttcgcgggaccgggaaacttccagcattgagccccttccctcagacttcccgaaggaggaattacgcccaattaggtaatcagctaatgttagcttctgcaccagatcaaacaaaaccatatgtgatcctcaacatgtaaagagtacctgcagataaaagagaaataaaataaggaataataggcaaagactaggagcacagtccccaaggaagaaaacatgactatgcacctgcaaaatgatccaacctcaggagtcatccaagatgtacaattaaacatggaatcattttagaccctccaaatagcaattatttaaataattaaagttatgtatcttttg

SEQ ID NO: 13186 - DNA, 696 bp, Macaca Fascicularis
  misc_feature (1)...(696): n = A,T,C or G
gaggggcctagaaaaccaggttttntggcctgcagttgggggaagnnnnngntttgagggaaatgggagggtcgagaggggcttgatggggagcagtgaacacacctgggaccccgaggtggggtgacttgaccttcagtcatcctcttggcgatttgagggttttccgggaaaggatgagaagtagtttttcaatggggctctggtgaccctggtgagatgtctgaaggtccctgaggcctgaccgtccagccagcgcccctggcctgtggatgccctgcctgccctgcagaggcagttggcagtgccaccttgcttttggccgggtcctggggaggcagagagaggccaattttggttctcactcctggccgcccagagggcacagtgaggagccagtagggagaggatgggagaagaggaggaggaggagtggggtccccggcagcaggtgtcccacttggagcacaaagtgaagcaagcacaggggagggggactcgaatcagtccccccagcaagcacagaaaggaggagctgcgcaagaggcagagccccccaacccctggggcctggctggggaaaggctgcacttggggagagccaggagctgttgaaggtttggggggaggggaaactggggttgtgtttcttcatttcttttttcgtttttgcctttgttggttcatccttgtttt

SEQ ID NO: 13187 - DNA, 836 bp, Macaca Fascicularis
  misc_feature (1)...(836): n = A,T,C or G
gggcatgctgccatnnccaaggcactcgtcnnattaggaattggcattgccacaggagaannnnnnnnnnnnnnngtgatatttaagcaactcctacaggccaagnnnnnnnnnnnnnnnnnnnnnnnnnnnnnnnnactgggcagtgtcaatgagaacctctcagtattgctgatggccaaaaagtttgaaattcctgtttgcccccatgctggtggagttggcctctgtgaactggtgcagcacttgattatatttgactacatatcagtctctgcaagccnnnnnnnnnnnnnnnnnnnnnnnnnnnnnnnnnnnnnnnnnnnnnnnnnntatcccgtnnnnnnnnnnngggcttcctacatgcctcccaaggatcccggctactcaacagaaatgaaggaggaatctgtaaagaaacaccagtatccagatggtgaagtttggaagaaactccttgctgctcaagaaaattaagtgctcagccccaacatctttttcctttctgaagtgaaaaggcttaaaatttcttggaaatagttttacagaaatggatttttaaaaatcctaccaagattagttcaatgaaaagtcataccaccctcaggaatcagctaagtaattattacttgattctnnnnnnnnnnnnnnnnnnattatcctacttaatacttaaataagtctagatttaactaacccaaagnnnnnnnnnnnnttcttacaaaatatcaagggctggcacctagacattaaactgtactttaaaaataagcaacatgttgcataacttgttggaataattcttggttctatttaacacttgtcataaatagcag

SEQ ID NO: 13188 - DNA, 910 bp, Macaca Fascicularis
  misc_feature (1)...(910): n = A,T,C or G
aggagagctcggctgttccagccaggtccttatccagcagccctcaggcccagccccctcggccagcagagctgtcagatgaggaagtggctgagctctttnnnnnnnnnnnnnnnncacagcaggagaaatggatgctggaggagaaggtgaagcacctggaggtgagnnnnnnnnnnntgcagaggnnnnnnngccggaagagcgccatcattgagacctacgtcatggacagccggatcgatgtgtctgtggcagcaggccacacagaccgcagcgggctgggcagcgtcctgagagacctagtgaagccaggcgacgagaaccttcgggagatgaacaagaagctgcagaacatgctggaggagcagctcaccaagaatatgcacttgcacaaggacatggaagttctgtcccaggaaattgtgcggctcagcaaggagtgcgtggggcctcctgacccagacctagagccaggagaaaccagctaaagacctgcaggctgcacccacctcctccccctcctaccccctaggatgccattcccttgggctgtggtggggaaatgagggctgaagccaaaatcaaatagcttgggagactggacattaaagggactagaggcctgatggttagtgttaatgatcctgtcttagggcagaggccaccagggagtggggatcctgaaggaagggnnnnnnnnnnnnnnntcttcttggtcctggctcccaagggcttctgtcttcatctctgcatgagctctccttcccagagaccaactcttttttattttattttattttattttttaatttatgtctggagcctggctactctgcatttgggattggggatgttgggtgggtgtgtggtccatgttcagcgttctagcaacacgtgtgtgtgtgtg

SEQ ID NO: 13189 - DNA, 652 bp, Macaca Fascicularis
  misc_feature (1)...(652): n = A,T,C or G
cgtgtcgcaggcgggccaggggatgggcgcaggccccgggccggtacnnnnccgccagttggtgcccgccctggggccgccagtgcgcgcggagctgctgggcaccgcttgggcnnnnnnnnnnnnnnnnnnnnncagcctccgcctggcgctggcgctgcgcccccggacccctgccgcctgtgcgcgcctggccgaggcctcgctgctactggtgaccctcgacccgcgcctgtgccaccccctggcccggccgcggcgcgacgccgaacccgtgttgggcggcggccccgggggcgcttgtcgcgcgcggcggctgtacgtgagcttccgcgaggtgggctggcaccgctgggtcatcgcgccgcgtggcttcctggccaactactgccagggtcagtgcgcgctccccgtcacgctgtcggggtctggggggccgccggcgctcaaccacgctgtgctgcgcgcgctcatgcacgcaaccgccccgggagccgccgacttgccttgctgcgtgcccgcgcgcctgtcgcccatctccgtgctcttctttgacaacannnnnnnnnnnnnnnnnnnnnagtatgaggacatggtggtggacgagtgcggctgccgctaacgaggggcgggcgaggacgcgggcccaaca

SEQ ID NO: 13190 - DNA, 1123 bp, Macaca Fascicularis
  misc_feature (1)...(1123): n = A,T,C or G
agataattttattggactanntgtctttgttnnctgccttttgtattctagcatccgcacttccactaatagccaagtagacaagctgnnnnnnnnnnnnnnnnncagcgtcatccttggtgatacaactaccaatgnnnnnnnnnnnnnnnnnnnnnnnnnnnnnnnncgggctgtggacaacgagaaagagggannnnnnnnnnnnnnnnnnnnnnnnnnnnnnnnnnnnnncttggcttccttgtacatcannnnnnnnnnnaccagctggtacagccctgatgcaaagtttcagagcatgaccannnnnnnnnnnnnnntgtgggtcaagatcagctccagctgggtctgcctcctgctttacgtctggacccttgtggctccacttgtcctcaccagtcgggacttcagctgaacctctgagtgccaaggacaccactgaaactcacaaaggtctccttcaccgaaaactcatgtaccttttaagtttgcttcaactaaaatattaagtgaatgctttgcaagtttgactgtatccaggtttatatcagaaggtgagattgaataatgcttgatgcagaatctgaacttctcatctatctgtatattttgtttacttttaaggatatagcacaaagggaacatttttttgtttaaagtgaactacagctgtgctgtgaagagagttctttataaagcctgtaggttctttcaactttggtttaaaatgtaagataggaaaatgttggatatttgaggccagcttannnnnnnntatatnnnnnnnnnnnnnnnnagcaaaaaaaaaaaaatgcatttatattacagttttcctctatgaaagtccttacttatatgatacaagcactctgttttgtgcttaaactcttcagaggggtagcatcaaagttcttggggaaggattgtgtatgtgggtcccnnnnnnnnnnnnnnnnnnnnnnnnnnnnnnnnnnnntggctactgcttctacatcttgagttttttaatttactttttgtacactgtagtattgatactgcttgattcaagtctggtgctttgccagatgtattaatttcaataaatgctttgtgagtttggttaaaatgaagattcact

SEQ ID NO: 13191 - DNA, 721 bp, Macaca Fascicularis
  misc_feature (1)...(721): n = A,T,C or G
acaaggagtgtatgttacctctccattagtaaacaattttnnnatgcactcagatcttggaaaaattattcaaagtctgttgnnnnnnnnnnnnnnnnnnnnnnnnnnnnnnnnnnnnnnnnnnnnnncatttccttatctatacagtaacccaagtgggatgcctccttatgcttctcagggttttccatttcttcctccatatcctccacaagaagcaaacaggaatatcacttctttatctgttgctgacactgtttgttcttcaacaacaagttataccacagccaagcctgccgctcgttcatttggtgtcctttcaaatgtgccattacccattcccacaatggatgcttcaataccgacaagccaaaatggttttggttacaagatgccagatgtccgtgatgcatttccagaactttcagaactaaggtcactggataactgtgaacacttccccacagttgtgatttttaaagagaggagatatatcaacatatccattggaccagaatttacttttacagattctgttgagaatatattacagactgctttatgttccattgtggttgatgttttatatgattttaaggttaaaattggcagcnttaggtgtatatgtaaaaattatttagaaccctatcaaccaaaataaagctgaaaaattgtaaatagttgtcagggagaaaaacttgatgtctgatatttattaaca

SEQ ID NO: 13192 - DNA, 1098 bp, Macaca Fascicularis
  misc_feature (1)...(1098): n = A,T,C or G
gcagatatgatggaatccagaagggctggaacnngnggaaaatgtatcagtatggnnnnnnnnnnnnnnnnnnnnnnnnngatggatatnnnnnnnnnnnnnnntcccagagccagtgccaggcagatcaccaatggaaccctcccctggcggtttgcagatcccgttcacttgctcctgtcctttctggtattgctgcaggtttgatacttcttatcttcttgattgttnnnnnnnnnnncatgatatcaaaacacagagaacgcaattatcatacaaatacaagccagaaagaagcttttcgtttagaagcacgagaagtatattctattgatccatacaaccagcaaatcatcnnagacaaactggtgtgtgccttgttgcttggaattcaacggaacattgattagaaagaaactgctctaacatcagcaagtctctgtatatggtctcaagaccaaggnnnnnnnnnnnnnnnnnntcacttcctatgtgcacttattctcaagaagaacatctttatggtaaagatgggagcccagtttcactgccatgtattcttcaaggactttctgaaacctcacttgtgagatgcctgaagccaggccatggctataaacaattnnnnnnnnnnaaaagtttcaccctttttaaggaaggcactaaaaagagctgtcctggtatctagacccatcttctttttgtaagcagcatactagtgttgctatgtgcttttggttataatgtggttttaattatataaataaagtattaagcattttctggggttatgatggccatacctttattaggaagaatggttttattttgatagtagcttccttctnnnnnnnnnnnnnnnnnnnnnnttttaccctcacttagtttgagtttttctcacattactgtatatactttgcctttccataatcactcagtgattccaatttgcacaagtttttttaaattatgggaatcaagttttaatcctagagatttgatatacagttcaagctttggatgtttccttagcagttttgtgataagctctagttgcttgtaaaatttcacttaataatgtgtacattagcnnnnaaa

SEQ ID NO: 13193 - DNA, 760 bp, Macaca Fascicularis
  misc_feature (1)...(760): n = A,T,C or G
agagtggggcttccgctnnnngctcatcaatgcagttgaggcctcctgtatccgaacacgagagctannnnnnnnnnncgaccaagaaaagatctnnncannnnnnnntaagaagacgctcctagacagagtgaagctggaatcccccacagtctccacactgaccccctccagcccagggaagctccttacaagaagcctggccctgggtggcaagaaggactaaggcagcgtctaccccctctgtgatttagagccctcnnnnnnnnnnnnnnnnnncaccccctccattgctcctcctcacctttgcaaggagaaagcaggctnnnnnnnnnnnnnnngctttgtgataaaacctccttaaatctgttcagaccaagcagtgtgagcttcctctcctgtcccatgttggaagatgctctgaaggggtggtagatgctggaagccagacacaaccctgcataccccactcaattggcggaagctggggctgggactggagtcagcccagctgggaggaagggctggggaggatctgcagctgaagcccaaggcagggctagtttgatgccaaggcaaagtggtgagagagaaaataggaaaggggcttttctctgaattggtaaatgggaaagaagtgagcaacttaagattgtcaccatcacaagtgtacaggattagactgtgtttatatttaactcttgcttcataggtgtaccatttaatgctaagtttaactgctttaataaagttaataaag

SEQ ID NO: 13194 - DNA, 770 bp, Macaca Fascicularis
  misc_feature (1)...(770): n = A,T,C or G
acagacagcagcgagcnnngnnnnnnnnnnnnnnncngcaggagcctcatgaccaagcctggctgctcgggctactgcctgtcccaccaaatgctcttcttcctctgggccagaatgaggggatgcannnnnnnnnnnnnccaacagagccaggactnnnnnnnnnnnnnnnnnnnnnnnnnnntggnnnnnnnnnnnnnnnnnnnnnnnnnnnnnnnnnnnnnnnnnnnnnnnnnnnnnnnnnnnnnnnnnnnnnnnnnnnnnggnnnnnnnnnnnnnnnnnncttctacaagctccggtggctggaggccatcctcagctggcagaaacagcgggaaggatgcttcggggagcccgatgctgaaaatgaagaattatctaaagctatccaatatcaacagcatgttttgaggagagtgaagnnnnnnnnnnnnnnnnnnnnnnnnnnnnnnnnnnnnnnnaacacagccacagcggtggnnnnnnnnnnnnnnnnnctatacatcctggcagaataccccccagcaaacagagagccacacccatccacaccgccgccaccaagcagccactgagacggatgtttccacgcctgctgcctggaggacgaacagactccttcagtcctccnnnnnnnnnnnnnnnnnggcatggctcacatccnnnnnnnnnnnnnnnnnnnnnnnnnnnnnnnnnnnnnncccatctgggaagcnnngagtacgcaggaccagggtaggtgggggccgggagggactcaggtggaagg

SEQ ID NO: 13195 - DNA, 373 bp, Macaca Fascicularis
gggcctagcgggatggcccttcggggcacccatgggctccatgacctacagcgcctctctacccctcccgctcagtagcgtgccagccgactttaccctccatgcatcggttagcgtcttcccgcaggccggagcattcgcaccgcccccagcgcgcctgcatcagccggtgctgcccacgcagagctcagccgggccgctgccccctcccccgcagacccgcacgaaccccttcctatgagcgccaccccgccgcgggccggcctgcgcatgcgccaggcgccccgcggccccgcctccggacccggggctggggcggggcgcgggtgctagtgggtcgctgaaccagtggcggctggaatcacgcggcggc

SEQ ID NO: 13196 - DNA, 717 bp, Macaca Fascicularis
  misc_feature (1)...(717): n = A,T,C or G
cacctatcaaaatgaagatccaaatcagttgntcctnnnnnacaaacccgaatgaggtactagaaaagagaaataagattcgggaacaaaatcgatatgacttgaaaacagcaggaccacaatctcagttgcttgctggaattgttgtggataagccacctcctactatgcagtttgaagatgatgatcatggcccaccggctcctcctaacccatttagtcatcttacagaaggagaacttgaagagtataagaagacaatcgaacgtaaacaacaaggcttagaagaaaaccatgagctgttttccaagagcttcatctccatggaagtgcctgttatggtagtaaatggcaaggatgatatgcatgatgttgaagatgagcttgctaagcgagtaagtaggttaaccacaagtacaaccatagaaaacgtcgagattactattaagtctccagagaaaatcgaagaagtcctgtcacctgaaggctccccttcaaaatcgccgaccaagaaaaagaagaaattccgcactccttcttttctgaaaaagaacaaaaaaaaggagaaagttgaggcctaaataaagtctttttataattattattataacaatgtgacattgcacatttaaataccacatttaagttgatcattaatatgcaatggtagatcagattgggggatatagcaaactggactttaagaactggaaagag

SEQ ID NO: 13197 - DNA, 1213 bp, Macaca Fascicularis
  misc_feature (1)...(1213): n = A,T,C or G
atactcgtgaatctctccccacaaaaatgttactgataataaacatgagtaaatgagaaagtctataaataacaatagactttgcctcaaggggctgtgtcaggttttgggatggctttctagggagcaattctgaaattatttgacagatatactctttatggtaaataggtcatttcagagtctagagtgctaaccattacactatggaaccaggataaataggtcatttcaaactgatatgtcataatgcaatatggatagaatatgaatcccatactttcatccctataactgcattttaaaatatagtctaaatgtcatgggcagaggttaaaacttgagaacatggtacaataagaaggaataattttttatctacatataatttcaggagaagggattaaaactaccaaaggttatttgccactccactgcaaacatgttgcctgcaatcctgagctcatgatttagtgtttgttaagcgtaattctgttgcctcaagtaaatagcatttgatgctacacatttttaaacctgtaaaagctacagacacaagtaatgaaattacgagtcacttaaggggggaggtaatatgcttgtatgttacattgacattgctctgcatgtctctattgggaaatatttggatttcagtgatagcttgactggttggacattgcatcaaatacacaccccatctgtcctctctgtccattgtaaagttatgaacgctcttgcacttgcatttgatgtggaataaatatagatgatattactgagtatctgctattctgcctttgttctaaaacaattgctttgtcagctaatttgattcaatattttttttttagacgatctttataagttatgaatttaaactgaaaccaaagtggtctccattaaagttacttaatccctttgtactacctatttctagttaaatataggttgctgtgcaaataggtaaagtgcttctttgccatgatggtatggattgaaactatgaaggctctcagtgtattggcttctgtaaagatgaggagtctcctcagaaacaaagctttccacatttctgcttactagacctgggatgatgtacatggcaagtctcaaacagatgcaagctacatgcaannnnnnnnnnnnnnnnnatggaaataactggatgctctgagaattacttggttgaagtaaggaaactgtaccacac

SEQ ID NO: 13198 - DNA, 724 bp, Macaca Fascicularis
  misc_feature (1)...(724): n = A,T,C or G
tgccaagagatgagttannncttttnannnntttaaaataggtggcataaatatatagcaatggaagtgtacttcaacaattatatgtgttgtaaaggaaaaaaatttgcagatagcctgtaaataaccaatttgtgtgtaagagacactgttatttgtaaatacttttattcccttaaaaaaaaaaagaattgtattcttttcttaggtccttccactggaaaaccaaatgaaagaatcaaagcgtttccctcaagcgttgaatattggcatggggattgttacgactgtgtatgtaacattagctactttaggatatatgtgtttccgtgatgaannnnnnnnnnnnnnnnnnnnnnnnnnnnnnnnnnnnnnntggtaggtgtatatgaatttgtcaatattggtttatatattttataatgtaccannnnnnnnnnnnnnnngcatgttcttggatttatggtttaaacatttaaaatttttactgtgatttcctggaatcccatcactttgggaagcagaggtgggtggatcatctgaggtcaggagtttgnnnnnnnnnnnnnnnnnnnnnnnnnnnnnnnnnnnnnnnnnnnnnnnnnnnnnnnnnnnnnnnnnnnnnnnnnnnnnnnnnnnnnnnnnnnnnnnnnnnnnnnnnnnnnnnnnnnnnnnnnnnnnnnnnnnnnnnnnnnnnnnnnnnnnnnnnnnnnnnacatnnnat

SEQ ID NO: 13199 - DNA, 507 bp, Macaca Fascicularis
  misc_feature (1)...(507): n = A,T,C or G
acagagcatagcggnnnnaccacaggngaggncttcgggcatcacgccaagttcatcgcttcaacaggcatggannnnnnnnnnnnnttctacagcctgtaggccctggccctnnnnntggaagatgggcnncannncagtagaggggtagaattagggtttgggggggtggggggaatctgtggggggagggggctctgtggggtgggacattcacatcatttcactctggtctgagtggtggcctgagaaccatggtggcatggaccaccctcatccatgcacctccatgcacctccaggccccatgggaacggatgtggaaggaagaactgtcaccctctaaaggcccagggcctctcccgtcctgtcgtccagtggacgcggcggtggctgttccacacccgttttgttgcagttctgtgagacaggagaggccgagccaagggaactgtgaaggggatgggcaggagggctgtgcagggttttgtaagcagcgatctagttc

SEQ ID NO: 13200 - DNA, 501 bp, Macaca Fascicularis
cacaacaaaagtgcctggcatccactactgctgcctttcatttataataatggcccttccatctggcagtgggggaagaatacactcttgacattcttgtctcctgctttagaatgctagtgtgtatctatcatgtatgcaatactttcccccttttcgctttgctaaccaaagagcatatattttactgtcagttatctcaactcttgaatccatgtggcgttttctctgtcctgctgcttcttttggcctcctcgtcttccttctctttttcgacaatggtagacatgaatgcgatatttaaagttcattggaaatcatcttcccttcagcagtaagcaaaaatgagcaatgaaatagtctaaatgccctctcagcttggtatgtgaaaatgagatcacgtactttttaaatccaaatacaaaaaagatggtctctgcaagattttgttctttgaatttcttgatattgtaattgattactgataactgtcgtcatgaa

SEQ ID NO: 13201 - DNA, 660 bp, Macaca Fascicularis
cagccaggagaagatgagctccgtgtttgaggacagtaatgtgtacatgttgcacatgatgtaccaggccatgggtgtctgcttgtacatgcaggactgggaaggagccctgcaatatggacagaaaatcattaagccctacagtaagcactatcctttgtactccctcaacgtggcctccatgtggttgaagctagggagactctacatgggcctggaacacaaagccgcaggggagaaagccctgaagaaggccattgcaatcatggaagtagctcacggcaaagatcatccatatatttctgagatcaaacaggaaattgaaagtcactgaaactatgcagcatttcagttttcatttaaacacttagttcggaaaccttaaaggatttgaatattccaaattgcacacgtcactccagcatctctgtaaaataattggaatgaaaatacttcttgcacttaaacattgcacatgccatactttgaggttagtctgaatcttgaactttaataccaaattaattttgagtgcttttgtttcctgagagataatggcatggtttcacatgctatacttcggacagagttttaaaaatgcaattatttttttctttcatgcctcttgtaatgttctgaacaaacttgaatgagaaagaa

SEQ ID NO: 13202 - DNA, 667 bp, Macaca Fascicularis
  misc_feature (1)...(667): n = A,T,C or G
agttcccccgctgngtccacagcgccgagcccacctacntnnngcgccacagccgcaccccgagcagcgacggcactgtggaagtacgcgccctgctcacctggaccctcaacccacagattgacaacgaggccctcttcagctgcgaggtcaagcacccagcactgtcgatgcccatgcaggcagaggtcacgctggttgccccgaaaggacccaaaattgtgatgacgcccagcagagcccgggtcggggacacagtgaggattctggtccatgggtttcagaacgaagtcttcccggagcccatgttcacctggacgcgggttgggagccgcctcctggatggcagagctgagttcgacgggaaggagctggtgctggagcgggttcctgctgagctcaacggctctatgtatcgctgcactgcccagaacccactgggctccaccgacacgcacacccggctcatcgtgtttgaaaatccaaatatcccaagaggaacggaggactccaatggttccattggccccactggcgcccggctcaccttggtgctcgccctgacagtgattctggagctgacgtgaaggcacccacccaggccactccattgggcacagacatctccgcgaccggttttcatttcttttctaaactatttccagtc

SEQ ID NO: 13203 - DNA, 168 bp, Macaca Fascicularis
accagagctctgtcttcctccagttctcaacgcggtgttgcttttcagtcatgccaggatgcgaatccaaaaagtttttttaaatatccctgattcctcctcgttttgaggctggccgtgatcatgctctctgtgcctgtcaccaggtctctcaagtgcactcatcca

SEQ ID NO: 13204 - DNA, 766 bp, Macaca Fascicularis
  misc_feature (1)...(766): n = A,T,C or G
atgcttgatgnnaanaacactttcagtatttgttctgntggnnnnnnnnnnnntgctggaaggcagacccgggcacaccagaaaatggaaatgatcaacctcagtctgataaagagagcgtgaagcttcttactgttaagacaatttctcatgagtctggtgagcactctgcacaaggaaaaaccaagaactgacagcttgaggaattctccccacacctaggcaataattatgcttcatcttcagcttccatgctccaagggtggaaaaaggagaaagtcctgcagaatcagtcccgacttccatacctgctgctggcctctacaccagtcgtctgtcccagtaaagtgatgtccagctgacatgcaataatttgacggaatcaaaaagaaccccggcgctctccagtcctctgacatttaaaaattgcattactccatttataggagcgttcctaggaaaagggattttaggaggggaatttgtgagcagtgaatctgacagcccaggaggtggactcgctgacaggcatacctttccttaatgtttaaagttttctgggccaagaatttttatccatgaagactttcctacttttctcagtgttcttatattacctactgttagtatttattgtttaccactatgttaatgcagggacaatgtgcatgtgtattattaaatgttaggtagaaatcataccatgctactttgtacatataagtattttattcctgttttcgtgttacttttaataaataattac

SEQ ID NO: 13205 - DNA, 732 bp, Macaca Fascicularis
  misc_feature (1)...(732): n = A,T,C or G
caaggagnncccacccgnnnnnnagagagagactgaggagctggcctgggacnatcntaggactcttctggtgctgggggcagggtgcatgggggttgcttatcgcctatttcagggggtggggaggggcatgtgcaggaagaggctgctgcggggtgggaaagggtggcttttcctttggggttaaggctgtgcagcacgttttacannnnnnnnnnnnnnnngctgtttttatattcttgtgaannnnnnnnnnnnnnnnnnnnnattttctttttttgaggggggttgcactttcattttcaaatgactttattaaatgaaaatccaaatcttccattcttcccctccattgccccctccacccccacacaccttccttcttgtcctcgtgttgaagcggggatcctggggaatgagtagtatcttctcctcgacctcacctatacatcccacacaccatcttccagnnnnnnnnnnnnnnnnnnnnnnnnnnnngtctcagcatgttttcttannnnnnnnnnnnnnnnncaggcccaagagagattctatgacatatattacagagagaattctatatcaatatatataaatattatagattatgtacacaagggcatgggctcaaatgcccactgccagtcccctacccaggcttcagcgtctctcttggcctggggaagtgggagggacgtgatgctggagaaggttacaggctgtgtcaagaca

SEQ ID NO: 13206 - DNA, 404 bp, Macaca Fascicularis
gtccatgtcagctcattcacaagaactgctcccaagcctggatgagtcgcaccttgcatcttgagcatgcatttatcacaataaatattaagctgagtgataatttctgctttcaggacattgtcatccattatcttggctgtgagctccttgggtacgggtaccttgtatgtttacttttatatacctagcgccaagcaagtgcatggcacatggtcagcgccgtaagtatttgtagagtgaagaatgccagcctctcttgtccctggtttccttatgtgttaaatgtggttgagtttgtccatcgctagggagaaacttccagtaataaaatttaatattctaggttattctacatgttagggttttctctgcccatttatctttcttagttaccaggagaa

SEQ ID NO: 13207 - DNA, 306 bp, Macaca Fascicularis
agaaggcatataaagctcctgttccgattttgaagttaaagatacgatgtgagatgtttcaggcacgtttgtagaattacctttataatacgtttcaggagttatagggtctgtgttaatgttttcattttggcttctccctgtattatttcgaataactgaatcccaggaagtattcacgctagcccacagatgggtatagtttgcttttgctccaggagacaaagaaaaaactgttgtcatcagaaaggcaagatgtaggtaatgtcctgtgtgttccatctccatgggcatactggtaatctt

SEQ ID NO: 13208 - DNA, 891 bp, Macaca Fascicularis
  misc_feature (1)...(891): n = A,T,C or G
ggaaaaaccatattgtactttcaactgctgaatgccgagcccaggcatctgacataatagtcannnnnnnnnnnnnnnnnnaaggatccaccgatgttgatgagcccctagaagtcttcatctcaccagtgagaagtaagcctgtgatcaataatgacaactctttagaatcaaatgaggaaaaggagggccannnagccnnnnnnnnacgaccccagactgtaccagagcccatggattccagaaaatcatctatattcagagaagggtttaggaaaagagtgataggacaagactgcaacttttcagactccagcgaggaggaggcgctcccagaagtcttaagcagggcactgagaagcaagcatggtgagaaggatcctgtgacttnnnnnnnnnnnnntacttggggaatacccaacaggaagagacgtttcagnnnnnnnnnnnnnnnnnngctgagtaatggagaagagcnnnnnnnnnnnnnnnnntcatccctaagacgtgggtcaggtaaagaagattaggatgccaagacttggcctgcagaatgtcaggaatctgaattaaaagctgctgtttccagatactttttattctgagcaccttgactgccttgtatccagttcatctgggaactcctttttgcattttagaaaatggaaagaggcaggaaattatgataaactcatgtttaacagaatgagtctcactgactaaatgtatgtaattatattttgctgtgtcgaagaaataaatagcaaatttgtggatcctttttttaaaaacctgctctcattcctgttaannntaagatcttagatttttacagtgataaatgggttgnncatnnnngtcgtttgtaattgtaaagcctcctactatgta

SEQ ID NO: 13209 - DNA, 722 bp, Macaca Fascicularis
  misc_feature (1)...(722): n = A,T,C or G
tagtgccagggacccaagnnagatgatgagaaaatgccaaacaaagggaggcaaggacagagaaggtacctgcaggacccacaaggctcatactggcccccatatgagcccacctctcccacccagatcaacatccccccagcccctgtgcccccatcatctggaacccagaaccaggcctcccactaccaccaccaccaccccggggctccttgattcacctttctagaacatgggtacctcctctttttgggggctcatttagactgctgcctttgctgctgacttgctgtgtgactcgggcccattgttcaatccctgtggcccttagacaccagggaaaatctccctcccacaggacatactagttccctggcaggcaagggcttccaactgaggcagtgtatgtgtggcagagagaggcaggaagccggcagtggcagcttccgtgtctagggaggggcatggctccctccttccctgtctgggaggttagagggaagaatctaggccttagcttgccctcctgccgcccttccnnnnnnnnnnnnnnncttaacactccctcctctctcagccgtgnnnnnnnnnnnnnnnnnnntctnnnnnnnnnnnnnnnnnnnnnnnnnnnnnnnnnnnnnnnnnnnnnnnnnnnnnnnnnnnnnnnnnnnnnnnnnnnnttgcagtattgaccatcatccttggttgtgtatcgcgtaaca

SEQ ID NO: 13210 - DNA, 732 bp, Macaca Fascicularis
  misc_feature (1)...(732): n = A,T,C or G
gaatatataatcagaagaaacgtgagagannngaagcagataaagaaaaaagtcacaaagatgacagtgaattagacnnnnnagctctttgtcctaagattagcctcacggttgctgccaaagagttatctgtgtctgacacagacgtctcagaggtatcctggactgataatgggaccttcaacctttcagaaggatacactccacagacagacacttctgatgatcttgaccgacctagtgaggaagttttctctagagatctctcagatttcccatctctagaaaatggcatgggaacgaatgatgaagatgaattaagccttggtttgcccactgagctcaagagaaagaaggaacagttggacagtggtcacagaccaagcaaagagacacaatcagcagctggtctcacccttcctctgaacagtgaccaaacctttcacttgatgagcaacctggctggggatgtcatcacagctgcagtgactgcagctatcaaagaccagttagagggggtgcagcaagcactttctcaggctgcccccatcccagaagaggacacagacactgaagaaggtgatgactttgaactacttgaccagtcagagctggatcaaattgagagtgaattgggacttacacaagaccaggaagcagaagcacagcaaaataagaagtcttcaggtttcctttcaaatctacttggaggccattaatctaggaatcagc

SEQ ID NO: 13211 - DNA, 737 bp, Macaca Fascicularis
  misc_feature (1)...(737): n = A,T,C or G
aaaaacggnnnnntcgtgtgnnnnnnatccacnnggcnannnnnnnnnnnctataaaaatggactccaaagagctaactttgtaccattcatagcagtcttgaaggaatattgtaatacagtccagctagattctgggatagattaccggaaaagggaacttcctgctgcaggaaaactctactacctcacaagtgaagctgatgtggaggctgtcatggataagttgtttgatgagctggctcagaaacaaaatgatttaactagaccaaggattctaaaagtgcaaggcagagagctgcgcctgaataaagcctgtggaannnnnnnnnnnnnnnnnnttgaagagctgtgtgagagaccacttggagccagtgactatttggaactatcaaagaattttgatacaatatttttacgaaacattccgcaatttactctggcaaacaggactcaaggtcgaagattcataactctcatcgataacttttatgatctcaaggtgcgtgtaatttgctctgcgtcgactcctatatcaagcttatttttacatcaacatcatgacagtgagttggagcaaagcagaatactgatggnnnnnnnnnnnnnnnnncaggattcagcagaaggactctccatgtttactggagaagnnnnnnnnnnnnnnnnnnnnnnnnnnnnnnnnnnnnnnnnnnnnnnnnnnnnnnaacagtactggaacgaaggagacagaaccaa

SEQ ID NO: 13212 - DNA, 740 bp, Macaca Fascicularis
  misc_feature (1)...(740): n = A,T,C or G
cagacttaccagggcagcagcggctacaannnnnnnnnacagatgcccgctgcctgcccagcagccccatccggatgtttgcttccttccannnnnnnnnnnnnnnnncagggacctctggggacggtgaacccccagacaggtcacccctggaacttcacattggtttccccacagacatccctaaaaatgccccccactcgatgactgcctcatcttcctcagtctcatccccatccccaggtcttcctagacgctcagcacccccttctcccctgtgccgtagtttgtctcctgggactgggggaggagtccgaggtggggttggctacctgtcccgaggggaccctgtccgggtccttgctcggagannnnnnnnnnnnnnntctgtgcagtacctggttgagtggggaggagggggcatcttctgaacagcttgcctctgcccacctccccattcacacacaccggcactttcataccctgacctctgacctcacctacagctgggatgtacctggagagataggggatagttctccctactgcccaggctggaatccaagagtggggggtggggaagaggctctcttctctaccttccttcatgattcctgacccctccatccttcccatttcctttgatgttattttgttacagctttttaaatattttttaaaattatttaacccctgggggcagagactgaggagggaggatgataagggatcccggactc

SEQ ID NO: 13213 - DNA, 738 bp, Macaca Fascicularis
  misc_feature (1)...(738): n = A,T,C or G
gaaccatatgaggctccacacaggnnnnnnnnnnnnnnngtgcccgcactgtggccgggcgttccgtcagcggggcaacctgcgtgggcatttgcggctccacaccggagagcgtccttatcgctgcccgcactgtgccgatgccttcccccagctgcctgaactgcggcgccatctcatctcccacaccggggaggcccacttgtgccccgtgtgtggcaaggccctccgagacccacacacgctccgagctcacgagcgcctgcactctggagagaggccctttccctgtccccagtgtgnnnnnnnnnnnnnnnnnnncaccaagcnnnnnnnnnnnnnnnnnnnnnnnnnnnnnnnnnnnccctaccgctgccccacctgtggcatgggctataccctcccgcagagcctcaggcggcaccagctcagtcaccggcccgaggcgccctgcagcctaccctctgtgccttctgctgcttctgagcccaccatggtgctcctgcaggctgagccacagctgctggacacacacagagaggaggaagtctcccctgccagggatgttgttgaggtcaccatttcagagagccaggagaagtgcttcatggtgccagaggagccgggtgccgcccccagcctggtgctaatccataaggacgtgggccttggcgcctgggcagaggtggtggaggtggagatgggcacctgacagctttaccttttcctgacacggtc

SEQ ID NO: 13214 - DNA, 739 bp, Macaca Fascicularis
ttttgttgaaattaatgtttctatggaagaactgcagaaattaagaaggactcgaatatgtcacttaattcagccgttggatacagttttggatgatagcattggctgtgcagtctggtttgcttctagaggaattggttggttagtggcccaagatggagtgaaatcctatcagagcagtgcaaaggtagttctcactggaattggtgcagatgagcaacttgcaggttattctcgtcatcgtgtccgctttcagtcacatgggctggaaggattgaataaggaaataatgatggaactgggtcgaatttcttctagaaatcttggtcgtgatgacagagttattggtgatcatggaaaagaagcaagatttcctttcctggatgaaaatgttgtctcctttctaaattctctaccaatttgggaaaaagcaaacttgactttaccccgagggattggtgaaaaactacttttacgccttgcagctgtggaacttggtcttacagcctctgctcttctgcccaaacgggccatgcaatttggatcaagaattgcaaaaatggaaaaaaataatgaaaaggcatctgataaatgtggacggctccaaatcatttccttagaaaatctttctattgaaaaggagactaaattgtaatgtgattcacagtgtaacaatataaaaatacgtttttatataattacttatataaaagtaagatactctgctgctttattatga

SEQ ID NO: 13215 - DNA, 746 bp, Macaca Fascicularis
  misc_feature (1)...(746): n = A,T,C or G
agcatcagagaattcataccggagagaagnnnnacgaatgcagcgactgtgggaagnnnntccgtcacagcgcaaatctcacgaaccaccagaggactcacactggggagaagccctacaagtgcagcgagtgtgggaaggccttcagttactgcgcagcgttcattcagcaccagaggattcacactggggagaagccctacagatgtgctgcgtgtgggaaggccttcagccagagcgcaaacctcacaaaccatcagaggactcacaccggggagaaaccctacaagtgcagcgagtgtgggaaggccttcagccagagtacgaatctcataatccaccaaaagacccacaccggggagaagccatataaatgtaacgaatgtgggaaattcttcagtgagagctcagccctcattcgacatcacataatccacaccggagaaaaaccttatgagtgtaacgagtgtggtaaagcgtttaaccagagctcatcccttagtcagcatcagagaatccacacaggcgtgaaaccctatgaatgcagcgagtnnnnnnnnnnnnnnnnnnnnagctctnnnnnnnnnnnnnnnnnnnnnnnnnnnnnnnnnnnnnnnnnnngaacgtggtggaagtggagagtcctggacatgccgactcaggacagatgggtgaggatctgagaaatgctaannnnnnnnnnnnnnnnnnnnnnnnnnnnnnnngagtctgcagcccagaggcac

SEQ ID NO: 13216 - DNA, 672 bp, Macaca Fascicularis
  misc_feature (1)...(672): n = A,T,C or G
agaagacacacagcttgatgaatttcacaaaccaacacctgtgcagccagcaaccaactcgagaggaatattcccagtccccagaggcccctcctgctcccgtccaggccgggcccgactgaaatgtgagtgtccaggtgcagaaagtccccgtaacaaatgacctannnnnnnnnnnnnnnnnnnnnnnnnnnnnnnnnnnnnnnnnnnnacagtcctgtggagcgggcccaggctatgcctcccaggttctgatgtctcagctgagacgcatccgagagcctgaggaagctcaaggctgaagacgactggctgccacatgccaggtgccacctctttgggcctgnnnnnnnnnnnnnnnnnnnnnntcgagaatctcgtgtactcttataaaatgcacacctgtgacaatgnnnnnnnnnnnnnnnnnnnnnnnnnnnagcgaaataaggtagatgcaagagannnnnnnnnnnnnnagctgtgggtggatctaaagactggaactcacagaaacagtgggaaggtgcttatgggggtctgggggaggggcagtgggagatggtcagcccnnnnnnnnnnnnnggacagttccggctcaggcacttcctcccccaccctgtggcccgactgagtggagaagctgcccatggcctgggcctggcagcgggg

SEQ ID NO: 13217 - DNA, 773 bp, Macaca Fascicularis
  misc_feature (1)...(773): n = A,T,C or G
tggacatctgtaaatcnttnnnnnnnnnnnnnnnnnnnnnnnnnnnnnnnnnnnnnnnnnnnnnnnnnnnnnnnnnnnnnnnnnnnnnnnnnnnnnnnnnnnnnnnnnnnnnnnnaaaatatttctacattttattgaaaaaactttttttttttgcctaaatataagtttggtagcttggtttcttttttttaattaaatagtgtgaaaatataatggtcattttgaaaacttttagcaaaaagtagtactttttgatgctttagtatttatggaaactagtggaaaagagaaattagtgtgctatataaatcaggcattcaaataacattagtagtacaggatatgtgtgttttctttccctgatatttaggaaaatcacaggagggcaaatctttcctggagttatatgaatcatcggcatttatccaattccactggtagtgttttgctagtgcttctaaaagttgctccctagcattttgaggtgtgggtaggtaaaaatgtgtttgcttgtggaaagcaaaaatgctgacaaggttttaatagattggcccaaaattccaacttgaatattaagaatgactagcaatggtagaattgacagagatgattggtaaagtctcttgatgcccaattgattaggtatgaaagtaatatgaacacattaatgttgaatttcacagacagtatattatctgaaaaaaattgattctgtgtagtacttcgaatttttaatttttaagaattggagaatttctaatattaatgtt

SEQ ID NO: 13218 - DNA, 362 bp, Macaca Fascicularis
  misc_feature (1)...(362): n = A,T,C or G
acatacactatcccnnncnatccctgnnnaagagcaactgaagtaaaataagggtcaaggtaagtggccagaagtacctgttcttagacaaacttgagctatgttgttttgataattttctaactaatctttctgtctacatttgaactattttaacatttttaagcagtaaaaaaaatcaaatccacagaataattttaggaaatgtcaagttataaataaatagtaataagatccaagacagcagaataagaaagtaacatcctaggggccannnnnnnnnnnnnnnnnnnnnnnnnnnggtggtactattatgtctagtgtttgctagcagggactatatccaaaagctccattttgtc

SEQ ID NO: 13219 - DNA, 688 bp, Macaca Fascicularis
  misc_feature (1)...(688): n = A,T,C or G
aaacaggtaagctgaccaaaatcatgcaactggtgaaaaggttgatctgtactcaagtccatctgactccagagtccatgctgtacattgtatagcactgcctctatggggtttacattcttcactcataaatacttgagttccagggtagtgctcattttgtatatgaaagattgtgtatataaagaaatggaattctaagttactacctgataggaattttgagaaagaagatgaaatagcagttactacattgtaaagagtagttaacaatatgtgttaaaaacctactgtaaaacattttctgttttacctaaatctctcttattatcttaatatattggcctacctttttccaagatcccagcagtcccaagattccattttcattattaccttttccttgattttatcctttatcagtcctattagtatttttgtttgtttgggagnnnnnnnnnnnnnnnnnnnnnnnnnnnnnnnnnnnntttatatacaggcagaaatgaccataatattgggtaagctttataaaggtacagtagttcagagagctttgttgataaccaaatggaaaaactgttttttaaaagcataactagtttatcttgagtaagaaaaaaagttgcttaaaatgttttcagatcgttagcatattgagatgactatttcagntttaatgtatttg

SEQ ID NO: 13220 - DNA, 632 bp, Macaca Fascicularis
ctctccctcccccacatctgtgtctttctttctctctctctctcaccctcacctttatgccttatatagagaatctctgtgtaaattctggctcataatcagtctccttcttatcagttttggtgtggagaaagaggccggtttaaatagactttaaagagtctaggaatagaaaagcaatagtcaccaagctaggtgacctgaaagctttaattttcatgacctggatatgtggtctattttatatctttttctgaaatggtttgtattcatttaggttaaatcaatcagcagatattgggtccggtataccaggtgttttgggggtaagctaataagtataactcatgtttgcagccttcgaagatgtaacaatctcattggaaacataagacatacatcacattatccacaaaagtgtatcatatgtacaactgagtggtacagatatgacatggaagatctaggggaggaagttcaaggaaggcaccacaccagaaatgggacctaaattaaggcttaaagaatgagcatggccacactgtcaatgagtgttctttaggtggtaggactatggttgatagttttcttcttcctatcttcctgcctttttcagattttcagtattaaac

SEQ ID NO: 13221 - DNA, 758 bp, Macaca Fascicularis
gcatgccatgctaatccggcacgacgagtccacccgagagctagagtacaggcagctgcacacgttacagaagctacgcatggatctgatccgtttacagcaccagactgaactagaaaaccagctggagtacaataagaggcgagaaagggaactgcacagaaagcatgtcatggaacttcggcaacagccaaaaaacttaaaggccatggaaatgcaaattaaaaaacagtttcaggacacttgcaaagtacagaccaaacagtataaagcactcaagaatcaccagttggaagttactccaaagaatgagcacaaaacaatcttaaagacactgaaagatgagcagacaagaaaacttgccattttggcagagcagtatgaacagagtataaatgaaatgatggcctctcaagcgttacggctagatgaggctcaagaagcagaatgccaggccttgaggctacagctccagcaggaaatggagctgctcaacgcctaccagagcaaaatcaagatgcaaacagaggcacaacatgaacgtgagctccagaagctagagcagagggtgtctctgcgcagagcacatcttgagcagaagattgaagaggagctggctgcccttcagaaggaacgcagcgagagaataaagaacctattggaaaggcaagagcgagagattgaaacttttgacatggagagcctcagaatgggatttgggaatttggttacattagatttcctaaggaggactatag

SEQ ID NO: 13222 - DNA, 162 bp, Macaca Fascicularis
gcagtgaactaacaacccacggtgcacgtaaggcaaatccctggccactgtagtctccccgctatggtgaagatgagggtggggcatagagagtgttgatttgggaaagtatcaggagtgccataattccaatgtttttgttcttttaagttaaattcagtt

SEQ ID NO: 13223 - DNA, 782 bp, Macaca Fascicularis
  misc_feature (1)...(782): n = A,T,C or G
cttaatgatttnnnnncaggannnngagatntnntgatttatatttcatgatatttcacatnnnnnnntcacagcatgagcatgaagcccagtggcactaagtggctgggtacaatcaagtgatatnnngtagcacttcactatctgaaaggccatgagttttcagnnnnnnnnnnnnnnnnnnnnnnnnnnctaaaattttaaaaaagttttgtaannnnnnnnnnnnnnnnnnnnnnnnntgacgagagatttagatatgtccaatttcctggctcatttcattgtgctctatgggtatgtataaaaagcaagaattctgtttcctaggcaaatatagcaactnnnnnnnnnnnnnnnnnnnnnnnnnnnnnnnnnnnnnnagtaactttgtcccagtcctacaatgtgaaaagagtgaatagttgcctctttttagccattttcatggctggtacatattcgtacacattacttttcagaatcannnnnnnnnnnnnnntattcttatttttattctcttaagtctttattaactttggagagagaaatgatgcatctttttattttaaatgaagtagannnnnnnnnnngaacaaaatgataaagaacagaaaacatttcaatatattactaataactttttccaatataaatcctaaaattcctataacatagtattttacagttttatgaagctttctattgtgacttttatggaattaagagatgaagaagatgagatattttagcatttatatttttcaaaattatatgtatac

SEQ ID NO: 13224 - DNA, 757 bp, Macaca Fascicularis
  misc_feature (1)...(757): n = A,T,C or G
ttttannnngcagtttaatcatgaaaactcaaaaagaaagggggaaatggtcagttaagccaaaagaaactttctaaacaacgtatatgtacacggcaaaattaaacnnnnnnnnnnnnnnnnnnnnnnnngtgtaattgagtggtggttgttactcaataaaattatcccaaaagtgtttctcctaagnnnnnnnnnnnnnnnnnnnnnnnnnnnnnnnnnnnnnnnnnnnnnnnnnnnnnnnnnnnnnnnnnnccttgacattcagaaagatgtgagctgcttactgatcatatatgtatatgtttcnnnnnnnnnnnnnnnnccattgtccacaaaactgatgttcttttggggttttatgtacagacttgtccaatgatgtgtgtggttactgnnnnnnnnnnnnnnnnnnnnnnngaagctctctgagttctttcattttacgttgggtttatggaattatttcaattgttggaaggcgtatggttcttcctgccctccctccccttttggaaataggaaagcaaatgtttagaagaattccttttgagaagctgtgtcgtgtnnnnnnnnnnnnnnnnnaggtgtgtgtcggtgcgctaagtgccacgtgcttgtgtgcagaggaggaggtggccctgccggctccgcgctgctgtgcctgtgatcccgacctgctccccgctcnnnnnnnnnnnnnnnnnnnnngcactcctttgtcatatannnnnnnncactgtcatactcacaactt

SEQ ID NO: 13225 - DNA, 685 bp, Macaca Fascicularis
  misc_feature (1)...(685): n = A,T,C or G
caagaatgcccatggaggnnnnnnnnnnnnnnnnnnncatnnnactctcctgtgatccaggtggtccagaagnnnaggacaggcgctttctgtgggccctggccacagacagggttacctggtgaggtgcagagagtccctctagtggccatttcgtatggtagttgctaatgcagaacaagttctgtcttgggcttaaattgactgaagactttaggggaaaagaacattaaatgcatgtaaacaaatgggggtactctgtccaggagaataatccgactggcatttgtggcagtttttgaaatgtaaatgtattcatgtgtgttcttgtaaatacatgtctctcagatgtcctttgaagtgggagggaatcaatccggggataatttcaaatggaatagagtattttgatattgttcattcagagggnnnnnnnnnnnnnnntatattgtatatatgtgatgaaaatgcattggctttttgtgnnnnnnnnacctgctctctnnnnnnnnnnnnnnnngtgttttaatgtttctacagttttgctattgcacgatttcatattttgcctctatgatgaacggcaaccattctttgtaactgtttagtgctgtaaagaaatattccaagtgtcattaggattgttgctgnnnnnnnnnnnnnnnnnnnnnnnnnnnnnaataaa

SEQ ID NO: 13226 - DNA, 764 bp, Macaca Fascicularis
  misc_feature (1)...(764): n = A,T,C or G
gatactaacaggttttctccgtgatcnnacnccgaatagttttctcataaaccaagcatttatnnnnnnnnnnnnnnnnnnnnnnnnnnnnnagtctctagaatggatgttgaaatctttgcctcctcagtcgggaagagtcctgctaaaaatcaggccaaatgacttggcaaataattgacaaagtgtttttcaggtgtgtctatctttgctagcagcttgtatacctcaggccaggtnnnnnnnnnnnnnnncttttttcatttactccagtgagtttctgctgtctcttcaagtatataccataggacttaaaggtgatttggatgcgttgtaacactgctaaatgtactaagtacagaattttatttacagtactatgagacagtcagttattgcctagggtagttcaaaaatatgatgtcagttagttaagcttttatttgactgatgtcagtgatattcagaagtgtgtaccaatcaaggctctttaaaatacagaacgactcaataaccagggaaccagccaaatactgtnnnnnnnnnnnnnnnnnnnnnnaatgaattggagacgattattctctgtaactccctaatgattgttttctaagcattgtggcttctcagtggcttgacagcatcttcctggttgtatgtggcctgtttacatgaagtattgagtaatgtttgttgtnnnnnnnnnnnnnnntaacaccaaacttaacacatgtttttgggatatgtttccaatctttaaatgacct

SEQ ID NO: 13227 - DNA, 722 bp, Macaca Fascicularis
  misc_feature (1)...(722): n = A,T,C or G
gcagtgatannctgagggggtaaaatcaagagaaaaaaccctcaggaatcaaggaacataatccggtggagggtaatccattacatgagcttctcctgttcttccactttcctgcctggctttcactccttcctctgctctgcccagcctttccctcccaccccctcctccttctgcaaatgcccnnnnnnnnnnnccttcccccaacacccacttccccaccccgttaggccccagatnnnnnnnnnnnnnnnnnnnnnnnnnnnnnnnnnnnnnnnnnnnnnnnnccaaatatgacccttnnnnnnnnnnnnnnnnnnnnnnnnnnnnnnnnnnnnnnnnnnnnnnnnnnnnnnnnnnnnnnnnnnnnnnnnacacacatgcatacatgatccttcacacaagcacttgcacacgtggactcctaaccatgctaacctcactggctgggaaggtggggaccnnnnnnnnnnnnnnnnnnnnnnnnnnccttttgcaaggcttagggtgtggccagccctgaaagctactttggacacaggtttcagcgggccccagctcagaagtgacccccagaaagggagggccaccgctttgcccccctgcttttacccttccttctgagtgctctatacctcccgaggttaccaggcctgaagcatctcagccaagctnnnnnnnnnctctgaggctttggggggtgggagccagagtggaggtcg

SEQ ID NO: 13228 - DNA, 704 bp, Macaca Fascicularis
  misc_feature (1)...(704): n = A,T,C or G
tgctggnnnnnnnnnnnnnnnnnnntttggagctgcagccncnaccagttcagctatnnnnactnnngctccagcttttggatttgggaaacctgaagttacatcnnnnnnnnnnnnnnnnnnnnnnnnnnnnnnnnnnnnnnnnnnnnnnnnnnnnnnnnnnnnnnnnnnnnnnnnnnccttggcannnnnnnnnnnnnnnnnnnnnnnngccccagcctttggaggtggcagttctgtggctggttttggtagtccgagctcacattctcacactgctttttctaagccannnnnnnnnnnnnnnnnnaatagcagcatatccacttctctctcnnnnnnnnnnnnnnnnnnnncaacagataatgtgttattcacacccagagataaactaacagtagaagaactagaacaatttcaatccaagaaatttactctgggaaaaattccattaaagcctccacctctggaacttctaaatatttaaaagggcaattttaaatacaaaaaagaatgatgtttgaaattgttttgagtgattcatatagaggtgcatatatgcatacatgtattcataaggaatataagcttccattaatagtgattttaaattttattttttcttaagtctaaatatttaagtaaaaagtaacaaaaactcagcaagcaagggaatttttttgtactgtaattttgaatggaac

SEQ ID NO: 13229 - DNA, 734 bp, Macaca Fascicularis
  misc_feature (1)...(734): n = A,T,C or G
caaagcaagaggaaggaacgataatggtgactcagnnnaagaggaagcagnnnnnnnnnnnnnnnnnnnnnnnnnnnnnnnnnnnnnnnnnnnnnnnnnnnnnnnnnnnnnnnnnnnnnnnnnnnnntcaattgcagagaaaaaaactttccccctacatctcacacctttacctctggccagttggccaccagggggagtaagctgaagggagagtagatggtgcaaagcaagcccatctctgagtagaaaaatcacccgagcacatgccaacctgataactgggggttgannnnnnnnnnnnnnnnggtatgatgtttgatttatgaagacacattgttagaaatccattttggcttcttcatcgaagtggcttcccagaggaagaggcctctcannnnnnnnnnnnnnnttaagttctgagtcctgatgagtgctccctaggtgcactgatgagggctcaggcagctgagagctgagcacgaggcagttggaatctagacactatgctgggttccctgagtcgtcagtccagacatttcaacaaggctgtggggagcagggcggagactctggctgggcccaggaaagggacaagggtgaactgggagagagacttactcagagatcccaacaggtgatactgcacaaagcctggttcttcaattgtcctaccctgtatctaatacaggagtttcatacaaaactgcgatatcgtgcagatgcagtctgaa

SEQ ID NO: 13230 - DNA, 721 bp, Macaca Fascicularis
  misc_feature (1)...(721): n = A,T,C or G
agggcaaaccagggagacccttgtccccggccaatgtnnnngctccacctggtgagacggtgacctccccagtcaggctgcaccccgactacctctccccggaggagatacagaggcagctgcaggacatcgagaggcggctggatgccnnnnnnnnncgcggtnnnnnnnnngagaagcggctgcgggcagccgagggagatgatgctgaggacggcctcatggtggactggttctggcttattnnnnnnnnnnnnnnnnnnnnnannnnnnnnnnnnnnnnnnnnnnnnnnnnnnnnnnnnnnnnnnnnnnnnnncannnnnnnnnnnnnnnnnnnnnnnngcgccggctcatggccaagcctgaggctctgaagtccccacaggagcggcagcaggnnnnnnnnnnnnnnnngcggtacgtnnnnnnnnnnnnnnnnnnnnnnnnnnnnnnnnnnnnnnnnnacgaggaccggctccgggaacaagaggaggatcagatgctgcaggacatgattgagaagctgggcctccagaggaagaagtccaagttccgcttatccaagatctggtcaccaaaaagcaaaagcaaaagcagcacctcccagtagcggccagtggggccgtgggctcggcccggacccggcattcggacttggactcaggaagggcctcctgtccctacaaggggcatnggacagcagggacctgcgctaccgtc

SEQ ID NO: 13231 - DNA, 301 bp, Macaca Fascicularis
ttacagcttgttttgcaggcatcaaataattgttgagattgttctactgttgtcatacattcttatatattgaattccggttaatttcgagtaattaattctgaggctgttgtgagtgttcagcaccctcccacgtacgttatatccctctctgaaacagaacagctccaatagcaacaagccagttgttttgccacgtttgtgtgtggattctgtaatgttcctccatacagttaaaacatcttaacttgcttttcaagctcactcagcctacgcacaaatattttgtgttgttttttca

SEQ ID NO: 13232 - DNA, 709 bp, Macaca Fascicularis
  misc_feature (1)...(709): n = A,T,C or G
agtatgtggccgtggagcnnntggccaccgtcagtccncccttggctcggtctgagnncannnaggtccagggccacctggtccacttccccctcaagttccttgaggatgagtctttgttgcccccgctgggtagcaaggagggcatgatccccctagaagtgtggacatagttgaggcccccgtcggggagaggtcaccagctgctgtgccccaccaggtctggctccctgccccttaagcgcagggactgagggcagtgccctgtgagatctggggaggcaggcatccctgaacgggattagaggtgtcacagaggacccttacatgagaaacagccgaagaggacactcgcaaccttgggctggggaggcaggagagagtcccagagaagctcaccccccctgctgcccagtgcaaaccacttctccatgctgcagaggagaagcgcagctcctgccagggcgagcagggtcaagcctcttactccaggagagggggactctgccccaggccctactacccattgttcccttcctcctcctgcccttgaaccccctccctgtcccagggcctctcccagcccattgctgccaaggtggagggaaggataaagccacttctggctttagcccccaccaggggaaggaaggagtgcatattaactccctcctcctagcctgctgacactaactttgtatctgtcaat

SEQ ID NO: 13233 - DNA, 744 bp, Macaca Fascicularis
  misc_feature (1)...(744): n = A,T,C or G
acaatgtaaggacagaacaatacaatactaagtccaaatctaannntctgtcagtggggcagttatgttttacactctacagatttacaaataacaaggctattcctcgaaaatctgttgttgctgggtcctggaggagacatgnnnnnnnagatgacccaatctgcctttgaatctggaggaaataggcagaaacaaaatgactgtagaacgtcatctcttttggccaaatttcatttcagccacttctgcaggatccctactgccaacctggaatggggacttatctactcctctctctctctctgtggatgtcaaatcatggtttagatcaaatatatttcaagctataaaagcaggaggttatctgtgnnnnnnnnnnnnnnnnnnnngtattcaggggccagtaataatggaacgctactaagatactccatattcttccccctgagtcacacagacagtttctgacaggtgcagctcctccattttcctcccgcaggtgatgactcagtgccataactgagaagtaactgacccctagttgacagcaccttgcagttccccaagaactttctgattcacagtctcattttgacagcacacaatgtccccttgaagcatagctttttaaatatctttttccttctactcctccctctgactctaagaattctctcttctggaattgcttgaacccaggaagcagaggttgcagtgggccaagatccatgccactgcact

SEQ ID NO: 13234 - DNA, 768 bp, Macaca Fascicularis
  misc_feature (1)...(768): n = A,T,C or G
gtgcattggtataagcaattatttcatcagttgtcagataacaagcattnnngctctgcctgcaagcccccaggcacttttttttttggaatggctcaaaatatggtgcttctttatataaaccttacatttatatagtgcacctatgagcagttgtctaccatgtgcccaccagaggctatttaattcatgccaacttgaaaactccagtttgtaggagtttggtttaatttattcagtttcatttggactatttttatatatttatcctcttcattttctcctaataatgcaacatctattcttgtcaccctttgggagaagttacatttctggaggtgatgaagcaaggagggagcactgggaagagaaaagctacaatttttaaagctctttgtcaagttagtgattgcatttgatcccaaagcaagatgaatgtatgcaatgggatgtacataagttatttttgcccatgcctaaactagtgctatgtaatggggttgtggttttgtgttttcgatttcgtttaatgacaaaataatctcttatnnnnnnnnnnnnnnngtgagagtttatgtttaaaagataagagacacaacatgtattatgcacttcatttctctactgtgtggagaaagcaataaacagaatgttaaacattatgcaaaattatacttttaaatatttgttttaaaattactgtacctagtctttttgcattactttgtaacctttttctatgcaagagtctttacatatcactaataa

SEQ ID NO: 13235 - DNA, 742 bp, Macaca Fascicularis
  misc_feature (1)...(742): n = A,T,C or G
agttgatgtcannnnnngaattgctaacacagtggcagtgttagatgaagatgctgtntacaaggtagataaatatactgtttgatactcaaaacatttttcattttgtttaaagtagaagttacataattctatattttaagtcgggttaaaaagtagttttacattttataagataatgatgtaaatgattcaagtttaaagctctatttgacctttttttctttttttgagatannnnnnnnnnnnnnnnnnnnnnnnnnnnnnnnnnnnnnnnnnnnnnnnnnnnnnnnnnnnnnnnnnnnnnnnnnnnnnnnnnnnnnnnnnnnnnnnnnnnnnnnnnnnnnnnnnnnnnnnnnnnnnnnnnnnnnnnnnnnnnnnnnnnnnnnnnnnnnnnnnnnnnnnnnnnnnnnnnnnnnnnnnnnnnnnnnnnnnnnnnnnnnnnnnnnnnnnnnnnnnnnnnnnnnnnnnnnnnnnnnnnnnnnnnnnnnnnnnnnnnnnnnnnnnnnntcccactatttcactttttaaaatgacattcctaccgattgatttttatcttgctataagttggatgacaccgtgaatctaataaggttcactgttgacacagtacaagttacatagctaaaatacatagcattgaagactaattttaaggattaacaagagtttattttctgttgtgcaatatcttaaaggaaggaaccacctttggaaaagtgtatctgctgctcctagg

SEQ ID NO: 13236 - DNA, 791 bp, Macaca Fascicularis
  misc_feature (1)...(791): n = A,T,C or G
agcngcacatgctgganagagannnnnnnnnnnngcgcacatcactatatttggctggctctgccagtgctgaattctttgctgacattgccctggctcctatggaagctgctaaggttcgaattcaaacccagccaggttatgccaacactttgagggatgcagctcccaaaatgtataaggaagaaggcctaaaagcattctacaagggggttgctcctctctggatgagacaaataccatnnnnnnnnnnnnnnnnnnnnnnnnnnnnnnntactgttgaagcactgtacaagtnnntgnnncctaagccccgcagtgaatgtnnnnnnnnnnnnnnnntggttgtaacatttatagcaggttacatagctggagtcttttgtgcaattgtttctcaccctgcnnattctgtggtatctgtgttgaataaagaaaaaggtagcagtgcttctcaggtcctcaagagactaggatttaaaggtgtatggaagggactgtttgcccgtatcatcatgattggtactctgactgcactacagtggtttatctatgattccgtgaaggtctacttcaggctccctcgccctcctccaccggagatgccagagtctctgaagaagaagcttgggttaactcaatagatagatcaaagcaaatgtggactgaatctgcttgttgatcagtgttgaagaaagtgcaaaaggaacttttatatatttgacagtctaggaaattgtctattcctggtataattactgaaaaactcttgcttaaggcaaganttcaaa

SEQ ID NO: 13237 - DNA, 690 bp, Macaca Fascicularis
  misc_feature (1)...(690): n = A,T,C or G
gcagggccaagtggggacagcagcagcnnncnggccttgggatgtgatgacaaagcaagcctagggccagggttnggggagcagagagagctgagaagtnnnnnnnnnnnnnnnnnnnnnnnttcccgctgggacttgacttcccaggtcaaggagtcggtctcattctggctggtggagtgcccagaggcctgtgtgaatgtgtgcgcctgcttttcctgcctggaatgttttctggctcagctgcagcaacatctgcaggcccagtgtctgccctgtgtccctgggctcactccaagtgcagggacatgnnnnnnnngnnnnnnnnnnnnnnnnnncgaagggcaggaaacagtcctctgaaggagtgggaggtggacagtctgcccccaccaggtaccatcgcctcctgccagcttccccagnnnnnnnnnnnnnnnnnnnnnnnnnnnnnaagtccatcagtattgaccgtctcgctccatcttggtgctccagagtcccaagtttccctttttcatcacatctgacaagagagaagaaacgtgggtgtnnnnnnnnnnnnnnnnnnggtggtgatggacctccccactccctcaagctctggatggctgcagtgttgtactagactttgttcaggctgttctcatcttagtattgccccttcctttcactttcacacttctctca

SEQ ID NO: 13238 - DNA, 840 bp, Macaca Fascicularis
  misc_feature (1)...(840): n = A,T,C or G
gcagctgaacancactcaggataaggtgnnttnagtattaacatcaacnnnaatacaactcnnnnnnnnnnnnnnnnnnnnnctcacactgctctacttaggctgaatagcagcaccattaagtatcttgactttgtctttgctgtgaaaaatgaaaaccgattttatctgaaggaagtgaacgtcagcatgtatttggttaatggctccgttttcagcattgcaaataacaatctcagctactgggatgcccccctgggaagttcttatatgtgcaacaaagagcagactgtttcagtgtctggagcatttcagataaatacctttgatctaagggttcagcctttcaatgtgacacaaggaaagtattctacagctcaagactgcagtgcagatgacgacaacttccttgtgcccatagcagtgggagcagccttggcaggagtacttattctagtgttgctggcttattttattggtctcaagcgcnnnnnnnnnnnnnnngagcaattttagaatctgcaacctgattgattatataaaaatacatgcaaataacaaggttttcttacctctcagttgttgaaacactttacttcttaaaattgatatgttgaaactttaattattttatcaatcccagcattttgatattagtctttattaataaaacctgttctctttaatcagcttacaatccaaagtgtcatatttactggtcctggagacaaacttgttcaaaggaacatcgatgtgcaatgttttaaagtctatcttaagaagtcttggccaaattttgatcctaactttgaagtatgcattgaacttattaacatggcc

SEQ ID NO: 13239 - DNA, 765 bp, Macaca Fascicularis
  misc_feature (1)...(765): n = A,T,C or G
cagactgagacacagcagaagtgtgtcagcccggcccnnngcgnnnnnnggcccggggctggcgccgttgtgtttgcgtcngtcttnnnnnctttgcaaccaagcagtttttgtggagcgggacttacctgcgtgccccaggggtctttcaggatnnnnnnnnnnnnnnnnnnnnnnatggtttcctctcggcagagcccgggttgtggggttctcaacgcagnnnnnnnnnnnnnnnnnnnnnnnngggacggctgacctcgagtcccctcccttcccgagaacctgctctgtcctgagggcggctaacaagggctgagccccaggcacannnnnnnnnnnnnnnnnnnnnnnnnnnnnnnnnnnnnnnnnncaaaaaacaaaacagaccaccatgaccaacaacagagatgggggatagggttttgtaaaggttctgttaggttcatatttttatatcattttgctcataaatgcggaatttgccgtgggaatttgaagacaaattatctatgtttttatggttttctaggnnnnnnnnnnnnnnnnnnnnnnnnnnnnnngctgtgggaggcctgctccctgtggggggcaccctgagcagggtggggggccttgggaggcacttcttgccaagtgcagacgagnnnnnnnnnnnnnnnnnnntgcgacgtccccgcacgacaggctcatactttctgaggacgtgcatagtatagggcgtctgaaccttgtacaaatgtgtagatgacatcttgctacagc

SEQ ID NO: 13240 - DNA, 799 bp, Macaca Fascicularis
cgcagtcagcccatgaggcagatgacctgctgggcctggggctttccaagccctcagctggtcctgagcaggatggagcaagctcttctcttgttcatgagctcctggttggaggcatttgagcaggtgagtaaccttcacaggcttgccgtgtgacccctggccacagccttccctccgcattgacctggaggggaggggtcagccttgacgtgatgaggttgctatagttgcagcccaaggacagttcagagatcagaatcagctttgaaggctgaattcttccactcatctatctacataagtccattcatttccaccagggccagagcagctccaccactgtgcacttagccatgatggcaacagaaaccaagagacacaattacacaggtatttagaagcagagggacaaccaggaggcccttagctatcaccagcgcatcacgactgcacactctcttctccattccccagcaggaacttctagctcatttaacagataaactgaggcccacggtttcagctagacaatgatttggccaggcctagtaaccaaggccctgtctctggctactccctggaccacaaggctgattcctctcatttccagcttctcagtttctgcctgggcaatggccaggggccaggagtggggagggtttgatggaggggaggggggcacacccaccccctgcttggttctaggctgctgcacaccagggccctgcatctgtctgctctgcatatatgtctctttggagttggaatttcattatatgtaagcaaataaaggaaa

SEQ ID NO: 13241 - DNA, 850 bp, Macaca Fascicularis
  misc_feature (1)...(850): n = A,T,C or G
tgactcagcacacatgcaaatcagagcaaaccaagaaaacgacaactgggcctgtaactgtgatctctctctatcccaaggtgatggtggccccaaggccttgaaggggctgggctccagccccgacctggagctgctgctccggagcagccagcgggaggaaggtgacaatgaggaggaggagtactttgtggcccaggggcagcagtgaccggccagggcaaatggcttagaagcaggccgctctccagcctgctgccagcactcactgtgctcaagcccccggggctcttcatggtagctgggagctgtggacgagagtcaaaggtggtggggccaagccagggactcctgactcttgtccctcccttcagagcttggtcacacaaggggcgagcaccaggccagcctgggacctggccagagctgggcccannnnnnnnnnnnnnnnnnnnnnnnnnnnnagaggggagtgggttggttcttcccaaccacttcccaggctctgacagccaagactcatctccaaggcaccgcagctttctaaggggactgggtttggactgggttttggatctcgaggggctggagcctcatcacctgggtggcatcttttctcagagagcaggtttctttatagtttggaaataaatggttcacggtccactggccacctcgtgttgctggagatggggcagggagggacagtgtgggcctggcctctcctttcctttccctgcctggggccttcttcaaatgactggtcttaggccaggcctccttcgtttcttgcttatgttggaacaccagtgccctccgcatggggccccactgcacctgctggcgggaa

SEQ ID NO: 13242 - DNA, 750 bp, Macaca Fascicularis
  misc_feature (1)...(750): n = A,T,C or G
ccacagacannnntggggggnnnnnaagcaacagccggacacccccttggtgctcgccttcggcctctcttggaactgcaccaccgaccaactccagacttgggagctcttcctccccaggacttggtcttttttctgggtcttgttttgttgatttttcttttttaattttggaacaaatgcttttccaacccgtgagtgctaagaggctctggaagggagggctccaggcccgaaggtctctctggctctaggaccccccagtgctcacacaatcagaccaaggaacaggacccccaggaaggaaacagatnnnnnnnngaccatggggtggaaggagaaaggggctagcactggatggggctggagggccgtcggggagaaatctccaacgctctctgtgtccgtgtggagggctgcagagnnnnnnnnnnnnnnnncttccccannnnnnnnnnnnnnnggcctggccagannnnnnnnnnnnnnnnntggggaacaaggtactacggaagccacgtcactattgggcccccgggtctgatctgggttttgcctctgcccttggggaaatgctatcagaaattcaccccattttctttacagtctcttttgtgtctgtcatttctctttcaaaaaggcggtgtttttgttgttgttggctttttttttttttttaaagaaaagttcttaaaacactaacggaaacccatggagtttgtcctttgtaaaaattttaaacacagtgtc

SEQ ID NO: 13243 - DNA, 710 bp, Macaca Fascicularis
  misc_feature (1)...(710): n = A,T,C or G
gtcagcagacatcagnnnttacttccactgttgggattnnncattcaaactctagatcctaaactgatagtnnnnnnnnnnnnnnnnnnnnnnnnnctacttaaattagagcctcctnnnnnnnnnnnnnnnnnnnnnnnnnnntttgtatcttctctaggaaaactttttatacctgaagctatccaggacagaattctgcccaacctgtcctgtatttttgccttactgctagctgacaggagttggctgctagaacaacataccttggaggnnnnnnnnnnnnnnnnnnnnnnnnnaaannnnnnnnnnatagttccacagtgtctcagttctgaagaaattaagaacaaagttgtatcctttctggagaagactgggtttgtagnnnnnnnnnnnnnnnnnnnnnnnnnnnnntgaaacaggaaaaaaggtantnnnnggaaaccctttgctaatgtgaatgtagaagaagcaaagaggtcatctttacagccttatgcaaaaagagctcgtcaagagttcccctgggaagaagagtacaggtcagcgctgcacacaatagcaggggccttggaagcaactgagtcactactccaaaagggtcctgctccggcctggtttttaatggaaatggaggcgctccaagaaaggatggataagctaaaacgttatatacatactctagggtgaaacttatgtctgtacat

SEQ ID NO: 13244 - DNA, 787 bp, Macaca Fascicularis
aaatgcagactttattaggggcataaggagggcaaggtatagtttatggaagtgagtgttagtgactttggcatttctgtagctgagcacagcaggggagtggttaatgcagatggtaagtgcaccaaggagaaggcaggaacactggagccaggaataaggaaggaaagggaactggagagtgtggtgaatgggaagaagcagtttactttagactgaagaatatattgggggaggaatagaggggaggtgtgcaggaaccagcaatgagaaggccaggaaaaggaccaaaaatgcagaaagtcaaagagttagaactgttggatacaggagaagaaacagcagccccgctacagacccacccccaggtttgatgtccttccaagaatgaagtctttccctggtgatggtctctcactctgtctttccagcatccactctcccttgtccttccggggctgtatctcagtcagccagtggcttcttgatgatggttgttggggtggttgttgtgtgatgggtcccctctaggttactaaagagtgtatgtcccctgcttgaaccctgaagggcaggtggtgggccatggccatggtccccagctgaggagcaggtgtccctgagaactcaaacttcccagagagtatctgagaaccaatcaatgaaaacagtcccatcgctcttacccgataagtaaacagttagaaaattagcgtgaaagcagcttagcattgggaggaagcgcagatctctagagctgtcctgccaccgcccaggagtgacctgt

SEQ ID NO: 13245 - DNA, 718 bp, Macaca Fascicularis
  misc_feature (1)...(718): n = A,T,C or G
tagnnnttcagtannnnnnnnnnnnnnnttctttccctccttttcccaaagcatccctcttagtctaggtccttgttatttcttgcctgaactcctgccatagtcttaactggtctccttgcttcctgtcttatcctctaccagtctttcttttatgctgacacaagaatggtcattctgnnnnnnnnnnnnnnnnnnnnnnnnnnnnnncnnnnnnnnnnnnnnnnnnnnnnnnnnnnnnnnnnnnnnnnnnnnnnnnnnnnnnnnntggcatccaaggctctttatgatctggcccttgcttacctctcagccttagttctcccaactcttgcacagtcactgctcnnnnnnnnnnnnnnnnnnnnnnnnnnnnnnnnnnnnnccaggctcttgcacacttctgcgcctttgcatgtgctgtttgctgtgtgtggtatgcccttcactgtcaccaccctgctcatccactctactaatgcctcttcgttcttttatactcagcttcctttaaagttcttctaagctgagttaggtgtctgtcctctatgatcccgcagtagtccatgaatacgtatattcttnnnnnnnnnnnnnnntattataattgttgaaaacttgtctgtcnnnnnnnnnnnnnnagctccttgagagcaggacggtgtcttccttatctctgtatccccaaggctttgcacnnnnnnnnnnnnnngaggtt

SEQ ID NO: 13246 - DNA, 737 bp, Macaca Fascicularis
  misc_feature (1)...(737): n = A,T,C or G
cagacgacgcccacctccagggaagcaaatcccttgctcccagccctggctgctccctcagttttcccnnnnnnnnnnnnnnnnnnnnnnnnnnnnnaacccactgtccgcccacacagnnnnnnnnnnnnnnnnnnnnccgctgctcagccctgagctgcaccgagaccttcccnnnnnnnnnnnnnnnnnnnnntcacagcaaactgcactacaannnnnnnnnnnnnntcaagtgtgagaactgcctcctgcgcttccgcacgcaccgctcgctcttcaagcatctacatgtnnnnnnnnnnnnnnnnnngagcccagccccgccaccacccccggccctcgaccgagagccgcccgcgcccgagcgtcccccggaggttgacctcgcgtcagcgccgggcctgccgttcccgctgctggaacctttcacgacccccgcccctgccgccaccggaccgttcgtgccctacttgatccctgcgccctttggcctaagccccccgcgcctgtgccccttcctggccgctgcacccgggccgccgnnnnnnnnnnnnnnnnnnnnnnnnnnnnnnnnnnnnnnnnnnnnnnnnccccgaagaccccagggcggctccggcgcgccctcaggtgcgtgcaggtgaccaccagggaggggtggaggggctttcctgcgccctgcggggtccggtggataccaggagnnnnnnnnnnctatccctttccnnngggggcca

SEQ ID NO: 13247 - DNA, 889 bp, Macaca Fascicularis
  misc_feature (1)...(889): n = A,T,C or G
cagggcagtagatannnnncattttactgatgcactttagttnttggtctgttaacctgttttccagaaannngtggccttttaggcgggagnnnggtgaccaaaccagtgacagccccaatccctgcagtttgtggcttccagtgtgggtggacagtcctgatggggatctccagctccttcattgtgggctgccacagacagctgcccacagaagggccagtgttgggagtggttgtggctctgagctgctctacagagcctcagtgtaaggggattgagccattgaaagctcattaccaataggacataatttttggctctctattcacaaccagtgcacagattgacacggtggcttcaggttcacagtgcactgtgttactgtgctatcccatgaaaccatttcttcccaagttgtgtttattcctgaagtgacacgccacccggaaaggctcactttgactgaggatgctgtcctctgatgtagctgctgcctccagcctctggctagagaacttactaaagggacttccttcctgttaaacccctgttaacaactctccataaatttggtgattctctgccaggtctaaaaatttgagttacatctcctgaagccaaactccaccttctgtgcttttttgcttcggataatggagtttttcttttagaaacagtgccaagaatgacaagatattaaaaaacaaaaaaaacactacttttaaagaaaatgcctaacagatttttaatacagttatctctaattaccactttattttctagttccttgattttcacctcaggctgcattctaactcatactgtgaagacaaaggtgtttttgattcagaaatatatgaaatctacgtagtcttaattgaaaaaa

SEQ ID NO: 13248 - DNA, 774 bp, Macaca Fascicularis
  misc_feature (1)...(774): n = A,T,C or G
aagtcagtgcttagaatnnnnntagcntttnnnaaannnnaaacttcaactgaattctgtagaaataatggttatttgtgatcttgtctggtgatctcttcccgtttatcagattactttttccacaaaagaaagtctctttctaaaatatcacagatttacctagagggcaacatttagatacaggaaaattttacatggcgttttgtcttaggattagacgtgtccaaattgatcctatttgattttggagagatcctattctaacaaatactctaaaatgataaaattgaggtacagctctcttataagaatatggataactatattttctgaattctggagattgataaccatatgcacttaacattatattctagaaacattaaatagtgcnnnnnnnnnnnnttccagttcttactaaattgtattagcaggagctggtaattacttgtattatcacatgtaactaataatttgaactacacttgaaggatcttgtnnnnnnnnnnnnnnnnnnnnnnnnnnnnnnnnnnnnnnnnnnnnnntgcatacataatagtaactgccatattatataacaaatttacattnnnnnnnnnnnnnnnnnnnnnnnnnnnnnnnncttgtaatctatattctccaggagttttatgcatttaatagatgaatttattttatttctaaaggcattcaagtttttcagcaccatataatagaaatactcaatttatattccaattcctttatgtcctatacatcattctctgcatg

SEQ ID NO: 13249 - DNA, 715 bp, Macaca Fascicularis
  misc_feature (1)...(715): n = A,T,C or G
gatgttggtatctaaaggcttaggcctatagattgatttacctttgcaactgtgctccaannnnnnnnnnnnnnttaaccgaagaactaataaatggactacaatagctcacgttacagggaaggagggtaggcaaggaggctctgtgtgttaaaatgagggcctcactgctttaggattgagtggctggaaagagtgatgcctggggaaggagatggaggtatgagggtaccctggctggtactttctgtactaaacatttcctttttctattttaccattaattttgttttaaactgtgagccatccaagtaggaagacagcaaaaaaagcaacttttccaacatacaatttacttttaataaagtatgaatacttcattttgagagcattccctggaattgccacagaattcattagaaacattttttaagcaacacttggaacagtgtttacttaaatccttaatggccttaattaattctcaaattcctgccccatcacgtacagagtcaattcacttcagagtgactaaaaggaaacagtgctttctaaagccacgcagtgtccctcaattacagagggtaggaacggttatacnnnnnnnnnnnnnnnnnnnnnnnnnnnnnnnnnnntagaataacaactgcttggaatatccgtgccaggaaaannnnnnnnnnngcaaatattttgtcactgcctgtaaagcaaa

SEQ ID NO: 13250 - DNA, 745 bp, Macaca Fascicularis
  misc_feature (1)...(745): n = A,T,C or G
gtcagtgcagacaggtcggaggagtccttcnnncagtacttcagtgagatgcnntggctcgccgtcccctacactgacgaggcccggcggtcacgcctcaaccggctgtacggaatccaaggcatccccacgctcatcgtgctggacccgcagggcgaggtgatcacgcggcaggggcgggtggaggtgctgaacgacgaggactgccgggagttcccctggcaccccaaacccgtgctggagctctccgactccaacgccacgcagctcaacgagggcccctgcctcgtcctttttgtagattctgaggatgacggagagtccgaggcagccaagcagctgattcagccaatagctgagaaaatcattgccaagtacaaagccaaagaggaggaggcgccgcttctgttcttcgtcgctggggaggatgacatgactgactccctgcgagattacaccaacctgcctgaggcggcccctttgctcaccatcctggacatgtcggcccgggccaagtacgtgatggacgtggaggagatcacccccgccatcgtggaggcctttgtgaatgacttcctagcagagaagctcaaaccggagcccatctagcgtggctccggcctcctgagacgttatttaaaactcagccttctcctcctcctccccctccttccctccgccctcggacttacccagcgtgccccgaatcacaccacccaagtgtccagcctctctgtggtgcctg

SEQ ID NO: 13251 - DNA, 461 bp, Macaca Fascicularis
ttctatcacttccagctttgttttcgtttaaaaaaatatacagagagctttgtaaatacaacagattttatttctccccccttttttaatgtacagcttttttgctgtttatatatacttaaaatattcccatgagttatgtccagttcttcttggaaaaaaatatattatgtttttgaatggaactgcaaagcatcctgcagcgtgagcacccctccacctggagctctgacacatcttctcaggccaaagcggcattacccgtgaatccgtcttctcccaccacagtatggtttgaggcacaatctgttaacatagttgggccctgtcagtgacgctcgctctctggggtcaggtggggggcatggtatttgcaaaaaaacaaattatggctaatttattattttgttgcagtgcggttaactgtaaactcatgtaagagtccgtgatttcctcattag

SEQ ID NO: 13252 - DNA, 693 bp, Macaca Fascicularis
  misc_feature (1)...(693): n = A,T,C or G
aggcagcccatgnngggaatccctggtagggagagtaatgccccatctgtgcccactgtctnnnncctgcccggggcgcctggaggcaatgccagctccaggacagaggctcaggtgctcaacgggcaaggcagccctgggggctgtgtctgttcaagtcaggcttccccggcccctcgcgcagcagcgcctccacgggcagcccgcggccccaccccacgcactgaagaggccgcctgggctgccatggccctaaccttcctgctggtgctgctcaccctggccacgctctgcacacggctgcacagaaacttccgacgcggggagagcatctattgggggcccacagcggacagccaggacacagtggctgctgtgctgaagcggaggctgatgcagccctcgcgccgggtcaagcgctcccgccggagacccctccttccgcccacgccggacagcggcccggaaggcgagagctcggagtgatggcctaggacctgccactgtggcatgcggctcttccccgcacctctgccacgtggacctatgccacgtggaccgcgcgcggggcgccccctggtggcggtggcacggccctgacggagcaccgcgggggttttcctctttgttgattgctgagtgggcggccaaggggagaaaaggagccgcttctgcctcccttgccaaaactcc

SEQ ID NO: 13253 - DNA, 666 bp, Macaca Fascicularis
  misc_feature (1)...(666): n = A,T,C or G
tgcnnnnngccacagccttcacggagtacgtccatgcatannnncgtggccacagccccagctgcctggctcgagtaactggggaagctgaccatgaccttccctgctggcatcgtgcgtgtgttcagcggggaccccacccccacctgtcctcagcttccggcttgtacacacagcccctattgagcacttccagcccaacgccgatatgcnnnnnnnnnnnnnnnnnnnnnnnnggctcacgtggaggcttccagatgtgtctgaggcagggggctctggccgnnnnnnnnnnnnnnnngagccgctctcagggcccagcacacctagccccgtggccgcacagttcaccagcgagggggccactctgtcgggcgtggacttggaactggtgggcagcggttnnnnnnnnnnnnnnnnnnnnnnnnnnnnnnnnnnnnnnnnnnnnnnnnnnnnnnnnnnnnnccgtaaatgctgccgccccagctctacactgcgccctggtgctggctgaccgctccctaccctcctgctggaccctggggcctcccgccccagtctccctgaggcccagactccacggagaggagccccatgcccagccggctgagcccaagattcgctcctccccctcatnnnnnaccccacacaggtcctggccttttt

SEQ ID NO: 13254 - DNA, 742 bp, Macaca Fascicularis
  misc_feature (1)...(742): n = A,T,C or G
gactgcagcttttgagcaaaaactctcctgtaggggttctaaaggacagcaccagtgggacagcccacaaggctggggctggagaacgagagactgcnnnnnnnnnnnnnnnnnnnnnnnnnnnnnnnnnncacccctcacaaagccacgcacgctgggggctctgttttcctgcacactaaatagctagcaatctatgcaaacacctttcctaaaaagaaaccaaaccccatagtacagtgccttgtcctagtgttcacnnnnnnnnnnnnntttcgatgccaaggtttccattttcagggctataaaaagtattacatggaaatgaggcatcagaccaccagacgttaccgctctgttgaatgtgtccaccgtggagtggtttggtgacacnnnnnnnnnnnnnnnnnnnnnnnnnnnnntgggtcacagccactcaggaggagaagggtcaggatgagaggctgcagcctcgacgcttgcgcggcctgatactgaaatagcatctactcgtgcactgaataaaaacagaaacttgatcatttttttcctgattagattttatcactctctgctaagacaatatagtctggagtataagtgggaaagcttgatttaaatactnnnnnnnnnnnnnnnntggaaaatatttttcaactttaattttctgaagtataaattatttatgtaaattcattgtttttgcatttcataggacatgcatctttaagctttatcattg

SEQ ID NO: 13255 - DNA, 724 bp, Macaca Fascicularis
  misc_feature (1)...(724): n = A,T,C or G
gggagcgccacannnccgnnngcagcctcacatctccccactccccttttgtacgtttnnnnnnntctttgtacgtggtttacgtaactttaaactgtaacagccttaatggaagaccaaatggttttttatatgtgtatgtacaaagttttctannnnnnnnnnnnnnnnnnnntataacctggacttgagctgtcagagcggaggccactaggcccctgtgcgtctgaggctcagacccctgctatggttggcttggggtggccagtgggctgggaccctccatgagagttttggacacttgggccnnnnnnnnnnnnnnnnnnnnnnnnnnnnnnnnnnnnnnnnnnnnnnnnnnnnnnnnnnnnnnnnggacgtgctggaaccttctatgggggtctaggctannnnnnnnnnnnnnnncatgagtcaggggcaccacagacctcacatgccagggagacttgaatgtggctgtcactcttccggacgccaagggctgcaggaggctggctgctcttggcactacccaccccatgtgacagaacaggagccagtgactcaggactgctcacggaccaggagggcaatgcctgaagtcagacctccctacagnnnnnnnnnnacaacctggggatctctggagcagggccctcctctctcaggcttggcccactcccccagacannnnnnnnnnnngccacaaatctgggacaaagggccc

SEQ ID NO: 13256 - DNA, 720 bp, Macaca Fascicularis
  misc_feature (1)...(720): n = A,T,C or G
agaatcttggctcacctttatgnggagatgatatntgctgtgcagaaaatgttagcaacagtcacagccttaccaagttcctctatgttctccgtggtcttctgagaacctctctttcagcctgcatcatcacaatgccaacacatctgatccagaataaagccattattgcccgtgtcacaaacttgtcagatatagtaattggtctggaatcatttattggttctgagagagaaactaatccattgtataaggattatcatggcttgattcatatacggcagattcctcggcttaataacttgatctgtgatgaatcagatgtcaaagacttagcttttaaattaaaaaggaagctgttcactattgagcgactgcatttgcctccagacttgtcagacacagtgagccgctcaagcaaacaggatctggcagaatccaccaagcggctgggcccaggctgtggcatgatggccggaggcaagaagcacctggacttctagggattcctctttagccgttgcatgcagaattctatgacactctaattatgattgctaatagcttatgtaaatatttttcttaacaatttgaccctccactccttgaaaaacacaggattgtaaaatggagccaccatttcttattttttaactttttacagaagtaacacagcagaaatacttttcaatttttccttcatgctatagagaaaataat

SEQ ID NO: 13257 - DNA, 756 bp, Macaca Fascicularis
  misc_feature (1)...(756): n = A,T,C or G
aaaagcaatgggagatgctgaaattaaagatgggagaaagattgccactggcagtaaaggatatgggcagttgtgaaatataccctcagacnantcagcacaatnntaatgggcggtttgtggtggtgtgtggtgatggggagtatatcatctacacagcaatggcattgagaaacaagagctttggatctgctcaggagtttgcatgggcccacgattcttcagagtaagttttggctgcgtgatagccagcttgccgtgattgcagatgtgttgtgtgctgcttgaggactctcaaggcttgatgtgggctgcgcttctccgtgttaaaaaacagttctcaccagagctgtccgttagagtcagaggcaactgtatagcgtgagctgtctttgtcctttctttgttctgtgttgagctggctcactcaaactgataaaataatcccatttaactggggacccagcacccatttctttggtggagcccatggcaggacctggtcctttatgggcttaaggcacagtagaccctcatgtctgctttggcaggccttggcgtgccctccctataatgtagtgtcctggtgctactggcctttgtgagctacttggggatgatgttgtgatttgatcattttgatgannnnnnnnnnnnnnnntttttaaaacttattttctgtgatagtacccgctgcccattcttaacaaatttctgtctgaattcagaatgttcataaaatnnctcataaaagca

SEQ ID NO: 13258 - DNA, 773 bp, Macaca Fascicularis
  misc_feature (1)...(773): n = A,T,C or G
atacggagtggttgnngtccgtgctttcannntgaggacattgaattggagaacnnnctggggaattttgtgggaaacacctgggaacaaaacagacacccnnnnnntgcagttgtaagnnnnnnnnnnnnnnnnnnnnnnnnnnnnnaccctggtgtgactgctgactgccagggtggtacctcccatgctnnnnnnnnnnnnnnnnnngagacaacaaagcacaatgttcactgtttacaatcaagacaactacgtgggtccaaacactccnnnnnnnnnnnnnnnnttgttttgcatttttaatgtcagtttctccctttattttttgtaatgaaaaagcacactaagagctgcccctggaattgggtacagccgaatagnnnnnnnnnnnnccgtgactaaatttcatttatctttttgatagcaaatgatgttaagagacagtgatggttagggctcaacaattttgtattcccatgtttnnnnnnnnnnnnnnnngttttcccttgaacttgattagaattgtgctactgtgaacaccgatcctgcatatggaagtcccacttcggtgacatttcctggccattcttgtttccattgtgtagatggtgggttgtgcccacctcctggagtgagacagctcctggtgtgtggaattcctggagcgtccgtggttcagagtaaacttgaagcagatctgtgcatgctttttctctgcgacatttggctcatttctcttttttgttctcttttgataggatcctgttcct

SEQ ID NO: 13259 - DNA, 742 bp, Macaca Fascicularis
  misc_feature (1)...(742): n = A,T,C or G
gtaaannnnnnnnnnnnnnnnnnnnnnntccaattctctgtatccgtcagacttctgtggttacaagaaatagccgctgnnnntngtcaccagaggctgcaactcaggccgcnnnnnnnnnnnnnnggcgtgtccaaggagcagagacaactactggacatgaacttgaagaaggtagtcagctgcagccactttcagccagcatcnnnnnnnnnnnnnnnnnnnnnnnnnnnnnnnnnnnnnnnaaagaagcaaatgctatttccagctccagggggaggggatgcagggggaggcggcactgcagttgctcaggacacgctcctataggaccaagatggatgcgacccaagacccaggaggccnnnnnnnnnnnnnnnnnnnnacaagtttactttaaaaaggtctatgatcttgagggcagacaccagaattcctcttataaagaaaactgtttgggaaaataccnnnnnnnnnnnnnnnnnnnnnnnnaagatgctaannnnnnnnnnnnnnnnnnnnnnnnnnnnnnnnnnnnnnnnnnnnnnnnnnnnnnnnnnnnnnnnnnnnnnnnngaagagtggggaacagagaagtgtggggaagagatacgaannnnnnnnnnnnnnnnnnnnnnnnnnnnnnggggtgatgaggccagtgggaccccacagagttggggagacaaaggaacattggttgctttggtggcacataagctcctnnnttctccagcgcccaa

SEQ ID NO: 13260 - DNA, 722 bp, Macaca Fascicularis
  misc_feature (1)...(722): n = A,T,C or G
tccaaagcaagnnnacagaactccagnnncgtgtggtgccccaaannnaggagtcccagcccgacagcaacctctgtagcagccacatggccttcaactctgccccagcccagggcttgctgaggcccatcctttccctgcctctgggcctggctctgggtctcctctccccatggctcagcgagcactgagctggtcctgcttccaggatggatgcatcacactcaaggacaggagcctggtgtttccctgatggcttttggacccagggcctggcttgagccactccttcctccaggactctgcgggaggctggggccccatcttgatctttgagcccattcttctgggtgtgctctttgagatcataactgagagtcaggagtttcactgcctgtagcgatggccagagcctctggcccctcctccactgtggaccagcccattggccaagctcctgggacccttggctatgaaaatgagccctggctgccacctgtttctggaagactgctcccagcccgcctacccagcatgatgggcacatccctctgccctctccctgtgttctgggctggggctgcctttgtgcagcttcgaggacaggaaaggccccaatcttgcccactggccgctgagtgcccccgagccctgactcctggactccggaggactgagcccccaccggaactgggctgaggcttggatctggggtgggggta

SEQ ID NO: 13261 - DNA, 722 bp, Macaca Fascicularis
  misc_feature (1)...(722): n = A,T,C or G
cagggtcagcacngngtcagcgactccnnnnntccagtggccagcacaccctagacaccccaaggagggagggctcnnnnnnggnnnccccgccacttcacccctccccagcttcccaaacttctgcctgcccaaatgggctctgaccgtgctctgtcggcccgagacatttggaggtcctgggggatgcnnnnnnnnnnnnnnngtcgctgaggagggggctgggggccccttcccaccccaaccttgagccccaggagctacagggcccacacccaatcttgggacactccctatctggttggaagagagtaaccagtttccagagagccagagagtgagagagaaagagtgagagagagagagagaaaaagagagagagatgctgttgaatcagaaacagatcaacagcccaaagattttccagccccaggaagctccagggctgagtggtcaggagccagtttctccagcccctcctccccacaacccctagtggggaggggcagctgtccatttgcccaaagtattaatgcaactgaagctgtgatatttccaacgactgtaggaggaaaaattaaggggagagaggaaaacaaaaccaaccaacccctaaaatcattttcttattgtacataacgacctcattctcctgtatatgcggaagatataaccttatatttggtaagtgtttcttgtgctattttatcacgtgacctgtt

SEQ ID NO: 13262 - DNA, 725 bp, Macaca Fascicularis
  misc_feature (1)...(725): n = A,T,C or G
cgttaaccacataactaatnnttnattgttattcttttttagcactacttatttatcttggattttgtaatatatacaattgttttatttgctcatggnnnnnnnnnnnnnnnnnnnnnnnnnnnnnnnncagattttagagagtgacgacgtggaaaatgaatttaaccactttcttattgggttgtcttgctttcttacatgaacttttttttttaatcattgaaaggaatttagtgtataatatgtgtttgtaattgtgattatgatagaggcctatctctgtttacatgcatagctttgagttaggctaaatacatcagaagtgttctgctgaccacataagaagttagtattgccaatctttcnnnnnnnnngaaaatgtgaccaatttnnnnnnnnnnnnnnnnnnnnnnnnnnnnnnnnnnnnnnnnnnnnnnnnnnnnnnnnnnnnnnnnnnnnnnnnnnnnnnnnnnaagcaagacaacattatgacactttaaaacagtattagcaaagaagtctatttgttaacccacaaatgnnnnnnnnnnnnnnnctcacaggtagcaaaatgaattagcacacctacttttactgactattcaacatatattgaatctttaacannnnnnnnnnggataactatttacaaagctgttttaaagtttttcaaacatgatagaaattttctaaatgttagtaagagagaagctttaaaacag

SEQ ID NO: 13263 - DNA, 700 bp, Macaca Fascicularis
  misc_feature (1)...(700): n = A,T,C or G
gcgcccgctgctcnannncnctggtgggccaaggcttcgtgccggatggagaccaagtgntctgccagggctgtagccaggcagggccctgagccaggctcctggacccaggctttcccataccacgggcccaggactgtagctccttttctaaaccacctctgggacttagccccaccccccaaccaaaaaaaatgggtcgccctctgggctccaggattgtttccccacgccagcatccccaaactggtactccctgacccaggcccccaaacctgggctcttatagagcctccatgagtcaagccgcctccccacacctggactccagaactcaccctctcccctgcagtctgggttcccagactgagtcctctccgcaaatcagggctctagaccccagccctccaaacctgggctctgggacttaggcccccttaaatctagacttctctttataggttttaggtctcctatgggtgcctgagaagtcctcaaaagtggactgttctcaagcttgacctgccccaccccatccccccggggctgaggctgtggggacagcgatcaggggcccaccgatgagggggccctagggtacagggtgctgcccagctggtggccaccgagtgtcttctcattttatttcagctccattttgcccatagatgggcagaggggtgagattggctcacccccc

SEQ ID NO: 13264 - DNA, 728 bp, Macaca Fascicularis
  misc_feature (1)...(728): n = A,T,C or G
cagtggacagnnnccaggtggacaccgnnnnncaacagccccatgacttcaattccacctggggcacccagcacccgcaccccgccacaggactagaggccctgagaccctgaaaaaggggctggcagtagggaaggtggaggcacactcctctcctgttggacagatgagctctgagggcaagccctgggcccagccacgcagagaccctggctgccctggctcttgtttgtttaggcccaggtctgcccagaccagggcccaggagagctctcaggaggctgagaaacctccaggccnnnnnnaaagttggtgccagagctgggttttagagatcttacaggatcccaatgggacagctacctaggtggggcacggcccctacctgagaacaggagggtcctccagagaatgtaccacnnnnnnngatatgagcagggcctgcccagagcctgggcacctttgggaacgggaaaagtgaggtgggacttgaaaaggctttannnnnnnnnnnnnnnnntgaggggatggtgggcagggagggagggcaaggaggctccctctggcatttgggagcaggtgggtggagggaggagcccctggaggtggctacagtcccttaatgggaggccttgttctgggcatgtggggctctccctttatccagagatggcccaagaccctagagccctgagtgctggcaaatctcactgctcctgacctggcct

SEQ ID NO: 13265 - DNA, 704 bp, Macaca Fascicularis
  misc_feature (1)...(704): n = A,T,C or G
ggcccacatnnnnnnngntggcgccccacccaccccacacctgcagcgccagctccctcgtcttcagctgtatttcacatgcctnnnnnnnnnnnagccaaggccgagaccctgtcttccagccacccactcccccaaagggcctcctcacccaccctgtggctcacagtggggccagcgtactccatgaggnnnnnnnnnnnnnnnnnnnnnnnnnnnnnnnnnnnnnnnnnnnnnnnnnngtcctgaagctgctggagcctgcactgtcccagtagctgaggcccggggttggaggtgggagcctcccacacctgcctgcgttctccccatgaacttacatactaggtgccttttgttttctgctttcctggttctgtctagactggcctagggatcagggctctgggatgggaggccaggannnnnnnnnnnnnnnnnnnnggctctgtgccttggtctctccttcctcctggccgagatagcgaggggctccctgggtctctcactgttgcagtggcctggccgttcagcctgtctcccccccnnnnnnnnnnnnnnncctggctcaggcccagcgtattgtgtgcactgcctggccaggccctgggtcctgcacatgtgctgggtggtagatttcttcctccacagtgccttctgggaagggagaaggcctctgcctgggacaccctaggacagtgggt

SEQ ID NO: 13266 - DNA, 788 bp, Macaca Fascicularis
  misc_feature (1)...(788): n = A,T,C or G
tgcagctgcagctcannnanctgaaggatgagtacnnnnngcggctgcagcactgcgctcgggaggcggcggagcacgcagacagtgcaggccaggcgccagccaccacggccctccggacattcctggaggccactctggaggacatccgggcagcgcaccgaagccgtgagcagcagctggcccgggctgcccgcacctaccacaagcggctggtggatctgagccgcaggcatgaggannnnnnnnnnnnnnnnagggcacctgggaaccnnnnnnnnnnnnnnnnnnnagccagcttggacctggaaccattgcccgtgcccctggtcactgacttcagccatcgggaggaccagcacggcgggcctgaggcactgctctcatccccacagaagggacccggtggagcctcccaggggggaacatcagagccacagggcctggacgctgcgtcctgggcccagatccaccagaagctccgggacttctcccgcagcacccaggcagagctggaacgagagcnnnnnnnnnnnnnnnnnnnnnccacggtggctgaagagcaactttctgagctacaggagtacgtggaccagcacctgggcaggtacaagcaagaaatcctgaggctgaggaagctggcaggttcagggaacccctggaaagtgggggctgtgcctccannnnnnnnnnnnnnnnnaaggaccggcagccactagcccgtctcccaggaccagagcagagcccatcacagccagcaggagccctcccaccccgttcccacgaaa

SEQ ID NO: 13267 - DNA, 719 bp, Macaca Fascicularis
  misc_feature (1)...(719): n = A,T,C or G
cacgtcagaccggctgactctagccaaggagggcagccccctgttgannnnnnnnnnnnnnnntacactgcgagaactggacttgagtggccagggtttcagtgagaaggacctggagcaggccctggctgccttcttaagcacccctgggggctcacacccagccctgtgctctcttaacctcaggggcacccgggtcacacccagcacggtcaggtcagcatccctaaccccagtccctggagccagggtggctgtcactgcatctgcctggggcctggaagtggtgtcctgcctggcctgagagctccaggggtcagagggcatgcatattgtccaagcccctgcgtggggtgggcttagggacaccaggggaactgagcttggtcttggtggctatgggtggcagagccaggtgtggaacaccagcaggcacagctccctaacctggcccagcccttctggggcaacagctcaacttcctgtggcctgctttccccacagctctgtgatcagcagctgcccaggcctgctctacctcaacctggagtcctgccgctgccttccccggggtctgaagcgggcctaccggggcctggaggaagtccagtggtgtctggagcagctgctcaccagccccttgcccagctaggcagccacagacctgggacacctcagcccgcctgcccaccccctacctttgcccaattcagatattg

SEQ ID NO: 13268 - DNA, 325 bp, Macaca Fascicularis
gaaccacagtctcatccggatctggtgccacccagactccttagaggctcccacctccatgtcgagagcagaggccaactccagccagacccttggaaatgccaccatggagaaatgcaaccacatctttgtggacaccagcctaccggacctggctgtggggctcatcctgctggcaggatccctggtgctgctgtgcacctgcctcatcctcctcgtcaagatgctcaactccctgctcaagggccaagtggccaaggtcatccagaaggtcatcaataccggtgagctgcgagcagttgactgggcagggccgcaggatggg

SEQ ID NO: 13269 - DNA, 702 bp, Macaca Fascicularis
  misc_feature (1)...(702): n = A,T,C or G
cngnnncaaacgggtgcttgtagaaagccgcttgcacaggcctgggctccgtggtgtggagtgtggcctgggagggcccgccccaaacgggtgctggtagaaagccgcctgcgcaggcctgggctctgtggtctcaggtgctggtgcaccctgtggctgccccctgagatgagcatcctactgtgtgtgtccatcggcctttcaggaggactggggcttccggggagctaagaaccctaagggatgtggggtgcaaggcgtcnnnnnnnnnnnnnnnnnnnnnnnnnnncagcggctgcgaatgacctggagggatgcagcaaggtgactcgggatcagaggctcctctcactccactctcttcccaggtgcacgttggcgacgaggacttcgtacacctgcgagtgttcaaatctctccctcacgaaaacaagcccttgaccttgtctgactaccagaccaacaaagccaagcacgacgagctgagctatttctgatcctgactttggacaggacccttcagccagaagactgataattaaagtgatcctccgtggaccagagcatgcacttgtgatcctaaaataagcnnnnnnnnnnnnnnnngcccttgcggtggaaggggnnnnnnnnnnnnnnnnnnnnngcatttctcttcctaaatttcactgtgttgatttctttccttcccaatcagtgatc

SEQ ID NO: 13270 - DNA, 784 bp, Macaca Fascicularis
  misc_feature (1)...(784): n = A,T,C or G
agacagcagcagggatggagcactnncggaaagctggctctgtagagctcccagcgccttccccaatgccccagctacnnnnngntaccntnnngatgcnnntccgagatggcagcaaaattcgcaaccttctgggactggctctgggtcggttggagggcgnnnnnnnnnnnnnnnnnnnnnnnnnnnnnnnnnnnnnnnnnnnnggaaaggctgtcagctgcgctgagattgtcaagcggagggtcccaggcctnnnnnnnnnnnnnnnnnnnnnnnnnnnnnnnnnnnnngacagctgggtcccagcctcacctgacacagggctggaccccctcacagtgcgccgccatgtgcctgcagtgtgggtnnnnnnnnnnnnnnnccccctggaccccaatgagtgtggctaccaacccccaggggcaccccctggcctgggttccatgcnnnnnnnnnnnnnnngccctcgttcccgaagaagggctcgagacaccnnnnnnnnnnnnnnnnnnnnnnnnnnnnnnnnnnnnngcctgaatgtctgggatgcttgtgccttttctgagaagccctgtgactgtgcaaatccccatcaaggtttgagtccacagaagtggacttccctgtcatgctttcccttccctctagcatgtgggaagggactgctgtgaagagtgacaggtgtggggcctctgccaagtttnnnnnnnnnnnnnnnnnnnnnnnnnnnnnnnnnncctacaatgcatctgaactgccttctgaaagaggtccagggagg

SEQ ID NO: 13271 - DNA, 726 bp, Macaca Fascicularis
  misc_feature (1)...(726): n = A,T,C or G
agctggcagttcagtccctnnnnctgccctattggaagccctgctgaaccctcaactattgactgctgcagacagcttatctgcctaaccctgaaatgctgtgagcttgacttgactcccaaccctaccatgctccattatactcaggtctccctactcctgccttagattcctcaataagatgctataactagcatttttttgaatgcatctccctctgcatctcatctttctcttttcaatcaggcttttccaaagggttgtgtacagactctgcactatttcacttcatattcactgcccaattcactgcaaggagacctctactctcaccttttaccttttcctaccctgacatccagnnnnnnnnnnnnnnnnnnnntacttctcaatctttgctttatggcctttccatcatagttgcccactccctctccttacttagcttccatggcttaacttctctgaccactcttgtcttcctccctcatcagcttctgctacttcatggaatgctgaccttcattgctccatttgtaggtttttgctcttctcagtttactcattgtcccctggaacaaatcactgacatctacaaccattaccatctcactaaataagactttctatccaatagtgattgatacctcaaatgtaagatgtgtgatattcaacatttcatcttccaccttcccaaacccaaacaattccatctctggtttcttc

SEQ ID NO: 13272 - DNA, 747 bp, Macaca Fascicularis
  misc_feature (1)...(747): n = A,T,C or G
ttttggacgcgctggccccccgccgctgtgcatnnnagcgttatttcagttcaaaatgaactatatgcccggcaccgccagnnncatcgnnnnnnnnnacaaaaagcacttggttctgcttcgagatggaaggacacttataggctttttaagaagcatcgatcaatttgcaaacttagtactacatcagactgtggagcgtattcatgnnnnnnnnnnnnnnnnnnnnnnnnnnnnagggatttttgtggtcagaggagaaaatgtggtcctactaggagaaatagacttggaaaaggagagtgacacacccctccagcaagnnnnnnnnnnnnnnnnnnnnnnnnngcaaagggtagagcagcagaccaagctggaagcagagaagttgaaagtgcaggccctgaaggaccgaggtctttccattcctagagcagatactcttgatgagtactaagtcttttgcccagagcctgttgctcttgaagagtagggactgtcactgatgaaagtgacatcctagccacctcacacatttgatcagagactgtagagttttgaaaagtcacttttatttttaagtcttttacacatgcaacatgaagaaatcgtgtaggtgggttttgtttttttttaaataacaaaatcgtttaaagaaacagtggcatagactccttcacacgtcactgtggnnnnnnnnnnnnnnnnnnnntattattcttcgtatcccaaattagagtttacagg

SEQ ID NO: 13273 - DNA, 802 bp, Macaca Fascicularis
  misc_feature (1)...(802): n = A,T,C or G
cgctggagtgcgcgagacagacnnnnnnnnnnnnnnnnnnnnnnnnnnngagaagcgctatgcggatgcccagctgtcctgtcagggccgaggaggcacgctgggcatgcccaaggatgaggcnnnnnnnnnnnnnnnnnncgcatannnnnnnnnnnnnnnnnnnnnnnnnnnnnnnnnnnnnnnnnnnnnnnnnnnnagggagggcgccttcgtgtactctgaccgctcccccatgcggaccttcaacaagtggcgcagcggcgagcccaacaacgcctacgacgaggaggactgcgtggagatggtggcctcgggcggctggaacgacgtggcctgtcacnnnnnnnnnnnnnnnntgtgtgagttcgacaaggagagcatgtgagcctcgggctggggctggccgccgggagagcccgtgagcctccacatatgagcctcgggctggggctgcccattgggggccccacgtgtccccgcagggttggcagggccagagcccagaccgtggtgccagccagggagctgtccctctgtgaagggcggaggctcactgagtagagggctgttgtgtaaactgagagaacggcctgtgtgtaagaggaaaagaaagcgtccctggggtgctgtctctgaggaagcggagtttcgttaccgtcttgtagccccgatgtcatcatgtaattattacccagaatgctcttccataaatctcgtgcctttgtccaagctatacaataaaatctttcagtagtgcagtagttaagtccaaatggtnnncaatggggtcttgaattac

SEQ ID NO: 13274 - DNA, 742 bp, Macaca Fascicularis
  misc_feature (1)...(742): n = A,T,C or G
ctaacaagatgaaacagaatatgagaagctatatttttatataggagtcagatacaannnnnnnnnnnnnnnnnnnnnnnnnnnnnnnnnnnnnnnnnnnnnnnnnnnnnnnnnnnnnnnnnnnnatgaaatatatttttagaacttgtttagaaaggattcagttaaccaaacaagaaaaaggcagtgcctcacaaagaaattaagaagttgtccgtcccacattacatcaaattcagttttatataggccatatataatatatatttataatgtataatttttatgtatttttcaaaactacaaactggaatccaactataaagtgtttaagaatctacatagaatattcaaactatagaannnnnnnnnnnnnnnnnnnnnnnnnnnnnnnnnnnnnnnnnnnnnnnnnnnnnnnnnnnnnnnnnnnnnnnnnnnnnnnnnnnnnacagctttnnnnnnnnnnnnnnnnnnnnnnnnnnnnnnnnnnnnnnnnnnnnnttttatatgtattgnnnnnnnnnnnnnnnnnnnnnnnnnnnnnnnnntttttcaagtgcataactatttttgaccagcagatggcgataagcttcagtattttatgcaatttttttttttttcacttctgaagggaaagtgtatcataaaaaaagatttgttttttctttttataaannnntgctactcttaattttcatgttggtgatgaaatttccaggtgctgtttcttaaggttcta

SEQ ID NO: 13275 - DNA, 724 bp, Macaca Fascicularis
tggaccacagcctggacgagacggggacgggtgccagcaacagcgagccaagcgagccgggcagccccacccgagagcacgcgcgccgctccgaggccttacaggggctggtcactgagctcagggccgagttgtgccgccagcggactgagtacgagaggagtgtgaaaagaatcgaagaagggagtgctgacctgagaaaacgaatgtctcagttagaagaagaactggaccaggaaaagaaaaaatacatcatgctggaaataaagctgcggaactctgagcgggcacgggaggatgcggagaggaggaaccagctgttgcagagggaaatggaagagtttttttcgaccctaggaagcttgactgttggggcaaaaggtgccagggccccaaagtaaaaggaatggcagagcttacttctgtgccacgtctgctggtctccagccatgcacggagtcagaagcctctgtatctctggagcagccaggcgctctggaaccagctggagagagagatcctgatacctctgtggggactgttgggaccccacacactccaggtgggatcagatgctgctccaaccatgcagctcctggtgagggtcagaaggggacagtaccaagagtagcgcttagcccttacccaggaaatgtccttcatggccacagaaaggaagggcacccaccatttctgccacaggatccaggcagccactgggagc

SEQ ID NO: 13276 - DNA, 842 bp, Macaca Fascicularis
  misc_feature (1)...(842): n = A,T,C or G
tgttgcttgctgnnnnnnnnnnnagnnnnnnnnnagaggggaggaaaggctgggccctgagtannnnnnnnnnnttggatgctgcctccaaagaggttctgccgcagcttttcttctttttcctcatgccccgggaaatagtctttcttcnnagaangtcagctgggcgggtcaacttgtgttccttttccctcaccggcttgcctcntaaacgcctgcacatgtgtgtagaggacaaaagaaagtgaagtcagcacatctgcttctgcccaaatggttggggccctgggcaacagattggagagagatcgcgtgaagggcagttggnnnnnnnnnnctcccggtttcgccgctggccctgatttgaactgctaccacttgggaaagctcaggggtggtccctggttttccctcctggagaatgaggcgcagaggcttcgcctcccgaaggacacagtgtggatgccgctggcctagtgtcctggcctcacagcttccttgcaaggctgtcacaaggaaaagcagccggctggcaccctgagcatacggcctttcagggctccctcatccagcctgtcgcagtgttgacatcttggtgtactcatgttgcttctccttttgttaccccctccctgtattaccatttgcccctcacctgtccttggtgagcnnnnnnnnnnnagaccaatggggctgtcttcccctgcctctgagtagtcggaggtcacatacacagcttttttttatagcccttttctgcctttgaatattcatatctcgtcctnnnnnnnnnnnnnnnggaaggggtgccgtcaggggccgacactagtacgatgcagtgt

SEQ ID NO: 13277 - DNA, 394 bp, Macaca Fascicularis
  misc_feature (1)...(394): n = A,T,C or G
atctctgtcagtccatctacntnnngcttcagatgaaccaatccttgccagacatgggggtagggaagcttcaccacttannngacccttgcagcctcttgtgtttaccccacttcctatgtctaggagccagagccaggatttaagcgcctggcttggggccagcctgtgggcctgaggcatacaggctacgtcattgagctgcagcgtgttgtcaagggccccagtggttctgtagagagtctggaggtgacctgcagacgggcagatgctggagagaagccaaaggcctttattcactgggtgtcacagcctttgaagtgtgaggttcgcctctatgagcgactattccagcacaagaatccnngaagannntagnnnnnnngcaaggtgg

SEQ ID NO: 13278 - DNA, 744 bp, Macaca Fascicularis
  misc_feature (1)...(744): n = A,T,C or G
tttaagcacttatttaatcctcattaacaaattcataaggtaggtgctattgatagtttagccataaccagatatggcttgttatttgtaagttatgaaggggtttatgttcactgttctttatttcagtgtagcacttttagagccaaaaaaacctcaggcacaaataagttaaataacttgtttaagatcacacagctagnnnnnnnnnnnnnnnnnnnnnnnnnnnnnnnnnnnnnnnnnagtataaggatccagcaaggttaggaagaggttnnnnnnnnnnnnnnnnnnnnnnnnnggcatctgggcatgtcagatgaagatttattattcagaaaagttaagtcagctgttgtagggatcagttgttttattcctggaaaatgttcttcattttgcctcaaatctatatctgacctgctgaggaaatcgtttggtgaaatgaatccagaaagcagagaaaatgcttcattactttaaatagcagcattaagcccattatagcctctgaattgtcccttccttgagtttgctaatgcttccaacttagtcatttgaagctcaagagtctaattttatatgccctgccaatgtcctcatctattgcagaatgtataattatctatttgttttggactatatgttacgaaaatttaaaatataagatcctctctctctctttcattattggtaaaccaacattgtgctgtgttttgggatattttatcattttctaaatta

SEQ ID NO: 13279 - DNA, 697 bp, Macaca Fascicularis
ttctaaatggaattttaaaagtcatagctggctttacgtgttgtcatattagcgttataaatatgcatgatagtataatccagtaatggttgaagaaagtactttacttaaagagggattttttttaaactcctgaataagtctactggaagagttattcttctgggtgaacaagcttttgtttgtgttcttattttaaataataggagtcaatttattaaaatattgtcaaaagcctattcccagggattttaatgcacaaaccatattgtgacaagagatgagcctctgtattgtaaataagagaaatgaagtagagaaatgttaaatattttatgagtttagaaggtagtaaataaaaggtgatgtaaatgaatgctgcacaaacggtgtttatgatacttttagtagtactttaagaaaaattacacattctcagaagctcttgatgtctctgattaaggggggggaatggtgttaatgagaacagtcataaatttttagcatataattacaagaacagcctgtggatatgatcacttaaataattttgtggtgattacgtgccattgctttttttatttaaaaagaaaatatttgtaattaaatgcctttttctaaattatcttctcttggaatcattacttttaatcctatgtgtttatgagtatttttgctctttattaatattgagaaa

SEQ ID NO: 13280 - DNA, 606 bp, Macaca Fascicularis
  misc_feature (1)...(606): n = A,T,C or G
ctggtgggcggaccccggggagacnnnnnnnnnnnnnnnnnnnnnntgcctctgcccccgcgcccgacgcccacctcccgnnngaaggtggccggccaggggtgttcttgctggattgacaacgcctagagccccgactccatgcttgccactcgtggctctgtccaccagggctcagcccggctnnnnnnnnnnnnnnnnnnnnnnnnnnnnnnnnnnnnnnnnnnnnnnnnnnnnnnnnnnnnnnnnnnnnnnnnnnnnnnnnnnnnnnncatggaactgcgagacccaggaccctcctgctctgcagacctctgagccaccagcagccaggactggagccaccagcagccgggactggagccaccagcagccgggactggagccaccagcagccgggactggagccaccagcagccgggactggagccaccagcagccgggactggagccaccagcagccgggactggaggctgtggggcatggcgtgacnnnnnnnnnnnnnngctggtttggttatgagacgatctcgctgggactgcccctgcctgtggaaaaccacagggacaaagggagccgccatctcgacccccaaacaggccagc

SEQ ID NO: 13281 - DNA, 740 bp, Macaca Fascicularis
  misc_feature (1)...(740): n = A,T,C or G
tatgtatatttgaaaatgtgaaacagatagttatatgtatacaagtcaaagatcaacttaacnnnnnnnnnnnnnnntttttcttaatggttatcctcttaannnnnnnnnnnnnnnnnnnnnnnnnnnnnntaggaaaattgttattaaataaagaatttgtatgaacctttgccaatgtttttgacacgttttactaattattgttcctgaattatgtttctggctttatccatttgttgaggtttttttgtttgcttatttttcaaaacattcatttattgnnnnnnnnnnnnnnnnnnnnnnnaacaataaagcattgattatttannnnnnnnnnnnnnnnnnnnnnnnnnngtcattgaacactggtattttctgtatcatataaaacattaaaattcaaataattataagnnnnnnnnnnnnnnnngaaaagaaacttgccatattttacaagctgcaattttagaaaagctttaacttaatgatagttttatcactgttttcttgtcccaaacttatccagggccatacctgcatgaatctaattaaaacagaaatgggaattgttgcacagaaatgggaaatagctaattttaaatcagtctaattggcctcttactaaatataacaattcttatgaaaatcatagtaccctattttcagacacaactaccagtttacacatttctcagtatcctgaaaggaaaaaagtatacgccccagcttatactatg

SEQ ID NO: 13282 - DNA, 739 bp, Macaca Fascicularis
  misc_feature (1)...(739): n = A,T,C or G
agcacatgccgttnnnnntgtngnnntctatttacatgactggggagnnnattttgcctgctgntgnncctacaagtatctaaatgcaggcgcaggaggaattgccggtgcctttattcatgaaaagcatgcccatacgattaaacctgcattagtgggatggtttggccatgaactcagcaccagatttaagatggataacaaactgcagttaatccctggggtctgtggattctgaatttcaaatcctcccattttgttggtctgttccttacatgctagtttagagatctttaagcaagcgacaatgaaggcattgcggaaaaaatctattttgctaactggctatctggaatacccgatcaagcataactatggcaaagataaagcagcaaccgagaaaccaattgtgaacataattactccatctcatatagaggagcgggggtgccagctaacaataacattttctgttccaaacaaagatgttttccaagaactagaaaaaagaggagtggtttgtgacaagcggaatccaaatggcattcgagtggctccagttcctctctataattctttccatgatgtttataaatttaccaatctgctcacttctatacttgactctgcagaaacaacaaattagcggtgttttctagaacaacttaagcaaattatactgaaagctgctgtggttatttcagtattattcaatttttaaatattgaaaatatgtcac

SEQ ID NO: 13283 - DNA, 328 bp, Macaca Fascicularis
ggtaatgagcgtcagccacgttcaagggcactttgggctaaaaaagaaagtgcttgtacacggatggaaatgttctggaaacaaaacaaaaggaatttcctcttgggagtttagggaaatgagggagacgaagtatgttttggtgctgtttgttttttgttcaacccaatgcatattttcatgttgagaggcaatataaatggagaaaaatatcttgagagaaaaaaaaaaaaactaccagaacttgccaatgctgaaaagtagtattttctctttcgagagttttcatggccttttaaattacacccccaccttcacaggcaaataa

SEQ ID NO: 13284 - DNA, 666 bp, Macaca Fascicularis
  misc_feature (1)...(666): n = A,T,C or G
aggaggagacagttactgtctatcccgccgacgtggtgctctttgaagggatcctggccttctactcccaggaggtacgagacctgttccagatgaagctttttgtggatacagatgcggacacccggctctcccgcagagtattaagggacatcagcgagagaggcagggatcttgaacagattttatctcagtacattacattcgtcaagcctgcctttgaggaattctgcttgccaacaaagaagtatgctnnnnnnnnnnnnnctagaggtgcagacaatctagtggccatcaacctnnnnnnnnnnnnnnnnnnnnnnnnnnnnnnnnnnnnnnnnnnnnnnnnnnnnaccaatggctgtctcaacggctacaccccttcacgcaagaggcaggcatcggagtccagcagcaggccgcattgacccgtctccatcggaccccagcccctatctccaggagacagaggaggggtcagnnnnnnnnnnnnnnntgtacatactgtttcctatgacattactgtatttaagaaaacaccagggagatgaaatgcctttgatatttttttttttctttttgtacttcggaacgacaaaatgaaacggaacttgaccctgagcttaaataacaaaaaatgtgccnnnnnnnnnnnnnnnnnnctaa

SEQ ID NO: 13285 - DNA, 597 bp, Macaca Fascicularis
  misc_feature (1)...(597): n = A,T,C or G
tgcatttgctccttcattatcatgttagacagatcataagannnnnnnnnnnnnnnnnnnnnnnnnnnnactttgcaatactgtctttgccctgttgatcacaattaggggtggggaagggtgaccaataaaaaattctgtgtggaagagccagacagggtgatcttcctacagtggttttagaaatccatgtgtacttttccttttaacagtgaatgacgaatggctagaaggggagtgcaaagggaaggtgggcattttccccaaagttttcgttgaagaatgcgcaactacagatttgnnnnnnnnnnnnnnnnnnnnnnnnnnnnnnnnnnnnnnnnnnnnnnnnnnnnnnnnnnnnnnnctattacctgtttgtaagatttagcacccttctgctgtacactatactgggacattacagtttggaagtgttaactattctctgttaaaatttaacctactagacaatgatgtgagtacctaggatgatttcctggggcacagcgggtgaggggatggggacaggtgaatggaggagttaggtgagaggaggagcagatggaagtgtctggaaagggcaccagnagggtcttc

SEQ ID NO: 13286 - DNA, 753 bp, Macaca Fascicularis
  misc_feature (1)...(753): n = A,T,C or G
agtgccgccagaggctgatctttgagcagacgccagctctcacgaagcatgaatggacagaagccctgggctgtgacacaccnnngagtcaagatgagaggactcaccagagcgacaggcccttcaaatgtaatcagtgtgggaagtgtttcannnnnnnnnnnnnnnnnnnnnnnnnnnagataactcacaccagagaggagcagcctcatgggcgaaacnnnnnnnnnnnnnnnnnnnnnnnnnnnnnnnnnnnnnnnnnnnnnnnnnnnnnnnnnnnnnnnnnnnnnnnnnnnnnnngcggagcaaaggcagggcagccggaaagcagagccctggctttgttcgacatccaaaaaatcatgcaagagaaaaaccccgtgcacgttattggagtggaagagcctgctgtgggcgcttccatgttatttgacannnnnnnnnncacataggagagaaactttgctgatgacttttaaccacaggtacaaaaatgtggtaagtccacatagcgtactcatgaaaagaggggctgggggtagaaatgtcattggtgacttctgactttctgaggaaatgacacttcccaagcnnnnnnnnnnnnnnnnnnnnaatctgtcaaactcagtgccctctttggcnnnnnnnnnnnnnnnnttccttccattacagcacagtgagttcacaggtaatataacctacccacctgtgtaatgtcaagaaatcagtatgcaaccccatttgaaaggatca

SEQ ID NO: 13287 - DNA, 761 bp, Macaca Fascicularis
  misc_feature (1)...(761): n = A,T,C or G
atccaatgcatttccatccatcggcagcggcaggaacgttttccaaagcagacagcagctcagctgattctgaaggccatctccagttacttcgtgtccacaatgtcctcttccatcaaaacggtgtacttcgtgctttttgacagcgagagtataggcatctacgtgcaggaaatgnnnnnnnnnnnnnnnnnctaggctgagcaacgacagaaccagctgcaccatgtaccccacctccaatttaaaagaaaaaaaaatccccttcactcctactgggaggtgggacccctttcattttcagttttgctcatctagggaaaataaggctttggtttccagttcaattgtttttgaccttctaaaatgtttttatgttagcactgatagttggcattactgttgttaagcactgtgttccagaccgtgtctgacttagtgtaacctaggagattttatagttttattttaatgaaaccctaattgacgcacagcagtggggagaacagcgtcttttacttgtcgccgaagccaggaagccccgtttgtaaccgtgtgttgtggtgctttatcgtacacccagtggcgttctttttactctaatgttctttttttttccccctcagaagaatcatgaatttgcaacagacctaatttttggttactttttgtcttaatgatggatttgaaaatggaagatttaataaggcaaagcagaatctgttgtccttaattatatttgcaatttggaatttgtgtga

SEQ ID NO: 13288 - DNA, 748 bp, Macaca Fascicularis
  misc_feature (1)...(748): n = A,T,C or G
atgnnnnnnnnnnnnnngcaggagtcgaggatnccaaggttatgatcactannncccgagaccccagttcccgcctnnnnnnnnnnnnnnnnnnnnnnnnnnnnnnnnnnnnnnnnnnnnnnnnnnnnnnnnnnnnnnnacatgaagtgggggcacngnnncgnnnnnnnnnnnnnnnnnnnnncaccgatctgctagtcgttcacgagcaccaggggcacacctgtggggctcatcgtcagccacctgccctttggccctactgcatacttcacgctgtgcaacgtggtcatgnnncatgacatcccagacctgggcaccatatcagaggccaagccccacctcatcacacatggcttctcttcccgcctgggcaannnnnnnnnnnnnnnnctncagatacctgtttcccgtgcccaaagatgacagccaccgggtcatcaccttcgcaaaccaggacgactnnnnnnnnnnnnnnnnccacgtgtacaagaagacagannnnnnnnnnnnnnngctcactgaggtcgggccccgctttgagctaaagctgtacatgatnnnnnnnnnnnnnnnnnngcaggaggccacagcagacgtggagtggcgctggcacccttacaccaataccgcannnnnnnnnnnnntcctgagcgccgagtgagcccactcaccactcagtcaggacgtggacttggaactcaggatggggccgtcacagacaggcctgccgagctgggatgggaac

SEQ ID NO: 13289 - DNA, 731 bp, Macaca Fascicularis
  misc_feature (1)...(731): n = A,T,C or G
cagaagggattttagaaagacaccttggaggtccgtgctacatcttcacagttccccagaataaacttaggtggtagcattacttgcctttgacgcctctgcatatgttttaatgactagatcaaaattgtggtgttcttcaatcaaaaatttgataattctatttttaatatttatgtgttaatcaccacacagtatgctctctgaagttctcttaagccttcagtttatactcttaattctcattctgagctggagaactgactttnnnnnnnnnnnnnnnnnnnnnnnggtttccaatttagtttaactgaaatttgctgctgatatgttgagtttgttctttaaataatatctcatatatcggtctttcctcctgtcttagaagaacagacctaactagtgaatgtattaatgaaaatgcatctatttcagagctgacatgaagagtttagtttttttactttataaactgtgaatttgagtatgccacctgcctacaatgtaactaatcatatttaaatatattttactttctctttgactttagaccttttgaagtctgtataaacttgttttaaaatacagtctctacttatgaatgtcataacaaaaatacctttttgcatgataaaaaattattactttgattacaaaaggcctattctttcatggtttccgcaatgagaggaagtgtaatgattattttaatatttctattaaatatgtta

SEQ ID NO: 13290 - DNA, 763 bp, Macaca Fascicularis
  misc_feature (1)...(763): n = A,T,C or G
atgatgagtacgccattttcctgaccaagaaattcagccgccgtcatggacccaccattactgccaagctctacgggcggaagccgcagctgagggaaaccctcctgcaggacttcagagtggttgcccagggtgtgggcatccctgaggnnnnnnnnnnnnnnnnnnnnnnnnnnnnnnnnnnnntccctggggagcaggaaccagagccaatcttaatcccgagagcccggagggctgtgctaccccaagaagaggaaggatcagggggtgggagactggtaactgatgtcaccaagaaagaagattcctgccagctgggccactcggccggtccctgcatgggaatgaccagcaggtatttctatnnnnnnnnnnnnnnnncctgtgagactttccagtatggcggctgcatgggcaacggtaacaacttcatgacagagaaggagtgtctgcagacctgccgaactgtggcggcctgcaatctccccatagtccggggcccctgccgagccttcatccaactctgggcatttgatgctgtcaagggaaagtgcgtcctcttcacctacgggggctgccagggcaacgggaacaagttctactctgagaaggagtgcagagagtactgcggtgtccctggtgatggggatgaggagctgctgcgcttctccaactgacaactggccggtctgcaagtcagaggatggccagtgtctgtccaggggtcctgtagcaggcagcgccaagcaacctgggtcaa

SEQ ID NO: 13291 - DNA, 737 bp, Macaca Fascicularis
  misc_feature (1)...(737): n = A,T,C or G
gaaagagaagnnnaatcggaccnnnnngagaccaccaaaagtaaaaatggagcagcgtgagtgaccannnaggtcacaggcacagaaccttccccctgctatctcccttcctgcttcgaaggactcattctttcctcccacttccaccccgacatagagtagtatttgctttttagtccattttgttttcaatacaatttaatattgatcagagtaattcttttgtacattgaaatgaggggcttggtttaaaaaaagaccttcccctctccctgcccctagaannnnnnnnnnnnnnnnnnnnnannnnnngtgctgccttctcttcccacagcctgtaactcagtgttttgtacttcactgaattgtgatggttagaaacttcgtggatagtttgtggaaatcatccattaaacatactgcttaaaatggtgttgctgtgacttcagagacaagcctggaaggggcaccttaggaagccccttcgcttcagttgctcgcttctgggtgtgctccctttgaaggcccagatgagacagggaacacttgtgggcacacagagcggcatctgatgccctgatgccctgtggtgtttggcatgtgcccccgtctactgaccaatcagcgtggcatgaggtccacgccacccaaacctttcactttccaaagagctagccgtcctccacccagtaccatgtcctagcctgtctgcatttgttagtggtaatattctttat

SEQ ID NO: 13292 - DNA, 731 bp, Macaca Fascicularis
  misc_feature (1)...(731): n = A,T,C or G
gctttgtgaacgacagtnnnnntcannnnnnnnnnnnnnnnggcnnnnnnnnnnnncagatgtatgctattcatggtgggtcctggcttccctaaagataattggaagacttcattggattgatagagagaaactacgtaatttcattttagcatgtcaagatgaagaaacggggggatnnnnnnnnnnnnnnngagatatggtggatccttttcataccttatttggaattgctggattgtcacttttgggagaagaacagattaaacctgttaatcctgtcttttgcatgcctgaagaagtgcttcagagagtgaatgttcagcctgagctagtgagctagattcattaaagtgaaagctgcatagtatagttttgccattttaacatttctgtatttgaagtgcttattaaatctaaaaatgaatactgttaatattttgtacattgtgttaaattaattttaataaattatataattatacatattgtaaaataaagacctgtattttattttctgctctttattctgaagtcctgttattctgactacagttttttgtgtatacttttgtgtctgttatttatgttcaataactgagctaatgtagaagaactctaggtttctacttgatttttctcccatgtatacctttcatgtattctatagcaagttgatgtaaaatggtttgtcaacaagaatgttaactgatgaaagtggatagaaccca

SEQ ID NO: 13293 - DNA, 1172 bp, Macaca Fascicularis
  misc_feature (1)...(1172): n = A,T,C or G
cagagtgacatgccncgggccancnnnnngctgcagagcgagcccagcctcaccagcgacgagctgcacttacccgggaagcctggcctgggcacgcnnngcgccagcctcacactgggcccgcccacgccgcccgcctccatgcccaacctcgccggggccacgcttgcggacgtgatgccccggaaagatgagcacatgggccaccagttcctgacgcccgatgaggcgccctcgccccccaggctgctggcggcgggcagccccctggcgcacagccgcaccatgcacgtgctgggcctggccagccaggactccctgcacgaggactctgtgcgcggcctggtgaagctcagctccgtgtgacccgtgtggccccaggctggggaggcaccagaggctcctccacgggcagcaggagtgagcggaggggtgtgctccacagcgactcccccagccaatgccacggtggagataacagccccaggtctgggggacagagaccacttagaacggcacagggcggccggccccggatgctgagagcttggtttcatttgaattttcttccccaacctgagtgctttgacaccaatggaaacagagaagtcgctgctttcttttggtgggcttggggacggggaccctccaggggtagaatcggagtgtgtctgcccgccctcgtgacagacacacggaaggcttctgacgcttgtggccagactgcaactgcacttacgtgttatgctactaatatttgaaacagacatgccattccatttgttaatttaaaaaaaaggaaaaaaaaaatcctaaagggaannnnnnnnnnnnnnnnnnnnnnnnnnnnnnnnnnnccgtctgtgttacagtggtgttgctgtttccaaggaagtgctgctttctttttctttttttaattttgtgaatttttaagtgctgttttgttggaagacagtgcaacgaaccgagactgatggacagtgtcctcactcagcttattgggctgcggcatctgtggaaaggtggcaccagggctgcagagggtggctggggttccgtcgtgtcgggggtcatttcaccttctctttgcgccactcgatgaggtctcgtgttgacgctattgtgtgccgcgccccccacagtttcacctccgtgtgtgatgaaactcc

SEQ ID NO: 13294 - DNA, 741 bp, Macaca Fascicularis
  misc_feature (1)...(741): n = A,T,C or G
cagaatcaggacattggccannnnnnnnnnnngggtccagagtgcnnnnnnnnnnnnnnnnnnnnnnnnnnnnnnnnnnnnnnnnnnntgggaagcccagcaatactgcacagttcctccatttttctcaaagcacactggaaaggccgttagaattgccctagcagagaaggtctgctttttttccagagcaaaatgaggcactaggtataaatatgttgttactgccaagaacttacataacaatagtttttgtttgctcgcagtgctttcttaattttatggctcttctgggaaactcctccccttttgcacatgaaccttgtggggctgtgaattccttctttaacccctcattcccaatatacccaggccacaagagtggacatgaaccacagggtgtcctgtcagagtagcccatctcccatctccccagctccctatctggaggatagttggatagttatgtgttcccagcaggaccaattatagcctttccaaggattgagttatggcctttgggagtgagatatcttcttgctgctggatttccaagctgagaagacatgaaccnnnnnnnnnnnnnnnnnnncttgtttgccacatggagagagactgaagacagaagnnnnnnnnnnnnnnnaggagccaagggattgacaaacaacagagccttgaccacatggagtctctnnnnnnnnnnnnnnnnnnnnnagatctatacctggactgcccaggtcc

SEQ ID NO: 13295 - DNA, 726 bp, Macaca Fascicularis
  misc_feature (1)...(726): n = A,T,C or G
gtctcgatctnnngnnnnnntgatccgcccgcctcggcctccctgtgttgggattagcggcgttagccaccgcgctcggttgcaaataacatcttaattttgttataaaaaatagtcattctcacctaccccctgacatagtctcagcgacctgtagggccgaggttacacttggagaacccgtgctctagggcctaaacccattcttcttccctggcccacgtgttccccccaccgccccacactggagccactgcctaattctccagcccaagatggtgctcgccagccctcctctcaatgctcatcacacacagggctattcctttcctccaatgaaccaaccgcctcccgcccacctccagttcccagccctctgttccctttgcctggtccaccctcggcctccctgggtcgcagacgaggtcggcctcgtcattccccgcagaccgccgagcgtccctcttgtgcggttcaccacagttgtattttaagtgatcatgtgagnnnnnnnnnnnnnnntgtctccccgcggatcatgggctcctcgaggacagggaccggcctgtctgtccactgctgtaaccccgcgccggcatagggacgtaaggccccactggagggcgctcatcaaatagtnnnnnnnnnnnnnnnnaggaagcggcggnnnnnnnnnnnnnnnnnnnngtcaggactgtcggacagaccgatggggtaacaggtcta

SEQ ID NO: 13296 - DNA, 703 bp, Macaca Fascicularis
  misc_feature (1)...(703): n = A,T,C or G
ctataacccacaggganctgcgcttnnatnccgagtnntgtgcacagcacctgccaaatacacggtgtttgacgcagagggatatgtgaagcctcagtcttgcattgacnnnnnnnnnnnnnnnnnngcacccatccccagccactatgatgtccaggaccgcttccgtattgagctgtctgaggaaggagctgagggccgcgtggtgggacgcaaggacattacctctgttctgagagccccagcgtacccccttgagcttcagggacagccggatccagcgcctcacccagggcctcctgctgggacaccaccacccacgnnnnnnnnnnnnnnnnnnnnnncccgccagcaactggccaccagctccttcctcctcttcttgctgacggggattgtctccgtggccttcctgctgctcccactccaggacgaactcagcnnnnnnnnnnnnnnngtcctgcacgtctccctgggacaaaagttggtggccgcctacgtcttgggcctcctcaccatggtgttcctccggacctgagctccctgctcaacctccagcccaccccacctcaccctccctgggcagggtcttaaggcagccnnnnnnnnnnncataccttgccttgcctcctaccctcttctctttcctgcctactcccccctcctcccccacaaaaaacacccagggatttgtactcgtttc

SEQ ID NO: 13297 - DNA, 679 bp, Macaca Fascicularis
  misc_feature (1)...(679): n = A,T,C or G
gtgtgtgtattgtgtcgtggatgagatngnnagtgattcatttgcacttaggttgatttggagacacagcatgatggagaagttggggaatctaggatcacattaatattattttgagatccactcatgtttggtaacagggcttagggaagatgactgagtagcttctttatggttacagcagagcacagactctgggggcctcctcttccttcacttggannnnnnnnnnnnnnnnnnnnnnnnnnnnnnnnnnacattaattcatgacatatgacagactgggattttcatgagaaaagaaacaaaaaatgctttccaggagggaaaactgtaggaaaataccatctcagaaactgcctccaaatctcacagtgaacttagtggaaattgcatcatgtggaaagcactgagcctttctttttcttttttttcttacaggcttttgaagatatattacacaggtgagtgcataccaagattttagcagatgctctttcagtttccacaaatatcaagcagnnnnnnnnnnactgaaggtataattgattcagatattgatattacattgtgcttgttgtactttctccatcccccaccctatgttgtcttctcttttgttgctatactcagtgattttattaggcagtccaatgaaagttctttccagatggtgata

SEQ ID NO: 13298 - DNA, 722 bp, Macaca Fascicularis
  misc_feature (1)...(722): n = A,T,C or G
agtaaataacattaactcctcatcccaaagcctattgtgttttcaacacaagataataggaagccaagccacgtgcacgtctcccaatccctgtctagggnnnnnnnnnnnnnnngggtggaagacttcctataaacagaatgggggaccaattgtgtctacagagggggtgggctgagcatgggcacgcatgtccccagcctcctggannnnnnnnnnnnnnnnnnnnnnnnnnnnnnnnnnntccgcgtgggtagcagtgtctgtgcctctcctgcccaggtgctagagagcagtccccagtgcagggtccccaatgtatttgaaaacagtggagtcagtggccctaggtggagggtgggtatgaaggccagaaagagtgaaacatgtgagcnnnnnnnnnnnnnnnntccctcttgaatcatccatatgaagccccggggccacttgcgaagcgtctctaatagcttcttcctcactcctgcgctctgaccgctagactttcaccccagccgccggtccggattcctgagatcnnnnnnnnnnnnnnnnnnnnnnnnnnnnnnnnnnnnnnnnnnnnnnnnntaggtttcggtcgcaggaagctgctaaaccatagctgacgccccctcctaagccagccttccttccccgcgcgggtatctgtccagcaccttgtcgcgctctcagtctcctccgcagccggccccaaccgtcaactt

SEQ ID NO: 13299 - DNA, 624 bp, Macaca Fascicularis
  misc_feature (1)...(624): n = A,T,C or G
caaagtgatactgaggatggtgaattcactgantgtaacaacatgacccnnnnnnnnnnnntacttaaaatctttgggcccatacatgagagaaacctcacattgctcctgctgctgctgcagatcctgggcagtgccttcaccttctccattcgatatcagctcgttcgactcttnnnnnnnnnnnnnnnnncttgatcattgtcctttacctcacagtctctaggattcctgactcaggctgacctctttctggtcccagactgcctccttgcccaggcctctctcactcttcatactcttccagattttgttctcagcattttcttttccctgtgatcactggcatcctgggcgtttcttgccccctactgtctactgattggattttacttatgactttctgcaacttgctactctccctctccatcctgtctttgcagcctcacagggtgggatacagaagttttttttttgcagttatccacagtcacatttcagagtcctgactctcaaggaactactggtttttgggatagaacttgggccagggctagggacacaggctccacagtgacctgttatttgattgtaaattaagtgttctgattagtaagaagtaag

SEQ ID NO: 13300 - DNA, 1251 bp, Macaca Fascicularis
  misc_feature (1)...(1251): n = A,T,C or G
gtgtgatatagggccccatgcgagnnnnnnnnnnnnnnntcctatgggactttnntgtgtnnnnnnnnnnnnnnnnnnnnnnnnnnnnnnnntggcttctnnnnnnnnnnnnnngatgagtgtagctactccagctacctctgccagtaccgctgcatcaacgagccaggccgtttctcntgccactgcccacaggggtaccagctgctggccacacnnnnnnnnnnnnnnnnnnacgagtgtgagtctggtgcgcaccagtgctctgaggcccaaacctgtgtcaacttccatgggggctaccgctgcgtagacaccaaccgctgtgtggagccctacgtccaggtctctgacaaggtaggagaaactggggggacaggcaaggagctcattcatgtcccccacctcggggtgcaccggtacatgaccatcacctcggagcggagcgtgcccgctgacgnnnnnnnnnnncaggcgacatctgtctaccccggtgcctacnnnnnnnnnnnnnnnnnnnnnnnaaactcgcagggggacttctacattaggcaaatcaacannnncagcgccatgctggtcctcgcccggccggtgacaggcccccgggagtacgtgctggacctggagatggtcaccatgaattccctcatgagctaccgggccagctctgtactgaggctcaccgtctttgtgggggcctacaccttctgaggagcaggagggagccaccctccctgcagctaccctagctgaggagcctgttacgaagggcagaacgagaaaggcaataaagggagaaagaaggagtcctggtggctgaggtgggcgggtcacactgcagcaagcctcaggctggggcagggtgggacttggaggggcaggccaagttcacctaaatgggggtctctatatgctcaggcccagggggccccattgacaggagctgggagctctgtaccacgagcttcagccaccccgagaggagaggaggtaacgaggagggcggactccaggccctggcccagagatgtggacttggctggcttgcaggggtcctaagaaactctactccggagagcgccaggaggccctgggttccagtcctaactctgcctcaaactgtacatttggataagcccttagtagttccctgggcctgtttttctataaaaagaggcaactggactgttagtggttttcaagcttttcttttaggaagttttatttatttttattatttttactttc

SEQ ID NO: 13301 - DNA, 713 bp, Macaca Fascicularis
  misc_feature (1)...(713): n = A,T,C or G
gacccannnnnnnnnnnnnnnnnnngtctgtgtagatgcagtaaataccactgtgtgcaaaaatcgaagtacaaaaccacaagactaaacaaaacaaacccagagagcaaaacttgtagaggtgggcagtccagaaagcagggggaagccctccccctttccttctctccctgaccctcagaatatatatcattgtaataggaagcattttttcattgttttcttgtgggtgtcactacagacatgttctggcatgttctccgagggatggagcatcctgttatatatttgacttcaaattgaaatgttggcttcattttttttttttacccaattaatctcccaatccctagcaactgtgactctgtatttagcacaagagaaaactgagaacgtgggtcttgcctccttccagaaatatgtctggctcatcaggacatttttttaaaacttcaaaatatttttaaggtattttaaacttttatataaaaaaaaatcaaccaacaagagactcttctgaggaggaacatttgtatttgaacaagatccttggtgtgtagttcagtcttgcagtatacaagcttttgtgtataaatgttttatgatatgattccctgtatttgcaggggtttttttctcttttgctttttagataaatatgtatatcgatattttaaattcatctttgctttttttagaggagtttgtaatca

SEQ ID NO: 13302 - DNA, 750 bp, Macaca Fascicularis
  misc_feature (1)...(750): n = A,T,C or G
tatgaagcacttgannnnntttgagnntttagcagaataccatgatgacncttcccagagtcggcttacgtcgctgcctgtgaggcacattacagcaccaagaacccccgggcaatttattaaaatgttgatggttctgtaagagcaactgctctgtctagtttggcgctctggattccaggtgaacaacttaacaaggtggtgggtctttacccacagcacaaacacagtgcccaccttggggctctgttgtttgagttgcccacatactgcagttattctgttaggaatgattccctgggtgcnnnnnnnnnnnnnnnnnngacacttgtnnnnnnnnnnnnnatctgtgatggcaaggcaaaagcaactatgttcacagtgaaaggttcgtggaataggttaggccatttcagtagacattgcagttagttagcaagaaccacgttgtctctttatgttttattttttattttttgcaaactggttttatttttttgatgaagctgagcaactctgtccaacaaggtttagtttgtacttggaaaccacaaagtagtctcaaagtattttagagggaatcgatattgatggcaaaagaaaatttgcagctatacannnnnnnnnnnnnnnnccctctctgtgaaacattatttttggtgatctaaagaaagcattgcctttcttgtttgagattttagggctatactttgttgtgtaatgttatggttccctttctgtaaaatgtta

SEQ ID NO: 13303 - DNA, 910 bp, Macaca Fascicularis
  misc_feature (1)...(910): n = A,T,C or G
gacacagacagtccactcagtgcagccaacnnnnnnnnnnnnnnnnnnnnnnnnnnnnnnnnnnnnnncttgagagctgctaaagagcatgctatgcctaaagatttaaagatgttagaaaataaagtcatagaaacattaccaggtttccagcatgttaacttctcagtagtgaaaaccatcttgttgaaagagaacttccctggagaaaacatagtttcaaaaagcttttcttctcactctgatctgattacaggtgtttatgaaggaggcttaaaaatctgggaatgtacctttgacctcctggcttatttcacaaaggccaaagtgaaatttgccgggaaaaaagtcttggatcttggttgtggatcaggtttactgggtataactgcattcaagggaggggccaaagaaattcactttcaagattataacagtatggtgattgatgaagtaaccttagctaatgtagtagctaattccactttggaagatgaagaaaatgatgtaaataagccagatctgaaaagatgcaagaaaccaaaagtaacacaagaactatataaatgccgatttttttctggtgagtggtctgagttttgtaagcttgtnnnnnnnnnnnnnnnnnnnnnnnnnnnnnnngatctcattctcacctcagaaaccatttacaacccagattattatagtaatttgcaccagactttccttagactgttaagtaaaaatggacgtgtacttttggctagcaaagcacattattttggtgtaggtggaggtgttcacctctttcagaagtttatagaagaaagggatgtttttaagaccagaatactcaaaataattgatgaaggattgaagcggttcataattgaaataacttttaagtctnnnnggttaatannnnctg

SEQ ID NO: 13304 - DNA, 728 bp, Macaca Fascicularis
  misc_feature (1)...(728): n = A,T,C or G
aacacannnnnnnnnnnnnnnnnnnntcaaacccctggaaanctacaaaaaccaggagagactgtctttgtaccaggagggtggtggcatgttgtcctcaatctcgacactactatcgccatcacccannnnnnnnnnnnnngcaccaacttccctgtggtatggcacaagacggtaagagggagaccaaagttatcaaggaaatggtataggatcttgaagcaagagcaccccgagttggcagtcctggcagactcggttgaccttcaggagtccacagggatagcctctgacagnnnnnnnnnnnnnnnnnnnnnnnnnnnnnnnnnnnnnnnnnnnnnngactcagagtgcgagtctggatccgagggcgatgggacagtgcaccgcaggaagaagaggaggacgtgtagcatggtgggaaannnnnnnnnnnnnncccaggacgactgtgtcagcaaagagcgcagctcctccaggtgacccagcaaggctattgtctgtatggaaggacacgctcgcggcaagggcagggcctggggagggcggcctgtctagtcctgcagacaaggggaggcctgacagagcctgagaatgaggacgccctcggcacgggnnnnnnnnnnnnnnnnnnnnnnnnnnnnngctttccctctgctaccgacnnnnnnnnnnnnggcttgttttactcagaaaggcaagagaatgtgaatgggccaaaaaaaccc

SEQ ID NO: 13305 - DNA, 766 bp, Macaca Fascicularis
  misc_feature (1)...(766): n = A,T,C or G
gacagactgtgtacgggcagtgtggcaaaatgaaggggccggggccttctaccgcagctacaccannnnnnngaccatgaacgttcccttccaagccattcacttcatgacctatgaattcctgcaggagcactttaacccccagagacggtacaacccaagctcccacgtcctctctggagcttgcgcaggagctgtagctgccgcagccacaaccccactggacgtttgcaaannnnnnnnnnnnnnnnnnnnnnnnnnnnnnntgaactcacacattacaggacatatcacaggcatggctagtgccttcaggacggtatatcaagtaggtggggtgaccgcctacttccgaggggtgcaagctagagtaatttaccagatcccctccacagccatagcgtggtctgtgtatgagttcttcaaatacctaatcactaaacggcaagaagagtggagggccggcaagtgaagtagcactgaacgaagccaggggtnnnnnnnnnnnnnnnnnnnnnnnntcacattctctgtctcctggaatgctcccgcctcaagtggagttagaaggaaggtagaggggctctccnnnnnnnnnnnnnnntttcgactnnnnnnnnnnnnnnnnnnnnnnnnnnnnnnncacctttccttccaggccctaagcacgtgcagcaaagcacaccacagcacctttgataacctctctccatcctgggcctgacgacctgctctagactgttatagagggataagcagctcattc

SEQ ID NO: 13306 - DNA, 885 bp, Macaca Fascicularis
  misc_feature (1)...(885): n = A,T,C or G
agtnnnnnnnnnnnnnnnnnnnnggccaggcattcctttnnnnnnnnnnnnnnnnnnnnntggctatcctcnnnntgattggccaaggaatggannnnnnnnnnnnnnnnnatgagctgctgaatatagagaaaaatccccagaagcctcaatatagtatggctgtagaatttcctctagtcttatatgactgtaagtttgaaaatgtcaagtggatctatgaccaggaggctcaggagttcaatattacccacctacaacaactgtgggctaatcatgctgtcaaaactcacatgttgtatagtatgctacaaggactggactctgttgcagtnnnnnnnnnnnnnnnnccaaagatggatagaatgacagaatggggaaatgttaagccctctgtcataaagcagaccagtgcctttgtagaaggagtgaagatgcgcacatataagcccctcatnnnnnnnnnnnnnnnnnnnnnnnnnnnnnnnnnnnnnnnnnnnnnnnnnnnnnngggacgaattgagcacccannnnnnnnnnnnnnnnnnnnnacaaaagccaaaagggactgtaatgacataatagaggaagagaatactaatttggagacaccannnnnnnnnnnnnnnnnnnnnnnagaaattaaaagcatcatttaaccatagacaatttgccaggatctaggaaccacctaacggtaggtggacagaaaggaaaaaaaaaatgtacttgcaagtactaggaattcagatgatcagctcttaaaaaaaaaaaaaaaaagcaaaaagactaaagccctattaaggaagttattgctttaataagaaatttcaaatactctcttatcccggtccaaaagtattaagagactaaagaagcaaaaag

SEQ ID NO: 13307 - DNA, 667 bp, Macaca Fascicularis
  misc_feature (1)...(667): n = A,T,C or G
tggacagtgaccagggccatcgagaccaccagagctacctccccaggggcagcccactaaggttctgcctcagtcccnnnnnnnnnnnnnnnncctgcccnnnnnnnnnnnnnnctccccctggaggctggctagaaaccccaaagagggggatgggtagctggcagaatcctctggcttcctagtaatagataccagttattctgcacaaaagcttttgggaatccttctttgcacccagagactcagaggaaaagagggtgctagtaccaacacagggaaaactgatgggacctgggcccggacagtcccccttgacctcagggccggtcagggaaatgcctccctttggtaaatctgtgttatccttctttacttggcaaacagccaatcatgttaactcttccttatcagcttgtggcccagagacacgatggggtccttctgcaggcaaaggaggaaatcctccagggacccgctgcatcccctaactgcatgcagatatgnnnnnnnnnnnnnnnnnnnnnnnnnnnnntccacaggaagattccttaacacccttaggacctgaggccatcttctcctttgaagatgaaaataggggttaagttctccatatgtacaaggaggtattgagaggaaccccactgttgactgaaaataaata

SEQ ID NO: 13308 - DNA, 706 bp, Macaca Fascicularis
  misc_feature (1)...(706): n = A,T,C or G
tctatggactttaaaatcttagtggtgcacgatgggcagggatggnnnnnnnnnnnnnnnnnnnnnnnaggattagaggtggcttggccggggctgtcactgcacagaggacggacaaatggacacttcagggattcagacacttgggggcttccgctccggagaggggaggggcatgtggnnnnnnnnnnnnnnnnnnnnnnnnnnnnnnnnnnnnnnnnnnnnnnnnnnnnnnnnnnnnnnnnggaggaagggcaagggggtgtcgtgcagggtcccctnnnnnnnnnnnnnnnnnnnnnnnnnnnnnnnnnnnnnnccctaccccatccccnnnnnnnnnnnnnnnnnnnnnnnnnnnnnnnnnnnnntcctctgctggctgggcctgacagccagggctggaatgaggggcagagaccccagagcagcccagtgaggtgcaagcaggcctggaagacagactggacccaaggctgggggtgcggaggtggcaaccacagagaatacaacgtttacaaaaataattacannnnnnnnnnnnnnnnnnnnnnnnnnnnnnnnnnnnnnnnnnnnnnnnnccccagcccctcatcctgcccctagggaggaagagccaaatgtgcctggcagaggctggggtctgctctgagggcaggagcactagccatggggctggaggcccacccagaacctcagctcactc

SEQ ID NO: 13309 - DNA, 736 bp, Macaca Fascicularis
  misc_feature (1)...(736): n = A,T,C or G
aagttaagagtgtaagtgaaaaatctggaggagaggataatttccactgtgtggaatgtgaatagttaaatgaaaagttatggttatttaatgtaattattaattcaaatcctttggtcactgtgattgcaagcatgttttctttttctcctttatatgactttctctgagttgggcaaagaagaagctggcacattgtatgttgttggagtctgttatctggtcagggggaacaaaatcttgacccatctgaatgtatgttactgagtcagtgcctgaacctttattttttaaattgaatgttccttaaaggttaacatttctaaagcaatattaagaaagactttaaatgctattttggaagacttatgatgtgtgtatacaaacaaatagcagataatggtgaatagctcacacataaagcccttttaaggagaaaatctaaaatgaaaagtggataaacagaacatttataagtgaccagttaatgcttaagagtgaaagtagatctattgatttgtcattcctcaatatatttaatatcaactgcattatgtattatgtctgctttaatcatttaaaaacagcaaaaaattatatagactatgattgaggtaccttgctgtgtaggaggatgaaaggggagttgatagtctcataaaactaatctggcttcaagtttcatgaatctgtaactagaatttaattttcaccnnnnataatgttctatatagct

SEQ ID NO: 13310 - DNA, 717 bp, Macaca Fascicularis
  misc_feature (1)...(717): n = A,T,C or G
cagtgcccagagtgccaccgcatgagcaatatacaaacagtccaaaaaagtgtttatttttatggaacatggtgcaataggcagaggacaagggacacatcactcttctgtctgtggccctgctggagtcctttgtgcccctcctgagtccacacgccttccctgcaagatgagaatggggctgggaagaaagaggtgacaccatggctggcaggagccccgccgcactgctctgcagacccattggcctgaccctggaagcagagccagcccgggacctgcccttgttcctttcccttcacaccaccccagcctcaagatgtcgagccactccagaacgtgtctcactccacagctaccccgcagcaatacgcactcttgggacctcactgatctaggatggggaggcaggccaccgcccctcccaagactcctcaagaaagagccccacggttgctccagaaactcaaggcactgcagccgtgggcactgcctcagcgtaaagacacaggggcgcctcccnnnnnnnnnnnnnnnngatgctcaccccgtcataagcagaaactagtgatcctggaaacgagatgggccttactctgtcgactaaatgaatagctattttcttgtcattttttaaagtgcaactcnnnnnnnnnnnnnnnnnnnnnnnnnnnnnnnnnnngagaaataagtaatcacagacattttaataccatt

SEQ ID NO: 13311 - DNA, 712 bp, Macaca Fascicularis
  misc_feature (1)...(712): n = A,T,C or G
caagcagcttcaagaaaccattggtgtnnnnangataatatttctaaatagcattcaggaagagagtattattacacagatnnnnnnnnnnnnnnnnnnnnnnnnnnnnnnnngatcggaagtgctgatgagttatatttattgaaaactcaacttttaaggaagtgctaagatcagtcacccatgtgaataagaagccaggaaaggaaagatggagaagcccagatcaccagacttctgtgaaggaggaaagcaacagaggaaaacagtgaaagggaacagaaaggggtannnnnnnnttacagaaaagccaactggatannnnnnnnngcagaaggtgtatgttggnnnnnnnnnnnnnnnnnnnnaaaatacttgagatagtcttaagcagaagaaggcaattagagaaaacaaagtgtctactggacttgtcaacatacagacttcaagatatcccttatgagaatccaaagaatgatgtgtaagggaagattttatttgcccttccagaagaaatcagtatctatgcaaatcttgaaagatgaaatcaaagctcataatgattcagaatcagtgcttgaccttctgtattctgaatggtgaactctggaagcagggattgtgtctgtctggctctttttagagctggaaatgtagtggctttnnnnnnnnnnnnnnnnnnnnnnnnnnnnnnnnnnnattatcatct

SEQ ID NO: 13312 - DNA, 894 bp, Macaca Fascicularis
  misc_feature (1)...(894): n = A,T,C or G
gcagatttgctgttanntgacannccgatgaggaggatggactgtaattcagagacgatctgatggcagcgagaactttaacagaggatggaatgactatgaaaatggctttggaaattttgtccaaaaacatggtgaatattggctgggcaataaaaatcttcacttcttgaccactcaagaagactacactttaaaaatcgaccttgcagattttgaaaaaaaannnnnnnnnnnnnnnnnnnnnnnnnnnnnnnnnnnnagatgaaaagaatttctatgnnnnnnnnnnnnnnnnnnnnnnnnnnnnnnnnnnnnnnncccttgcggggagttttcatcctgaggtgcagtggtgggctactcaccaaagaatgaaatttagcacgtgggacagagatcatgacaactatgacgggaactgcgcagaagaagatcagtctggctggtggttnnnnnnnnnnnnnnnnnnnnnnnnnnnnnnnnnatactacactggcccctacacggctaaaacagacaatgggattgtctggtacacctggcatgggtggtggtattctctgaaatctgtnnnnnnnnnnnnnnnnnnnnnnnnnnnnnnnnnnnnnnnnnnnnnnnnnnnnnngttgggctttcatttnnnnnnnnnnnntttgtttaaagtgatttgaaaaatactcattctgaacataccatgcgcaatcataactgttgtgatcattcttctcgcttgcctttgttacttaatgtactttcagtacagcagatatgctatattcaccaaataaacatagattgtattaatatttattgaatccctgtgtgcaaaaggctctgatacaagcttagtcagacaaaacacannnnnnnnnnnnnnnnnnnnnnnnctta

SEQ ID NO: 13313 - DNA, 774 bp, Macaca Fascicularis
  misc_feature (1)...(774): n = A,T,C or G
tccagttacagggtgctgccanncnnnggaaggctnnnaggggctggccagnnnctgtgtccccagtggaagcctacnnnntgtataagcaccgtgccacacagcccccgccggcctgnnnncttnnnnnnnnnnnnnnnnnnnnnnnnnnnnnnnnnnnnnnnnnnnnnnnnnnnnncttcagcccgggcctgctccctggccaggccgaagttgagccgatccccagtgtagttcttcacgatgaggagggtccccactgcgggagcagccggcagggctcagcacccttactgtgccctccccgccgcagcccctcctgcatgccaggcttacctgtgccagcctgggccactgccctgatggctgccaggatgctgcccactgctggggaggtgaatacggctcctgcgatgaccccggtcagcatccccttccctatgaaacctggaggtggaaggggtagagtgagcatggcaggtgggnnnnnnnnnnnnagtcactggggcttcccatgctccgggggtcatggtttgnnnnnnnnnnnnnnnnnnnnnnnnnnnnnnnntcccccaggtcttcaaatggctgactccttcttaggaggcaccttagagaggccttctgcgacctccccgcctgaagcagtcaccaactccctccccagggactcactgttcctttgccctgttttactgtctgtactaagtcacttagcaccctctgaaatgatctcatttcctttcgtgtttacctggctattgtctatctccc

SEQ ID NO: 13314 - DNA, 748 bp, Macaca Fascicularis
  misc_feature (1)...(748): n = A,T,C or G
cccacccccaaatagcacgcaagcttgtaanctcacctcttacaaaatgtttagattctgtagatgtaaaaagcctttcnnnnnnnnnnnnnnnnnnnnnngtttataggtgttcactttcctccggagctgattaactactgacatgccttggctttctcatccagaaattatggaaacagggtctgtcagtggcaggaggccgggctgtgttttacttggatgacacaatgcaatttacttgcctattcatacccatgcatgctgctcaccctagacaatgacatataagccgtatatagatcaatgtccacatatatatacacacacacatatatatataaagcgttacaaggaacactaaaacagtgttgattcttgtctctgaagatgagtaattaaacctttttttttcccaactaaagaatggatttaattaaactaggtattgaaaaaaagtagcctaagtgttagagatggtgaatatattccattttagtttaaagaaccaatttcctgaattttaagcattcagtaagctgccaattttgattttgtgttgctctttacccaaattacgttttctttgtttttcttttttggggggaggagggggaaaaaagcagcaatactgtgtttggaaattatactctgtatctggctttcctgtgtatgttaaccacttaaatgttattatcctgctttggttttatagtgattgtgagcgcattnnnnnaagtatacagtt

SEQ ID NO: 13315 - DNA, 740 bp, Macaca Fascicularis
  misc_feature (1)...(740): n = A,T,C or G
cagagttattnntttttttatactcccaggtagtgttctagatgagaaagaggtaagaatgagaggaatgggcacaattttggaaatcaatcccaaagagcctgagtaaatgaaaggccactatgaaatgacgccaggagtaacaacggaacttcacttttgtaatgggatttttatttttgctctttttatagtatcagggaagcaaactgccttttacaagttagaaaaatgctgtttgaatctagttgaaccagggaatacagagcgagcaatatgtagcttgaattacatttaaaagcagattttttacaaacaaaatggcgaaagcactgattgtcatttttagcagtcacttaaggcctatagaacttttttcaagtcggaaggtcctgttcttactatctcaaaaatgggcatcgaacaatcaatctaggagcgtggcagtgggtaaaatggtggacaggcaccaaagctattttctcatctgtcctgtggatgagtggaactgtggaacaagtgatgtggaattaatgggtgcaacagctgtacagacaatcaataacacacagttctggaaagaacacatcacttgtgcttgtttgatgagcttgtcacattctaatccctctccccatcctgtttcaattttgggaaacttgtatactgctggtgtcagcaactctgattctgaaatnnnnnnnnnnnnnnnnnnnnnnnnnnntctctttctatttatt

SEQ ID NO: 13316 - DNA, 1007 bp, Macaca Fascicularis
  misc_feature (1)...(1007): n = A,T,C or G
gcttgagagccggcagnnnncaggacnnnacgnnnccaggccagggctccttccctagaatgtgctctgtctcagggatcctctttcaagggatctgtgatggatctaggtcagggaatgtcccccctgtcnnnnnnnnnnnnnnntccccttggccagcaaaatatcatctgacacgttttattccactgccaccaaaaggccttagcagtaggaggactaggctccattataagagttcttacagcaagaaagactgtttaaaaaaaaataaaaagactcatgttaccttgagaagaattctggatgcccaggctggtgaagaagggattgacaatggaccatcttctaggaactcccaagtaaactatttcaggacatgtatctgctgaaatgtattttattttcaaggtggagggaaaaatcgtctatttcctaaatcctgtttaggatctgatagtctatgcctttgtctccgagtactgcagaactgacattttgacgatctaccagagtggcagctggcgttggtcaggtgcacctgtgtgcactgggggagggatggtttgggcaggtgcagatccaagggctgtggtaaacgggagagcttgtgtttttgaagtggaaaaaaacccaagagtttgtacagacatcccgtcttcccagagaaggtggacactcttgggctcattgtaaagtgcctgctgcatcaataaagctcttggcttattagtatatacattgcggtgtgtttcatatatgtaaaaaaatggtaatgaatgggatggtaatgaatgagagnnnnnnnnnnnnnnnaacccgacgtgggaggagtagacctgtgcccctgttgagtcacccctaggagcgagcnnnnnnnnnnacaggccctctgccacaggacgccagccttggcctcagagccgctggctgctgcagagaggtgtttgctgaatgaactatttattgtttcttactcctttgatttgtatgtaattaattttgga

SEQ ID NO: 13317 - DNA, 711 bp, Macaca Fascicularis
  misc_feature (1)...(711): n = A,T,C or G
atgatgagggcttcagtgatggcttcacccgagaggagccgaccgcggtggatgtgtgtgcgctcacctgaggctgcttgggcccagtgtgggggtggcagggcaggtgagggctctgtcgccttgnnnnnnnnnnnnnnnnnnnnnnnnnnnnnnnnnnnnnnnnnnnnnnnnnnnnnnnnnnnnnnnnnnnnnnnnnnnnnnnnnnnnnnnnnnnnnnnnnnnnnnnnnnnnnnnnnnnnnnnnnnnnnnnnnnnnnnnnnnaagggagtgagggaagcaggggaggggagggagcagctgggcaaggaggtggcttcagaggaagtccagcctcagcaggacccgcaaagagctccaggcacagcccacagtaccacagtgtgcccacaccatcggttggctcccagatgaggaggccagagaggggtgagtaacttccnnnnnnnnnatctccagggcagggtacctnnnnnnnnnnnnnnnnnnnnnncagagacagcacagatgtgaacccnnnnnnnnnnnnnnnncccccagtggctcggtgggccaccagtagcatcttctagatggcagagggggaatggcagggccaggagccaggctgcctgggttcccactctgctgctgccacttccagctgtgtggctctggatgagcctttgccttttggtgccttggtttccgcatttagcacctacttcctag

SEQ ID NO: 13318 - DNA, 762 bp, Macaca Fascicularis
  misc_feature (1)...(762): n = A,T,C or G
cagcctccagttgtagcaggtttcnnnnnnntcctatgctggagtgcacaatgagagtactcacttctcacctgtcttgctcttagattgggctgtggctttcatcctgtgtcccctgacctgtccagatgagcgtgagggcagcattgggaagcnnnnnnnnnnnnnnngcctcccttgccagtgggctgtgttgactgctgctccccacccctacagatggtcccaggaagcagggagagttggggaaggcaagattggaaagaaagaccaaggcctcggcagagatctctgtcttctctccacttctggtcccctgtagtgatgtgcctgtaatctttttctccacccactcccctttccacgacaaaaacaaggctgcctccctctctccggagagttggtgacagttggtcctctcggtcnnnnnnnnnnnnnnnnnnnnnnnnnnnnnnnnnnnnnnnnnnnnngggcctgggcctggagcattcgctgtgccaggaggcggcagcccttctgggcagagcctgtccctgccttccctcactcctcattttgnnnnnnnnnnnnnnnnnnnnnnnnnnnnnnnnnnnnnnnnnnnnnnnnnnnnnnnnnnattgttttattttggaattggtgtatatcannnnnnnnnnnnnnnnnnnnnnntgtgtgtatatatttaaaaaaaaaaaatcagtgtttaaagaaagacctatgtacttaatcctttaactctgcggaaagcanntggtaggtagc

SEQ ID NO: 13319 - DNA, 481 bp, Macaca Fascicularis
gaccaagcagcaggcccagcatcctttcctgccgagttttcctggggcaggtccgccctcgcatccgaggctcccagggggattcgcggaggggcggcgccctggggggcttcctggaggaggcgccctgggtccacctgcccatgcgcctggctccccccacagactgcggcctggcgccggcggcgctcagcaggattgtgggcggcagcgcagcgggccgcggggagtggccgtggcaggtgagcctgtggctgcggcgccgggaacaccgctgtggggccgtgctggtggcagagaggtggctgctgtcggcggcgcactgcttcgacgtgtgagtcctaaacgctccaaatgcccctgcacgtgtctgtagctcacccggaaccgaactgttgcccgaaaacgcaccgtgacaccctcttttgccggagtgccctccccgactcccgctcccactgccccaggctgctcctcccac

SEQ ID NO: 13320 - DNA, 747 bp, Macaca Fascicularis
  misc_feature (1)...(747): n = A,T,C or G
ccgcctagcccggctgctggggttgcacacannnnnnnnnnnnnnnnnnnnnnnnnnnnnnnnnnnnnatgtnnnnnnnnnnnnnnnnnnnnnnncccatgacaaggaatacatcaatggggataagtatttcnnnnnnnnttttgannnnnnnnnnnnnnnnnnnnnnnnnnnnnnnnnnnnnnnnnnnnnnnnnnnnnnnnnnnnnnnnnnnnnnntcatcaaccatgtcnncagcgtggacccnnnnnnnnnnnnnnnnacggcgtgctatgacattgacgtggaagtagaggagccattaaagggacagatgagcagcttcctcctgtccacggccaaccagcaggagatcagtgctctggacagtaagatccatgagacgattgagtccataaaccagctcaannnnnnnnnggacttcatgctaagcttctccagagaccccaaaggctatgtccaagacctgctccgctcccagagccgggacctcaaggtgatgacagatgtagccggcaaccccgaagaagagcgccgggctgagttctaccaccagccctggtcccaggaggctgtcagtcgctacttctactnnnnnnnnnnnnnnngcaggcaggagctggagcagtcgctggttgtgcgcaacacctaggagcccagaaataagcagcacgagggaacttccggccgtgccccgggccccagtgctttgccctgggctccagcatcactcctctgccaccttgg

SEQ ID NO: 13321 - DNA, 774 bp, Macaca Fascicularis
  misc_feature (1)...(774): n = A,T,C or G
agcgtactggagttgctgtttgtagcaggttttaactcaggaacaactnnnnnctgatctctccgcnnnctgccgggaggcgacgttcgccgtcctctcggagccggtagcgttgctgtccgagtccccaggacggatctcctgcagacctgccttaatgctcagatcgaagtatttcacaagaatacttgtgtttttaacagcccttcccctagacggtgcggccgtgagggcctcatgtgactgcattgccttttctttctgtggatccagtatcttcctcggctttttagggagcaggaaaaacgtgtctgagagcaagtctttaaaaacccgccctgttgtatataactgtatctgtttcnnnnnnnnnnnnnnnnnnngggtgggaacttgatataaacatttaaaggggccacgatctgcccgagggttgctcctttnnnnnnnnnnnnnnnngatgaggagattaagccatttcttatcctgtagatgtgaagcactttcagttttcggcaatgttggaatgtagcatccgaagctcgttccttcacattcggtagcgtctgtgcttgtccacatgcgctgggcgcctgggaccttgaatgcctgctctggttgtnnnnnnnnnnnnnnnnnnnnnatttcttcacttctctggggcccccagggcgcccgttgacaagtgtggagaaactcctaatttaaatgtcacagacaatgtcctagtgttgactactacaatgttgatgctacactgctgtaattataaac

SEQ ID NO: 13322 - DNA, 872 bp, Macaca Fascicularis
  misc_feature (1)...(872): n = A,T,C or G
ccgatttacttgaagacactcccagacagtgccggatatgtggagggcttgcaatgtatgagtgtagagaatgctacgatgatccggacatctcagctggaaaaatcaagcagttttgtaaaacctgcaacactcaagtccaccttcatcccaagaggctgaatcataaatataannnnnnnnnnnnnnnnnnnnnnnnnnctgactgggactggnnnnnnnnnnnnnnnnnnnnnnnnnnnntggagttatttgctgttctctgcatagaaacaagccactatgttgcttttgtgaagtatgggaaggacgactccgcctggctcttctttgacagcatggccgatcgggatggtggtcagaacggcttcaacattcctcaagtcaccccatgcccagaagtaggagagtacttgaagatgtctctggaagacctgcattccttggactccagaagaatccaaggctgtgcgcgaagactgctttgtgatgcgtatatgtgcatgtaccagagtccaacaatgagtttgtacaaataactggggtcatcgggagaggcgaagaaactgaaggcagagtcctaacgttgcatcttattcaagctggcagttctgttccacgtccattgccggcaatggatgtctttgtggtnnnnnnnnnnnnnnaaaggatgcctgtgtttaaaaacaaattgcttttgtgtccctgaagtatttaataagaagcattttgcactctagaaagtatgtttgtgttggttttttaagaagtctaaatgnnnnnnnnnnnnnnnnnnnnnnnnnnnnnnnnnnnnnnnnnnnnnnnnnnnnnnnnnnnnnnnnnnntttaattgtgaaagtttaaagcctctt

SEQ ID NO: 13323 - DNA, 904 bp, Macaca Fascicularis
  misc_feature (1)...(904): n = A,T,C or G
tcaatgtagtgggctctgtttgtggggcccaggctttgatgagtggttcaaaccccatgctgggctgtaacacaggtgccgtaactcctgcaggaataaacctgagcggccttctaccctcaggaggtctgctaccaaatgcattgcccagtgcaatgcaggcagcttctcaagcaggtgttccatttggtttaaaaaatacttcaagtctcaggcccttaaatctactccagcttccaggtggttcacttatttttaacactcngcagcagcagcaacagcagctctcccagtttacaccacaacaacctcagcagcccacaactgctagtcctcaacagccaggggagcagggttctgaacaaggttcaaccagtcaagaacaggccttatctgctcannnnnnnnnnnnnnttaaccttactggagtaggaagttttatgcagtcacagnnnnnnnnnnnnnnnnnnnnnnnnnnnnnnnnnnnnnnnnnnnnnnnnnnnnnnnnnnnnagctcagctacatcgtcatcggcatacaggcagccagtcaaaaagtaaaatgaagagaggcacgccaaccagtccaaaattctgagtcttgcattattttttgttccttttttaaaaacacaagagcattgaatcaaaaggattgagtttctactttttgtttttttaatgtgtcagtattttacattgctagatgtacaaactttatacagaagcacaaccttatcatttttaaataaaaacagggaaatggtttaacaaactagggttggtttgcctaagtcattgctttttaaaaatggtttcactatacattatatggaagtgacctaagaaataatagaaacatctttcagaagaatgtagtttgatatttatttagtataaaatgt

SEQ ID NO: 13324 - DNA, 283 bp, Macaca Fascicularis
aagatagctgagaaattcagccaaagtggctgactgtcactgcagcagagggcaatgttaagaagcagccctcacatgatctgtttttcaccacttcactgagaagacaccatttatctatccaaggacagaaagtagaactgtacgtatcttcgttaaatgtttgacacaattggaaatgtctgtaatttttgccagaatgctattgaaaatgttaattgcatgacttgctagcatattcttttccgcaagaatagacataataacatgcctgtgacaatga

SEQ ID NO: 13325 - DNA, 686 bp, Macaca Fascicularis
accatttgtgactgctttagagtatgccacagataccatagccacagtcgtggggaaaccagagaagacgttctttttggaagcattgcgaggcactggctgtcaacctgaggaggctgtcatgataggagatgattgcagggatgatgttggtggggctcaggatgttggcatgctgggcatcttagtaaagactgggaaataccgagcatcagatgaagaaaagattaatccacctccttacttaacttgtgagagtttccctcatgctgtggaccacattctgcagcacctgttgtgaagcaatgtgtgcgtctgaagcaacttgaaacgcagcttcttactgtctggaatgattccctgaccaactcagtgccagtgtcggtagacacacaccagtcagtgctgatcgctttttaaccctcttttgttgtgcattaattagaaagaaaggtattgaattgcagccagccagtaagctttgcgaatctcttctattttgtaactgaagatgagacccaaagaaagggaaagctgagattttgggccattccttttaaaaattcatcaggttaggcagggctgggagggagaacctaccacagggaagagtgttctctgctgtctcctcactggaaaacagggaggggggatttcagactgtgaagaaagttgaatggtggttt

SEQ ID NO: 13326 - DNA, 901 bp, Macaca Fascicularis
  misc_feature (1)...(901): n = A,T,C or G
catgacagacnnnannnnaaaaggtctaatgcttatcactnnnnnnntgaaccatacaaagatggttacattagaaatccacatacttatcttaatccacctannnnnnnnnntggtatgatttgtgtggtccagggcgtatatggctatcatcattatatnnnnnnnnnnatcgatgacagtggctggggctgtgcttatcggtctctgcagactatctgctcttggttcaaacnnnnnnnntacacagagaggtccattccaacacacagagaannnnnnnnnnnnnnnnnnnnnnnnnnnnnnnnnccagcaacatttgtcggatcacggcaatggattggatctattgaggtacagctggtactaaaccaattgattggtataannnnnnnnnnnnnnnnnnnnnnnnnnnnnnnnnaaatggcctctcaaggacgggaactggctaatcatttccaaagcgaaggaactccagttatgatcgggggaggagttttggcccacacgatactaggaattgcatggaatgagattacagggcagataaagtttctgattctagatccacattatactggtgctgaagacctacaagtgattttggaaaagggctggtgcggatggaagggtccagacttttggaacaaggatgcatactataacttatgtcttcctcagcgaccaaatatgatttaaaatatcttggagtcaaagactgcagtagnnnnnnnnnnnnnnnnnnnnnnnnnnnnnnnnnnnnnnnnnnnnnnnnnnnnnnnnnnnnnnnntgacggtttaaattatgacctttttcaaaggttgtaaatacagcacggagaatgtattttttagacattcctttaataaaacttaaaagacaaagcatacacaaccagca

SEQ ID NO: 13327 - DNA, 724 bp, Macaca Fascicularis
  misc_feature (1)...(724): n = A,T,C or G
tcagcagcaccccatccttacccagtgccctctccttgccagcttctccccaggccagtgcgtagaaggagccagggtgtccccaggacaggccatcccccaccccatcctgtagaaatccattcccccttttcctcctgtccttcatctcccaaggagtcatggaactcagggtactgggtcctgggtcagcctcagggcctcaacgggnnnnnnnnnnnnnnnnagcttcccagcccttccaggagctgcagggggatcctctagcatggggggtgtgacttggttcctttgtccaggccnnnnnnnnnnnnnnnnnnnaggatgggtggggcctgctctggagctgagcccgaggctgctcacaggtgtccttagtggagttgcnnnnnnnnnnnnnnnnnnnnnnnnnnnaatatcccgagggactggctgtgggatgcgtgtttgggtcaggctgtgccctctcagtaaacactggagctgctccatccctgaagaggccccgtgccccaggcatggcaggcacctcgcctctccctttccggtgctcacacgcccgccgtgtcacctgatgcaggtctcacctctgtgccttgctgctcctgaggcccaagggcagccgtggggctctgtgctgctcggaccgcccaggccacagagcctgagcttcgtagccaaagcagcctgagacccacccaccaaggaaaaaagcagaataaac

SEQ ID NO: 13328 - DNA, 783 bp, Macaca Fascicularis
  misc_feature (1)...(783): n = A,T,C or G
taacatgcatgggaagtgtacagtgggtgatcactggtnnnnnnnnnnagcaggcagcaagcactacccagagggggacggcaactgggccaactacaacacctttgggtctgcagaggcnnnnnnnnnnnnnnnnnnnaagaaccctggctactatgacatccaggcnnnnnnnnnnnnnnnnnnnnnnnnnnnnaacannnnnnnnnnnnnnnnnnggagaaacagctccctgctgaggtaccacactgacactggcttcctccagacannnnnnnnnnnnnnnnnnnnnnnnnnnnnnnnnttcccagtgaaatatggagtaggannnnnnattactgacaacggcccggcgatccctgtggtctatgattttggtgatgcccagaaaacagcatcttattattcaccctatggccagcgggagttccctgannnnnnnnnnnngttcagggtatttaataatgagagagcagccaacgccttgtgtgctggaatgaaggtcactggatgtaacactgaacaccactgcattggtggaggaggatactttccagagtctagtccccggcagtgtggagatttttctagttttgattggagtggatatggaactcatgttggttacagcagcagccgggagataactgaggcagctgtgcttctattctatcattgagagctttgtgggagggaacccagacctctcctcccaacnnnnnnnnnnnnnnnnnngagaacaacttacccagtagctacaatgttatggcagaagagaaacta

SEQ ID NO: 13329 - DNA, 723 bp, Macaca Fascicularis
  misc_feature (1)...(723): n = A,T,C or G
gatatgacatgggtgagaatgattacatcagagaacttcagcagtacaacagctagcccagaactgatttttttttttgtaaatttgagacttatgtaaacgtgatttcaaaccataattnnnnnnnnnnnnnnnactccagcaatttttgttgtatgattttgtttttttgtaaagtgtaattgtccttgtacaaaatgctcatatttaattatgaactgctttaaatcactatcaaagttacaagaaatgtttggcttattgtgtgatgcaacagatatnnnnnnnnnnnnnnnnnnnnnntgtttggacttggggttggaacaaggagagcagcagccatgtcagctagacgttcaaatgtgcagatgattatggaaaataatctcaaaatcttacaaagctgaacatccaaggagttattgaaaactatcttaaatgttcttggtaggggagttggcattgttgataaagccagtcccttcatttaactgtctttcaggatgttccttcgttgtttccatgagtattgcaggtaataatacagtgtattcataagaatctcaatcttggggctaaatgccttgtttctttgcacctcttttacaagtccttacatttaattactaattgataagcagcagcttcctacatatagtaggaaactgccacatttttactatcatgattggctgggcctgctgctgttcctagtaagatatt

SEQ ID NO: 13330 - DNA, 1284 bp, Macaca Fascicularis
  misc_feature (1)...(1284): n = A,T,C or G
caaacaaatatttgtaaaataataattaccatttaatgaacatctacaaatgtgctaggcactgtattatacacatttctgattttcacaactttgcaagtgggtatctccattttatagatgagaagctgaagctcctgatagaatgtacgctatttgaggacagtgatactctttttaatctctttagttccctatggtaccccaagtgcctataacagtgtgtgaaacaacatacattcagtgtacctctgctgaataagtgaatgaaataatgatgatgacatatatatatttgatcaacatttactggatgtcagctatacttaagcatagaggatgaaacaaaagctctgcttttttcaactttataacgaaaaggagaaagaaacatgaatacaactaaatgtaatataaaaatgaagggaatgctttgctagatatacaaactttgaaatggtatgagaaaccaaaaaaaaaaaaaagtggagaacattcttcgctgagagaaaagcataaagcctatgaatgaaagcatagaattatctcaccaacttaattctccacaaagtttcctaacaatctgagatcctctgtattcaaagcatactttttcctgtatacaattaatgattaattccatgtgctccttagccaaaattgttttacttcttttatttgagcagatttgtgtgatgccatgttgatatacttaagttgtcccgtggttaaatatattcttaaattcattcatccaatcattcatctatttactcggtcattgaacaaatttgccaagcattgtgccaagtaatgagtgtgcaattgtgagccagaaaagacaaagtccccgtcttctctgaatgtacaatcttagacatgtaagtgttatagtattgagtgataagtgtcactggagaaacaaaagatactaagggcatcggaggagcttctgaactgaatatggaccagaaagaaataaggnnnnnnnnnnnnnnnatgactgaagttaccacacatttattttagctccatgagggaagaaccatgtttttctcaacacacccaacccttaagtctctaagtcctatatttttactttgtaattaacttttaaatctctttttaaaaaaaaaagtcattcctagattcatatttatggtatgtgaaacagtatgatcatgaaagggtattagtagaaggtaataatgtaagtcagaattgataaattacagagataaaacattcagataaaattctgtagaaaactattatcatgaaatg

SEQ ID NO: 13331 - DNA, 858 bp, Macaca Fascicularis
  misc_feature (1)...(858): n = A,T,C or G
gtacttgtcacctcgaattgagcatgcacttggaggctcctcagctcttcatatcccagctttcccaggaggaggatgtctcattgattacgttcctcaagtatgccacctgctcaccaacaaggtgcagtatgtgattcaagggtatcacaaaagaagagagtatattgctgctttcctcnnnnnnnnnnnnnnnnnnnnnnnnnnnnnnnnnnnnnnnnnnnttacaaaactcactctgctgctgatgtggaaagatttttgttttcttgtacacnnnnnnnnnnnnnnnnntttccctcgagaccagccaactctcacatttcagtccgtctatcacttcaccaacagcggacagctttactcccaggcccaaaaaaattacccgtacagccccagatgggatggaaatgaaatggccaaaagagcaaaggcttatttcaaaacctttgtccctcagttccaggaggcagcgtttgccaatggaaagctctaggaaacaccagtcttgagaggtggccagccagactgcctgtccacatgcgtgtcagcacacacagccgcttcctggaagccgcctggcatgtcttcacggcagcgttttgctcacacagcagctttgcacaccccaggcagccccgactgctgaaatccaactggagctggctggtggtccctggatcctagagcccttcacttcgggttcctccctctttcttgcctctatttcttagttggaagaaataaactcacaaattatggtgcagtaattttccggggaaagtaaagcatcaggaatgcccacacctttcttccaaagcctttgtctctgagacctcttaagtttaagataaagcc

SEQ ID NO: 13332 - DNA, 744 bp, Macaca Fascicularis
  misc_feature (1)...(744): n = A,T,C or G
gctgatcacgcacgatgccatnnngccgcagctggcccagcccannnnnnnnnnnnnnnnnnnnnnnnnnnnnnncgacctcggtggggccctcagcctcttggccttgaacgggctgttcatcttgattcacaaacacaacctggagtaccccgacttctaccagaagctctacggcctcctggacccttccgtctttcacgtcaagtaccgggcccgtttcttccacctggcggatctcttcctgtcctcttcccacctccctgcctacctggtggccgccttcgccaagcgcctggcccgcctggccctgacggctccccccgaggccctgctcatggtcctgcctttcatctgtaacctgctgcgccggcaccccgcctgccgggtcctcgtgcaccgcccacacggccctgagctggacgccgacccctacgaccccggagagaaggacccagcccagagccgggccttggagagctccctgtgggagcttcaggccctccagcaccactaccnnnnnnnnnnnnnnnnnnnnnnnnnnnnnnnnnnnnnnnnnnnntctgtacccgaggtcagnnnnnnnnnnnnnctggannnnnnnnnnnnnnnnnnnnnnnnncgggacctgaagaagaaggggtccgannnnnnnnnnnnnnnnnnnnnnnnnnnnnnnnnnntgctgggacggccgggcgaactttgtgcccagcacttcacactcagctgacaccggcccac

SEQ ID NO: 13333 - DNA, 797 bp, Macaca Fascicularis
  misc_feature (1)...(797): n = A,T,C or G
tccccccttccnnncccctttccccacccccaccttgccacacaagctaatnnnnnnnnnnnnnnnnnnntctgtatttgtggggaaatgtgctgaaggacagtatgtatcccttgcttcatttttaggtcgtaggtttggaatgttttgtcccagttcttcaaacactcttaaatttttcctaagtaatgtaaaaatggaactgccaattttatttctcttgcaaaaatagtaaatacttggtgttacattattcccaggtttaatgaaagaacccaacttagtttttcagtgaatttgacacctgttttttaaacgatgaaatttttctttgagaactggcaaggatgcagtcagctgtttccagtagtttttagcctgattttggggtctatagagattgctttatcggatacttcaagtcattcttgcttgcacttcccctattgacacatgaaagctgtgttggtgttttattgtacatacttcagatgcacataggaatagaagtgtgttataaatctagctttctttatgatgtttctgataatatgagaattgaaaactttaccttctcttgtacatagtcagactatttgtattaaattttcatttcattctaagttcaaaagtttgaaaattattagttttgcaagatcaaacactaatgtgaccattttatgaaggttgaagtggatttatgcaggcagttctatatatagaaatacaattctttttaaatttttaggaccaatacaaaataacaaaaatgtaatggaatcagactgaactaaagt

SEQ ID NO: 13334 - DNA, 757 bp, Macaca Fascicularis
  misc_feature (1)...(757): n = A,T,C or G
acaaagnnnnnnnnactgtgagcnnngnnnnggggccnnnngagcagtccccccactccatggagccacagctcaggcagctgggcctgcccaccaccctcaagagaggtgtagtgactctgctatccgactttgaggtgtgcaaggagggcgatgtgctgaccccagagcaggctcgcgtcctgaagctttttgggtatgagatggctgaattcaaggtgaccatcaaatacatgtgggattcacagtcgggaagnnnnnnnnnnnnnnnnnnnnnnnnnnnnnagagcgcatccgagtccgcagaagagtcagactcagaagacgatgactgaaagggannnnnnnnnnnnnnnctcctggaaccttctgggtctcactggaccnnnnnnnnnnnnnnnnnnnnnnnnnnngagagcagctgtttatttgtctgtagacagggaatgtgatgggcactgacctcctataaagaannnnnnnnnnnnnnnnnnnnnnnnnnnnnnnnnnntaatcccagcactttcggaggccgagacaggtggatcacgaggtcaggagaccgnnnnnnnnnnnnnnnnnnnnnnnnnnnnnnnnnnnnnnnnnnnnnnnnnnnnnnnnnnnnnnnnnnnnnnnnnnnnnnnnnnnnnnnnnnnnnnnnnnnnnnnnnnnnnnnnnnnnnnnnnnnnnnnnnnnnnnnnnnnnnnnnnnnnnnnnnnnnnnnnnnnnnnnnnnnnnnnnnnctgcactccagcct

SEQ ID NO: 13335 - DNA, 750 bp, Macaca Fascicularis
  misc_feature (1)...(750): n = A,T,C or G
acaaccaatgtgcagactgattggcccggtcattggtttccgagagaggaggtctgcatgtgatttgctaattatcactagggccaaggtgggatttgtaaagctttacaataatcgttctggatggagtcctgggaggtccttggcagaactcagttaaatctttgaagaatatttgtagttatcttagaagatagcatggagggtgaggattccaaaaacattttgtttttaaaatatcccctgtaacacttggctcttggtgcctgtgggttagcaccaagttctccccagggcagaattcaatcagagcttcagtttgcatttggatgtgtgaattacagcaatcccatttcccaaacctaaaatctgttttcctcatcagactctgagtagccagttgctgtgtcgtaacttcatagctgcaggaggctcaggcgatctgtttcaggggagcaccctaggcagcctgcagggaataacatactggccgttctgacctgtcaccagcagatacacaggacatggatgaaattcccgtttcctctagtttcttcctgtagtactcctcttttagagcctaagtctctacaaaagctttgaatactgtgaaaatgttttacattccatttcatttgtgttgtttttttaactgcattttaccagatgttttgatgttatcgcttatgttaatagtaattcccgtacgtgttcattttattttcatgctttttcagnnnatgtatcaat

SEQ ID NO: 13336 - DNA, 736 bp, Macaca Fascicularis
  misc_feature (1)...(736): n = A,T,C or G
aacaagaagatgcactttctgtagnnnnnnnnnnggatttaaatcactaacttgtgaacttcaatttgaattgaacttaactatcggctttcttctagtaaaattgtatggtttatgttaaatacgtacatattgaccaatggcctctgaaaaagcacattttagattactgaaattgaaggaaagaaaatgcatcttcaaacattttttggaatctcaccacatgtactttgttagatttgtgtattgtagggtgtttgttttgtatttttgtattgtatatgaacttttttttaaatgtgacagttaaacacatctttaaaagcatagtcacagacaaaagaagcatacagtatacaaatttccttgaaaactcctacaatattatatttggaggcagcttcagattgttttattggtggtaactgcttgctgaggtcttttagttggtaataactccagagaagcagcctgtgtatattcctaacattttgttcactagcatttaagtttagaataagcccaagtaaaacgatggaaatgtatatagaactcttagttcttacatgatttaattatatcaagatacatgaatttaacttactttaatgtaggcaaactatccattttttgtccattttcctgtttgttaaaataacatacctctcctacgtattattttcttgacccaaatgaaatattaacctaaggtcaagctgggagagagaaatgactg

SEQ ID NO: 13337 - DNA, 973 bp, Macaca Fascicularis
  misc_feature (1)...(973): n = A,T,C or G
gcctgcagcagccagacgcagcnnngagcgctggcacgccctgaccagcgagctgccccccgcggctggggctctgtcctcagcctgagtggacagcagtgtcctggtacaggcctatcaggccgggtgcagtacccaaccttcgcacgagtgtgttgcacgtttacacggggtgggctgcccccaccctgcactaccttatttttgtgaatctctgtgacctgggtctgtctgctcctgaggggctgtggagttctatattcatatatgcaaacctcctgcctgactcgctagtccctgcaaatatgcaaagcccccctcctctgcacacccgggcagtgctcagagcccggccccaggcccccacgctcctcgctcctgcctctccacgctgccccgtccctctccccccacagggaggaggtcggattaggggaggttcagaggaggagaatgcctcagaaaaagagaaaaggacaaaaaacacacccagagccactcctttaatacagaaacttcattgcaaaaacctagccctgtacagctgcccttttttaaaggggtggccatcgcagggtctctgcctccccagcagggggcagatgctcccggccactcgtttaaataactgtcccctggagggggccagagtttgaaggcagggcccttgccaccctcctggggaacacccgtgcatgtttacgccttttctggttgtgtcagtggccggagcnnnnnnnnnnnnnnnnnnnnnnnacctccgaggaagctgggctcgtgnnnnnnnnnnnggggagggcgccgggcagggctgtggtgggcatgnnnnnnnnnnnnnnnnnnnnnnnnnnnnnnnnnnnnnnnnnnnnnnnnnnnnnnngggcatcgtccccgcnnnnnnnnnnnnnnnnnnnnnnnnnnnnnnnnnnnnnnnnnnncgtgggggggggcatcttggggggtgggagggggg

SEQ ID NO: 13338 - DNA, 741 bp, Macaca Fascicularis
  misc_feature (1)...(741): n = A,T,C or G
gctgggattgtttgtggaactggaatttggcctggcatattttgtcctgtccttgttctattggatgtacgtcgggacacgaggccctgaagagaagaaggagggagagaagagcgcctactctgtgttcaatccgggctgcgaagccatccagggcaccctgactgcagagcagttggagcgcgagttacagttgagacccctggcagggagataggacccagctgtgccatcatgcagctaacttctgatgtcttcctcaccactggctatggatttgatttcaggtgtataggactaagggcagcttgcaggttagctctgtgactgcatggttcttctacattctttccctgatcttttgctgccatttgatctttgaatttctctttagtgttggggaaactctctaaagtacattcactgtgggtccgatgcaatttataaaaattatgtactcaagaagggagacctgtttgtctcatttctcatctgtttgggggatgattttagagcactagaaaggcactgggaagattctcagcttaaaacatccagccatttgaagtaatgattaggtacatcagggctgcattgtaaatgttctctttaagtcttttaacatttatagcaatttttttttttcccagnaaagtttaggttgcaagttttgggtttcttgtttgtttttgttttgcttcctgctttaattctttcattttcagtcattactggtatgaa

SEQ ID NO: 13339 - DNA, 632 bp, Macaca Fascicularis
  misc_feature (1)...(632): n = A,T,C or G
agcctgcccacccgccttgtccttcaggactggagtcagcctgaggaagcccagcggcnnnnnnnnnnnnnnnnnnnnnnnnnatggcatggannnnnnnnnnnnnnnnnnnnnnnnnnnnnnnnnnnnnnnnnnnnnnnnnnnnnnnctggactaagtccggctcattcaagaacataacctaccaccttctccctccccacgccaaccccaggcctggagctgaaacagcccagggagagccccagggcctggccttcaccagctgcagggtctgcttttaattggggggggctgaccctgaacccccccaggtcggggaggggtcccaccactcaaagtgcctctgaagaaaccagctttttgcactaaagccaaaccgctgcccccttagccccaagggccctgggggcagccgcccccctgcctgccggcccgtggatttgtcaagggtgttatgggcccagctttgggggccagtcctgatgcactttgaggagtgttggggagaggactcccccactcgcacttaactcgatggctctcgggccctggggctgtttttaccatgtttttgaagctcaggtgtctcgcgtctgggctgcaccaggcgaagagagaaataaagatgt

SEQ ID NO: 13340 - DNA, 1400 bp, Macaca Fascicularis
  misc_feature (1)...(1400): n = A,T,C or G
gcagaaatattagcnaatacgtcagacaatgctggcttctgtatannngagggaaactgcctgggctcaggagttctgaatgtcagnnnnnnnnnnnnnnnngcacccatcattatgtctttcccacacttttaccaagcagatgagaggtttgtttctgccatagnnnnnnnnnnnnnnnnnnnnnnnnnnnnnnnnnnnnnnnnnnnnnttaatcctttgactggaataatcctaaaagcagccaagaggttccaaatcaacatttatgtcaaaaaattagatgactttgttgaaacgggagacattagaaccatggttttcccagtgatgtacctcaatgagagtgttctcattgataaagagacggcgagtcgactgaagtctgtgattaacactactttgattatcaccaacataccctacatcatcatggcactgggtgtgttcttcggtttggtttttacctggcttgcatgcaaaggacagggatccatggatgagggaacagcggatgaaagagcacccctcattcgaacctaaacattgcctttgcttggtgaagaaaccatgtgagctgtcctgnnnnnnnnnnnnnnnnnnnnnnnnnnnnnacctcctcgcaggcttgttgcctgttgaaagaagggaaaagacacggcgctggcaagtgataggaacattctggccagaggttaaagagcaggctgacatggctggccattaagctttataaaatcatgtgggctctgaaattgtttttttatgtgtctagcaagtatttaataaacccatgtatagtaattttgttgttgttgggtgctggtagctccagaattttgtgaccactgttgtgggtaaaatgtctctgcatcacttgttaatgctacttggtctaactttattcagtatgcttcattcaccgaactttgtgctcaaaatgcgtatataccattttatgttgtattccatcatttcacttgcaaaacagaagtaaataagagttcgggacccagggtaaaatggtagcttcatccagtatatcattcaaatgcatctgatttctaaaatattacatattacattttatgttgatcttcagttcataattcctnnnnnnnnnnnnnnnnttccaactacaataaaatactaggtagaatcaaataggaaaggggttgggtggggcagtacccatgagttgatagtgataagcttctaaggatttttaacttgtacttttgtgaacgaagagaatgcataaataatgtcggtgaggataagtacagatatttcatgtagagtagaattaaatgctagttatgatgcttgtggatagttaactgttatttttttagtcaaaatgatcgtgctgtgaaaagatgctcctgnnngtaatgagt

SEQ ID NO: 13341 - DNA, 763 bp, Macaca Fascicularis
  misc_feature (1)...(763): n = A,T,C or G
gacggtgtcagacgcctcctgngnnncagaactgctgtggtcacttttcgtccctttcacggtgtatcaagtaaggtggcttcgtcctgttcatcgccaactaggggaagcgaatgaggagtttnnnnnnnnnnnnnnnnnnnnngtggccaaggaattgggccagacagggacacggctcactccagctgacaaagcagaacacatgaagcgacaaagacaccccagattgcgcccccagtcagcccagtcttctttctctccctcccctggtacttctcctgannnnnnnnnnnnnnnnnnnnnnnnnnnagttaaggaagttttgccccatgtgccattgggtgtcatccagagagacctggccaagactggctgtgtagacttgactatcactaatctgcttgagggagccgtagctttcatgcctgaagacatcaccaagggaactcagtccctacccacagcctctgcccccaagttccccagctctggcccggtgacccctcagccaacagccctaacatttgccaagtcttcctgggcccggcaggagagcctgcaggagcgcaagcaagcactatatgaatacgcaagaaggagattcacagagagacgagcccaggaggctgactgagctcaaaggaacaggatggcacccagagccgcaggacggagactgggggcagccctcacccaactcacaacaggctggatgggtgggtggtaaaagggaaggatgaggctcccccaatatcacata

SEQ ID NO: 13342 - DNA, 762 bp, Macaca Fascicularis
  misc_feature (1)...(762): n = A,T,C or G
tttagaccagtacttaatattttatagacgaatatgttgttctatggatagcaatggtgatttcttcannngatatggtgatatactttagtgctttgtgcctgcaaatttcaagacaccttcatctaaatatattcaagactacatgtcatcaagcacctgaacaggttcacaagcatattgactgactaatagcccaaggaaaagagatgaagttaggggaatctatgagtgaaggaaatccccctgtgcaggaggctagtataccataaataaggttatatttgaatataaaacataaaccctgtagattttgttgtgtctatttcagttatgacacccccattgtgtgtattatcattttttatcacagatgttctcagaatagtctacatattaattagaaacaagactaaagaaagaaaggtcaatcctgagggcaacaaagtgaaccctgtaattctaagtagcagtttgtctctgagacgtatcagacacagggttttcactgccaaaggattacataaatatccagaacataaaggattttagccatcttgagggtgtttaccttgattgctaaaaactgaaagtgagctcaatactgcttaagtgcatggcttataatattgtaattactgagtcaagtgatgttctaagaaatgttttatactaatcatttttcaaaagaggcatgttaattagtatgtcataaaaaaaatacttgtttttagtatactagaattaaaagggctacaggaa

SEQ ID NO: 13343 - DNA, 759 bp, Macaca Fascicularis
  misc_feature (1)...(759): n = A,T,C or G
aggcaggagaatcacttgaacctgggaggtgttgcagtgagccaggatcacaccactgcactccagcctggcannnnnnnnnnnnncaaaaaaaaaaaaaaaagcgtcccaggagacagcagcctaagttttggagtaggaggtgtgtgcctgtgaaagctaaccaccaagacaaagcagcacagtgtgaatagaacaaacagtgggatcgagaattgcacagaagacaggtcagctgaggggcctacacacagaggcctgccttttgcctggcccaggcttacccccacctctgggcctcacctcctccaggaagccttcccagctacccaaagctcaggtggccttcttgcaggtccccgtagcaccctgagcctgtaccttgggtaacacttgctatgctgtcctgtgctagccgtttgcgtccgtctcgcggttagattgtgagctcccacgggcagagacccactgttgttcccctgtatgtccccagcccagtccaacaaatgtgactgggacatttattaaatgaaagaacaatnnnnnnnnnnnnnnnnnnnnnnnnnnnnnnnnnnnnnnnnnnnnnnnnnnnnnnnnnnnnnnnnnnnnnnnnnnnnnnnnnnnnnnngtgactctagtcagttatagtaaaatccactgtgtgtggaaggcagaagccagcagttgtatcccaagtgtcttttgtatttgtctttatccttnnnnnnnnnnnnnnnaatacctattactgtatgtgct

SEQ ID NO: 13344 - DNA, 751 bp, Macaca Fascicularis
  misc_feature (1)...(751): n = A,T,C or G
tcgnnnnnnnnnnnnnnnnnnnnnnnnnnnnnnnnnnnnnnnntctgcagaaagccagattcttaagcaccttctggaaaatcttttcaagatattctgcctagatggtgtgaagggagnnnnnnnnnnnnnnnnnnnntctggccccactatctatcagctcctttctgcttgtgaatcctttaaggagatcatcgtcactgactactcagaccagaacctgcaggagctggagaagtggctgaagaaagagccannnnnnnnngactggtccccagtggtgacctatgtgtgtgatcttgaagggaacagagtcaagggtccagagaaggaggagaagttgaggcaggcggtcaagcaggtgctgaagtgtgacgtgactcagagccagccgctgggggccgtccccttacccctggctgactgcctgcttagcacgctgtgtctggatgccgcctgcccagacctccccacctaccgcagggcactgaggaacctcggcagcctactgaagccagggggcttnnnnnnnnnnnnnnncgcactgaagagcagctactacatgattggcgagcagaagttctccagcctccccctgggccgggaggcagtagaggctgctgtgaaagaggctggctacacgatcgaatggtttgaggtgatctcacaaagttattcttccaccatggccaacaacgaaggacttttctccctggtggggaggaagctgagcagnnnncctgtgatgcct

SEQ ID NO: 13345 - DNA, 772 bp, Macaca Fascicularis
  misc_feature (1)...(772): n = A,T,C or G
catgcatggcctgtcgccacctggacagcgtgacctcaggggttgtccaccttnnctttatggtgaggcctatcggatggcaaagtccttgaaaccctagagctgtgatgtagaatatgtactgtccgtgaaaccacgttcgcagtagcaccgactgcagttgagacccattttgctctcccttacccacccgggtgctttttgcacaaagcctggagcctggcactcaagcccaccggtggcggctcctagtgcctggacatgcctggaagacccctcagccttctgtttgcagaacgttcatttcaggagcttctccttcccacatacatcttaacttgctcgacactgccacctgcagaagcctcgcgggctctagtcaccgtgtgtctagatgaagtttgaactggccagcatggacctgtcccaggtgagaggggagacacggtggactagaaggagtggttaaaagtggataatttctatcagcttaacttggcagagaaaatttgtaacaactctgagcacatgctgggtgaagtcacagctcaaggaaagataaagatgggcagaaggaggtgtgagtggcttctggggtgggacccagaggggaggctctgggacagtggctggggttcagtgccggggccctgaggaagaaatggagactgatctcaaaattctagaattccctgtacatctgttcatgtgcttgtgtccaggtgcgagttgtaaactgtctcgtgtttgcataaataaaaggcaccaagca

SEQ ID NO: 13346 - DNA, 784 bp, Macaca Fascicularis
  misc_feature (1)...(784): n = A,T,C or G
gctatgtctgagatgagcatctcgcatccggaagcccagcaacacctggcccggagtgggcacctgggtaccactgccaccttctctgttggctccactggcctcgtggtgtatgactaccagcggctcctgatcgcctacaagccagcccctggcacctggtgctacatcatgaagacagctccggagagcatccccagtctngaggcgctcactagaaaagtccagaacttccaggccaagcccgcagtgcctacctctaagctggaccaggtggaggggcgagatgcaggctcagcaccctccagaggggacctggccttcctgggcatggccgtgagcaccctgtgtggcgaggtgccgctctactacatctaggactcctcaagtgagcaggtgtgatcccagggtcgctgggagcgcttgggccacctgcccgggctgtggaggagcgctcgcgctgaccaggcgatggggcatccactgaagcagggtcatccagggagctcaggggaggggaggctcgcagaacggtacttcccactcccccgatcctctctgtccatcttcaacatgcctttgcttcacagggtcagtggaagccccagggggacaggaaacgccctgggcaaagggtcttttgcagcttcttgcagacgggcaagaagctgcttctgcccacaacgcagggacaggccccggagaaattggagtttgggtagaggatgggagcgggcagaggtggtgcccaggggccctagaactcctgccacaacagaataag

SEQ ID NO: 13347 - DNA, 761 bp, Macaca Fascicularis
  misc_feature (1)...(761): n = A,T,C or G
ggtcaacaatgntggaatatcccagcgttctttgtgcatggataccagcttggatgtctacagaaagctaatagagcttaactacttagggacggtgtccttgacaaaatgtgttctgcctcacatgatcgagaggaagcaaggaaagattgttactgtgaatagcatcctcggtatcatatctgcacctctttnnnnnnnnnnnnnnnnnnnnnnnnnnnctctccggggtttttttannngcctnnnaacagaacttgccgcatacccaggtataatagtttctaacatttgcccaggnnnnnnnnnnnnnnnnnnnnnnnnnnnnnnnnnagctggagaagtcacaaagactatagccaataatggagaccagtcccacaagatggcaaccagtcgttgtgtgnnnnnnnnnnnnnnnagcatgtncaatgatttgaaagaagtttggatctcacaacaacctttcttgttagtaacatatttgtggcaannnnnnnnnnnnnnnnnnnnnnnnnnnnnnnagcaagatggggaagaaaaggattgagaactttaagagtggtgtggatgcagactcttcttattttaaaatctttaagacaaaacgtgactgaaaagagctcctgtacttttcannnnnnnngagggagaaatggaaaacatgaaacagcaatcttcttatgcttctgaataatcaaagactaatttgtgattttactttttaatagatatgattttgttttcannnntgtaatgaa

SEQ ID NO: 13348 - DNA, 670 bp, Macaca Fascicularis
  misc_feature (1)...(670): n = A,T,C or G
ccccctaaaatttgtggttttttttttttttttaaagaaaataaaaacaaccaagcgcacccaatctcttaaggaatctttaagcagagaagggcataaaacagctttggggttgtcttttttggtgattcaaatgggtttcccacgctagggcggggcacagattggagtgggctctgtgacatggctctggactctaaagaccaaatttcactctgggcacactctgccagcaaagtggactcacttgtaaatacaaggaatttttttttttttttttgaagggaggacgggagctggggagannnnnnnnnnnnnnnnnnnnnnnnnnnntcactgacacaaaggaagtgccccctccccggcaccctctggccgcctaggctcagcggcgaccgccctccgcgaaaattgtttatgtttgatgtgaacttgtagctgtaaaacgctgtcaaaagttggactaaatgcctagtttttagtaatctgtacattttgctgtaaaaagaaaaaccactcccagtctccagcccttcaaaatttaaaaaaggcattgagcaaatctgtgtatattatttggcacttatggtatttgcggcgtcagtctttttctgttgtaacttatgtagatatttggcttaaaaatagttcctaagaagcttctaataaa

SEQ ID NO: 13349 - DNA, 282 bp, Macaca Fascicularis
agagacttggtgcgggtagggaaaatgcttgggggtccttcacttggttagggagatagtgaagcccactgtggtactgatgacttctgtattctttcctcctgctaacccagggacggtcctaagaggaaggtgacttctctgtgtttgtcttaagaagcactgggggatttctgacttgaggtccatttttccagccagccagtgccttctttgtaatattaagtgccttgagctggaatggggaagggggacaagggtcagtgtatcgggtgggggcag

SEQ ID NO: 13350 - DNA, 785 bp, Macaca Fascicularis
  misc_feature (1)...(785): n = A,T,C or G
aagaaaaaatantnataatatatannngaangaaagaggacagtaggccataaaatgttagcaatgttatgctatgtctatgtagataagcatgggccattaaaaatagcaaactggaaacagttcatgtgtggggggcaagattggaagtaattttaatgtatctaagaagtgatttcctttattgttgtactcatgtacaaagactaaagatcaggacaaatccagaaaataaaaacaaaacagtatttattaggctacttcctgtcgtagtgaaattaaacactaaaagtaatgtaatctcagcnnnnnnnnnnnnnnnnnnnnnnnnnnnnnnnnnnnnnnnnnnnnnnnnnnnnnnnnnnnnnnnnnnnnnnnnnnnnnnnnnnnagcctgggcaacacagggagaccctgtttctattttaaaaaaaaagtaatgtaatttcaatctttttcttgatatatgacttgagaatgatattgtaaaaggaattcttctcttcaataaaatgggttttaacataactttaaattcagttaaatctacaatattgaacacctataggtgacttagggatggggactttttcacgtcattaagagtgtttgtttaaggtgatctcactgatggtagttctcagccatctcaaaaactgcaagctaatcagttagacattctttaatgaccccaattttttcactttaattgctaccatgttttctgtttttactgatttttgctaaagcatgtaagagtgaatttattatagcagtaatcttgtg

SEQ ID NO: 13351 - DNA, 729 bp, Macaca Fascicularis
  misc_feature (1)...(729): n = A,T,C or G
cagggnnctgtggcccagcctggctatggttcagtgagaagcggcaaccagannnnagggtgcactaaccccccaccatctggctcaggcggaggctcaagcaactctgggggaggcnnnnnnnnnnnnnnnnnnnnnnnnnnnnnnnncagcaacagtgacaacaacagcggcagcagcagtggcaacagcggtggcaacggtggtggcagcnnnnnnnnnnnnnnnnnnnnnnnnagcaacaatggtggcagcagcaacaacaatggtggcagtagaggtgacagcggcagtgagtcctcctggggatccagtaccggctcctcctccggcaaccacggtgggagcggcggaggaaacggacataaacccgggtgtgaaaatccagggaatgaagcccgcgggaccgnnnnnnnnnnnnnnnnngactccagaggagagagagtttccagcaacacaagggaagtaagcaaagagggcaatcacctccctggaggctctggagacaatgatccgaactctgagacatctcctgggatgtttaactttgacactttctggaagaattttaaatccaagctgggtttcattaactgggatgccataagcaaggaccagaggagctctcgcatcccgtgacctccagacaaggagccaccagatggatgggagccccctactcccttcttaaaacaccactctctctcatcactaatctcagcccttgcc

SEQ ID NO: 13352 - DNA, 752 bp, Macaca Fascicularis
  misc_feature (1)...(752): n = A,T,C or G
gtccgcccagggcattacactgacggacaaccaaaggaagctattctttcgccnnnnnnnnnnattgatacatcatcaccttctccagcactgaccctcaagaccggagatggaccaacccagacgggaccacctccaagatctttggtttcgtggccaagaagccgggaagcnnnnnnnnnnatgtgtgtcacctcnnnnnnnnnnnnnnnnnnnnnnnnnnnnnnnnnnncattgnnnnnnnnnnnnnnnnnnttctactgggccagagaaaatgaaggaaggccacaagctgagagcccacatcaacactgcacccctcccagcaccccacagccctcacttcccctggcctggacccaggagacccaagagaaagcaccctcccttaggaatgaggagtgggcatcaggcctgggacactgctctccttccccacccccagctggctaagttaagtggatgggcccatgagatgaccttgcatgtgagcagatggcagagatgggtgtgtgaggggtgaggaggcatcagcagttgagccccaaaggagatcaggcagccccaccnnnnnnnnnnnnnnnnnnnnnnnnnnnnnnnnnnnnnnnnnnnnnnnnnnacctgcaggtcccagcatggcagggatgggagaggggtggggagcaagtcactgcctcctctgagcagagattcagagtaggatcacatgaataggggaaaaaaagagagtctattttgtctaataataaaga

SEQ ID NO: 13353 - DNA, 707 bp, Macaca Fascicularis
  misc_feature (1)...(707): n = A,T,C or G
accaccgcagcntgcgcacggtgcagctgtacggccccaccaacttcgcccccgtggtcacccacgtggccaggaatgcagcggctgtgcaggacggctcccagtactcggtgctgctcatcatcacagacggggtcatctcggacatggcgcagaccaaggaggccattgtcaatgctgccaagctccccatgtccatcattatcgtcggcgtgggccaggcagagttcgacgccatggtggagctggatggtgacgacgtgcggatctcctcccgggggaagctggctgaacgcgacattgtccaggtgaagcccagactttgcctgccccacgggaaattcaagagtccctctagccaggcggacctcacacccactttgggggcttccctggggaagggcctgggagggaggcaccaagagccccaaagtgccccagtcgtcaccgaagggagtaggagtcactcctcagccatgctgtgctctgggctgggcccctctctgtcacacctgggacacactcctaacattgtgagtgcccagccagaggccagaaccctctgccagcccttcctcagcccccaggcctctgtggtcagcctcgttctgtttttttctgccccttgaaggccgaggcagtgtctttagcgttgctgcagccttctccaagaatgggcattgcttggttaactgaatcaatgtaag

SEQ ID NO: 13354 - DNA, 723 bp, Macaca Fascicularis
  misc_feature (1)...(723): n = A,T,C or G
ttgttattgggggtgtggcccagggccccagtcaagccgtggaggcactgtgtctgcgtgatggggtctgaagnnnnnnnnnnnnnnnnnnactggagcannnnnnnnnnnnnnnnnnnnnnnnnnatggcnnnttttgctgctgaggacactcactgtggctctgtgggatgagagaggcacaggggtgagcacttgagacactgccttggggccttgggttaggggagcctttgcctttagtgcaggacacacatatgcttacacctacctttatcaccattctttcatgaatcatgcctagctccatccttgccctgggacctactaggccttccatccaactgggaaatggggagaaggaaagctggcctcatgttcttcaggatcagttccnnnnnnnnnnnnnnnnggcccaccccagttgccattcctgaaaaatnnnnnnnnnnnnnnngcctttagggtccctgtagacccaggagagttgagagggtgggggacacagagagaatagagaggatgtgggacctgccagagggccagagcgcaggagttcaagcagagnnnnnnnnnnnntggnnnnnnnnnnnnnnnnnnnnnnnnnccttggacaagtcacttcacctctctgtgcctcagcatcctcatctataaannnnnnnnnnnnnnnnnttcctaccctacctacctcacagggctgttgtgaggacccagggagtt

SEQ ID NO: 13355 - DNA, 1359 bp, Macaca Fascicularis
  misc_feature (1)...(1359): n = A,T,C or G
acccaaatgttgataaaaatggtgatgtgtgcattnctannnttcatgagcctggggaagataagtatggttatgannnnnnnnnnnnnnnnnnnnnnnnnnnnnnnnnnnnnnnnnccatcatgattagtgtcatttctatgctggcagaccctaatggagactcacctgctaatgttgatgctgcgaaagaatggagggaagatagaaatggagaatttaaaagaaaagttgcccgctgtgtaagaaaaagccaagagactgcttttgagtgacatttatttagcagctagtaacttcacttattnnnnnnnnnnnnnnnnnnnnnnntggcactgtttttcctgcactctacccacctattgctggacttctgtnnnnnnnnnnnnnnnnnnnnnnnnnnnnnnnnnnnnnnntaaaacatgccagttatcaatgctgacaagagcctaacaagtgccaacttacagatgattacgtatttggaattctaatgaactgttttaaccttcaggaagaattgtaaagacctgtacatagcacaacatgatccggataatatatatactgttcatgtacatccacaaatacaccttgtaccaaataatgctttcttgtagtagaataagaatcgtgtaaattctaaaagattttagcaggttttctttcctattcattgtttcttatcagtttaaaaggattcctttaagcatgtcagatgaaaagcaattaggattaaaagtttccatttaatttcccttaaaccattgaggcttcattaaactcttttcacttactaaacttttgtatcttctttgttttgacacactcccctttgcttttatctcttatctgccagaatgttctcaaatgatttagttccaatactgaaatacttaatgagcaattacttgatttttaatgatgacttcgaaggagtcatcactaggtgctttgtcctttttctattctagttgcacccacctcttggattggatatagcaataacatttattggctgttgtgagctcttgatcccagtcattaccccccgagaactaaaaatagatggttcttaattcaacttacagaaaatttcccccaaacaatagcaaatctgacttttcccccttcagttgcccggtagtaaggttggataaacgaagcatgcacagctacaggctttctacctaacttctagggtttgctattacaaatactatttactctcatacccttctccttagtccttcatatttctttgcctctattcttctatactgcaagatttttctcaccttattgtacaaataaattttttttttttatattttttttttaatttgattttggaattct

SEQ ID NO: 13356 - DNA, 741 bp, Macaca Fascicularis
  misc_feature (1)...(741): n = A,T,C or G
tcccaacaatgtgtgtatatnnnnnnnnnnnnnnnnncgaggctggaactagtttatctgaacacctcagctgctgtaagcttctcctctctcaccctgtaaactgacaagcatgaggaaaaaaggagcacatccaagtctctgcctcttttacatgtacttgactgtgcaaggcaagtagttttacagccatttctgttcacacttttcaccccaggatttggggatctagctgagacatttctacctcgaacaagtcacatgtannnnnnnnnnnnnnnnnattcctgcagggctggtgacagacataacagctctggttttatatcttgggtgtctctaaggccaataagaataacattatctacccagagagtttaaaagaaaagtaggagtccgaaggaagggtaaacaagaatggagctgtgttcacactgaatttggggtcaatctatttcccccaccctctctcctccccaacccttcaggaatcctcctttagtttattaattttatacagaagaaactgccttagaaacaaaggattcgataatttgcttatttattctttgttaacatgagagtcccgtnnnnnnnnnnnnnnnnnnnnnnnnnnnnnnnnnnnnnnnnnnnnnnnnnnnnnnnnnngtagcttttgaactgatttaaaaaaattgctgannnnnnnnaaagtattaatgtgcttgataccatgactgaaataccatgatcttgttgtca

SEQ ID NO: 13357 - DNA, 749 bp, Macaca Fascicularis
  misc_feature (1)...(749): n = A,T,C or G
aaggctgttttattctgggcccaagcccccaattttctgggctctgtgcagccctcttccctccttcgtcagtcacttaccatgcaaaccacaggctctaagagtttgtccccagggacatccatccaagtcatctccatggctcctgggtcccctggtgaacatggggttaggaggtcatcgatcatcacgctggggttggtgcgggaggggccacagacctgaaaccaaatggatctgactggctggagcagctgcccctcagtgtcaatgagaggggctggacgacccctccggtctctaaggaggtcccaaagagaatgctctgggcccctagcatctgaggaagatgggctccttcagaaattgggctgggtggtccaagcaactcatgatatgtgtgcgattccagcaatctgtagccccagtgccttgatgtcttcctcattaacactgtcacgtctcaccacgaacacagtgacattaaaagtgtggtatggtttagctgtgctgccacccacatctcaacttgaactgtatctcccannnnnnnnnnnnnnngtgggagggacccagggggannnnnnnnnnnnnnnngggctggtctttcctgtgctattctagtgatagtgaataagtctcatgagatctgatgggtttatcaggggtttccacttttgctgcttcattttctcttgccaccaccatggttctgaggcttccccagccatgggaactgtaagtccaat

SEQ ID NO: 13358 - DNA, 687 bp, Macaca Fascicularis
  misc_feature (1)...(687): n = A,T,C or G
ttccccccaacnnnnnnnnnnnagcagaattccttccccccaccccagggatggagaggcactgtgtatctccctccagactcgaagtcatcctgcaagatggcgagaaccaagcaagctcggatcccagggtgtgggagtggggggcctgttcccggtctgacctccttggcactggannnnnnnnnnnnnnnnnnnnnnnnnnnnnnnatatcaggggccaaggtacctttacaggagcacctagagcgagggcctctggcaaaaacaaaacaaccaacacacctctccacagggccagctccttagggataagtagaagacggaaattgcagttccaagagggattgtgcccaaatgatttatggggatacctggaagggagcttggggtgggggctgtctgtgacacttaagcagtctgggtggttgtctatttgtctgtcttcagtcttgaagcagggcttcccaatgcccttttcctccctgcctgccttcccccattatttcccacaggccagcataattttgtttttcctaatttatagtcactgttctagacagaccaaagagaaggaacagtggtggagtctaggctgctgatcagtaagctttacctagcacctgagcacctttctcccctcccccctttcctcacccttttctagatgtaagacagaaggtaaat

SEQ ID NO: 13359 - DNA, 767 bp, Macaca Fascicularis
  misc_feature (1)...(767): n = A,T,C or G
ggggaagagcnnnngcatccatgatgaagacacgtgggtcnnnnnnnnnnnnnnntttgacttgagactagtaggaggagacaagctctgctctgggcgactggaggtgctgcacaagggcgtatggggctctgtctgtgatgataattggggagaaaaggaggaccaggtggtatgcaagcnnnnnnnnnnnnnnnnnnncctctccccgtccttcaaagaccggaaaagctatggccctggggttggccgcatctggctggataatgttcgttgcttaggagaggagcagtccctgnnnnnnnnnnnnnnnnnnnnnnggggannnnnnnnnnnnnnnnnnnnnnnnnnnnnnnnnnnnntctgcnnnnnnnnnnnnnnnngtgttcttnnnnnnnnnnnnnnnnnnnnnnnnnnnnnnnnnnctctgcttgttctcctgagccctgattatccttgtactcattctggggctcaggcttgagccactactccctcatcccctcaggannnnnnnnnnnnngcttatgccttgttctcagggacaagcagcccccattgctgcctgtagatgtgagctattgagttccctcttgctggggaagatgagcttccacgtgtcctgtgctcacttctgaccccttgacgttggttctggcctttcatgcctcttcccaagctgcctggaatcctcagacctgtcactttgaccgaatgtgcagaccattactaaggcaagatctatgtctgcaaacaacattaaagaa

SEQ ID NO: 13360 - DNA, 779 bp, Macaca Fascicularis
  misc_feature (1)...(779): n = A,T,C or G
gcagacaatggnnnngagaccatgcgtatgtcccgaggcggctgctctgnnnnnnngcggtgtggaaagggaaccannnacgagggcggtgtccgagagcctgccttggccttctggccaggtcacatcgctcctggagtgacccatgannnnnnnnnntccctggacctgctgcccaccctggcagccctggctggggccccactgcccaatgtcaccttggatggcttnnnnnnnnnnnnnnnnnnnnnnnnnnnnnnnnngagccctcggcagtctctcttcttctacccgtccgacccagacgaggtccgtggggtttttgctgtgcggagcggaaagtacaaggctcacttcttcacccagnnnnnnnnnnnnnnnnnnnnnnnnnnagaccctgcctgccacgcctccagctctctgactgctcatgagcccccgctgctctacgacctttctgaggaccctggtgagaactacaacctgctggggggtgtggccgggaccaccccagaggtgctacaagccctgaaacnnnnnnnnnnnnnnnnnnnnnnnnnnnnnnnngctgtgaccttcggccccagccagatggcccggggcgaggaccccgccctgcagatctgctgccgtcctggctgtaccccgcacccagcnnnnnnnnnnnnnnnnnnnnnnnnnnnnnnnnggcccctcggcctgcctggccatgtgagnnnnnnnnnnnnngagcctgtgggggaggcnnnnggtgtctggaggaagtttgtacctgataa

SEQ ID NO: 13361 - DNA, 864 bp, Macaca Fascicularis
  misc_feature (1)...(864): n = A,T,C or G
cgcggtgcagggttgtaannnngctttatcttttaggattattcctaaatgcatcttctttataaacttgacttgctatctcagcaagataaattatattaaaaaaaaaataagaatcctgcagtgtttaaggaactctttttttgtaaatcatagacacctcaattagcaagaactgaggggagggcacttattactgctttttccattgtttaatgttttgtgatttttagctaaagagagggaacctcatctaagtaacatttgcacatgatacagcaaaaggagttcattgcaatactgtctttggatattgtttcagtactgggtgtttaaaggacaaatggtngctagaattcaggggtaaatgtacatgttcagaaaacgtcagaacatttggggttttaaacttgatttgttgctccctaccagcctagacaccgataactcttgtgttcaccaggacccagacccttggcaagggataggcttgttggtgacattgtgaatttcaaatttgttttatccactctttttgctatttatttaaatggtcgatcaacttcccacaaactgaggaatgaattccatgagcctgttctgaaannnnnnnnnnnnnnnnnncacgtgctcgtcctttaatggagttcaccagcacacttgttaaccagtcccgtttgctttcgtctttttttgtgcgtaataaagtcaactgaccaagtgaccatgaagaggggctgtctggggctcctgttttttagctgctgttcttcagctccgaccatgttgctgtgtgattatnnnaattggttttaattgaggcagaaactgaagctctaccnnnnnnnnnttaaaaacaagaca

SEQ ID NO: 13362 - DNA, 668 bp, Macaca Fascicularis
  misc_feature (1)...(668): n = A,T,C or G
actatttcatgcctcttgtatctccttgctcaagnnncaggcaccttctcttactcttgaatttcacataacttttcttgaatattgtagtacaaacatgctcccatctttactagtaaaaccaacttagtttttataccaaatattatctatttggtgagtatctttaaataattattagttgttttgaattacaataatttattctaatacatatctcataatcatgttatcccttaccttctgtcctatgtactcatatcctttcccatccatctgttcactcatctttttttctaaaaagtttgtaattatagtatgtagaatgaaagctgggacaagggaaacaatgagatggcaaagtccacagactggattatggacagaacttggaaatattgagaataatttcttaaagccacttcatataggannnnnnnnnnnnnnnncacattatgaagcagaaattaaaaatagccaagaggcccagaaatctaaagatctttgttctataactgtaggtggagaagagatccctaatatgcctcctgaaatgcagcttaaggtcctacattcagctcttttcacatttgatttgattgaaagtgttctagctcgagtggaagaactcattgaaataaaaacaaagtctacctctgaagaaaata

SEQ ID NO: 13363 - DNA, 893 bp, Macaca Fascicularis
  misc_feature (1)...(893): n = A,T,C or G
tgcattttcctccaaaaggcagacccaagagagctgatacttttgacctccaaagaattggatttgcagctgaacaactagcaaagtggattgctgacagaacggatgttcattgtatagtctttgctatgacnnnnnnnnnnnnntggaaccatatccgtggacctccatatgctcataagaacccacacaatggacaagtgagctacattcatgggagcannnnnnnnnnnnnnnnnnnnnnnnnnnnnnnnnnnnnnntactgaatgccgctannnnnnnnnnnnnnnnnnnnctaaatnnnnnnnnnnnnnnnaaaggagatgttggaaaaagacggataatttgcctagtgggattgggcctggtggtcttcttcttcagttttctactttcaatatttcgttccaagtaccacggctatccttatagtgatctggactttgagtgagaagatgtgatttggaccatggcacttaaaaactctataacctcagctttttaattaaatgaagccaagtgggatttgcataaagtgaatgtttaccatgaagataaactgttcctgactttatactattttgaattcattcatttgattgtgatcagctagcttattcttgtgtactttttttaaactgtgggttttcctagtaaatttaatttatagaaatcaatggtagcatttagtgttctacaaaggaaatatcaaagtgtttttcaagcctattatattcagtgtgtgccacaggattgaaataaatgacaatgtaattatgaattcatgttttagaactgtttactcattagtaaaggactgcaatgttagtaaggaaaacctatggcatgtatgttaaagattcttagtattgtacagggataaagcaaatgc

SEQ ID NO: 13364 - DNA, 776 bp, Macaca Fascicularis
  misc_feature (1)...(776): n = A,T,C or G
agagatgaaaagggnccactgaaaagtgaatttgatagctcagcatttaagcatgattacatattcagatagctcttttgcttttctataaatatatgcattgtgtgtgtagtaatagatgtaagtttacactttgaaaggaaatcttgtttcaatgtttattataaaagccttgctaatttagtagtgatgctttccttggttgtacaggtgtacatttgtaaaccttcatgctgtaaatggaatttgttttatctctttgggatacatttgcattttagtgtacatttacgtccctgccctctttgacctggcaatatagtgttgtataatgtaaatttatttctccaaatcgagagtgattttttaaaaattttttatctttatatggtttcagaagtatgaaccagctttctttttattattgtgagatcattttgttttataacatagttgttgactgttaatatggacatgctagaatttggatcactttcaattgaagtcagggtattgtgcataatagaaagtattggactgagatatttggttaccatggaggccaatgcttttttcatcttattaaatgtgatgtgacttttttctttgtacagaagagtactgtatttttgaatagcctactcccaagtaagagcaaatctgtatgataacatttttttctctggacataagacataacagtaacacgatgtacatttacaagcggccttatgtacatttcccaacaatcttttaaggcaaaattgtgaccatat

SEQ ID NO: 13365 - DNA, 764 bp, Macaca Fascicularis
acagagagaggagatacttccaaaggatcagggttcttcaaccttggcacgttgacattttgggtggaataattctggggagtagtcttgtgcattgtaggatgtttagtagcattcttagtctctaaacaatatatgctgtttcctcatctccctcctcagtgtaacaaccaaaaatgtctccagatgttgcctgggcagcaaactcaccccgggttgaggctctagtctggtccaaggggtggagcagcaactccaggctagaatcggaatgtacccaagcttaaatcctgtgtcaatttataggccgcagggcctaccccaatcatatgtttagcatttgaggatcaagtcagctctacccaggactggtgggttcagtgctacccattcaggagagcagacaggttgggagtaggggtctttgagtgaggtagaacatgttggactacaatcttaaaatcattcccatccatttctttatatagctgggtctgtaatttaaaggagaagagatggcttaagttttgtgtgaatgatacggctgcacacaacatttagcagtgttgacaggagaaagacctgtcatgcttttttcattctcctgttttgtctaatgttgcccagctcctggagtcagggaatttgcgtaagtagcactttgcaggtagacaaaaagtcctcaggttcctcaactgtaaaaatgaggattaaatgagattaaatgtgtagagcagtgcctggcacatagtaaatgtcaataa

SEQ ID NO: 13366 - DNA, 704 bp, Macaca Fascicularis
  misc_feature (1)...(704): n = A,T,C or G
agtaaggcaaaatagccccaaaacaagactgacaaaaatctgaaaaactaatgaggattattaagctaaaacctggaaaatacaagccttaaaattgactgctgggcnnnnnnnnnnnnnnnnnnnnnnnnnnnnnnnnnnnnnnnnnnnnnnnnnnnnnnnnnnnnnnnnnnnnnnnnnnnnnnnnnnnnnnnnnnnnnnnnnnnnnnnnnnnnnnnnnnnnnnnnnnnnnnnnnnnnnnnnnnnnnnnnnnncaggcacctgtagtcccagctacttgggaggctgaggcaggagaatcacttgaacctgggaggtagaggttgcagtgaaccaaggtcatgccactgcactccaccctgggtgactgagactccatctcaaaaaaaaaaaaaaaattggttgctgtgcctcattacaaatgcatatggtgtttgagtgctgctgtttgaaattatttttctttttgggccttcaaaaatccaagaaaagttgatgattgacttgaagattacagaatttaagggtttttggcatgtgtgttttctattgataactggttatacaatgtcgaagtaatactttcataatagaattgacatgctccaggatagtttgacaaaggtaaattataaagtgaaatctctcgtttcgttatcttccattctaacctcagagatctgtttctctgaagaaggaccatc

SEQ ID NO: 13367 - DNA, 896 bp, Macaca Fascicularis
  misc_feature (1)...(896): n = A,T,C or G
agtgctgatgcagacnnnnncagggagannnnnnnnnnnnnnnnggtagagnnnnnnnnnnncgaggtgaataatgctacagcacgtgtaatgaccaataagaannnnnnnnnnnnnnnnnnnaaatgttggaaattaagcccagtagttggagctgtatatggtccggagttatatgcagcatccagctttcaagcagatgtgtccctaggcaatgatgcagcagtgcccctgtcaggaagaggnnnnnnnnnnnnnnncattcctttaaacagtctccctttagttcctggcttcccttaccctactgcagccaccacggcagccgctttcagaggagcccatttgaggggcagagggcggacagtatatggtgcagtccgagcggtacctccaacagccatccccgcctatccaggtgtggtttaccaggacggattttacggtgctgacctctatatatcaaacagggtggatatgcagcctacagatatgcacagcctnnnnnnnnnnnnnnngccaccgctgctgcagccgctgcagccgcttannnnnnnnnnnnnnnnnnnnnnnnnnnnnnnnnnnnnnnnnnnnnnnnnnnnnnnnnnnnnnnnnatggagttggcgctgtggcgagtttataccgaggtggctacagccgatttgccccctactgaagtgacgtgagacccctgcaaatgggacagccccccagttcatgaggcctggctattgcaatatttactagtagaggaactctatagcaagatgaagaggaaaaacaaacaaacaaaaaaaaaaaacacaaaaaaagaaagaatacttttttatacctcactatgttctttgaatatgtattttttcnnnttaaatttctgcctttaattcttttgttc

SEQ ID NO: 13368 - DNA, 790 bp, Macaca Fascicularis
  misc_feature (1)...(790): n = A,T,C or G
aggacacagctgtacaggcaacattnnnnncagcttcgaggnnnnnntcaccatgacagnnnnncggatgctatgacccaacccatctgtggagagtggagtgcaccagggacctttcctggcttcttagagtgagagaagtacgtggacatctcttcttttcctgtccctttagaagaacattctcccttgcttgatgcaacactgttccaaaagagggttgagagtcctgcatcatagccaccaaatagtgaggaccggggctaaggccacacagataggggcctgatggaggagaggatggaagttgaatgtcctgatggccatgagcagttgagtggcacagcctggcaccgggagcaggttcttgtaatggagttagtgtccagtcagccgagctccaccctgatgccagtggtgagtgttaattggcccattatcgttactacctgtgttccctcaccaggccatcctgtcacacgagcccattttctccaaggtggaatctgaccaagcatgagagagatctgcccatgggaccagtggcttagattccgccacacccataaatccttgtgtgttaacttctaactgcctggggctggccctgctcagacaaatctgctccctgggcccctctggccaggctctgcctccgcggctgggacccctcacttgcctgccatgccctgctcggcttcagtctccaggggacagtgggcacctctctctgccaatactttttttaatttgcattttttttcatttggggccaaaagtccaggaaatg

SEQ ID NO: 13369 - DNA, 674 bp, Macaca Fascicularis
  misc_feature (1)...(674): n = A,T,C or G
agtatttatagcannnnnnnnnnnnnnnncannnnncatctcaccctcagaccccctcgccttccccacctccccaccgagaactccagannnnnnnnnnnnnnnnnnnnnnnnnnnnnnnnnnnnnnnnnnnnnnnnnnnnnnnnnnnnnnnnnnnnnnnnnnnatcagtccaaatgagggttccgagaagcaaagtacccaactttggcttcggagtatttgactttggggcaaagggctggctcggagtctagactcttctgtaagactcacagaacaaaagcaaggaattgacgacttgggggaggcctggtgatgaggaggggacgggtttgtcttgtcttctttttaatttatggactagtctcattactccggaattatgctcttgtacctgtgtggctgggtttcttagtcattggtttggttttgttttttgaactggcatgtggagtggttcacagttctaatgtaagcactctcttctccaagttgtgctttgtggggacaatcattctttgaacattagagagggaggcagtttgagctgctgaaaagactattgcttagttttgtttttaaagaccctacttgacgtcatgtggacagtgcacgtgccttacgctgcgtcttgttttctaggaagagggggatgctgggaaggaatgggtg

SEQ ID NO: 13370 - DNA, 690 bp, Macaca Fascicularis
  misc_feature (1)...(690): n = A,T,C or G
tggggctgtgactcacccctgcctccagggccgggccggggcgggggcccccgggacctctcaaggcccaaggtgggccccaggatctctgggcagagccgactgctcatggcggacgtnnnnnnnnnnnnnnntgtgtgtctccagcccccgcgtcccctttcccgggctcccctgctgcatggcggatgcactccttcctggcccagtcacatcgcctccttgagccttagtnnnnggggtaactcctcccaccccacctacctcacagggttgttgtgagggtgcacagaggagcaaggtccctgaaggccctcgggcagtatataggggccgcccaccttcagctgccctgggatgggaaggacccagcccaacccctgggcgtaacactgtgtttgcaaatggagattcaggtattggggatgcaggttgtggggagctggcctgtcagagtaggggtaggtggcttggccttcaccttggtgatcccatccccagccatttgcattgctggcccagcgcctggcctggggggcggggagaggcagcagaaggggctgggcaggggcggtggaggactcaggaactgcccggggagagtgggtgtggcggctgagccagcggccgtcctgtgtttgaattcctggaatgggtccttgcttctcggctatgtcggaccccaccgtt

SEQ ID NO: 13371 - DNA, 753 bp, Macaca Fascicularis
  misc_feature (1)...(753): n = A,T,C or G
gaggagaaatcgctgagacaagaaggaaaattagagaagctccagaccaaggcaggtgaannnnnnnnnnnnnnnctaaaaagctgtcgcctggaggtaggaatgaagaacaatgtcaaatgggagctgaaccctgaaatagttgcccgccacttcttcaagaatcttggtgttgtggttgccccacatacattaaagttaccagaagagcctatcacacggtggggcgagtattggtgtgaggtgacggtaaatgggcttgatactataagagtgcctatgtctgtggtgaactttgagaagcccaagaccaaaaggtataagtattggttagctcagcaagctgccaagagcatgggccccaccagcccccagatctaaatctctccctccaagacagcaaagcagaatcaggagcagtggagcagaaatgggcaagcaccttgatctcactcccagttctgaccaaatgcagaattttagagaacatccgaagacatcagactgcactgcgtatacatgttgaattcttcattttcgccatctttaactatcgtcactggggcagtcttgttccagaagtaccaggctgtagatttgataagccagatacaatagaccgaaactatccaaaannntgtttannntgttcctccattggagtttattgggacaaacagaagaaccagccattgtctccagtacttgccacattctcatcatccaaactgaacatttgtatcccaagcagac

SEQ ID NO: 13372 - DNA, 747 bp, Macaca Fascicularis
  misc_feature (1)...(747): n = A,T,C or G
aatagcatttattacatnnnnnnnnnnnnnnnnnnnnnnnnnnnnnnnnnnnnnncaattaggaagacatagttccctnctcttttgggtaatgaagggagcagtctaaagaattgtatgcatgtttgcatggggttattgagacattggatgtgaaatacttaggaagacatgcatggagaatgcttaacaaatgctcttctcctttttctgtcttcccttaggaagaatgttctctctcttctgattaggaaggaattcccttttgagtagatgctggaaggttgaagtttttttgttagtttgttcgtttggtttgggtttttttttttttttatgagagtcttgatctgtcgctcaggctggagtgcaatggnnnnctatcttggctcactgcaacttaggtggaggtctttttaaataacctcatgttactnnnnnnnnnnnnnnnncaggaaaagtccaggctaactgagctaggtgaaggcttgtgcatcaccnnnnnngagttccttgctgtcacagatgataggttcatgtacagaacattaatgtttggtaaggaaagcattttttttgttattgttgttacaattgtcattactttactttttttcccccaaagaggcagatatagactgcagaaacttcagtctcatatataaatattcatgtcattttagaggattatatggttgtctccagagaaattaacttacattatcaaaaaattctttgtctaatgta

SEQ ID NO: 13373 - DNA, 702 bp, Macaca Fascicularis
  misc_feature (1)...(702): n = A,T,C or G
gtcggggagcgagctcaggcagcgggatnngctccacagaccggggccaggccctcagagaccttcgcacgtttctgcaagtcccaggactcggctctgggcagcactgacccagctgtggaacccggaactccgtcccttgacgtcctggcccagcctcttgaagccagcaacccagcccctgagggcctgacccagcctctgcagggcgggaccccacactgggagccctgccagctgccctctgagtctccaggttcactctcagaggttctggctcagccccaaggggctttggctctgtccaactgtgagtcacactccaacactggagtctgacccaacccctnnnnnnnnnnnnnnnnnnnnnnnnnnnnnnnnnnnnnnnnnnnnnaacccgctgataccatcctaagctggctgctagagtccccaattttattctaatcattcccactcagtacccgccacccccaccctgggagtgttgatagaatttcaaattctatttttgagattctatttctagaattctagattgttctctcagaattccaaattccacttctgaggccctgaacccagtctaggatcggaccctgagtctcaagcccttgactttggcccccttgttcccaggcaccctgtggctggctgggggctggggtgtctcctcaccagggcctggtcagcacccagatg

SEQ ID NO: 13374 - DNA, 679 bp, Macaca Fascicularis
  misc_feature (1)...(679): n = A,T,C or G
ggcttcataggaaaaatggttagtaaattacagaattgtgcagcatgaatacttctgatgtgggctgcagccattggcactaactaaaaatataaacactctcatcaccccnnnnnnnnnnnnnnnctagcaggagatttaagctgtctccaaatggtcatgactgagaaaaaagaatgaataaaggaaaaagtgaataatgannnnnnnnnnnnnnnnncttagggggcttgtggtaacaggcccagagtggacatgtgannnnnnnnnnnnnnnnntgaagagtcnnnnnnnnnnnnnnnnnnnnnnnnnnnnnnnnnnnnnnnnnnnnnnnnnnnnnnnnnnnnnnnnntcagggtcactggtgggaatttgaagattagagggatcttttgccgtacatccgggcagtgagggctggctgagctcagcaggagcactgtgggtgttagttgccttcctgcatcgcttgttcattcagtgagcatcagcaggcacctgctgtttgcaaggcacaggtgacaggaaacaagaannnnnnnnnnnnntgagctcaaggagtgggcactccagggaagaagcagggagggacaggggagtcccttactgttgcacacagggccagagctgggattcnnnnnnnnnnnnnnnnnnnnnnnnnnnnnnnncagactctctc

SEQ ID NO: 13375 - DNA, 687 bp, Macaca Fascicularis
  misc_feature (1)...(687): n = A,T,C or G
taaagtgctaggattacaggtgtgagccaccacgcctggcctatttcttggctcaacttaaaagcccatcatcagctcctccagggcagggcttgtgttgactgctatgttgtgtnnnnnnnnnnnnnnnnnnnnnnnnnnnnngcctgactgaatgaaaaagcaagggctctgatgacctggggagaggaggggctgtgaattaccttcccttccccaccctctcctgcagcaaatcagccggcaccaggagcagttcannnnnnnnnnnnnnnagccccctggggagctnnnnnnnnnnnnnnnngtggagggggaggtgggcgccataggagaggaggccccgcagatgaactacatccaggtgacgccgcaggagaaggaagctatagagagggtaagaggcctggctgaggggtgactgcgggtgggcaggacccctaccctctgctgctcacacttaacccatcttcccacagttgaaggccctaggcttcccagagagcctggtcatccaggcctatttcgcgtgtgaaaaaaatgagaacttggctgccaacttccnnnnnnnnnnnnnnnnnnnnnncgagtgatgccaggaagccaggccacccaagccctcaccctacccctactccatgaaagttttataaaagaaaaatatatatatattnnnngtttatttaa

SEQ ID NO: 13376 - DNA, 728 bp, Macaca Fascicularis
  misc_feature (1)...(728): n = A,T,C or G
tcactgccgatgtctgtgtcaacagaggcgacccatatnnncaggaggtaagcgccactgtccaaaatgtcatggaaaggctggggtactgcaacccctaccgactggtgtggcaatccaaggttggtccaatgccctggctgggtcctcaaacagacgaatctatcaaagggctttgtgagagggggaggaagaatatcctcttggttccgatagcgtttaccagtgaccatattgaaacgctgtatgagctggacatcgagtactctcaagttttagccaaggagtgtggagttgaaaacatcagaagagctgagtctcttaatggaaatccattgttctctaaggccctggccgacttggtgcattcgcacatgcagtcaaacgagctgtgttccaagcagctgaccctgagctgtccgctctgtgtcaatcctgtctgcagggagactaaatccttcttcaccagccagcagctgtgaccccactggtggaccctgtggcattaggcaaatgcccaacctccagatacctccgatgtggagaggatgttattagagatcaaggaaggaagtcatccttccttgatatatatacagcctttgggtacaaattgtgtgatttcttgaggattggactctattgatggatttctatttttgtataactatacagtaagcatttgtattttctctctctaggtatgttactagttggaatgtccacta

SEQ ID NO: 13377 - DNA, 715 bp, Macaca Fascicularis
  misc_feature (1)...(715): n = A,T,C or G
cagtgcagcgattcntcnnnnnnngagnnnnngnnnacgcctacaccatgttcttctccacgttctaccacgcctgcgaccagcccggggaggcggtgctgtgtatcctcaactacgacacgctgcagtactgcgacttcctgggctccggggcggccatctgggtcaccatcnnnnnnnnnnnnnnnnnnnnnnnnnnnnnnnnnnacgtgctgtttcttctgggcacactggtcatcgccatgtccnnnnnnnnnnnnnnnnngggcatctggaacatgctggggccctgcctctttgccttcgtgatcatggccnnnnnnnnnnnnnnnnnnnnnnnncaccggcgccagtgctaccccacctcgtggcagcgctgggccttctacctcctgcccggcatctccatggcgtccgtgggcgttgccatctatacctccatgatgaccagcgacaactactactacacccacagcatctggcacgtcctgctggccgggagcgcagccttgctgctgccgccacctgatgagcacgctgagccctgggcctgctcgcannnnnnnnnnnnnnnntatcagatctgtaagaacgatcgggaggaactgtacacggtgacatgacaccagcctggggacagctgctgctctgatgacctcttcagccaggagctgcatcgaggggggggaacctggttcagtcctggacagattga

SEQ ID NO: 13378 - DNA, 753 bp, Macaca Fascicularis
  misc_feature (1)...(753): n = A,T,C or G
gtacaggataaggaggggnnnngaattggtgagatggaatcttagatcgtcccccatgtaccagcctcattcgaattctactctttggttaaagttagaaattcagagatttaggggtggaggaagagctttggggaagatgaggtaaggaaaggtgactcgtgaagttaataggatgtctctaatttctagatgtgcctgagcttctgttcttttcctctgtctttgtctgtgtctctcttgaatgtatttactttctgtctgttaagtctatttaaggttctgtgtctatgcatctctctctgtctttctttttttaaccttctcattcttctatccagggatttannnnnnnnnnnnnnnntttggtaggggaggtataaggtttggtctgtaaggttctaactgccttcttttttctcnnnnnnnnnnnnnnnnnnnnnnnnnnnnnnnttgaaactccaaacataatttttaatactatgtgccagtggactcttccctcatatctctgcaccacaagtggttggatgtttcctcttcctccctcatgtctacctcaccagcctcgctcatgatttggcccttatccttccttgtacacataccttcagatttctgcttacactttgatttcagagctttattccctagtctgttccctagtgtagcatcttgctgtaaatcttgtacaatgattctgtgtaaatagctgtggcctatgccaataatgaagagcaagccttcaggtaa

SEQ ID NO: 13379 - DNA, 720 bp, Macaca Fascicularis
  misc_feature (1)...(720): n = A,T,C or G
ccgagcccgttnnnnnnnnnnnnnnnnngatcaatgggtggccgggtttgcctcgtggagcggcccggggtcgcggtgagcccactccannnnnnnnnnnnnnnnnnnnnnnnnnngagctgaagaagaagctgttcaaacgccggcgggtgctgaatcgggagcggcgtctgaggcaccgggtggtcggggctgtgatagaccaagggctgatcacgcggcaccacctcaaaaagcgnnnnnnnnnnnnnnnnnnnnnnnnnnntctgtcagggaagaagcgcagaaaactnnnnnnnnnnnnnnnnnnnnnncagaaagagaaggcagccatggaaggtgaggctgggacagaggtgggtgaggggaatcctggatttatttgggttaatacttccttcttccctttactcagtggaagccccttcaaaaccagccaggactagtgaaccacggctcaaaaggcaaaagaagacaaaagctccccaggatgtagaaatgaaggaccttgaagatgagagctaaacctcttccagtannnnnnnnnnnnnnnnnnnnnnncttcagactcagtggttgttttagaggacgttgacaaaagcagtgccccttttcactctccagatttcctcctacctaatggcctactgacctcccctacagggatgtctttgggagggaagaaggtacagaagaaagatnnnnnnnnnnnnnnnnngc

SEQ ID NO: 13380 - DNA, 1500 bp, Macaca Fascicularis
  misc_feature (1)...(1500): n = A,T,C or G
gtcatttacactgaccctgtggatcnttnnnnnngcaccgtggcagannnnnnnnnnnnnnnnnnnnngagtttgtctactgcaaatgcaaagaaagatcccagcnnnnnnacctgtaatatcagtgttggacgttaatgcccacttttcttattcttactcagccccttttcctccattaggagcattggtcctgttgtccattttcatcaccagatgttttccactgaagcatgcacatgccactgtcaccaaaaacgaactaccactttccaaattccattcagagccattttagtgttttcctattccctacccctcccactactttcaatgatgaaataccctaagttctccttctgacactttattgcctagatgctgcaatgtttttatgtttcctttatgccaaacataacaaaacagttatatagaccgctttagcaaagtacacaataatggcttataaatggtgtttaaatatgcattcattttaatctactgaacaaatattgggataactccaaaccgcatgaaagggtgtaattgcagcatgagttaaatcttgaagcctagaattgtcagcacttccaacttcttgtttgacagtgttatttatgttatttatattagctaacaggaaacaactactgtgtttcaacataataaatataatagaaaaatattttatttgtattgttgtataaaatatttacaatcatatagaatatatagagttacattttaatagcaattgtgtacatgtcacgaaaccatttcccttatcaaagatgtaatttgtaaacctcaaatagttgtgtatctgtcctgttacaagtagatgacttcaattaaacaaatgtatgaaggacattattctgattcataaaagttataaaatattaggtaaatacagagaaannnnnnnnnnnnnnnannnnnnnnnnnnnnnnnnnnnnnnnnnncttcccatccaaactataagaaaatgtgaatttcttcaacatcatacttaaatgttacagaaaatagaaatacaaacaaggttggtacatgagggaaaatgttgaccttttacttccttttacaaaaatgaaaataataaacatgttttagtataaaataacacaaaatgatatacactaaagttgatgaagcaaataaatattctggcttctttttcaaggtatcagggcaatttccaaacctttcattttgtacagaaggaagaataactacagctcatgggaaatgttttgactttacaaagtatagatgttggaacattaagaaaaatgtatattcccaatgaaaaaatagttatatcgtcttatagtaaacaaaaagattagcaataatactatggacatattagattatatactgcagacacatatctatnnnnnatacctattttaaatttttaatacaatattttattttaatataaacatctgtcagttatagnnnannnnnataatttnacaagtacatgctatc

SEQ ID NO: 13381 - DNA, 730 bp, Macaca Fascicularis
  misc_feature (1)...(730): n = A,T,C or G
gagagcnnntagagactacatnnnnnnnnnnnnnnnnnnnnacagcgggttctaacaaaagaacccaaatcaaaggaaatagaaaatggtcatatatttacagttaatgatcagttcacatccaaactacacagagtcaagattcnnnnnnnnnnnnnnnnnnnnnnnnnnnnagacccagagaggaaagaaacaaggcagaaagtagacgacgacagaaaacatgagatagaagctgctatagtgcggataatgaaatctagaaannnnnnnnnnnnnnnnnttctagtagcagaggtaactcagcagttgaaggctcgattcttaccaagtccagttgttattaagaaacgtattgaaggacttattgagagagaatatttggcacgaacacctgaggatcgcaaagtatacacatatgtagcataaaatgcgttcagaaatttgatttattcttggactgtactcttcgcatggactgggaagttcttttaaatcattaaatattaagacgaccatctcttctattaaattacagtacatgttctagaccattgagatcaagcctttactccctttgagagttttcaacaacagttgnnnnnnnnnnnnnnnttacaacgtttatccctgtagagatcatctttacagttcctcgggaaaatgtgaatgtgctgcgttttgttttctttactgtatgaaaacaggaaaataaaacaaaaatttagaa

SEQ ID NO: 13382 - DNA, 509 bp, Macaca Fascicularis
tccaccgagcgccaggagaaggccaagatcaagcggctggccctcagcctcatcgccatcgtgctggtctgctttgcgccctatcacgtgctcttgctgtcccgcagcgccatctacctgggccgtccctgggactgcggcttcgaggagcgcgtcttttctgcataccacagctcactggctttcaccagcctcaactgtgtggcggaccccatcctctactgcctggtcaacgagggtgcccgcagcgacgtggccaaggctctgcacaacctgctccgctttctggccagcgacaagccccaggagatggccaacgcctcactcaccctggagaccccactcacctccaagaggaacagcacagtcaaggccatgactggcggctgggcggccactccgccctcccagggggaccaggtgcagctgaagatgctgccaccagcacagtgaaccccatgtggcacagaacccccagttttcccctctcatcccacagtcccttctct

SEQ ID NO: 13383 - DNA, 670 bp, Macaca Fascicularis
  misc_feature (1)...(670): n = A,T,C or G
atgtcctaactatttttatagatttgtttaatagcttgtcattttcaagttcattttttattcatatttatgttcatggttgattgtacctttccaagcccacccagtggggtgggaagagaagaagaagggggaccttgggccgccgcaatcacgtctgtccagagaaattccttatgggactgaaggcagaaaagcggccagaaggcagccctgggtcctttcctttggcaggttggggaagggctttccttaagccttaggatttcagggtttgactaggggcctggagagagannnnnnnnnnnnnnnnnnnnnnnnnnnnnnnnnnnnnnnnnnnnnnnnnnnnnnnggtttctttatttcacactttttgaatgtcaaggcagtgaggtgcctctcactgtgaatctgtggtgggcgggggctggaggagagggtggggggctggctccctccctcccagccttctgccgcccttgcttaacaatgctggccaactggcgacgtcacagttgcacttccattccaccagaatgacctgatgaggaaattttcacttttcaataggatgcaaagatcaatgcaaaaattattgttatatatgaacatatatannnnnnnnnnnnnnnnnnnnnaagcaaattaagaaagaaatggaagttggaag

SEQ ID NO: 13384 - DNA, 871 bp, Macaca Fascicularis
  misc_feature (1)...(871): n = A,T,C or G
aggcccggcccgggcggcgcgacnnnnggatgagcggcgggcggcggaaggaggagccgnnncagccgcagctggccaacggggccctcaaagtctccgtctggagcaaggtgctgcggagcgacgcggcctgggaggacaaggatgaatttttagatgtgatctactggttccgacagatcattgctgtggtcctgggtgttatttggggagttttaccattacgaggtttcttgggaatagcaggattctgcctgatcaatgcaggagtcctgtacctctacttcagcaattatctacagattgatgaggaagaatatggcggcacgtgggagctcacgaaagaagggtttatgacctcttttgccttgttcatggtcatctggatcatcttttacactgccattcattatgactgatggtgtacagctcccaactgctccctatccagtccaaaggacccnnnnnnnnnnnnnnnnngaacttgatcgttggggaaccccagccccttggaacttggaagacccannnnnnnnnnnnnnnnnnnnnnnnnnnnnnnnnnnnnnnnnntctgcaagggttgtgacctgaaactttttaaaaaccacccacctttggagaagcatttctgaatttatccgtcaccaaccatttcttcttggataccgtcaagtaacagctgtttgccaagtggagctgtcatttaatttgatgcacctnnnnnttcagatgaaacattaaattgtcttcctcgannnnnnnnnnnnnnnnnnnnnnnnnnnctatcagtggcatttaaagnnnnnnnnnnnnnnnnnnnngtnnnnnnnnnnnnnnnnnnnnnnnnnnnnnnnnnnnnnataacagtttc

SEQ ID NO: 13385 - DNA, 731 bp, Macaca Fascicularis
  misc_feature (1)...(731): n = A,T,C or G
ctgcctctagacacctgtattnnnctgccccagggagcatccaagggaggagaagggagagggctcaggtaccttttgcatagcggcacagaggacgtcattgcnnnnnnnnnnnnnnnnnnnnnnnnnnnnnnnnnnnnnnnnnnnnnnnnnnnccacccagtcactgtttttggccagggctggaaagcaagtgtgaattgaggaggggcagaaacagcaggagggagctgagcagccaagcaaaggagggcgggtgaggcacagggaatggcagagcccacacaggctgccacaatccctggctgcccaacttggccgggcctcactttgctcgatcgtgaaaaggacctaaaatcacctccactcagccccccacctgtctggctaagatctggagtacacgttcacccagcagcaagtcggggcagacagatgtggtggctgggggcacaggccaggcagggaacgctacctgccatgtgctcgggctccttggtgacctcgatggcgtaataggcaggaaagacgccccgggcaccggtgcgcatgttgtaggcctcgtaccagtagtcttcagcctggagctccactagcagagggtcatccacttccagctcaagttcgtcttcgtgtcgaggcacaaacctgtccccagcaaggacaggtgagaaattcggcaccagggcctgtccggccaggcctactctgcggtctgggagccacagcag

SEQ ID NO: 13386 - DNA, 742 bp, Macaca Fascicularis
  misc_feature (1)...(742): n = A,T,C or G
ttagttatagnnnnagatatatatcatattggtattcactaatctgnnnnnnnnnnnnnnnnnnnnnnnnnnnnnncaatttattaaaatgattgtaaaatagcttgtatagtgtaaaataagaatgatttttagatgagattgttttatcatgacatgttatatattttttgtaggggtcaaagaaatnnnnnnnnnnnnnnnnnnnnntttatagtttgtacatgcattcatacaggcagcgttggtctcagaaannnnnnnnnnnnnnnnaggggaagagggagatggagactggtcctgtgtgcagtgaaggttgctgaggctctgacccaatgagattacagaggaagttaccctctgcctcccattctgaccacccnnnnnnnnnnnnnnnnnnnnnnnnnnnnnnnnnnntagtttactcaatttccccttgcactaaagtatgtaaacaggagacaggaaagtggtgcttacatacttaaaggcaccatctaatagtgggttactttcacatacaggcctcccccagcagttgaatgacaacagaagtttggcaatagtttgcatagaggtaccagcaatatgtaaatagtgcagaatctcataggttgccaataatacactaattcctttctatcctacaacaagagtttatttccaaataaaatgaggacatgtttttgttttctttgaatgctttttgaatgttgtttgttattttcagtattttggagaa

SEQ ID NO: 13387 - DNA, 787 bp, Macaca Fascicularis
  misc_feature (1)...(787): n = A,T,C or G
cagtgtgcatgnnagagncnnnnnnnggagcacccgctgcagcctggctactgctttntactgcagaatgaactgcaannnnnnnnnnnnnnnnnnnnnnnnnnnnnnnnnnnnnnnnnnnnagtgaaggttctctacagctatgcctgtttgaatgatatgtagggtccccacaaaaagcaggctttctgccctgaggggcatcttgccacttccctactccacatgagccatgcatgcttagaaatccaagtgcagagctctttgctccaggagtgaggagactgggaggtgaaatgcggaagtggaagggtttgggggcagagctgaaaacagggttggaaggatttcctgaattagaagacgaacattaacatacccagtaatgaaaatgagtgcagggnnnnnnnnnnnnnnnnnnnnncagtctcaaatgagatgaaaacagggaagcagagaaaggtcagagaatgggactcagattgggaacttgtgggaatgagagtgaccaggttgaactgggaagtggaaaaaggagtttgagtcactggcacctagaggcatgcccaggattcctaggaaggctggcagacaccctggaaccctggggagccactggcannnnnnnnnnnnnnnnnnnnnnntttttttggtgggannnnnnnnnnnnnnnnnnnnnntttccttctgtgtgtgattcgggagttcttctgcagagatggcgctatctttcctcctcctgtgatgtcctgctcccaaccctttgtactccttattacaaaagaaa

SEQ ID NO: 13388 - DNA, 751 bp, Macaca Fascicularis
  misc_feature (1)...(751): n = A,T,C or G
cagaaaacaacgtagcctggcagagatttcttcccnctgggcctattgctctgctcccgctttcagacaccttgagttccttggtttggtctacgtcccatgaacatgcagcacagctagttagcatggatgaggaaaaatttgtggatgccgttaactnnnnnnnnnnnnnnnntgctgaccacacggacttcatcgacacagctggtgccannnnnnnnnnnnnnnnnnnnnnnnnnnnnnnnnnnnnnnnnnnngctcgccagctgcccccaagcgtagccagggtggatgccaaaagccgagttctgtttcctcttgggttgggacatgctgctgagtacgtcaggcctcgggtggcgctcattggggacgcagcccacagagtccatccgcttgcaggacagggtgnnnnnnnnnnnnnnnnnnnnnnnnnnnnnnnnnnnnnnnnnntcagtacggcagccttcaatgggaaggacttaggttccatgagccacctcacaggttatgaaacggaaagacagcgnnnnnnnnnnnnnnnnnnnnnnnnnnnnnnnnnnnnnnnnnnnctctattctaccagtgccgccccacttgtgttgctcaggacatggggattgcaggccacaaatgcagtgtctccactcaaagaacagattatggcctttgcaagcaaatgagttactcctctcctaaagattatgttgatgaaaaagaacatcctcccccaagaccnnnnnnatacata

SEQ ID NO: 13389 - DNA, 653 bp, Macaca Fascicularis
  misc_feature (1)...(653): n = A,T,C or G
cagccgggncnnncnnnngnnnnnnnnnnnnnnnnnnnnnnnnnnnnnnnntcatggggacagtttcacactttccttctgaccagggagggggcagcccatcccccgctgcatctgagatcaannnnnnnnnnncagnnnnnnnnnnnnnnnntccccatgggtcctgtgacctcagcccacgcggggacctacaggtgctacagctcactcagctccaacccctacctgctgtctgtccccagtgaccccctggagctcgtggtctcagacaagcggtcattcctctctgaagaacaggctgacctttctgggacctgctttctggagcctctgatgctccctgtctgggtctccacgcgcctccttcctggctctttttcctactgaggaatcagcttcagtgtcacctccaagtgtgaccttcactgatgacacagctcagcccagacctgcctgctnnnnnnnnnnnnnnnntaatcaacctacaccgtgcagcttaattccctctctctctttcaccatctctgcacatacacgtgtcacaccgacatcttatgtgacattaaaacctagttatctgtatatgtattcagataatatatactcacacataaatatagatctctacccatacatctaaaactatccct

SEQ ID NO: 13390 - DNA, 748 bp, Macaca Fascicularis
  misc_feature (1)...(748): n = A,T,C or G
acagattaaagaagatctcataaaggacctgcagatgcaactggnnnnnnnnnnagacataccagctatggaacgcctgacccaggaagtcttacttcttcgggaaaaagttgcttcagtagaatcccagggtcaagaaatttcaggaaaccgaagacaacagttgctgctgatgctagaaggactagtagatgaacggagtcggctcaatgaggccttacaagcagagagacagctgtatagcagtctggtgaagttccatgcccatccagagagctctgagagagaccgaactctgcaggtggaactggaaggggctcaggtgttacgcagtcggctagaagaagttcttggaagaagcttggagcgcttaaacaggctggagaccctggccgccattggaggtggggaactggaaagtgtgcnnnnnnnnnnnnnnnnnnnnnnnnnnnnnnnnnnnnnnnngactgcagcccaggatggaaaaccttgnnnnnnnnnnnnnnaaagatccttatctgattttggcagaattaaacggtgacttactaatgatagaactggtacaagtagcatcaactacaaagtgaaactcactttagcctacatggatctcactgtacatacatatcaatccccaaattgaatggtagaggttgcaaagtgtatttgcacattttaaatcattttgctttagtttttccacttttattcattcttatctctagccccttctcatttcctcatc

SEQ ID NO: 13391 - DNA, 747 bp, Macaca Fascicularis
  misc_feature (1)...(747): n = A,T,C or G
atggacgctgcaaatgcaaccgctgccagtgctcggatggctactacggtgctctatgtgaccaatgnnnaggctgcaagacaccatgtgagagacaccgggactgtgcagagtgtggggcctttgggactggcctcctggccaccaattgcagtacagcttgtgcccataccaatgtgaccctggtcttggcccctatcttggatgatggctggtgcaaagagaggaccctggacaaccacttgttcttcttcttggtggaggatgacgccagaggcagggtcgtgctcagagtgagaccccaagaaaagggagcagaccacacccaggccattgtgctgggctgcgtagggggcatcgtggcagtggggctggggctggtcctggcttaccggctctcggtggaaatctatgaccgccgggaatacagtcgctttgagaaggagcagcaacaactcaactggaagcaggacagtaatcctctctacaaaagtgccatcacgaccaccatcaatcctcgctttcaagaggcagacagtcccattctctgaaggagggagggaccctcacccaaggctcctctccttggaggacagtgggaactgaagggtgaaaggaagggtgggtctgtaagaccttggtaggggactaattcactgaagaggagcggccaccaccctacttcattttcagagtgacacccaagagggctgcttcccatccctgcaaccttgcatccacctgggc

SEQ ID NO: 13392 - DNA, 747 bp, Macaca Fascicularis
  misc_feature (1)...(747): n = A,T,C or G
gcccaatgaagnnnnnnntccaggtctgacaagaaggggccaaagaccattgcggagatgaggaagcaggacctggctaaagacacagacccgctcaagctgaagctcctggactggattgagggcaaggagcggaannnnnnnnnnnnnnnnnnnnnnnnnnnnnnnnnnntgtgggacggcgagagccgnnnnnnnnncgtgggcatggccgacctggtggccccggagcaggtgaagaagcactaccgccgcgcggtgctggccgtgcaccccgacaaggccgcggggcagccgtatgagcagcacgccaagatgatcttcatggagctgaatgannnnnnnnnnnngtttgagaaccagggctcccggcccctcttctgaggccgcagtggtggtgnnnnnnnnnnnnnnnccacagcttgggagctgtcgtgggacctgggtccccaccgtgagggccccatgggcgacggcagatgtggccagagtggggctccgagccccgggtcaccgcctgcccagcattccaggcacaggaagagaaagcattccaaagcctctgattgttgtttcctttttctcctcctgaaggaacagctgattcatgctcctcccacagttgtcacatctgtgatttatttggtgtttccggcgtggcctctggagcaccaacacatggtgagccccgcggctggtgctcatgggccctggtgtttgcaccgcactttgtaatcagtcccgtgg

SEQ ID NO: 13393 - DNA, 799 bp, Macaca Fascicularis
  misc_feature (1)...(799): n = A,T,C or G
ttacaagattgtaacattagactttttaatacaaaaatgcagttagcttttatactaatcaatcttaatttctaggttactcagaattccaagtattctgcagaattccaagtattctgatttggactcacatcatgtattgactgcactttaaccaggaagttactgccaacagcatctctctattaaaggaactgacaagagaggaaacaaaagttgtgttaggtaataggactgcttcagaaatagggctattcatgtttaaagtgtttttcgtttttcagggcatctcattgggagatactcctcttccaggcagtatcagtgatggcatnnnnnnnnnnnnnnnnnnnnannnnnnnnnnnnnnnnnnnnnnnnnnnnnnnnnnnatcttcacgaggccatcttgctttgtcccaacaatacatttagacgaaatccaacaaggacttcacagtcnnnnnnnnnnnnnnngcagttaaattctcataccaccannnnnnnnnnnnnnnnnnnnnnnactaactcgannnnnnnnnnnnnnncagttaacaatcatatgcggaatctaacaagccaagacctactgtatgaccttgacgtaaatatatttgatgagataaacttaatgtcattggccacagaagacgactttgatccaatcgatgtttctcagctttttgatgaaccagattctgattctgggctttctttagattcagtcacatagtactctgtcaccagtctaatcctctcactgtgtgtgtgaggtgctacnnnnnatgtactgaccatgat

SEQ ID NO: 13394 - DNA, 802 bp, Macaca Fascicularis
  misc_feature (1)...(802): n = A,T,C or G
aaggcgagacacgtttnnnnntcctacaggatggatgtggagaaaggcaagattgaagacacaggaggcagcggcggctcctattccatcaaaacccagtttaactctgaggagcagtggacaaaagctctcaagttcatgctgacgaatcttaagtggggtcttgcgtgggtatcctcacaattttataacaaatgacttttttccttagggggaggtttgccttaaaggcttttaattttgttttgtttgcaaacatgttttaaattaaattcgggtaatattaaacagtacatgtttacaataccaaaaagaaaaaatccacaaaagccactttattttaaaatatcatatgacagatagtttccagagctacaacatgccaggtatagctgccaaccattgtcacagttttgactcttaaccccatgaactcctttccctttcttctctgaaaaaaactaatttaaatttgcttttttttttaactgagttgaattgagattaatgtgttttcactggatttgtatctctctcaacttcccgcacttaacagtatgaaatagaaactcgtctttactgagacgaggatatgtttgagatgcacagttggataatgtgggaaaatgacatctaagctttacctggtcaccatgtgatgtgcagatgcttgaaatgtaacacttctcactcggttctcatactgaatgccgactgctctgtgttagagatatgaaatggtgtttgatactgtttgagacattatggagagaatttaattatttgtaaccaggaaaacaca

SEQ ID NO: 13395 - DNA, 1536 bp, Macaca Fascicularis
  misc_feature (1)...(1536): n = A,T,C or G
ctcacctctttctgggtggtacttactgtctcacactgnnctggcaaacttgtacacacaaacacacannnnnnnnnnnnnnnnnnnnnnnnnnnnnnnnnnnnnnnnnnnnnnataaannnnnnnnnnnnnnnnttggagtgagttgcaaggaggattgctggagctactcgatctagcgctaatggttnnnnnnnnnnnnnnnaaacctacataatttaacatatttatttactttagtgtgacaactgatgaaaagaaatggagcaatccaaattgtataaaatgacttaagaaggaagaaaagtgacatataaatatattttgcaaatgccatattaatttaaaaatgagtatgattgattttattatttttaaagtgggcattcgtcactgttttgagacctttgtatatatttgtgcatttttatcttttttttcgggccattattttaaggtgtgattttggtcctctaatgtaggagttatgtttaaatacaaccaatcaggccctaagtgcaaaaaagttctgtcttggtgcttatcactggcataattattatttttttgttttcctaactttgctcttaggagcatgaacctctttgtagctttatggtaatgcaatatttccagtcatttactgtcaaaaaaattttttacattgtgttagtgaagattgtgttttcaaggttaaatgattggtattaatgtatatagagtaaaattattacaaaatttaaaaatgatttttcttggcattctttttaaatactctgaaaaatatatgcaaatgataagcctttaatcatactaaagccagttatgttaagaatttttcctttggattttataattaagagttgcttataaatatttatgacattgagctgttactgttttcgttgtctaaaaagaatgggacgtgtcatgaactggtttggtttttaaaaaaattcttgatgtgaattccactgttgcctgactatgtatattcagatgaatgtactctttcttgttccttgttaccagattaatctgagagaatgtggattcatcttgtcatcattctcatgctcaaatacttaaaatggttcttttgcccaaaagtctcagagtcttcattttggtacagtggagtcacaacttggaaggtgnnnnnnnnnnnnnnnncgtgcctaaggacaaaattgagcatgctcagaatggtccttgaaaatctcctaaattaccaatgaagttctctttgtagtcttaaagtttaaattcctgtggagtgatacataggtatgaatatattatgcttatattaagtacaaaaatacaaactgcatatcaagagtagattcttatagcattaataatttacatgcatgtgtctttttccagtaggtatggttgaatttatgtaaatttattgctaatcccatcccttacaatctagagtataagctgcacaagggcagaggtttttgtctggtttgttcatggatgtatcttaagagccgagaacagggccnnncacaataagcatca

SEQ ID NO: 13396 - DNA, 705 bp, Macaca Fascicularis
  misc_feature (1)...(705): n = A,T,C or G
ctacactgnngcatgcnaagaagcagcattcccttctacaggctgttcaatgacattcacaaatttagggactaaatgctacctgggtttccagggcacacctagacaaacaagggagaagagtgtcagaatcagaatcatggagaaaatgggtgggggcggtgtgggtgatgggactcattgtagaagggattccttgctcattcttgaggagcattaaggtatttcgaaactgccaagggtgctggtgcagatggacactaatgcagccacgattggagaatactttgcttcatagtattggagcacatgttactgcttcattttggagcttgtggtgttgatgactttctgttttctgtttgtaaattatttgctaagcatattttctctaggcttttttccttttggggttctacagtcgtaaaagagataataagattagttggacagtttaaagcttttattcgtcctttgacaaaagtaaatgggagggcattccattccttcctgaagggggacactccatgagtgtctgtgagaggcagctatctgcactctaaactgcaaacagaaatcaggtgttttaagactgaatgtttttatttatcaaaatgtagcttttgggagggaggggaaatgtaatactggaataatttgtaaatgagtttaattttatattcagtgaaaagattttatttatga

SEQ ID NO: 13397 - DNA, 745 bp, Macaca Fascicularis
  misc_feature (1)...(745): n = A,T,C or G
tctgtcatgtgtgancntnnntagacatattaacttaataaatgtatgagtcttaaatatctcttagttctcattaaatttaggaaaattcacactagaaaataaagctgttaatgtaacaattgtggaaaagtgttctagcaacagcatatacttatcatcattgcctttccactactctactatctgtgtgatattagacaaaatatttgcttcttggtacctcagctgtaaaatgaaacacacctaaaagtgtggttaattgtttccaacatgtataatacagcaacaactatctggcccatactgctttggattaacattggatattactgtttttattatcatcaacattattgttagtggatttcttaacaggaagacacagtggagatgatannnnnnnnnnnnnnnnncatcacgtatatttcatgaaggacttctttgataaaatctgtgttatgagctgaatgtttgtgttcccgtaacaattcctatgttgaaacatgaatcccaaggnnnnnnnnnnnnnnnnnnnnnnnnnnnnnnnnnnnnnnnnnnnnnnnnnnnnnnnnnnnnnnnnnnnnnnnnnnnnnnnnnnnnnnnnnnnnnnnnnnnnnnnnnagctctttcaaccgcatgaggatacagcaggaagtcagcagtctacagtgccaaagagggagggcctttcgcagaacccaagcatgctggcaccctgaccttggacttgnnnnnncaaaac

SEQ ID NO: 13398 - DNA, 693 bp, Macaca Fascicularis
  misc_feature (1)...(693): n = A,T,C or G
cgccagcggccaccgcgcaggcctgacctctcgggacacacccagccctgtggacccagacaccgtggaggtgctgatgacctttgaacccgacccagctgatcttgccctatcaagcattcctggccatgagacctttgaccctcgaagacaccgcttctcagaggaggaacttaagccccagccaatcatgaagaaggcgaggaaaacaggnnnnccagaggagcagaaggacgagaaatattggagccgccggtacaagaacaacgaggcagccaagcggtcccgggacgcccggcggctcaaggagaaccagatatcggtgcgggcggccttcctggagaaggagaacgccctgctgcggcaggaagtggtggctgtgcgccaggagctgtcccactaccgcgccgtgctgtctcgataccaggcccaacacggggccctgtgaggctgccccacatccccacctggcggagctctcctccgccttgctgagacttacgccctgttccctccctgccctgtggcccacgggccggccagctgggtgccccagggacgtgataatgcagataaatacatttatatttttaagaaaaagcgaacctcccccctcccttgcgggggcggggagggtcctctgtgtgtccccggcacgtcagggaccccatcctcccaccgcctccgtaacac

SEQ ID NO: 13399 - DNA, 761 bp, Macaca Fascicularis
  misc_feature (1)...(761): n = A,T,C or G
atgtaacaaagcaacttgtacacttttaactttaaaaactgaacctcatctttccagtgaaacaaaaagaaaatttaaaaataaacaggaaaaaaattacaatagagaatgtcaattccaaataagatcctacaggttctgctgattctcccattgagtggcagggctcaagtcatcattaggagagaatttattttaaaaagtgtcatcttaaactgcaaaggatgtctatcaaatatcacaattaaacatgcaaaaggagaagccatgttgtcaaaatgcccacttaacccacccaaacatctcaaacccaccctttgctgaccttctataaacccatttttttaaggttttgttttctgtttttgttttttttaaacaagagaaagtagacagatacatgttggtaaatgccaaatgtccatattcacacagagacacagtgtactctctgagcccaatatacagagaaaggaggaaaaaagctagaattctatgcactactacacaggggcccggcaccctccggcttccagcagagacaagggagcaggtttttcttttttcccacagagctcagcggtgttgattccacacagtttttgttcagacaggaagggataaaaatgaacttcgaacagaaaggggtagagactcttttcccactgtattctgctctaggtatttcccccaaataaggtgagaaccatgatacagagnaaagagnntctcagaacagggcgactgagnnnagnnnaaac

SEQ ID NO: 13400 - DNA, 752 bp, Macaca Fascicularis
  misc_feature (1)...(752): n = A,T,C or G
cagaaacagagtgggctccgatcagtgnnngttgcgnnnaaacgttgtcnnnnnttcnnnnnnnnnnnnnnnnnnnnnnnnnnnnnnnnnnnnnnnnnnnnnnnnnnnagtgctcattggtcttatcatcttttgctgtcataaaaagcgcagagaagaaaaatannnnnnnnnnnnnnnnnnngatatcagggaagatgtgccgcctccaaagagccgtacgtccactgccagaagctacataggcagtaatcattcatccctgggatccatgtctccttccaacatggaaggatannnnnagactcagtataaccaagtaccaagtgaagactttgaacgcacgcctcagagtccgactctcccacctgctaagttcgagcacccttacaagactgatggaattacagttgtataaatatgaaggactactgaagaatctgaagtattgtattatttgactttattttaggcctctagtaaagacttaaatgtttttccaaaaaagcacaaggcagagatcagaacagctgtgagaacacatccactttatgcaatggcatcagacgtgtaagtcagatgtcatgttaaaattagtacaagccaaattcttggtttaaaaaaaccctatgtatagtgacactgatagttaaaagatgttttattgtattttcaatagctaccactaacaaatttttaacttttgatatgcatattttgatatgtggtcttttagaaaaanntatggttaa

SEQ ID NO: 13401 - DNA, 748 bp, Macaca Fascicularis
  misc_feature (1)...(748): n = A,T,C or G
ctagcaacattgagtaccaattatttgctaggtcctgtgcaagggatacaaagatgattaacactccttacccttttggagcttaaagcataaggaagacaagttattctgtaaggaagataaagcattcaaaagtactacagagaaaaaccaagtatgcctaagttttgctttgcgaatgttctcctcttaaataatagtttcaaattttgagaccagtggttccccctaagtatagagcattgaaattaatactttataataaaacacttattgttgcagaatgttaaaactgcagaacaggcaccagatggtcaagacaagggtgatgtgaggattagtatctgagattcacctggtctggaattgtcataggctactatgcatcagaatcacatggagggctttctaaaacagactgctcggccccacccccagggtttctgagttcataggttttaagaggtgagttgaacaattccccaggtgatactgatgttcctggtccacactgtgagaaccactaagtttgagtactgactcacaaagataaaattccttaaaagaaatgtactgttttaagatactgtaaaatgtggaggcagggcaaacctttataagggctgttatgtatgaaatgtgcctctgacccaaatccacggcctttgtgtaaatcaccaaggagactttgcattaagttcagagtacaatacnnnctgggcgtagctctgtatttactcagtatgtg

SEQ ID NO: 13402 - DNA, 750 bp, Macaca Fascicularis
  misc_feature (1)...(750): n = A,T,C or G
gcatatnnnnnnnnnnnnnnnnnnnnnnnnnnnnnnnnnnnnnnnnnnnnnnnnnnnnnnnnnnnnnnnnnnnnnnnnnnnnnnnnnnnnnnnnnnnnnnnnnnnnnnnnnnnnnnnnnnnnnnnnnnnnnnnnnnnnnnnnnnnnnnnnnnnnnnnnnnnnnnnnnnnnnnnnnnnnnnnnnnnnnnnnnnnnnnnnnnnnnnnnnnnnnnnnnnnnnnnnnnnnnnnnnnnnnnnnnnnnnnnnnnnnnnnnnnnnnnnnnnnnnnnnnnnnnnnnnnnnnnnnnnnnnnnnnnnnnnnnnnnnnnnnnnnnnnnnnnnnnnnnnnnnnnnnnnnnnnnnnnnnnnnnnnnnnnnnnnnnnnnnnnnnnnnnnnnnnnnnnnnnnnnnncaagttgactgtgtcccgtgcacggaaaatacagcgttttttgtctnnnnnnnnnnnnnnnnnnnnnnnnnnnannnnnnnnatggggaagctggtacccctgaaggagaccatcaaaggattccagcagattttggcaggtgaatatgaccatctcccagaacaggccttatatatggtgggacccattgaagaagctgtggcaaaagctgataagctggcagaagagcatgcgtcgtgaggggtccttgtcctctgtactgtccctttccttgcccctaacccannnnnnnnnnnnnnnnntgtgttggctgcacaagagccttgattgaagatatattctgtctgaacggtattaa

SEQ ID NO: 13403 - DNA, 729 bp, Macaca Fascicularis
  misc_feature (1)...(729): n = A,T,C or G
agcaaagcccagaaaannncttcccctctcgcctccagtcataacagtcaaacttctatgcacaaaaaagccaaggactccaaaaattcctcctcagctgttcatttaaatagcaaaacagctgaagaaaaaaaagtggcaccaaaagagcctgtggaagagacagacaggcccagcccagagcccagcaatgaagctgccaagccaagaaatacagagaaggacagtaatgctgagaatgtgaattctcaatccgagaaaacaggtactaatcccacagaaaaaaaggagagtgtatctcctgaaaataatgaagannnnnnnnatcataaccaagacagtgaaaatcctggaaatacaaattgccatgatgttgtactagcacagtgaattatcagaaaacccataggccagtttaggttagagaggaaaaaactactgtatcatttatcctaaagaacagagacgaggtcaatttcaaattttagccatctgtttgtgatttctgtcataagcattttgttgtttgtttttttattttggatgacaatgaagtgagtaactaataaggagatttaagataagaccccataaatgaatgtattnnnnnnnnnnnnnnngatgtgaattttcaaattttgtgtataataattactttgaaaatatttgcagagtatctagaaattaccatgtagtatttggtatgcaaaatacattcttttgagacat

SEQ ID NO: 13404 - DNA, 688 bp, Macaca Fascicularis
  misc_feature (1)...(688): n = A,T,C or G
gccttgttctcgggggacgcgctgtcggtggccggctgcggctcgtgcctggagggcagnnnnnnnnnnnnnnnnnnnnnnnnnnnnnngctgggcaccctgccccccgagacgaaggtgttctgcggccacgagcacacgcttagcaacctggagtttgcgcagaaagtagagccgtgcaacgaccacgtgagagccaagctgtcctgggctaagaagagggannnnnnnnnnnnnnnnnnnnnnnnnnnnnnnctgggcgaggagcgcctctacaaccccttcctgcgggtggcagaggagccggtgcgcagttcacgggcaaggcggtccccgctgacgtcctggaggcgctctacaaggagcgggcgcgcnnnnnnnnnnnnnnnnagccgcggcagccacaggcgcgggccctccttgcgctgcagtgggggctcctgagtgcagccccacaggagtgacccatccagaccctcacagggctggggcctgcgtccctcctcgnnnnnnnnnnnngctggacccgcgcgagggccacctctgnnnnnnnnnnnnnnnnnctggccnnnnnnnnnnnnnnnnnnnnnnnnnnnnnnnnnnnnnncttgtgcttcctgggtggacacacaggaccactgtgcggggctgtgtgggcnnnnnnnnnnnnnnnnnnnnnnnnnnngcg

SEQ ID NO: 13405 - DNA, 752 bp, Macaca Fascicularis
ttccacacaataggaatttcaccttgtgtcatcggggatgtagtaggagttgcattatttgtcaaaccaaatagagatgcgtgggctgactttgctgaaatacaaaagaattgaaccttatcagaaggcgttttctaagtggcccctcccatagaagcagggaagttgtccacccctagcagaagccacattatttacaaaatggttataaatccttgaagacatttttgcccattttgtacaaagtaacaggagtaaacaaggtgtttatacttattatgtttcattaatgaaacttttattactttacgtcatggggaatgcttgttttctttagaaatgaactaatgatcactacaaaggaagaattcatgacagcatttcctagagaaaaagcttaggtgcgcgtctccaaatgatggtttctttttctacaccttagctttttcatagctcaatttttcttacaacttatcttgtgttttttctttgattgtcagttttctttcaaagtttattttttgttacttaatgcagaaaagtgagctctggcctccccagtgtaaaagtcaattgtgtctagaaagagggcagtaaaaacagcaaagcaggcgctgctttcaaaaagccctgtccaaatcatcctgcccagaacctttttaggtttgcatcctcatttccccctcccctaatttcaatagctggaaagtaatcaagtatccccagaaccaatttatgcactagactccaaa

SEQ ID NO: 13406 - DNA, 732 bp, Macaca Fascicularis
  misc_feature (1)...(732): n = A,T,C or G
aannnnnnnnnagagccaagggaggcannnnnnnnaatccatcttcctcacaggatccacctgannnnnnnnnnnnnnncccagggannnnnnnnaatagcagtcaaagatgagatggagatcgtttttctggagaacctgaggcatgcagctggggttttggctgaggcggacctcgtgggactgctggagcccatcaatacccgcatcactgacccccagtacttcctggacacgccccagcaggcggcagccatcttacagaaggtgggaagacccaacctccaattacaaatggacatattccactggcnnnnnnnnnnnnnnnnnnnnnnnnnnnnnnnnnnnnnnnnnctnnnnnnnnnnnnnnnnnnnnnnnnnnnncaggtcccaggccgaggggagcccagcagccccggagagctgaatttcccctatctgtttcnnnnnnnnnnnnnnnnnnnnnacannnnnnnnnnnggctgcgnnnnnnnnnnnnnnggtgaggggtggccctggggaagggagctctggagggactggacaggggctgttttctccttgtgggctgagatgcccaggcctccctctccctacaggagacacagtagagggcttgagttggctacgttcatactgggataggcggggccaccccgaggtggccagtgagggcctgcacaccacccacatgcctccagacagcgagtgagatcccatctcctcctctgc

SEQ ID NO: 13407 - DNA, 625 bp, Macaca Fascicularis
  misc_feature (1)...(625): n = A,T,C or G
tccatttgttctggaatcctgtgtgttggtctgttgttccatgcattagctgtttgtaagtaatgcatttgcatactgaaaaaggaatgccacctgccacagtggatggtgaggaaggtcctttgacgnnnnnnnnnnnnnnnnnnnngtctctggggacacgaggatgccctnnnnnnnnnnnnnnnnnnnnnntnnnnnnnnnnnacttttggtgtttaaaaaaaaaaaaaattcgttaagtctataacctggcaacattttacaaccctgtattttnnnnnnnnnnnnnnnaataaaaaatccagaaccacacagccctatggtcaaacactcctacgtttgtgcctctgctcttaaaggtgctgtgctggacagttggcatgccagggtttgagaagagtggnnnnnnnnnnnnnnnngcagttaactgttcataattgannnnnnnnnnnnnnnnnnnnnnnnnnnnnnntttgatcatgtctgttcctgttccattctcccaggagcttctctgcagactgacacaccctcccccnnnnnnnnnngtggagatgctggtgtctgggtagnnnnnnnnnnnnnnnnnnnnnnnnnnnnnnnnnnnnnnnnnnnnnntact

SEQ ID NO: 13408 - DNA, 732 bp, Macaca Fascicularis
  misc_feature (1)...(732): n = A,T,C or G
agagcannnnncagcaggcatgnnnnnnnnnnnnnnnccccagatgtgagggcaccaccaagaatttgtggcctaccttgtgagggagagaactgagcatctccagcattnncagccacaaccaaaaaaaaaaaaannnnnnnnnnnnnnnnnnccactgtgcaagttccccgagggctttggggcatgagccggtgaagnngcaggtttgaccgggaaagcagcgctagtggagggttggaggaggaagtaaaggatgagggttcatcatccctccctgcataaggaagctaaaagcatgggcctgctgcccctccctgcctccacccacagtggagagggctacagaggaggacaagaccctctcaggctgtcccaagctcccaagagcttccagagctctgacccacagcctccaagtcaggtggggtggagtcccagagctgcacagagtttggcccaagtttctaagggaggtacttcctcccctcgcccatcagnnnnnnnnnnnnnnnnnnnnnnnnnnnncccctcagacagccccctgccccgcaggcctgccttctcagggacctctgtggggcccgaggcaggccatggagtgagacccaggagctggacacttctcgggaaatggcttttcccaacccccagcccccgcccggtggttcttcctgttctgtgactgtgcatagtgccaccacagcttatggcatctcattgaggaaaaag

SEQ ID NO: 13409 - DNA, 773 bp, Macaca Fascicularis
  misc_feature (1)...(773): n = A,T,C or G
gtgtgatgagctggtggcggagatggagcactatggccagtggtcaggcggccggcatgaggattcaaggctggctggaggctacgagaatgtgcccactgtggacannnnnnnnnnnnnnnnnnnnnnnnnnnnnnnnnnnnnnnnnnnnntgcggacgtatgtgggccccatgaccgagagcctgtttcccggctaccacaccaagnnnnnnnnnnnnnnnnnnnnngtggttcgctaccgaccagatgagcagccatctctgcggccacaccatgactcatccaccttcaccctcaacgtcgccctcaaccacaagggcctggactatgagggaggcggctgccgcttcctgcgctacgactgcgtgatctcgtccccgaggaagggctgggcgctcctgcaccccggccgcctcacccactaccacgaggggctgcccacgacccggggcacacgctacatcatggtgtcctttgtcgacccctgacactcaaccactctgccaaacctgccctgccactgtgcctttttagggggcttggcccccatcctcggagtgggggatgggtctctctcactccccgcttcctgagtgcatgttccgtgtgcctggactgaatatgtcatcttgctcccaacacacggccctctcaggaagcacccggagtccccgcctctctcctccgcccacaggggttcatggggacagggcttctgggggctcccgtgtgataaattattaatgtcctcagcctcaggccataaagaca

SEQ ID NO: 13410 - DNA, 673 bp, Macaca Fascicularis
  misc_feature (1)...(673): n = A,T,C or G
gccgcacgtgcccttccgggactcgcagctcacacgcntgctgcagccggccctgggccccggcaccactgcggtgctgctgctgcagatctccacgcggccggaggacctcggggagacagtctgctcactcaagttcgccgagcgagtgggtcaagtggagctggggccagcccggcgccgcagggtcccgcgctcctccgggacgccctcctccctcagtaccgacactccgctcaccgggaccccctgcacccctacgccgtcccctggcagccctccatgccccagtcctgacaacggctcgggctcggccctcacgcccggagagggcctgcccctgtagtcctgagtggcgtccctgcccatggggtctcgggccaggtctctgctggcagaggcggtagtaaagtccctgtacccccatcttccagggcacaagctccttagcctctttggatccattgccccggaactcccagagtcacccctccacctccgcaaccagtgaagtgtgtggtgcctggtgaagtgatcaccccccccgcccccagtcctgcatcaggccacaggtctcggcttcctccttatcaccatttgctgttatcacagcacacagcagggaatcccaggcgtccccggccaagtggttacccgagtcaccactcctgac

SEQ ID NO: 13411 - DNA, 771 bp, Macaca Fascicularis
  misc_feature (1)...(771): n = A,T,C or G
tacatgagcattcagccggctgaagatccagatgattatgatgatggcttttcaatgaagcatacagccaccgcccgtttccagagaaaccaccgcctcatcagtgaaattcttagtgagagtgtggtgnnnnnnnnnnnnnnnnttgtcacaacagctagaatgcaggtcctcaaacggcaggtccagnnnnnnnnnnnnnnnnnnnnnnnnctagaagctgaacttcttcaaatagaggaacgacaccaggagaagaagaggaaattcctggaaagcacagattcatttaacaatgaacttaaaaggttgtgcggtctgaaagtagaagtggatatggagaaaattgcagctgagattgcacaggcagaggaacaggcccgcaaaaggcaggaggaaagggagaaggagnnnnnnnnnnnnnnnnnnnnnnnnnnnnnnnnnnnnnnnnnnnaggaagaacaagcagccaacaaaggcgaggagaagaaagacgatgaaaacattccaatggagacagaggagacacaccttgaagaaacgacagagagccaacagaacggtgaagaaggcacgtctactcctgaggacaaggagagtgggcaggagggggnnnnnnnnnnnnnnnnnnnnnnnnnnagtgatagtaacactggctcggagagcaacagtgcaacagtggaggagccaccaacagatcccataccagaannngagaaaaaagagtaaatgttgccttgttttatgtgttctaaatacttttaaagaaag

SEQ ID NO: 13412 - DNA, 719 bp, Macaca Fascicularis
  misc_feature (1)...(719): n = A,T,C or G
cgatgaacacaatagcagagtatcacaaattggctagaaaattaaaacttattcctaaaggtgctgagaattccaaaggttatgattttgaaattaagtttaatcccgaggctggnnnnnnnnnnnnnnncaaatacagggctcaagtttatgtacctcttaaggaactcctgaacgaaactgaagaagaaattaataaagctcgaaataaaaaaatgggtttggaggatactttagaacaatnnnnnnnaatgataacagaaagtaagagaagtgtgagaactctgaaagaagaagttcaaaagctggatgatctttaccaacaaaaaattaaggaagcagaggaagaggatgaaaaatgtgccagtgagcttgagtccttggagaaacacaagcacctgctagaaagtactgttaaccaggggctcagtgaagctatgaatgaattagatgctgttcagcgggaataccaactagttgtgcaaaccacgactgaagaaagacgaaaagtgggaaataacttacaacgtctgttagagatggttgctacacatgtcgggtctgtagagaaacatcttgaggagcagattgctaaagctgatagagaatatgaagaatgcatgtcagaagatctctcagaaaatattaaagagattagagataagtatgagaagaaagctgctctaattaagtcttctgaagaatgaagataaaatgtt

SEQ ID NO: 13413 - DNA, 690 bp, Macaca Fascicularis
  misc_feature (1)...(690): n = A,T,C or G
catggagcactgcgacacgctcaatgtcagnnngcagatgggcagcaacaagggcgcctcgcagcggggcatgacggtgtatgggctgccacgccaggtctatgaccccaagtactgtctgacgcctgattacccggagctgggtgagcccgcccacaaccaccacgcacataactactacaattccgcctagggccacgaggccttccctgttttccccccaagggaggctgctgctgctcttggctggatccagccagacccagccgaccccctctccnnnnnnnnnnnnntccagcccctgtagaactcaacctctacagggttagagtttggagagagcagactgggagaatggggggcccactggggggaaggggaccctccgctctctagtgctacggggtccaacatagagnnnnnnnnnnnnnnnnnnnnncaaaggacgcactgagcaaagctattccagctgtccccccgctccctcacaagtgggtacccccaggaccagaagctcccccagcaaagcccccagagcccaggctcggcctgcccccaccccattcccgtagtgggagcaaactgcatgcccagagnnnnnnnnnnnnnnnnnnnnnnnnnnnnnnnnnnnnnnnnnnnnnnnnnnnnnnnnnnncagcgtttataacgcgagcactttcttttttttct

SEQ ID NO: 13414 - DNA, 756 bp, Macaca Fascicularis
  misc_feature (1)...(756): n = A,T,C or G
gnnnnnnnnnnnnnnnnnnntggagaagctagagaatgacaagagcttccgcggtgttgtcctgacctccgactgcccgggtgtcttctcggccggcctggacctgacagagatgtgtgggaagagccccgcccactatgctgagtactggaaggccgtgcaggagctgtggctgcagttctaccagtccaacctggtnnnnnnnnnnnnnnnnnnnnnnnnnnnnnnnnnnnnnggctgcctgatgaccctgacctgtgactaccgtgtcctggcagacaaccccannnnnnnnnnnnnnnnnnnnnnnnnnnnnnnnggcatcgtcgcccctttctggttcnnnnnnnnnnnnnnnnnnnnnnnnnnnnnccgggcagccgagcatgcgctgcagctggggctactcttcccgccggcagaggccctgcaggtgggcatagtggaccaggtggtcccagaggagcaggtgcagagcnnnnnnnnnnnnnnnnnnnnnnnnnnnnnnnnnattccagaccatgctcgacagctgacgaaggccannnnnnnnnnnnnnnnnnncagccgcctgatcacgcagcgtgatgcggacgtgnnnnnnnnnnnnnnnnnnnnntccaaagactccnnnnnnnnnnnnnnnnnnnnnnnnnnagagaggctcaaagaaaagaaaggctaacggctgggctgccacagacttacagccacgcgtgcccctctgggtccagggaggtctaaacaaggcatttc

SEQ ID NO: 13415 - DNA, 667 bp, Macaca Fascicularis
  misc_feature (1)...(667): n = A,T,C or G
gaggcccagnnnnnnnannnnnnnnagattgaaaaacagaaacacagcgtttttgacttgacttgcaaagtgaagcagggttttcatttttactccccttggtttagtttnnnnnnnnnnnnnnnnnnnngagggggcccagtgagattctgaaacccaattcttcgaaggcgtactggcccttagttcagttattttagttgtttaagttgatattttttttctggaatgtagccatttgctgttatctgggaaacagaagattcaacaggaaaccagcctaagacacttcaggtcgagcgctcccttggagtccgtgcccgtcgcatcccctgcttgagtttcgcacttggaagaatcctgcaccggctggcgtgtgctgtggccccgtcccatccagagcgtggagcccgaccccagccagcacctcccgctccgtcatttcatttcacacccgtgaagggaggggaggccaggagggagctgcccctgtggaagctggtgggcaactgctgggaatcggccacacgtggtgttcgtgggcagcctggcgcaatgccattcatttgtacaaaaacatttttgaaaaattttcaataagatgcgaaatcctccaacttttcaacccaacgtgatgaatatttgattttgttctagatnnnntagc

SEQ ID NO: 13416 - DNA, 653 bp, Macaca Fascicularis
gtaggatgaacttcgataccaagaagttatgccaacttttcaagtagttttataatagaaaaaattgtaatagttttaatcaagatgttcaggggtattaaaacagaactgtgtactgtatatctgtatatatgtatatatgtatgtatatttaaggaagtccacaaatcatactacatacatgctacaaaatgtataactttggcttagataacatgtaccattttaaatggagatcataattttatgttcacttgatggggaatgactagaatggggcaataacaaatcatttctaaacagttattttccattaaaagccatattaagtattttgcttgttaaattctagttttatgttttaaatctcttagtagttacattgccatttggtagcatcatgtatatatttatgcttatgagtttgcattatgactcctgtaaaatatgaaattataatgcaataaaagtgttatctttcttacaaaagttttgtacctaagtggatataaataactgcataaatgaataaattaattcagaattaactccttcaatattatttctagtagcacaactgataataaaattgatattttctacaagtgttacttctaaaattacagacaaaattacttatacaactcagttaa

SEQ ID NO: 13417 - DNA, 746 bp, Macaca Fascicularis
  misc_feature (1)...(746): n = A,T,C or G
tactnncaatccaagcagttcttgctggactnnnnnnnnnnnnnnnnnaacatcttgtgccacttctgtgccagcatgataagcggtcttgtcaccactgctgcctccatgccnnnnnnnnnnnnnnnnncnnnaatccannnnnnnnnnnnnnnngatgggaagccggaatacannnnnnnnnnnnnnnnnnnnnnnnnnnntgtccgctacgagggcttcttcagcctgtggaagggcttcacaccgtactatgcccgcctgggtccccacaccgtcctcaccttcatcttcttggagcagatgaacaaggcctacaggcgtctcttcctcagtggctgaagtggccgggggctcccacttgcctgctgcgtctatggccactgcgccctgggggcctgggctctgctgccctggacccctctatttatttcccttccacagtgtggttnnnnnnnnnnnnnnnnnggacttggtctgttctaccccctgctccagcttgccctgctcatcctgatcctgtgatttctctgtccctggctattcttgcagggagctggaaaacttcctgaggatttctggcctccccctgggttttagtttcagggcacacaggacagcannnnnnnnnnnnnnnnnnnnnnnnnnnnnnggcagaactgaggggatagggaggagnnnnnnnnnnnnnnnnnntcagaggacctacagagggagatgtggcccttcctccccctcactgagga

SEQ ID NO: 13418 - DNA, 798 bp, Macaca Fascicularis
  misc_feature (1)...(798): n = A,T,C or G
agtccctcatcatgatccagcccattctctactcttattcctttcatgggccaccagagnnnnnnnnnnnnntagcagcagcannnnnnnnncaganntttgctgatggatactttctttcaaattgtcatttatcttggtgannnnnnnnnnnnnnnnnntaaagctggctaccaggacatgcccgagtacgaaaacttcaagcaccttctgcaggcaccactggatgatgctcaagaaattctgcaagcacgcttcccgatgccacgttacattaacacggagcatggaggcagtcaggctcgattccttttgtccaaagnnnnnnnnnnnnnnnnnnnnnnnnnnnnnnatgcttggggccaggaaactggagcacccatcctaactnnnnnnnnnnnnnnnnnnnnnntcatggaccatttgaagaagctggctgtctccagtgcctgctaagctgaggatgcaaccaggaaattgaagannnnnnnnnnnnnnnnngttcaaaatgtctagaaaggcttaataacattcctgttacttttctagcagattttaacaaataatcaaggaaatnnnnnnnnnnnnnnnnnnnnnnnnnnnnnnnnnnnnnnnnnnnnnnnnnnnnnnnnnnnnnnnnnnnnnnnnnnnnggtcataaatgttttggtacttgtagatgtttatgtgctttttgtatcctaacttttagaatctaaataaaatcagaggtagtgtattttggcaacttgtttaggtgagaatcttaatgatcataaaggaaataaatctagatgca

SEQ ID NO: 13419 - DNA, 859 bp, Macaca Fascicularis
  misc_feature (1)...(859): n = A,T,C or G
gctcaaggannnnnnnnnnnnnnnnnnnnnnnnnnnnnnnnnnnnnnnnnnnttcaaggttgctgatcccacaccctttnnnnnnnnnnnnnnnnnnacgatgaaaacaaacttctttggtacccgagatgtgtgcacagaattactccctctaataaaaccccaagggagagtggtgaacatatctagcatgatgagtctcagagcccttaaaagctgcagcccagagctgcagcagaagttccgcagtgagaccatcaccgaggaggagctggtggggctcatgaacaagtttgtggaggacaccaagaagggagtgcaccagaaggagggctggcccagcagcgcatacggagtgacgaagattggcgtcaccgttctctccaggatccacgccaggaaactgagtgagcagaggaaaggggacaagatcctcctgaatgcctgctgcccagggtgggtgagaaccgacatggcgggacccagtgccaccaagagcccagaagaaggagcagagacccctgtgtacttggcccttttgcccctggatgctgagggtccccatggacaatttgttatggagaagagagttgaacagtggtgagctgggctcacagctccatccatgggccccattttgtaccctgtcctgagttggtctaaagggcacttacaaagtcataaatatccttatataagaaaaaaaaagatctcttatcaattagtactcactaatatacttctaattgagcagcctgcacactcagttgaccacctaaatctgtcaggtcttttgtggtttcctctgatgcagggagaggaaaaattgtaattgatgaaaataatgaatgaaaatcaa

SEQ ID NO: 13420 - DNA, 775 bp, Macaca Fascicularis
  misc_feature (1)...(775): n = A,T,C or G
tacagagtgatatgctgatcnnnnnnnnnnnnnnnnnnnnnnnnnnnnnnnnnnnnnntgtaggtctcagnnngagagaaatnnnnnnnnnnnnnnnnnnnnnnnnntaggaacctgctggtcatggtgtggaaagccaaatgaagctgccacagggtttcttgtcagtcctttgggaaatgggagggagtagtttggggaggagggtgggaaccctaatttccaaagaatgaaattttgatgttaaatgacatgtatacaaattctttcttaagtgaaagttatgctgcatcgaattgtaactaaaagtatagatcccacaaatagagaatgggttctagagagtcctgttctatagaaatccaaaactaaaatctctcataactcaagtatggaatactttttttaaagaaattcttatcatgggtgttgtaatcatgaggatgaatttgactttatgcagtgttctgcagcatgccacccccatgtctcatagcannnnnnnnnnnnnnncctgacataccctgcagctctcagctnnnnnnnnnnnnnnnntgtgggagaaagaggagctggagttatagaaatgatnnnnnnnnnnnnnnnnnnnnnnnnnnnnnnnnnnnnnnnnnnnnnnnnnnnnnnnnnnnnnnnnnnnnnnnnnnnnnnnnnnnnnnnnnnnnnactggatgaggcagatttttcacatttttgcaaatataatgttttatatatattaagtttaattttttcaatttttttagtgtaaaagcaa

SEQ ID NO: 13421 - DNA, 738 bp, Macaca Fascicularis
  misc_feature (1)...(738): n = A,T,C or G
ggacaaggagtgtgatattgcttcacttagtaacaacttgaataatgccaacaaaactgtagataatattccnnnnnnnnnnnnnnnnnnnnnnnnnnnnnnnnnnnnnnnnnaagagagcacctttgtttctgatttggagaaccagcccagtaacattgtgtctattcaaactgagccatcaaggcagttgccatctccacggacatcattaatgtcagtatgtcttggtagagactgtgatatgtcnnnnnnnnnnnnnaagcatttcattgagaattctgatggtataaaaagaaaaaaggaagaatgtcatctannnnnnnnnnnnnnaannnnnnnnnnnnnnnnnnnnnnnnnnnnnnnnnnnnnnnaagtgattttttttttttggtgttaatttgtaaaaatcattatttgttcaaaatgtatgtcccaccnnnnnnnnnnnnnnnnnnnaagtgaagaaaatgatactgctagcagtttatttaaaacttggggtcctttttaaataagaaaaattatataaattttagaagttatttcataaagccatacggtattgacatttttaaggtagtcaatgagtatttttgaattttttttttttgagagttattctggaaatgtgttataagctaggnnnnnnnnnnnngacagtctttatttttcttaaaaatttatatgattcaaaaccatttcttcaggttaaattgaggcattttaatctgcaca

SEQ ID NO: 13422 - DNA, 624 bp, Macaca Fascicularis
  misc_feature (1)...(624): n = A,T,C or G
gcatcccccaccccacccctcctccctgtagagctgatttatggcctccttctggggctgggctctgcaggccaggtgggtgtggcttgtgttttccttgctgtcctttctgcctgtactggatctgctattttcagggaaacaggccccagggcccccctgagcctcaccctaagcccttaggcctctgggagtgctgttgggttctatttatttatttatttgttcttttgttccctacccatgctcccagcgtcttccttgctgagcagcgggagaggtcctaccccgtcctctctctgaggccagggcccttccattccatttagcctctggatcatcctggctgggagaagtgggaccgagccacccagcccttctctccccaagcagccctacagccgggatgggaggcgcgtggcctctcctttatctgtctatttattttgtaagtgtgtattcatgtggaggaggtcgttgctttatttttttaaggctctggagtgttgtgtatggtttcttttcacatcccagcctcccatgggcacttccaagaagagaggggatttcttggaaaaggagagaggaatcccctagagcagggaaagcagtgcctgccanctg

SEQ ID NO: 13423 - DNA, 759 bp, Macaca Fascicularis
  misc_feature (1)...(759): n = A,T,C or G
tctcatttttcctcatgacagttctggaaagtgagaattaagcacagagaggtcaagtgacttggccaaggttacacagctagtaaggaatgggccaggaatcaaacttagattcgcctgtttcgaaaaccaacgcccatcatcagtcctaaccaccgtgctgtggcagacatggccttttactaagagactctgagatgttcctaattgtttcttctttccttgttcagtgtgacaacatctggggtgatggaaagtatgaagaaagtcaagaaggtgaccaacggctccgtggagccccagggcgagtgggaaggcgccgtgtgacagagccgaccctgaggatggcactgtccaaggaaactgttaacttattcatagtcctattggagagcaggagcagctcctccagtgaactattggcacctccgacagtgacaccagggcacatggctggagcacagtgctgcggaaacctgactttgtactctcttttatggaaacgatctgtggctggttcaaggcagctggatcctccttcaggcgggaatgggagggcgggcacagagaggaggagaggaagaggaaaggaagaattcattttttatttaggtttatttttttcttcttcatttgggagctctannnnntatgcagttgtgaccccacgtgtggggcagcgtnnnaaggacggctggtggagggggannnnnggtgcgaggtatctgtctnnnnntttannnnntgtctactgaggac

SEQ ID NO: 13424 - DNA, 619 bp, Macaca Fascicularis
  misc_feature (1)...(619): n = A,T,C or G
gcgggcattggtgatatcctggaagaaattatccgacagatgaaagttttccaccccaacatccacatcgtgtctaactacatggattttaatgaagatgtgagccaaatcttgtttgggctgggaaaggacgaggggtggggaccaccagccagggcggttaactctgcatgaaccctaacctggggaagaaggggaggtaagccacactggcttcttcgccctcttgcagttgtttatgggttacttttcggccaggcnnnnnnnnnnnnnnnnnnnnnnnnnnnnnnnnnnnnnnnnnnnnnnnnnnnnnnnnnnnnnnnnnnnnnnnnnnnnnnnnnnnnnnnnnnnnnnnnnnnnnnnnnnnnnnnnnnnnnnnnnnnnnnnnnnnnnnnnnnnnnnnnnnnnnnnnnnnnnnnagcactttgggaggccgagacgggcggatcacgaggtcagnnnnnnnnnnnnnnnnnnnnnnnnnnnnnnnnnnnnnnnnnnnnnnnnnnnnnnnnnnnnnnnnnnnnnnnnnnnnnnnnnnnnnnnnnnnnnnnnnnnnnnnnnnnnnnnnnnnnnnnnnnnnnnnnnnnnnnnnnnnnnnnnnnnnnnnnnnnnnntg

SEQ ID NO: 13425 - DNA, 863 bp, Macaca Fascicularis
  misc_feature (1)...(863): n = A,T,C or G
taccagtcannnnnnnnnnnnnnnnnnnnnnnnnnnnnnnnnnnnnnnnnnnnnctgcaggcccagcacagnntgagggactcgctggaaaacacactgacagagagcgaggcccgctacagctcccagctagcnnnnnnnnnnnnnnnnnnnnnnnnnntggaggcnnnnntggatgagatccgggctgacctggagcggcagaaccaggagtccnnnnnnnnnntggacgtccgggcccggctggagagtgagatcaacacataccggagcctgctggagagcgaggacagcaagctgccctgtaacccgtgctccactccttcatgcaccccgtgtgcgccctccccatgtgtgccccgcaccgtctgtgtgccacgcatcgtcggcgtgccttgctcaccctgcccccagggccgctactgaagcccctttgtgctggtggatcctggagggcctgggnnnnnnnnnnnnnnnnnnnngtggccaccaaaagagctgggccagacccggccagcaaggaagaccctgagcaggaccgtggatcacctgcaacaagctctgatactccagcgggtgctcaagccctcatcacttcaaaactgcctctttttttcaatgggtgaactgtcctcttaggtgatgtttctggttgtctgtgctgcctcaaagagcatgtgttgttagttaactggcaaatagagctgcactcaatggccttnnnnnnnnnnnnnnnnnctctttgtcacttacgctgctgcatccacaggccaatcctactcaactgggctcaagaggaaggggcaaattctgtatttatttttatgctccttctgnnnnnnnnnnnnnnngagaggtgtaca

SEQ ID NO: 13426 - DNA, 723 bp, Macaca Fascicularis
  misc_feature (1)...(723): n = A,T,C or G
ggtgcattggtcnnncatctctgtcgatgtgaggcgacgcaccatcacctatttgactcgcagcgtaccctaaaccgccgctgccctaagcatattgccaagtatctgcaggcagaggcggtaaagaaagaccgactggatttccaccagggctggaaaggttacttcaaaatgaatgtggccaggcagaataatgacagtgactgtggtgcttttgtgttgcagtattgcaagcatctggccctgtctcagccattcagcttcacccagcaggacatgcccaaacttcgtcggcagatctacaaggagctgtgtcactgcaaactcactgtgtgagcctcgtaccccagaccccaagcccattaatgggaagggggacataggagtcccttcccaggaaactccagtccctttcccctctcgcctcttcccactcagttccctttggtttttcatatttaaatgtttcgatttctgtattttttttttctttgagagaatacctgttgatttttgatgggcagggggtggctacagaaaagcccctttcttcctctgtttgcaggggagtgtggccctgtggcctgggtggagcagtcatcctcccctttccccgtgcagggagcaggnnnnnnnnnnnnnnngtggtgggtgggcaatagcatcactgcctgccagatcctcaaacttttttatatatatatatatatatatataaatgcc

SEQ ID NO: 13427 - DNA, 734 bp, Macaca Fascicularis
  misc_feature (1)...(734): n = A,T,C or G
tccgagactttagatatcaatttgagcactgttcataaagacctttgctcaaatcacaaataaaattacaagatcctgatctgtccactgatactgagggaattcctggggaagtcggagcctgagcaccagcactgagcctggctgggggaaggaagcatgaagacctctgccctcctcccattttcctccagtcagcagcccagcatcctggagccccggggggccagcacctgcaatgctcaggagcccaacttgcaccaggagaggactcagatgccaggtggggaggaccctgcaggcctgcagtgcccagaggcctgagcgtggctgtgtgtagaaagcgtgggtggcaggcacgtggctctccttgccgctacgcaacctgagatcttgttgggagatttattgacagcaggcagccatcactgcctggttgatgctgcactgagctgggcagggggatgccgggcaggggactcttagggctcaggaccatgctgagctttccgacaccacccacaaagaacatggggtccaggttctttctgccccttccnnnnnnnnnnnnnnnnnnnnnnnnnnnnnnnnnnnnnnntcttgccctgtgtacctgcttgccttcgtcggctgccccgcctcctctgggctggcccactcacccacagtggaggtgcccaggatctgcacttcctcccctttcacccacctgtacgcctaacctggccttagac

SEQ ID NO: 13428 - DNA, 631 bp, Macaca Fascicularis
  misc_feature (1)...(631): n = A,T,C or G
ccaagtgagtgagggactcccgnnncgcccncnnngcagcggatgggantcagcnnntgccccccggctggtgcctcactggtcccctgcccatgcgccgcctttgtgcgcaggtacgaactgggccccgcactctacttgggctggagcgcctccctgatctccatcctgggtggcctctgcctctgctctacctgctgctgcggctctcacgaggaccccgccgccagcgcccggctgccctannnnnnnnnnnnnnnnnnnnnnnnnnnnnnnnnnnnnnnnnnnnnnnnnnnnnnnnnnnnnnnnnnnnnnnnnnnnnnnnnnnnnnnnnnnnnnctctggcccgtaggccccactggccttcccagtgccccaaggagaggggtcctggcctgggcccattcccctgtagtaacctcaggggccggccacgccctgctcccggagccccgccttggccacgcccccgtgtcttgcactcccgcggcccctgcaggtcaagaactgctcttgggaagtcgcatatcccccccctgaggctggatccctcatcttctgaccttgggnnnnnnnnnnnnnnnnggacggaggtgtccccgcacgtttgtattctgtataaatacatgca

SEQ ID NO: 13429 - DNA, 899 bp, Macaca Fascicularis
  misc_feature (1)...(899): n = A,T,C or G
gacgcagatgactgcatgagngtagtgaggtcacagatgcaggatacagaagttccaaggcacccaactgcagatatcgggccatggcgagcactagacctgtgtccattgcctgcgagggtaacccacaggtgcctgtgcactttgacggttagatgccaccctgtagggattatcgcgagtggttgaccttacacttaccccttaaatagcagtgagtaatgcgtttgagctgtcccaggctctgtctcctcagctcatttcttattctttttctctatataactcgttctattaaatacattgcaccaaagagaaatggagacataaacctataatgaatgaggctgggcttttctgtaataagcttccttttacaatactgctcagcttagctctctcagatcctatcctgtggaatttagttattatgtgtatttatgtagtatttcaaacatttcaaaaatgctttcatctatgtttatcacattttaataccacagcacttataatgatgtcattacatatagaagctcaaagttaagnnnnnnnnnnnnnnnnntaaaattagtggaagaattgagacaaaaatccagtgtagctggccacttattcagggctttttctacttcatcacaaggaatgtttttaaagtctctgcttttttttaatccttaaaattcacctgtccggggaggcattaaaaatttggcaatgtatgccagcaaaatgtgagctctgtattttttggcattgttatgtttgggttgaataagattaagaaaatgatattgggaattttctttttcctgaacctttgaatcaccctagtaagtcaaagtattaaaaaaagtactagatcattaagactcatgtgctcttgctgactgaaagatttt

SEQ ID NO: 13430 - DNA, 774 bp, Macaca Fascicularis
  misc_feature (1)...(774): n = A,T,C or G
gggagatagacaatagccaggtaaacacgaaaggaaatgagatcatttcagagggtgctaagtgacttagtacagacagtaaaacagggcaaaggaacagtgagtccctggggagggagttggtgactgcttcaggcggggaggtcgcagaaggcctctctaaggtgcctcctaagaaggagtcagccatttgaagacctgggggannnnnnnnnnnnnnnnnnnnnnnnnnnnnnnncaaaccatgacccccggagcatgggaagccccagtgactnnnnnnnnnnnncccacctgccatgctcactctaccccttccacctccaggtttcatagggaaggggatgctgaccggggtcatcgcaggagccgtattcacctccccagcagtgggcagcatcctggcagccatcagggcagtggcccaggctggcacaggtaagcctggcatgcaggaggggctgcggcggggagggcacagtaagggtgctgagccctgccggctgctcccgcagtggggaccctcctcatcgtgaagaactacactggggatcggctcaacttcggcctggccagggagcaggcccgggctgaagnnnnnnnnnnnnnnnnnnnnnnnnnnnnnnnnnnnnnnnnnnnnnnnnnnnnnaagnnnncaggccggcgggggctgtgtggcacggtgcttatacannnngtaggcttccactggggacacagnnnctggccagcccctnnnagccttccnnngnntggcagcaccctgtaactgga

SEQ ID NO: 13431 - DNA, 720 bp, Macaca Fascicularis
  misc_feature (1)...(720): n = A,T,C or G
actggggagtgctgagcacnntggggcagatagatggctggagctccactcagctccgcgttgtggtctccagtttcctacggcagagtggtcggcatgtgagccacctggannnnnnnnnnnnnnnnnnnnnnngttatacgctctgtggactgcggccagagnnnnnnnnnnnnnnnnnnnnntgggagtttagccaagcagctctcttcctgggcaccctgcatctccnnnnnnnnnnnnnnnnnnnnnnnnntctggcccacctccttgtactgcctggtggctttggcccaatcagtaactgggggcctgagnnnnnnnnnnnnnnnnnnnnnnnnnnnnnnnnnnnnnnnnnnnnnnnnnnnnnnnnnnnnnnnnnnnnnnnnnnnnnnggccttactcctcttgccatttctgtcatccctcctcctaaatttgctgtggtgtttagtcccacccaactatctagtctcaccagtgctcaggctgtggctgtcactcctgagcaaatggcctttctgagtcctgagcagcgacgagcagttgcatgggcccagcatgagggcaaggagagcccggaacagcaagnnnnnnnnnnnnnntggnnnnnnnnnnnnnnnnnnnnnnnnnnnnnnnnnnnnnnattgactatcagcttccttggccacctgctctgagcctgtctctacagtagaaggagattgtggggagagaaat

SEQ ID NO: 13432 - DNA, 761 bp, Macaca Fascicularis
  misc_feature (1)...(761): n = A,T,C or G
agagccagtatatgaagcagannnngagcccgagcccgagaatgactatgaggatgtggaggagatggacaggcatgagcaggaggatgaaccagagggggactatgaggaggtgctcgagcctgaaggttcttctttttcttctgctccgnnnnnnnnnnnnnnnnnnnntggagctgggactctggggatctcagctgtggccctatatgattaccaaggagagggaagtgatgagctttcctnnnnnnnnnnnnnnnnnnnnnnnnnnnnnnnnnnnnnnnncgaggnnnggtggcggggacgttgccatggccactttggactcttccctgcaaattatgtcaagcttctgnnnnnnnnnnnnnnnnnnnnnnnnnnnnnnnntgatttcccatgtccaaagtggctctgcctccaccccctccctattccttttgcagatgtctaaccagatgagattctggacagacttccctctcccgcttcattaagggcttggggcagagatagcatggggaaggaggtccccttccccaagagtcctctctaccctggatgagctcgtggacatttctcttgtggtcttgcctccttccccatgaacacctctctaccaccccaagttctgctctagtcctctatgagctctgggcttcctggtttgtttacccggaaaagtacgtctagattgtgtggtttgcctggttgtgctatttgcccactttccttccctgaagaaatatctctgaaccttcttt

SEQ ID NO: 13433 - DNA, 727 bp, Macaca Fascicularis
  misc_feature (1)...(727): n = A,T,C or G
ctgctgctacatgaagctgagtgaccctggcggctannnnctgagtcagtgggtggctgggctgcctggctatgaactgcnnnacaggcttcgggagggggcctgcnnnnnnnnnnnnnnnnnnnnnnngcggctacagaaagctggccctggcctccgaactcactgctaccgtgcagcactggagacagtcatccgacgggcccggcccgagctccgtcggccaggcgtgcagggtatccccagggtccacgagctcaagattgaagaatatgtgcagcgggggctacagcgagtggggctggacccccagctgccactgaatctggctgcccttcaggcccaccaggcccaggagaaccgtgtggtggccttcttcagcctggctctactgcttgccccactggtggagacgcttattctactggaccggctgctgtaccttcaggagcagggtttccatgctgagctcctgcccatcttcagtccnnnnnnnnnnnnnnnnnnnnnngttctggtggccaccaagatgcccctgggtcaggctctttctattctggagactgaagacagctgatgcagcctgaggacacatctcagaccccatcatctgaaagtgcccagatagcacagtggcagagtacacctcatacagagaagcagcatcctgcatcctcctgagtcgtggttccttcagtttcatcccctttctctccctccatggatt

SEQ ID NO: 13434 - DNA, 735 bp, Macaca Fascicularis
tcaagtatcatttggttatcttactgggacatttttattgatattctctacactaaagttttcacatttaccatcattccattttgtaccagttaaaggcattttgatgatgctttttcttgatgctaagatcactgcagaagaataacctgaccttttctttgcatttgttttgaatgtctaacaccattagcttttgtgacctggttaagaagtattagtgccacaagcccgaaaagacagttctcatgtggcagtggtgatatggcatccagagggccagtgtttctacttttgtgggacttcagtcatgctgataatagtatcttctgtttatacaattctgtaatatttatgtgtacagttagtattctaatgaaggaatgaagagtttgaactagaaggtaggtttaagccatcaccaggcctttgcaaatggcctaaatggtgttccctttgaagtaacacttgccacaagtatataatctatattaattgtgttttgcataaaattgccaaaacacagtaaagtgtatatagtggtataagatcttgaaaataatctctataattgtgctctttatctgtgaatgggaaaagccatttttagtaagtgactaccatttgaaaaactaaattggatgtatatctgaatgttgcattgtattgtacagtatgcatattattgtttgtggttgcatatggcaatgaagtgtttgttttataaaaaaaaaa

SEQ ID NO: 13435 - DNA, 769 bp, Macaca Fascicularis
  misc_feature (1)...(769): n = A,T,C or G
tccaaacagcaccctacctggtttttatccacaaaggtagaggccacatgtttttaaagcatgagaaacatagtttgtcctctccttttatccaagcaggaagattctatatcctgatagtagagacagactccaggcagccctggacttgctagcccaaagaaggaggatgtggttaatctgtattacctggtttgtcctaaggccataggtaaagagtaccagctctggctggggtccatgaagccccggccaagcagccaaatcttgcctgtgctgggcataaaaccctccgctttcacatctctgagctatatccccattagtgaagatggcttttgctttagagtttggctggggagcacttagttcttcccattgcaaaaggtaatgttgcctggggcttaacctacctgcccttttgggcactgtcggnnnnnnnnnnnnnnnnnnnngtcaggggcaaggactggtggaggagagttagcccaagtctgggctctgcccagatgccatcacatccctgatactgtgtgtgctttgaatcgccttccctgagaaaggaagaggggatctttggactatgttcttggctccagacctggaatccacaaaagccaaaccagctcatttcaacaaaggagctctgatgtgaggggtaaggctgccccctgcccccgggctcttcnnnnnnnnnnnnnnnnnnngtgaacaccatcatgcctttataaaggatcctttttacaggaaaagcatgagtggtggctaa

SEQ ID NO: 13436 - DNA, 638 bp, Macaca Fascicularis
  misc_feature (1)...(638): n = A,T,C or G
ggctgaggggcaaggcggaagtcaatcaagagactnnnnnnnnnnnccttgaggagaatgaccagctgatccgctgtattgtggagtatcagaacaagggccgggggaacgannnnnnnnnnnnnnnncatgtgttacatagaaatctcatttatttggctaccattgcagatgccagtccaaccagcacttcaaaagcaatggaataatctttcaaaagcaatagaataannnnnnnnnnnnnnnnnntgaggagtaattgaatgtaatccatctctcacaaaatggagacagggtctttatcagctcaactggttaaaacatgaatgaaacctccgtggctctttcaaaaaatgtgaaaatgtgaagaaagctcctaacttaactgtattctcaatgtaaatattttttaaataattaagcaaatccatgaataagttgagcccaggtgtcctctttcatgaacttggagcatgtttggacaacaaagacatcaatgggatgttcaagtctactttttagtttcaacatgaagaggaaactgagtaggtgttgggcaggaattggtgagactcatgacttgaganccttgctaaatggacatgtaactgtatgctccttcctaccagtttgcaaat

SEQ ID NO: 13437 - DNA, 746 bp, Macaca Fascicularis
  misc_feature (1)...(746): n = A,T,C or G
agaacacgagaaactcacagtggatgaatggaagcagcacatctacaaggagattgtgaacttcagcnnnattgcccggaaggactcgcggcgccggagtggcatgaaactgtagggactcatctcacatggcaccgctggccagacactgcccaaggaccagtatttatttgtcactaccaaactcagcccttcttggaatacagcctttcaagcagaggacagaagggtccttctccttatgtggggaatgggcctagtagatgcagagttcaaagatgttggttgggagaaactagctctgatcctaatgggcnnnnnnnnnntgcccatctggagaactgcctgcaggtggggacctttccttcccactggagtggggctgagagggcgctgagccaggccaggnnnnnnnnnnnnnnnnnnnnnnnnnnnnnnnnnnnnnnnnnnnnnnnnnnnnnnnnnnnnnnnnnnnnnnnnnnnnnnnnnnncttgattccctcacagttctggaggctggaaatctgggatggaggtgttggcagggctgtggtccctttgaaggctctgggtaagaatccttccttggttctttttagctcgtggtggcagtgggcagtccgtggcattccccggtttagtgctgcatcactccagtctctgtcttttctgttctctcctcttttaacaacagtcattggatttagggcccaccctaatcctgtatgatcttatcttgatcctta

SEQ ID NO: 13438 - DNA, 721 bp, Macaca Fascicularis
  misc_feature (1)...(721): n = A,T,C or G
agctgctgctggaggcctggaggnnnngctgcgggaccagctggccctgcgagccttggaggaggcggtgagcaggggagggtgcccggggcacacagggcccgcccagccagccaggctcacctgcccctcccatgcccacagctggagcagggcctgagccttgggccagtggagtccctggacggtccagcaggtgctgtcctggagtgcctggtgttggaatccagaatgnnnnnnnnnnnnnnnnnnntccccgttgtctacctgctgggnnnnnnnnnnnnnnnnnnnnnnnnnnnnnnnnnnnnngctggcggaggcgctggagtcgcagaccctgttggggccgcttgagctggtnnnnnnnnnnnnnnnnnnnnnnnnnnnnnngcaggagcgcagcaccgtgtccctgccccccgggctcctggggagcagctggggtgaaggggcaccggcctgggtcttgctggaggagtgtggcctggagctgggggaggacacgccccatgtgtgctgggagccgcaggcccagggccgnnnnnnnnnnnnctacgcctccctggcactgctatcaggactgagccaggagccccactagcctgtgcccagcatggcctggcagctctccagcagggcagagtgtttgccnnnnnnnnnnnnnnnnnaggaaggccagaagcccagcagccacgtggccagtctaccatggggccca

SEQ ID NO: 13439 - DNA, 907 bp, Macaca Fascicularis
  misc_feature (1)...(907): n = A,T,C or G
caggtgnnnnnnnnnnnnnnnnnnnnnnnnnnnnnnnnnnnnnnnnnnnnnnnnnnaatagtaacaagtattgaaataatccataaacaagtagacgttgcaaaaaaaggacaagaagtaggtgtaaaaatagaacctatccttggtgnnnnnnnnnnnnnnnntggaagacattttgaagatacagacattcttgtcagtaagatcagccggcagtccatcgatgcactcaaagactggttcagagacgaaatgcagaagnnnnnnnnnnnnnnnattgtggagctgaagaaagtatttgaaatcatctaatttttttnnnnnngagcaggaactggagtaaatgcaatactgtgttataatatcccaccaaaaaatggaacagacgtatctggacactgatggacttaagtatggaaggaagaaaaataggtnnnnnnnnnnnnnnnnnnnnnnnnncaagaaacttacactggtttgacagtggtcaattacatgtccccacagttccnnnnnnnnnnnnnnntcacctctcctttccccaacccttctctacttggctgctgttttaaagtttgcccttccccaaatttggatttttattacagatctaaagctctttcgattttatactgattaaatcagtactgcagtatttgattaaccaannnnnnnnnnnnnnnnnnattcttgggacttttttgatgtaagaaatacttctttatttatgcatattccccccacagtnnnnnnnnnnnnnnnnnnnnnnnnnnnnnnnntagggcttttataaaatagaaaattaggcattctagtatttatttgctttgtgtgaaannnnnnggtgtaaaagcacannnnnnnctttttactgcttgtgtagtcatgagtccattgtaatcatcac

SEQ ID NO: 13440 - DNA, 788 bp, Macaca Fascicularis
  misc_feature (1)...(788): n = A,T,C or G
ccggaccggcagtcacnnnctgccctcgttagctacattgaggagccctacatggacatagacagggacttcactgaggagtgaccttgggccaggcctcgggaggctgctgggccagtgtgggtgagcgtgggtatgatgccacacgccttgccctgttcccgtttctccctgctgctctctgcctgccccaggtctttggatgcaggcttggtgggagggaagtcctagaagcccttggtccccctgggtctgagggccctaggtcattggagagcctcagtccccataatgaggacggggtaccatgcccacctttcaacttcagaaccctggggcccaggcccacccagaggtaagaggacttttagcattagctctgtgtgagctcctgccggcttcttggccatcagtcccggggtagggaggaagacatgggtgaccccccatctgtgagccaagcctcccttgtccctggcctttggacccaggcaaaggcttctgagccctgggcaggggtgatgggtaccagagaatgctgccttcccccaagcctgcccctctgcctcattttcctttagctcctctggttctgtttgctcattggccgctgtgttcatcccagggggttctcccagaagtgtggggggagctttccctccatcccttgtggcacagggcagccgctcctgcctgagcctggacacggggcccttccttgtgttgccaatttattaacagcaaataaaccaataaaatggaaaaaaaaaaaaaaaaaaaaaaaaagg

SEQ ID NO: 13441 - DNA, 723 bp, Macaca Fascicularis
  misc_feature (1)...(723): n = A,T,C or G
accagcagctnnnagtagagaaaggctatcccagaaatattgcccacaactggatgcactgtcgtccccagactgtagacactaccccatcaggtggggataccacnnnnnnnnnnnnnnnnncaaccttggataccactctctcagccacagataccacatttgaatactnnnnnnnnnnnnnnnnnnnnnnnnnnnnnnnnnnnnnnnnnnnnctccaccacccaccctttcattccctcccagaggcctaatacctgaatgaaatacctgtctgctcagttgaacctcgcaggtgctgtagcaggggcatgactgtagaactcaggcctctaacagnnnnnnnnnnnnnnnnnnnnnnnnnnnnntctttcaatcctgagaagtgctcccctaactcagatttggcccccaactccatttcctgtctgtcttagacagcccttccaactgcgtcatctcttttctggaggtcaatggtggaggcagatgcctgggtcctgttcttcttacataaaatgcaagaaaacagcatggccactaaactgagcaagggcgttggaatccttgagaatcacatttatgtgcttatggttatgggcaagctaattaaccttgttgaacctcagattccccatttgcaacattaggttaagaccagtcctgcagggttgttgcactaaatgaaatactgtatgtgaagtgcctggcacagtgtctggt

SEQ ID NO: 13442 - DNA, 737 bp, Macaca Fascicularis
  misc_feature (1)...(737): n = A,T,C or G
acaaattacatggatttcagtacnnncctgggaatcgaataggtgnnnnnttcattgatgatggaagtaatgcaacagatctccttagaaaaatggcaacacagatggtagctgcacagcttgcatcagtggtgtggaataacccaagtcagcaacaacttatgcaatttggaggaagctctggatcacagttgcctcaaatccagacnnnnnnnnnnnnnnnnnnnnnnnnnnnnnnagcccctcctgaaactcctgtgaaagaaagactttttattgtgtttaatcctcatcctttacctttagacgtattagaagatatattctgtcgtttnnnnnnnnnnnnnnnnnnnnnnnnnnnntcaggaaaaaatgtggggtatgccaagtatgccgatagaataagtgctaatgacgctattgccactctacatgggaagattctgaatggggtgagacttaaagttatgctggcagattcgccaagagaagagtctaacaaacggcaaagaacttactgattcttgagaacaaagactaaataatgacataatcctcagctgactgnnnnnnnnnnnnnnnnnnngcattccnnnnnnnnnnnnnnnnnnntttttttcatatacctgatagtctgtgtacagcattgttttgtctgggaagcagggattgctgacatgtatttttgaatccatacattaatgctaaaactaatatagtagttgttccttagagca

SEQ ID NO: 13443 - DNA, 748 bp, Macaca Fascicularis
  misc_feature (1)...(748): n = A,T,C or G
agtgtnnnnnnnnnnnnnnnnnnnnagaagtnncccccaaatcaggtcaatgtgtgccctcntgagctcccacccaggcatctgcagtgctcatgatcatgtgtcccccaactccgcccctcacggtttgggcctgtttctggcaaagagtcaggaaggttactgaattagggaacattttctgcaccttctgattttacttaagcagctaccattccatggacttgcctcccagagcagcacaatgcccgtctgagccccacgtggcaggagcctctgggacggggcacacacgggccgagcctctgtgctatctcgtcctccgggcgcctcagactcggggtgagggaggcgggcagcctctcgccagccttcccgtccttcagttcaaccacatctttggagcgtttttgttttctctcccaagggccgtcccgttgtgttcggaagggtgagtggctggttccagggcgggctggtaccagctccggggtggagtgaacagcggcggctgtccctgnnnnnnnnnnnnnnnnnnnnnnnnnnnnnnnnntgtttacatttgttttattgtacataggtttgtaaacattattgcctaagatatttgtatataacttgggctttgtagcttttatttattcagaactcatatggcatgttaatgactctgatggtgtcctactctgggcagctgtataggatcatcatgtggttacaaaaaatacttcccctcagaaaaaagtct

SEQ ID NO: 13444 - DNA, 1191 bp, Macaca Fascicularis
  misc_feature (1)...(1191): n = A,T,C or G
acgacggcaaggattatctcaccctgaatgaggannnnngcgctcctggtccgcggtggacacggcnnnnnnnnnnnnnngagcaaaagtcaaatgatggctctgaggctgagcaccagagagcctacctggaagacacatgcgtggagtggctccacagatacctggagaatgggaaggagacactgcagcgctcagaacccccaaagacacacgtgacccaccaccccgtctctgatcatgaggccaccctgaggtgctgggccctgggcttctatcctgcggagatcacagtgacctggcagcgggatggggaggaccagacccaggacacggagcttgtggagaccaggcctgcaggggatggaactttccagaagtgggcagctgtggtggtaccttctggagaggagcagagatacacgtgccatgtgcagcatgaggggctacccgagcccctcaccctgagatgggagccgccttcccaacactccatccccatcgtggtcatcattgctggcctggttctccttggagctgtggttggagctgtggttgttgctgtgatgtggaggaggaagagctcaggtagaaaaggagggagctactctcaggcttcgtgtagcgacagtacccagggatctgatgagtctctcacagcttgtaaagcctgagacagctgccttgtgtgccctttaacagcatctgcttcattcccctcccctttgtgtcttaagggactctggcttctctttttgcaagggcctctgaatctgtctttgtccctgttagcataatatgaggaggcaaacatccacctccatgtctaccatgacccccttcctcacactgacctgtgtgccttccctgttctacttttctattaaaaataagaaactgagcagtgcacggcggctcacacctataatcccagcactttgggaggccgaggcaggcagatcacgaggtcaggagatcgaaaccaacacggtgaaaccctgtctctactaaaaaatacannnnnnnnnnnnnnnnnnnnnnnnncannnnnnnnnnnnnnnngtcccagctactcaggaggctgaggcaggagaatgatgtcatcccaggaggcagaggttgctgtgcgccgagattgtgccactgcactccggcctgaggacagggtgagactcttctcaaaaaataaaa

SEQ ID NO: 13445 - DNA, 751 bp, Macaca Fascicularis
  misc_feature (1)...(751): n = A,T,C or G
cccagtgatttccaaaggcccttccagtttcatttgtnnnnnnnnnnnnnnnnnatattctgtgattcccctccctnnnnnnnnnnnnnnnnnnnnnaggaattcctctacagattcttgccacagaaaatcatatacctgaatcagctcttgcaagaggactccctcaatgtggctgacctgacttccctccgggccccactggacatccccatcccagaccctccacccaaggatgatgagatggaaacagataannnnnnnnnnnnnnnnnnnnnnnagtgtggatttctccctgggaatgagaaagtccnnnnnnnnnnnnnnnnnnnnnnnnnnnnnnnnnnnnnnnnnnnnnnnnnnnncattctggtgattacatggnnnnnnnnnnnnnnnnncaagattgaagatggaaatgattttggggtagcaatccaggagaaggtgctggagagggtgannnnnnnnnnnnnnnnnnnnnnnnnnnnnnnnnnnnnnnnnnnnnagtacttctcagaacgtggggatgctgtggccaaggcctccaaggagactcatgtaatgnnnnnnnnnnccttggtgcatgagcgagatgaggcagcctatggggagctcagggccatggtgctggacctgagggccttctatgccgagctttatcatatcatcagcagcaacctggagaaaattgtcaacccgaaggggaagagaagccatctatgtactgaacccaggactagaaggaaaa

SEQ ID NO: 13446 - DNA, 756 bp, Macaca Fascicularis
  misc_feature (1)...(756): n = A,T,C or G
gtactacaacgactgnnacgcggtgtgcgggatgnnnannnnntccccatcgaggtggacctggcgcacaccacactggcttacggcctcaaccaggaggagttcacagatggggaggaggaggaggaggaggaggacacggcagctggggagccgtccagggatacacgaggggctgctgggcccttggacaagggtggaagcnnnnnnnnnnnnnnnnnnnnnnnnnnnnnnggcgccggggggcagggtgcgtgggaggacggagcctgggagcggggcggggccgccaagcaagggggcgacgcataaaggcctgctggcttggggcgcctgcctccctgctcctttgtcctcgcacagtgaacctgggctcctgcccaggacaggcaccagggtcatggcctgggacctggacactggcccctccaccctccctcccctcccggctccctggccagagggagagcttggtctctggacctgccttaggaagcagagggagggcaggaaggaaaagaaaggacttggaggtggcaggagtccgggccctgctccttgtgggcactcgcactgcccccggagcctgccggcagtggggccagcgatggacagctgaagttggggccagtgtctcctgggcacccttgcctcgccccagaccggcccgtccagtccccatcacacctcggcggcctttatttattctcttcccccagcttggccacttcttgaaggagggctgggctctgggcc

SEQ ID NO: 13447 - DNA, 747 bp, Macaca Fascicularis
  misc_feature (1)...(747): n = A,T,C or G
gaagattcaacaaagctcnntgtggcatcaaatcaaggagctctgcatattgttcagctgtcgggaggaagcttcaagcacctgcatgctttccagcctcagtcaggaacggtggaggccatgtgtcttttggcagtcagttcagatgggaattggctagctgcgtcaggtaccagtgctggagtccatgtctacaatgtaaaacagctaaagcttcactgcacggtgtgctatggccattgcccctaatttgagtacagcatcccagacaaacagtatacagattggagcnnnnnnnnnnnnnnnnnnnnnnnnnnnnnnctttggctccaaagggatactcctatcacacacatcagttttcatcccaagagaccgatgcacatccttctccatgatgcctacatgttctgcatcattgacaagtcattgccccttccaaatgacaaaaccttactctacaatccatttcctcccacgaatgaatcagatgtcgtccggaggcgcacagctcatgcttttaaaatttctaagatatataagcctctactcttcatggatcttttggatgaaagaacactcgtggcagtggaacggcctctggatgacatcattgctcagctcccaccacccattaaaaagaagaaatttggaacctaaaacagggcactgtctgtgtccttccttgaactgtctaccctgtcgcttttcacaaatcatggtaataaacaagttattctgaggact

SEQ ID NO: 13448 - DNA, 756 bp, Macaca Fascicularis
  misc_feature (1)...(756): n = A,T,C or G
agcacgtgcacagccagattctcctgggtgccccgctgaccccctgagatgggttttctggtcccagcagactcatgaatgccggtcacagggggaaggggctccagaacatttctgtgaattgtctcaacattcttgtgaggcaggtatgatcatccccattctacagattagaaaactgaggttcagacagctggagggccgtgatcactgtctttgcccttgctgctccacaccccggtggtcaccccagactcctccggcttttcccgggggcttttgcctggcatgttttgctctcctgattttgagcaccccaagactttccttgtgctcgttaccaaggcggcagagggtctgggcacaaggagagagaggggccctgtggtggccgagacatgggagggactgctccgaagcccagcagcccttggagaatgtggccaaagtcccagacctcccccaagaaaagtccagggatacgtgtctctcacacacacctttggcagccatccccagggactctaggttgagaagctctggcctgagccacgcccagctgttgacaagaggtaacgaccccactggtgatgggccctccgtgcctccatctgcctctgcctctgcctctgcctctgcccaccccggccacgaccnnnnnnnnnnnnnnnnccggatgtccatccagcagnnnntaaaggggcacccgaggccatgggcaggctctcatggaaccacccngcacatcatagcctt

SEQ ID NO: 13449 - DNA, 710 bp, Macaca Fascicularis
  misc_feature (1)...(710): n = A,T,C or G
tnnngnnnnnnnnatggccacactgtcactgtggtgggagggctgggagtggctgtggtctttgctgccctcctactcagagtctacgcgcggggccgtctaaagcaacggggaaagaaggctgtgcctgttgagtctcctgtgcagaaggtttgagggtggagagggcctgaggggtgaagtgaaatagtcttctcaccattttctcctactgtaacccgagggagctggctcaaagggcaaaatgcaggtgttttctcagtatcatagactctgcagcagggggtggggagcccaggaggcagccttcccttttgccttaagtcacccatcttccagcannnnnnnnnnnnnnngccccagggtagagatagtcctcagtgagggggagtttggggtcaagagggcataggtaggttccacagttccccctcccagaagtttccttaagtcttgccctagctgtgctctgctgccttccagactcccctctgcaaatacctgcatttcttaccctggtgagaaaagcacaagcggtgtaggctccaatgctgctttcccaggagggtgaagtgaagatggtgctgtgttgtggaaaggggatgcagatccctgcccagcaccaccacctcctatgctcctggatccctaggctctactccatgagcctgtcgtaggttttggtactttagaaatgtaactttttgctc

SEQ ID NO: 13450 - DNA, 739 bp, Macaca Fascicularis
gataccccagaatgatcttctaggtcatccaaaaaccagagctttataactcacggtggatccaatggcatctacgaggcaatctaccatggggtccctatggtgggcattccattgtttgccgatcaacctgataacattgctcacatgaaagccaaaggagcagctgttagattggacttcgacacaatgtcgagtacagacttggcgaatgcactgaagacagtaattaatgatcctttatataaagagaatgttatgaaattatcaagaattcaacatgatcaaccagtgaagcccctggatcgagcagtcttctggattgaatttgtcatgcgccacaaaggagctaaacaccttcggcctgcagcccatgacctcacctggttccagtatcactctttggatgtgattgggttcctgctggcctgtgtggcaactgtgatatttatcatcatgaaatgttgtctgttttgtttctggaagtttgctagaaaaggaaagaagggaaaaagtgattagttatatctgagatttgaagctggaaaacctgatagatgagactacttcagtttattccagcaagaaaggttatgatacaagatttctttcttcctgtgaccaaaagaaaaataaaaaataaaaataaaaatcttttcaaaatgtactttgtcaaataaaaatttgtttttcagagatttaccaccccagttaatggttagaaatattttgtggaaag

SEQ ID NO: 13451 - DNA, 752 bp, Macaca Fascicularis
  misc_feature (1)...(752): n = A,T,C or G
tgcagtaaatccnnangagttactaaaccaaggagatttaactgnangacggacatgagcgtgggtgctgacctggaaagagcagctctatctgatctcaaaatgcatatactgggaacaggatgccatagcccacaacggaaccagaatgaatctctgaaggacaagactctgcttttgccactcttcctctttcctggtatagaagatggatnnnnnnnnnnnnnnnnnntaactaccacctgatccagacaaggaatnnnnnnnnnnnnnnnnnnnnnnnnactgtacctacctctcttcccaatgcaaaattctgggatagaccaaaagtgaatttgattatgtgttggctnnnnnnnnnnnnnnnnactgttgaggggaggttttcctttgaagagttttcatctcagactcagctgtcttttcacatgggtgaaataattcctgctaccaacaacagagcttnnnnnnnnnnnnnnnntttcaagatgccttgttgctttgaagaagggagtgatgtcaattctcttgttacattctccctttagcaacctgagtaagagactctgccactgggctgcaaaaaaataaattacttgaatctccccttggcccaggctgaggtactgtcttgtcctatacacttctacttggtcactttgctttcttctttaatggaacatacagtagcatgttaagagggatttcatgtttttgtttttttaaagttaaacattacatgatgcaga

SEQ ID NO: 13452 - DNA, 702 bp, Macaca Fascicularis
  misc_feature (1)...(702): n = A,T,C or G
agcaagggctttgtgactgccgacatgatccggaaacacctgnctgctccaggggatgatgtgctggtgctgctttgtgggccacccccaatggtgcagctggcctgccatcccaacttggacaaactgggctactcgcaaaagatgcgattcacctactgagcatcctccagcttccctggtgctgtttgctgccattgttccccatcagtactcaagcactataagccctagattccttccctgagagtttcagctattttcgttccatctagagctgaaatctggatagtacctgcaggaacaatattcctgtagccatggaagagggccaaggctgagtcattccttggaaggcctcctaaatctccccgtggcaacaggtccaggagaggcccatggagcagtctcttccatggagtaagaaaannnnnnnnnnnnnnnnnnnnnnnnnnnnnggctagttccttgatagcatcttagtctcaccttctttgtgtctgtgatnnnnnnnnnnnnnnnngcaatgggttttacttaaccttcactatttaacctatgggcaaatctgtacatgtgagtataagttgagcatacttccagaggtatcttatggagatggcaagaaaggaggaaatggtttcttcagatctcaaaggagtctgaaatatcacatttctgtgtgtgtctctctcagcccct

SEQ ID NO: 13453 - DNA, 685 bp, Macaca Fascicularis
  misc_feature (1)...(685): n = A,T,C or G
tgatgctgatgatggcgttaaaagtggtgagggagatattgggggcagagcagactttgccagtgcccctcaggtcaaaccaagccaagagcaccctgtccccattccaaggggcnnnnnnnnnnnnnnnnnaaagttattttctttaaggtgccattccttcatgttccttcatgttttctcagtttggaaggtgatgggtagagctttccagaaccttctctattccagaatttctgcnnnnnnnnnnnntgaaggaaggctgtgccatctttgggcactgccaagggagttggggtgatgggcttctttctgcactggagtctcacacctgttagtgttgacactcaagcagtgttggaannnnnnnnnnnnnnnnnnnnnctgcccagctttcgggatctctggcccccatcctcttgtgtgtgtgtgtgtgtccctctgcccagctcctgctgtaattagctccacgtgtgcccccttcactccctcgcgccagccctgcagccagcctacagcaattatattttaagaggtgttcccaggcttttgggacctactgaaacaatgatggttattttagatgtgatgatttatatctatgtagagctgtttctggaccactcaagctcttcaatacnnnnnnnnnnnnnnncttgggatttattaaattatgtaagaagat

SEQ ID NO: 13454 - DNA, 710 bp, Macaca Fascicularis
  misc_feature (1)...(710): n = A,T,C or G
ctattgcgacaatagttggtaaanngatgttnnnnnnnnnnnnnnnnnnnnnacaaaggacaatcttgggtggaattgcttttgttgccataaaaggagcatttaaagtttacttcaaacagcagcaatatttacgacaggcacaccgcaaaattctgaattatccagaacaagaagaagcataaaactgacttctggttgttctgcagttctctcatccttatgaatctgttgtgttgttttgattccatcattaatgctcttgtggagacttgtgataagctgctgctcctatattttttaagaaatataataaagcacttagggcaggggaaatcatctcggtaatcacggaacctaaggatgtgatttgttttcattgtttgtatgtactacttttatggcagtcatgtgaaccattatcttagcatggtgaacctgggttttgttcatattttctccagacagaaatgcaaagatcaaactgtgcaaatatttannnnnnnnnnnnnnnnntttattcaaatgcctcttttgtacatgttcatgtttagtgttttctcagaatcagcaactcaattaaggtactatgaggatttttctcactgacataatttgattacatactaaataagaggacatgttaatatgaggaaatgtaaattaaattagttataaataaccaaaaatgtatgtaaagattcaaatga

SEQ ID NO: 13455 - DNA, 763 bp, Macaca Fascicularis
  misc_feature (1)...(763): n = A,T,C or G
cgctnnnnnnnnnnngttcnnnnnnnnntgcctgtggcctggactcccgtggacacccgtgggcaggtagcttccccgtggcatccccacgccacctctgcctgcccctgtggactgatgctgtcacgcaccgtcccatggcaccgccnnnnnnnnnnnnagccagnnnnngagccgacatcactnctggcctctcatcccctactctcctgagagccgtggtcacagcggccggccgctctgctgagaaggcagagaggcaggtgcaggcctcagcggggacagcagggataagggcacgaaggaaggggactcggcccccttcagaannnnnnnnnnnnnnnnnntgcagctttgccaaaaaggaacttttcacgccatgcggctgtggaacttagtctcaatcccaggctcctcttgactctgggcagctttaatcaggttgggcggcctctgccacagcgtggggtgggatggccgtctttcctcaaccatgcagcttgtgaggacgggttggggagtgggaagtgggaagtcaccagagaacaggagagggatttgagagcgagaccccagcgctctccacagaccagccagaggggctggagccagacgtgcatgggttcaaggccctggccctgcccagcctctgtctcggggcctcagccccagtttcccaagaacaagatgtgacggcgtctgccgccgaaaccctgatgaggaccaggccccctgctctgcggtcagcctgaggaattaaagc

SEQ ID NO: 13456 - DNA, 769 bp, Macaca Fascicularis
  misc_feature (1)...(769): n = A,T,C or G
tttacccagaacacttncngtcctgtgaagtagagtgcatttannnncatttagtttgttaatgtctgaaatgaataaaaagaggaaattacgattaaactgatgttctgctttttatggagaagattctgcccgtctgccctggacagtagcagggaggtgagggcagattttacccacttggctgtcacaactnnnnnnnnnnnctactccttcccttcattgctnnnnnnnnnnaagacttttttccaaaacatgcctgcagtcctgaagaatggcactctgcagtcctgaagaatggcactctgcagtcctgaagaatggcactctgcagtcctgaagaatggcactctgcagtcctgaagaatgctcattttcacacaggcccaaatcctgtgtatcaggataatatccttccctgcannnnnnnnnnntgcaaacctgnnnnnnnnnnnnnnnnnactgtgaccnnnnnnnnnnnnnnnnnnnnnnnnnnnnnnnnnnnnnnnnnnnnnnnnntggcagtggccgctctccacnnnnnnnnnnnnnnnnnnntagggcccaacnnnnnnnnnnnnnnnnnnnnnnnnnnnnnnnnnnnnnnaattaattcagggtgaaaatgtggagttcttggcctagtgtaaagtatcaagatgtatatttatgggatagatacatgacttagaagaaaattgtccagaaatagtactgagttttagatggaaaagactcgtgcttcctggagtagggaattttctttgcc

SEQ ID NO: 13457 - DNA, 673 bp, Macaca Fascicularis
  misc_feature (1)...(673): n = A,T,C or G
gaacaggtttcnnnctgtnnnnnctnntgggtctgtgggccgtggcatgagtgttttctagtagtagattggagggaaagctttgtgacatttagtactgtgtttttaagaacaaataatttggttccagatgtgttagaggatcttttgtactgaggtttttaacactttatttggnnnnnnnnnnnnnnnnnnnnnnnnnnnnngaacagtccccaggcaccgttcttgtcaggcctcagcacagggagtctctccacagagccgccttggtgttgccctaacttgccagtggcctttgctcagagcctcctcctgtgccatgtgannnnnnnnnnnnnnnnnnnnnnnnnncttgccgcctgcaaagcaaagaaactgcctttttttttttaaccttaaaaannnnnnnnnnnnnnnnnnnnnnnnnnnnnnnnnnnnnnnnnnnnnnnnnnnnnnncagaggaaggcttggatgtacaatgaaactgattggaactaagagcagtgaagcaagggaggcaatcacaccgaagtgggccttcannnnnnnnnnnnnnnccgcaggggtgtttttttaaataacttgatgctgtgtgcatgatgttggtgcttgatcgtgaaaggaaagtctcatccttaaaatgtgtgttgtatttcacaatcctggact

SEQ ID NO: 13458 - DNA, 979 bp, Macaca Fascicularis
  misc_feature (1)...(979): n = A,T,C or G
tttgtggatggacttgattcnnnnnnnnnnnnnnnngaacatttcaagaggtggctgcagccggataaagtagccgtcagcacagaggaggtcnnnnnnnnnnnnnnnccagagtcacaggttgagaagccagtggccaaggacgagccagcagccggggacaaaccagcagcagcagagcagtaaattacacacactcacacacgtggagcagctgnnncaggtccagagggagcagcgtggagctcagtggcagcagcagggagaaatccactgagggaaaaaacccaaatttcactccacaaagaaaacagctgcaagcccccagggacttacttggggctggcatgtgtgactgtcttgggtgaagtgactgacccagtgcacgctggatcaaaatgctgctttcctctgtgtcttagcttgactgagctctgtcacggcagattagaagtctgctaaggatcgaatgtgaaagtacttggagaaactgaggcccctcatgtgtaatgtgtaagttaagtgagccatatattttcttgcctcttctggacattcatgcttgtgtcccaagcattcccttggtgaactgtcacgggtgagtggggccagtaagagtgaagtctgctccttgaatccaagccccatctggggcttcgctaacaaatctgtagtaagtgtacagactccagagagagaggctggccttctttctctcatttgttccttgcggagaaaagaagtgtgaaaatgtgggtgtttatgtctgtgtatgtatattttttatttcatgcatggcttctcctccaacttcctcctgcacttaaaaagggccaggttccaaattagacttgtaaatatggtgttagtgtttgacactactcctggatggttccaaacgtcttccttgtggcagctttcctggctgagcccgaggttccctccctgtttatcgtgttcatgatcagtatacgtgtcc

SEQ ID NO: 13459 - DNA, 735 bp, Macaca Fascicularis
  misc_feature (1)...(735): n = A,T,C or G
cccccggtacatgcnnnnngntgcagggtggcccactggaggggggtactcaggccaaacaacagtgaagccccatccctgaccctgccctggagggggcagaggccaggcccccgtgctgaggaggagcccagagttgggcctaatcaggtggggacacatctcagcttggaaccaacaggggctgaggacagagggcacaggagagagggcagaggagaggaggggtgtctagggggaatggcagagtgtgagcgggactgtgagggggctcttgatgggagtagaggaagtgctgagggtcttgagaggggagatgcatgcgtgtccaggctgaagatgcccccacactctgtcaaggctgtggccaggaggtgttggggtcctttcatctggctccatttctggnnnnnnnnnnnnnnnnnnncagcacagggaagaactaacacgactaacctaggcctaccccaaatgcttcttgctaaccaggccgagaggccacacacttgccccccatccccacaaaccaggtaatgccannnnnnnnnnnnnnnnnnnnnnnnnnagatgagtctgtcctggtcataactgtgtactnnnnnnnnnnnnnnnnnnnnnnnnnnnnnnnnnnnnnnnnnnnnnnnatggttcagtggattgaggtgtggggaggagggtcctaggnnnnnnnnnnnnnnnnnnnnnnnnnnnnnnnnnnnnnnnnntcaatgtttt

SEQ ID NO: 13460 - DNA, 468 bp, Macaca Fascicularis
  misc_feature (1)...(468): n = A,T,C or G
tccccaccctccccccaccccacccttggcctgccacccagagccaagagggtgctgctcagttgcagggcctccgcagctggacagagtgggggagggagggacagacagaaggccaaggtctggtgtggtgtgcagaggtggggaggaggcgaggatggggacagaaagcgcacagaatcttggaccaggtctctcttccttgtcccccctgcttttcttctcccctatgcccaagccccgtggccgccgcccctcccctgccccgttggtgtgattatttcatctgttagatgtnnnnnnnnnnnnnnnnnncgtgtgccacccctgcccctccctgatccctgtgtgcgcgccccctttnnnnnnnnnnnnnnnnnnnnnnnnnnnnnnnnnnnnnnnnnnnnnnnnnnnnnnnnnnnnnnnnnnnnnnnnnnnacatcccaaccaaaaccaaccaaacaaaaa

SEQ ID NO: 13461 - DNA, 764 bp, Macaca Fascicularis
  misc_feature (1)...(764): n = A,T,C or G
tgcccgaagagctcnnnngaaaacaggaggcannnnnnnnnnnnnnngcagaagtgcagaggtgaatctttatgtacagatacatttgctacaattccatggaaccaaatacgcagccattgannnnnnnnnnnnnnnngccgaggagcttgaggtacagaaaggcagccttggcatcaaccaggaggnnnnnnnnnnnnnnnnnnnnnnnnnnnnnnnnnnngacccggtgtgttctcgtctagtcagtggnnnnnnnnnnnnnnnnnnnnnnttttccttcaggttcgtcaggctcaccggttctcactgtgtctgggaagtaggactgatggtcatcttcgnnnnnnnnngcagctccactaagcctgagcaagtgttccctcttggttttcttagcttttgaatttgaagaagtactttcgaagattcccattttaagaaccatgcaaattttgctaccaaaagtcttcaccactgtgttcttaaatgaatgttaacttctgaggtttggaactttgtggtgttttttccttcttttcttttccattcttctttctttctttttatgttgtttgctgtannnnnnnnnnnnnnnnnnnnnatattgggacattggttattttatgctttcttggatataaccatgatcagagtgccatggccactaccccactgtttgctctcctgcaaatcaactgcttttaatttacacttaagcaaatnnntgagtgttagctctactgcctttctagctattacag

SEQ ID NO: 13462 - DNA, 718 bp, Macaca Fascicularis
  misc_feature (1)...(718): n = A,T,C or G
ttacggaatgtggtgctgagagactacatttataattggagatcctgaacaccaaagtaagcctaaaaggaatctttgaggaaaaaagnnnnnnnnnnnnnnnnnnnnnnnnnnnnnnnnnnnnnngaatatactgacatgttataaacataacttttattacagtagcatctaaggttttaaatcagtgttttctgcttttactattttcagattagatttttagatacaaagatgaaaaactcagataactcaaatgagctatctgtatccctacaacctaattgtatattgagtagaaactgaattaatgtttccttgcaaatgggaaatcacatagnnnnnnnnnnnnnnnnntnnnnnnnnnnnnnnnngggcaaaaatatgttactttaccatttacctaagactgttagcaggttcttgtttcataaaggtagaaaataaatatagataacatctactgagctagctgattggtgatgcttctaccttaatatctttcctactgatttataattcctttattttcacatatactaaaactctaatgcatgttaattcagataaaaaggcattttgtattccacatagaatagtgttaagaattgtgaagtacacactgagctgtcatggcaaagtagtatttaatgtgcttatagggtgtgggggtgtgtgtgtgtgtgtgtgtgttgtgtgtgttggnnnttgtataatt

SEQ ID NO: 13463 - DNA, 562 bp, Macaca Fascicularis
  misc_feature (1)...(562): n = A,T,C or G
ccgcccaccctcctccaccgccgcctccgttgtatgaacttcccaacgccttcctctatattcctttccaactccttttgccccagatttcactttcctgctcaggtctcacctcagcccctcttctccctgatttctcggcctctctcgctgtgtgaaggggcctcttcctaaagtctccgccttcccccaccttctctctccttcggcccagcctccctcaccctcctccattcctctctccccgcccttttcttgcctgaaaagcagaggtgaggacctgggacccctgagggacaggcgaggaagagctcaggagcagccacaggccaggcccccttgatgaagcggaggctgaaggaaaggagtctgggtcttgtccctaggaattctcttcccacaggacagattgggggggcagcgggaggnnnnnnnnnnnnnnnctgacaagttgaacccagggcgttgctgtgggctccttgatctcgctgcccccgtgacccaaaggcatgggatggacagagatgcctgctcccatgaagctggttggggatggcagtca

SEQ ID NO: 13464 - DNA, 858 bp, Macaca Fascicularis
  misc_feature (1)...(858): n = A,T,C or G
tagctgcccaggaagtgnaactatgctaagagannnggggcggggggcactgctccccaccgagctccacatggggagatctgtggtgggggcaacctctctgttctgatgctaatttgtgtttttcttctctttcactacctcttcctttttaaaaataacaaccagaaatgcattgacattctaattgagaaagagtatttggagcgagttgatggtgaaaaggacacctacagttacttggcttaacccttctggaagggtctgactgtgtgacccgcggcaaatagttcacgttggnnnnnnnnnnnnnnnnnnnnnnnnnnnnnnnnnnnnnngccgccattggacctccctttttaaaacggagaccaagactcccatcagctggtctcggatttacatcggaactgctcaggattgatacatttcaagtctgtaaatacggacaccaacgccatttaccctaatttaagaacagcggggactgaccctccatgccgagggctgcatgctaccgcatctacgtcaatacatgggctccccgattcgcagctgtcgccttggcagcacttgtcacgttggcagcactttgagagcaagtgtgaatggacccacatgtaatctgctatgaaaaccatttgtatagtgtgtttcattttttaatgtgtgaaaataaagaaaattaaaggatttctgtacaagtcgcatttggttttgttttaagttttactaatttctatatgtaaataaaagatataatgattgtgcaaatttatattcctagtgtcttcctgtagtttaaaagggctgtattcttggatgaaaattttttaagatcttaaaatttaagccccg

SEQ ID NO: 13465 - DNA, 726 bp, Macaca Fascicularis
  misc_feature (1)...(726): n = A,T,C or G
gagcagccccctnnngtgctgcnntcnnnctcccttcaatatgctggggccgagaccctggcctccaaagtgcaattccgggaccccaaatcccagcggacgcaccaggctcaggtggcgttccaggtgtgtgtgcgccctggctcctacaccccgggacccccttccgctgcccttggagaacctcctgaccctcacttcagtccagccgaacttgagtgggtcactaaggagaagggggccacactcctctatgccctgctggtacgggtggaatgaggggtgacacacaaatactacaagcacagtcgggcctcgggcccatggactctggcgactgcctccacctcattcccgtgactcgtggcatgcgcannnnnnnnnnnnnnnnnnnnnnnnnnnnnnnnnnnnnnnnnnnnnnagatgtaggtggcaagtggcacagctccatgtctggaggcccagcactccgtctgatgggaggagccgtgggagcccagctccaggccctggtacccctcttcatgcactgatttggggaacatgactcccttttactccccttccccacatcacttaatttatttccgtttttgtttctggttactgtgaatcccagaggagtctctccctgtgcccacatgaagctnnnnnnnnnnnnnnnnnnnggcgggnnnnnnnnnnngtgggcgcacggaagatgggggcctctgtacagttgttact

SEQ ID NO: 13466 - DNA, 706 bp, Macaca Fascicularis
  misc_feature (1)...(706): n = A,T,C or G
gcctcgtgcagtcttaacagggagagggctttctggggcagggggagcccctgtcggcagctttcccgttcacctttgttggnnnnnnnnnnnnnnntcctccctcctccccatgccttgctcccacacccctctcctcatccctcctggtcgtgccccatctcttttggtcctggctccagaagagccgcgccccacatacctgcatcttccgctgtgacctccagagccctgcctgcccctgctccccagctcctcctgcctgcacccgactcggccccctcctgacttgccttatttatttgttcgacgcgtctctgaatgtatccgcctcggttcccacctctgccttcgctgcgcacgcccctcgtgtttcagggctgaccatgcccccacccgactccgcatgtttgcgtctgtttcctccctttctggccctgtcttaccccatcacccgactctggccaccgacctcagggccgaaggggaggtggtgtacataggaacgcgttgcggagtccgccccgtcccccgaggggaggggtcttgtacatactgtaacatacagagtatagtgaagaatctatttaaggtgccgcggggagggctgcacggccgggcttgtggttctctagcgcggcgggggcctcctgccggctccacgggcactttctacttgtgcatgggcttggtttatacgaatgcc

SEQ ID NO: 13467 - DNA, 736 bp, Macaca Fascicularis
  misc_feature (1)...(736): n = A,T,C or G
ccgaaggcctcagggcaggtgtgtggtgtgtgggcgactccacaagacctggctcccaccctggcagcccagcctgagaccgttgcactgaggcaggcaggagcggcagggtggctgctctccaggagccnnnnnnnnnnnnnttcctgtcccactgggtcccctcccctgctgggcaatcctgggaaggtctggaggttcctgtggacctcagagaagccaggggcaggtgccaggcctgaggaagacctctggagctcctctccagcctcctctttccctcccctctggtcttcattctcttcagctccctacgtgggctggggaggagacacctggcgggcagannnnnnnnnnnnnnnnnnnnnnnnnnnnnnnnnnnnnnnnnnntgtgtggctttggcggatgtcagacttctggttttgcttctccacgtggacagtgagtatctggctcattcttcgctgggtggttctgagattgaacctacaggtgtttgccaagtgcctggcccagagcgagtagccactaactgcttctcccacctctctcctgcccaacctagtagagctgagggcatgagaggcagagtgcacagtggtccagggtgcagctctgcagcacaggcagcctaggcctgcatcctgccctgcctctcannnnnnnnnnnnnnnnngnnnnnnnnnnnnnnnnnnnnnnncttagttttctcacctgtaaaaggaggatgagaat

SEQ ID NO: 13468 - DNA, 706 bp, Macaca Fascicularis
aatgaaagatacctatgcaataacatttaggataatctttgacattttggaaaaataagaattgagggaaaaaaggtgtatctcccaagtagatgcaaagcattatattgattgacacttgtatctaactccagtcttacagataaccaaggcaaaaagctaaataaacaatatgtaacctctaacatttggtaaaaggaagtatactggtctgttaggagagacaaacttttttttagaattgaagtctaaaacaaacaaaagcaattcaatgtcaatagacattgagcaacgtaatagacaaatatctcctaatggaacatttgttacagctgctccttccatgaactgtgctttgtaaaatgagctctgtcgtgagtccaaaccaaacccttccaagagagaacaaaggtcagagatgctgaagatttcaacaaatttctcctcttatttctaccaagcctttgtgaacattgttcttcattttggcctggatttctccctcagggacctagaacgatggaatgtcagtctctgtagttaaatttttttctttaaaattcaattaagttataccaggatttacaggcaagattttttttcttcattgctcccataagcaaatttgttttaaaaaattgtaaatgaggtatatacttagttcttggttaaaaaatatattgctttgttaagtattaaagatttt

SEQ ID NO: 13469 - DNA, 719 bp, Macaca Fascicularis
  misc_feature (1)...(719): n = A,T,C or G
tgcccgccccccgcgtgccgccagccaatgnnncgccggaagcggggaggtgccgaagggacgtcgcgtcgccgcgccgggtctctagcagctgccgccgagcnnnnnnnnngacgcccgccttcgcccgccatggccgagagcgactgggacacggtgacggtgctgcgcaagaagggccccacnnnnnnnnnnnnnnnnnnnnnnnnnnnnnnnnnnnnnnnacagagacgaggagaagatgtggagacttccaagaaatgggcnnnnnnnnnnnnnaaacaacattctatcaccaagaacacannnnnnnnnnnccgggaaacggaggagctgcaccatnnnnnnnnnnnnnnnnnagtgggcaaggtgatccagcagggtcggcagagcaaggggcttacacagaaggacctggccacgaaaatcaatgagaagccacaggtgatcgcggactatgagagnnnnnnnnnnnnnnnnnnnnnnnnnnnnnnnnnnnnnnnnnnnnnnnncatcggnnnnnnnnnnnnnnnnnnnnacattggaaagcccatcgagaaggggcctagggcgaaatgaacacaaannnnnnnnnncagtgcgctccagctgatctcgttctgccggttccccttgaccgccagcaccgccgtgggtctcctcacggccaaacggaacaaggggtccagctcgtgggggaccctccccagcccatcctg

SEQ ID NO: 13470 - DNA, 619 bp, Macaca Fascicularis
ggacccttgcaccaccatatatgttgctgccacagagcctgtcccagagtctgtccaggaaacaaattccatcacagtctatgctagtgtgacacttccagagagctgataccaaagacccaacaaagggactttctgaaggaaaatggaaaaaacaaaatgaacactgaacttggccccaggccccaggtttcctctgacagacatgctacacatctgtacccttcttggatcaactgcctggtgatgtttcttccacatacatctgtgaaatgaacaaggaagtgaggcttcccaagaatttagcttgctctgccgtggctgcaggcgcaggacagagcgttacttgataacagcgttccatctttgtgttgtggcagatgaaatggatagtaatgtgagttcagactttgggcatcttgctcttggctggaactggataataaaaaccaaagactgaaagccaggacatctgagtacctatctcacacagtggaccaccagtcacaaagtctggaaaagtttacattttggccgtctttactttgttctgggagctgatcatgataacctgcagacctgatcaagcctctgtgcttcacttgcccccccccgaaaa

SEQ ID NO: 13471 - DNA, 840 bp, Macaca Fascicularis
  misc_feature (1)...(840): n = A,T,C or G
tcagatggctgactgcagnnntacccaagtccaaagcacaaggtctgcagaaagttctggttgttgactgggtaccacagttcacannnnnnnnnnnnnnnnttaggaggccaagacaggaggatcacttgaggccaggagtctgagaccagcctaggcaacaaaacaagactctgtctctacaaaaagtttaagaaatgaaccagacatgatggtgtatgccnnnnnnnncagccactcagaaggccgaggcaggaggatcgctcgagaccaagagtttgagcttgcagtgnnnnnnnnnnnnnnnactgcactcaagtctgggcaatgtagcgagaccccgtctacaagaagttttnnnnnnnnnnnnnnnnnnnnnnnnnnnnnnnnnnnnnnnnnnnnnnnnnnnnnnnnnnnnnnnnnnnnnnnnnnnnnnnnnnnnnnnnnnnnnnnnnnnnnnnnnnnnnnnnnnnnnnnnnnnnnnnnnnnnnnnnnnnnnaacaagaccccatctcaaaaaaaaaaaattctggttgtcattgaattgggataaacagagggtttgatgctttctgccttctgtctcaggtgatgcattgcacatttgggatatatggaaaggaaatgaggagagaagtcagggcctcctctgatctctcgctatctgcgggtcctgtccttttctcaagacctnnnnnnnnnnnnnnntttccctgtcttctctttagtatgatccctcaaaacctcacctaactggaaggatgattttgtctcagtttgtactcctaaataaaaagtaaacatgacacctctaaaaaaaaaaaaaaaaaaaaaaaaagg

SEQ ID NO: 13472 - DNA, 762 bp, Macaca Fascicularis
  misc_feature (1)...(762): n = A,T,C or G
aactaaaaacaaaancaagatttgggnnnnnnccacttccagtctttcaagaagtaagaccaagactggagtaagaccttttaaccctggtagaatgaatgtggcaggagacttatttcagaatggagaatttgcaactcatcatagtcctgattcttggatctcccagtcagcttcatttccccgtaatcagaaacagccaggggtggattctttatcaccagtggccttacttcgtaagcagaatttccagcctacagcccaacagcaacttactaacccagctaaaatcacttgtgcaaattgcaaaaaacctttacagaagggacnnnnnnnnnnnnnnnnnnnnnnnnnnnnnnnnnnnnnnnnnnnnnnnnnnnnnnnttcttccttttctcataaacgtactcaaaacacacgaagtgtaatatgtaaaaaagatgcatctacaaagaaggctgatgttgttcttccagtagaatcaagcagatccttccaagaattttgtagtacatcttgtgtgtctccctgtgaaaacaaccggaatcttaaaaaaggagtttttaataagtcaagatgtacaatttgtagtaaattagcagaggtctggatttttatatctaagttgtttaggctaacagtgataattttaacttttaagtactattatgtactctttcatctacnnnnnnnnnntgttctggatgtataacatgaaagctgaaaggaacaataaggatatgttagaactatcctatggga

SEQ ID NO: 13473 - DNA, 494 bp, Macaca Fascicularis
ggtaattcatcctcaacatgtgtatgaaattaaatccttgcaggaagagaaattaacactaagaaaaagtcatcaacatttttcaacttttttttttttttttacattggcaaggacaataactataaatctatatccagattttcttgccgctgaagctattgtcagaatcttcctttggacaaaacatcactagctgactataaaaacaaaagtgtcatcattgaagccctgaagaggcagggaattgagcttcagcaaaatacaggtaaagaatctatccaacataaatgtcagaagacaaatttcctaaacaagtgaaagagacatcaaaaattttaaaataatcacaatgaaatcattttttaccacttttacagcagtgtttcaagcgtactgtcactcagatctgtagagatgaatattactcaaaaaattgttttgttctcttgcatttttttgaactaccacaaagctatacagatttttttgta

SEQ ID NO: 13474 - DNA, 756 bp, Macaca Fascicularis
  misc_feature (1)...(756): n = A,T,C or G
aattannnnacagtataccaaaaatatgctgaaacaagaaaancnnnnaaagaaacttcgggaaaaacaaaaagttgtacgagaaagtcatggtccaaatatgaaacaagcaaaaatgtggcgtgatttgcaacaattaatggaatgtaagaaacagtgctttctgaaacaacaaagccaaacttccatnnnnnnnnnnnnnnnnnagggaggagaggaccggctaatactgtaaattgtgttatcatttggagttttacttgataccactagctataagcctaatctcataatgtatttcttttttgaaactgatttgtatagtgttttgttttcagattagccattctttattaagttttcgtagaaaataatgttaaggtagatttagttttaatgttttttcacatgaaaaagaggcttttattattttccgtagtttagacatcactggcatcttctgagttttatgagacaggaaacttaagtttactatctgtaaatgtaaacatatgtccattaagaaacatgtagtttttttttaggnnnnnnnnnnnnnnnnnnnnactgtttttcttaatctttttttaaaaaactttagaagaatcttttaggaattagtatctcttgttttgaagaaacgtttatctgaagnnnnnnngttcgtacagtttcacttcagtttattttcttctgtaaaatgcaagaaaatttaatattttgactaacatgttctgtttgtataattaaaggcaa

SEQ ID NO: 13475 - DNA, 669 bp, Macaca Fascicularis
  misc_feature (1)...(669): n = A,T,C or G
cacatnaccctcccacccaccttccagacccccttggttggcaccctctcctcctgttccctctcaccccatggctgtgaatgacaggactggtcacatgtgtgttttccattgggtttaatttaatggacgtgcagtttcatttgtaaattgtgcattagccatctccttcagtggcaggatgtgagtggcgacctggctcaactggaggggacccgcggggcttcccctctggggcttcccctcccccacctgcttggggtagagcaaaaggatggtcactcttccgaggtctccctgaaatgaatgtatttctcccccaaaagagctgatatttaatgttttaatagggatttttgagaaacaaataaccgtatttataatctgggtgatccaatcattttttactcccttttgatgccatacatagaggaaagttagcttttttggcgtgagacttttgcaatgtgcagtgggataaaatgcatttccttttctggttcgtttctcttgttcacacacacacacaccccccattccactcaccacctggacaggtgtcccccagcacgggcacactggcacacaggtgcccacatctcttcctcccagcccctccacctgcctaatgttatgcaacctccttctgatgtatccaccaaaccagta

SEQ ID NO: 13476 - DNA, 661 bp, Macaca Fascicularis
  misc_feature (1)...(661): n = A,T,C or G
agggttggaagggcagcnnntaaggttcacaagccaccccccacacccttcccactcagcacccagagggggctgtgggtcgaggcctgactccaggcctctcctgcccacaccttctgggctgggttccttctctcccttggatgcccagtgctggccttggaggacggtcatctggaggacgggggtaggggaggctgtctttgtaccactgcagcatcccccacttccccacggaagccccatcccaaagctgctgcctggcccattgctgtaaaatgtgaagggggcagctgagttctcttaggacccagagccagggccctcagcttccatcctgcgggaggccttgggcaggcactgccagcgtcttccagggccacaccagggactatgggaggatcctgacccctgcagggctcaggggtcagcagggacccactgccccgtctccctctccccaccgagacagccccagagggagcagccagctgggatgggaacccaaggctgcccacatgtggcttttgtgggactcagaaagggaagcagaactgagggctgggattctcctcacggtggcagctctcatagcgaaagcctagtgtaatatgcacccatctcatccacgtagtaaagtgaacttaaaaattaaatcaaa

SEQ ID NO: 13477 - DNA, 726 bp, Macaca Fascicularis
  misc_feature (1)...(726): n = A,T,C or G
cagctgcaagggctggaacacctatgggtcccagagcgactctgtcgtgctgctgcaagggagactgaacctcaggacaggagtggttcctgcagcccttggtggtgctggtgtcatggccctgctctgtatctgtctgtgcctcatcttctttttaatagtgaaagtccgcaggaagcaagcagctgggagaccagaaaaaatggatgnnnnnnnnnnnnnnntgggtaccgtctcctgggattccaggaagaagccctggccagacagccccggagaccaagcatctcctgctggggatacccctcccttgggagaacaacaggagctccattatgcctccctcagcttttctgagatgaagtcgagggagcctaaggaccaggaggccccaagcaccacggagtactcagaggtcaagacaaacaagtgaggactcccccagagctcagtcctggccggaggaaccacagcctgtctagggggaaggacaagtcagggaccacttgctgaagcacaaagagcccttgtgacaatgttaacattaactgatgtgtaagtgctccaagcagagcagaaagaagatagatgatggaattggagaagtgggctcaaacctaggccctggcactgtcatcaagcaattcactgcatccctctgtgcctcagtttcccattctgtaaatcagagatcatgcatgttacctcaaaggttgtgtgaccata

SEQ ID NO: 13478 - DNA, 742 bp, Macaca Fascicularis
ttttgccgccgccgccttcccaccgtgctcctcaagctgcgcatggcgcagcaccttcaggctgccgtagcctttgtggagcaagggcacgtacgcgtgggccctgatgtggttaccgaccccgccttccttgtcacgcgcagcatggaggactttgtcacttgggtggactcgtccaagatcaagcggcacgtgctggagtacaatgaggagcgcgatgacttcgatctggaagcctagcggatctcccactttccatggctgtcttttacagatgggaaaactgaggcctgattctggagattctatgagggtgctttccccaagggtgtcagatggtcgtaggttcttaagaacttgattcatcagtggcaggccttgcatagagccacgggagatgcgtccttgttttccaggaaatgttcttagaacttggactactgattattaattgactctgccttggaaagcagtgggaagtaagttggtgctgcactggggtattgttggcttcttgtgttggaaacttggtaatctaaaaggaaaaaccgcaaatccctacgccctgtttccctttatctagtcttgtagttggactggttcaattcgtttaactccaattcttgctcctggccgtggttaagctgtgtacagatgatggagagtttggccttaagtttttataaactgagcgagactagtgttcaggatctcctcccttgttaaatgccaataaagcccc

SEQ ID NO: 13479 - DNA, 766 bp, Macaca Fascicularis
  misc_feature (1)...(766): n = A,T,C or G
aaaataatgnnnnnnngnnnnnnnnnctctcttaaactttggaggatcaattcaaagagaatgatgaatgcaattaaggaatcttatgattataatccaaataaaactaacaggccatttatttctcagaaaatccattttcctgatttttctaccagagacatacataggaattatgttgattgtgtgcgatggttaggcgatttgatactttctaagtcttgtgaaaatgccattgtgtgctggaaacctggcaagatggaagatgatatagataaaattaaacccagtgagtctaatgtgactattcttgggcgatttgattacnnnnnnnnnnnnnnnnnnnnnnnnnnnttttctnnnnnnnnnnnnnnnnnnnnnnnngcattgggcaatcaagnnnnnnnnnnnnnnntttgggatttagaagtagaagatcctcataaagccaaatgtacaacactgactcatcataaatgtggnnnnnnnnnnnnnnnnnnnnnnnnnnnnnnnnnnnnnnnnnnnnnnnnnnnnnnnnnnnnnnnnnnnnnnnnnnnnnnnnnnnnnnnnnnnnnnnnnnnnnnttttgcctaatcaaaattagagtgtgtttgttgtctgtgtaaaatagaattaatgtatcttgctagtaagggcacgtagagcatttagagttgtctttcagcattcaannnnnnnnnnnnnnnnnnagtgatgtttacattgtttacattctttgtactgtctncctgctcagactctactg

SEQ ID NO: 13480 - DNA, 204 bp, Macaca Fascicularis
gttttttttttttttccccctttttttttttttttttttttttttgagttacaaacaggtctttattaaagatgagaagccatggtctttattaaagatgaggagggggcaggaaaggggggcagtgcctcctgtacccactccctttgcctgccgagggtgagggagcccctgtgctccacccatgccccccatgatggcaca

SEQ ID NO: 13481 - DNA, 726 bp, Macaca Fascicularis
  misc_feature (1)...(726): n = A,T,C or G
atgcttcagtatntttcaggaagtggagagacagtaaaggaaaagacaaagaatatgctgaaattattaggaaacaagtttcagccactaaggccgaagcagaaaaggatggagtgaaggtccccacaaccctggcggaatactgcatcaaaactaaagtgccttccaatgacaacagctcagatttgctttacgacgacttgtatgacgacgacattgatgatgaagatgaggaggaggaagatgccgactgttatgatgatgatgattctgggaatgaggagtcgtgacgtgctccttcagtgcccctgtactgccctgccgtctcaggccaaagggaggggagcaagtggggacctggccatggcccctcagcaaaaacctattcacagcgggtggggaaacacacacagctcctgctgactccccttatggatctcagtttgctcctttttatggacctttaatggagagagagtaaccctccacagaatgtttgaattcttgcattctttacccttccatcactgtattgattcttttttaaaaaaacatcaacccaaactcccgcctcacttcgtctctacagaatgttcacagcaaaacacgtttggtctgtttttagattcttgaagaattcaatagtctttcaagaggttgaatgtgtttaaagctgggaacctgttgggagctcacaagcgctgcatatactgggagcaaaagaaa

SEQ ID NO: 13482 - DNA, 823 bp, Macaca Fascicularis
cacatacaggaattagggcctagattgtaagctcttgcagcagtcacatttgttcccgggctttggtggttatttctaaagttttgaggtgctttgctctttcttgtgtgacctgatagctccctggaactttgggtctctctgtgtgacacatgagactcacagttggagttctccagctctggaggtgctgaaggagctgcattaattctggaagacgactccgtgcagcaactactgaagaaaggaccagacttcaacggggagtgcggatgggccgacctggctgggattcgtgaatctggagaagagctggagaatggatagtattgtctgtgattggagacttaatttctgtgtgagaccaaaggaggagagatgtattttgttcaaagtttaaattttatgtggtacactatcttatgtaacctgtccagtgagtttgtttggacaacctaactcagctttacttgacatggaacctaaaatagaagataagatcttgatattctgtacaagttgatgtaataccctgatgcgttttaggggacttggcataaaatgaaagttttgcagaggcccttgaggggctcggggatgagagtatggaactgtctgcattggaccctaaactggactggaagaggcatcttcaaggttcatacgttgtccagctataagttcatttgagtagcagacctaacaaatatttgaggtcaaaaccctaccgtgttaaaaacaaacaaaaaaaacttaccatgttaataaaagtattcatttgcttgaaaagacctaaaaaaaaaaaaaaaaaaaaaaaaaaagg

SEQ ID NO: 13483 - DNA, 767 bp, Macaca Fascicularis
  misc_feature (1)...(767): n = A,T,C or G
gccaggcacagtnntcgcacatgggggcttccatgcacttgcgcacacccttcacctaccgtgtgcctgaggacacctggggctgcttcttcgtgtgcaatctgctgtatgcactgggcccccacctgctggcctaccgttgccttcagtggcctgcattcttccaccagccgccaccctccagccccatagccctccacaagaagcagcaatgagagggctatggacttaggacccaggactctgtttacgcgcccagccagccctacctggggaagcgggggtcgggtgttttagagacaggagggacatctccaggtgttgttagtcctggctatggtggtttcagtccagtgggtgggatggagaccaacaaccaagtgttcctgcaaggagcgcctctcacagctgtcaccatgcttcaacccccacacgacgcttccaccccttccagaatttacccatcatccccccgtggatccttttagtaaaaaccctttcaatttccaaaatatcactgcctaagtgtttcagggtgcagggacgagggaccctcttcttggcccccatgagggcccatccatcactgccatcgtggttgccaggagcaagaggtgctgggatggcagaaggcggcctctggttggtatgcatggctccatcttccagatgggaaaaccgaggctcagtatggacaagagacctgcccaaggtcacagccagagagaaaagttcctgctctaccaataaatcataaccaatagcat

SEQ ID NO: 13484 - DNA, 885 bp, Macaca Fascicularis
  misc_feature (1)...(885): n = A,T,C or G
tgagttgctgccttnncccgctcactccagtcacacagagaattggcgtttcccgcagtgggggtgcggctcttggacaggtaatgggggcaaggtgggtagggaggatacactgtcacttgctgttataggcacaggtgattaaaatgctaaatattgcaaatatatgctttgtcagtatatggaaaagttgaagggaaaatactggaatgcttcttcaaaggttaaaaaataactgggtcctttggtaatttgaccccacgtgctctctggccctcaagcatgtaatctcagggtctgaggcccaggacccacccccctgccatccctcccaccccactccctgctcagtacctggcgttggtacacaggcaaggactggcacaaccaaaattggcttttctcttcctcttaatattgaagaaattcccacatttctcatttggtaatggtgttgtggcctcagatttcttccagtatttgcttctgatgaataattatggtctatacataaaaaagtaagattaagtattgctgaatttgcagttacgttgtcgtgtaaaagagctacttccaagtgtggttacaaatgaacccatggaatgatgacttcatgttcttctcgtgggtttgtgccgtgctgctttccaaatatgtattgaatttatgnnnnnnnnnnnnnnnnntcagttctgtgaaatattttgggatctataccaattaaacattttcatagttctgcctactgtcgttccctgaggctccattgctgcttggtggccattctctgccttttatagtcacctaaactaccacccatcatctcttgcttgcttgaaatcttgctgaaatgttctcatttcctgtttgctgtatgggctcggg

SEQ ID NO: 13485 - DNA, 711 bp, Macaca Fascicularis
  misc_feature (1)...(711): n = A,T,C or G
ctgcaatctccgcctcccgcgttcagggatactcctgccccaatctcccgaatagctggcattacaggggtccaccaccacnnnnnnnnnnnnnnnnnnnnnnnnnnnnnnnnnnnnnnnttttgtatttttgtggagacagggtttcaccatattggccaggctggtcttgaactcctgacctcaggtgatcaatccacccacctcggcctctcaaagtgctaggattacaggcgtgagtcacagcgccnnnnnnnnnnnnnnnnnnnntactaacannnnnnnnnnnnnnnnnnnnnnnnnnnnnnnnnnnnnnacaatgagtatgaaggaaaaaaaggggaattaaagcttctgttttttggcacagtttacagttaagttgtgctactggctcagactcttcttgactgaagagcattctctgccatctgcagaacttgagtgcagtaactgccgagtatttgaaagtctaatcaccattaaatccaaaaagcaagtcccaggcaagacatttagaaagatacatactcggtcannnnnnnnnnnnnnnnnnnnnnnnnnnnnnnnnnnnnngagctggggaagacacatgcttctgaggactctaaccatgccacattgagcccggcaaatctggggacaaatggtttgacatctgctgataacttgatgccctgaggaaaannntgaggttttggctacaaacat

SEQ ID NO: 13486 - DNA, 236 bp, Macaca Fascicularis
  misc_feature (1)...(236): n = A,T,C or G
cgtgatggactccggtgacngnntcannnacactgtgcccatctacgaggggtatgccctcccccatgnnnnnnnnnnnnnnnnnnnnnnnnnnnnnnnnnnnnnnnnnnnnnnnnnnnnnnnnnnnnnnnnnnnnnnnnnnnnnnnnnnnnnnnncaccacggccgagcgggaaatcgtgcgtgacattaaggagaagctgtgctatgtcgccctagacttcgagcaggagatgg

SEQ ID NO: 13487 - DNA, 749 bp, Macaca Fascicularis
  misc_feature (1)...(749): n = A,T,C or G
gcagtgggcttntnnngagaatcaggcttattctcacatctgccattagaaagcaggcaacaaatggagacacagataggtgctctgatactagccacagacatcagtcgccagaatgagtatctgtctttgtttaggtcccatttggatagaggtgatttatgcctagaagacaccagacatagacatttggtttnnnnnnnnnnnnnnnnnnnnnnnnnnnnnnnnnnnnnnnnnnnnncctgggaattaagcaagcagtggagtgaaaaagtaacggagnnnnnnnnnnnnnnnnnnnnnnnacagtattgagcgataattaatctatccagttcatttttttaacatcataagaataaaannnnnnnnnnnnnnnnnnnnnnnnnnnnnnnnnnnnnnnnnnnnnnnnnnnnnnnntcacaatagatatacatataatcaatactctacaaattgagcatctgttttgaaaattagaagtcctcttttggaatgatcagatatatttatgcatttatgagtatagatagattaggtttggaattctgctgtacagaaagacttccctgaccttgttttatcctcgtcatgtgtggagggccatacgaacatgaaaaannnnnnnnnnnnnnnnnnnnnnnnnnnnnnnnnnnnnnnnnnnnnnnnnnnncttcctttcaagttgtatattaatgtgttataaattacagtcttgggatgacatctggtgaaagttttctacctct

SEQ ID NO: 13488 - DNA, 611 bp, Macaca Fascicularis
  misc_feature (1)...(611): n = A,T,C or G
gatgcccnnnnnnnnnnnnnnnnnnnnnnnggagacagggctgccccttaannnnnnnnnnnnnnnnnnnnnnnnnnnnnnnnnnncagccagcctccagcaccttccctctcaccatcacactgccccctcactcccacatttccacctggcatcctgatcctcacctgaatctctctctctctctctttttttttttttttttctgaggcannnnnnnnnnnnnnnnnnnnnnnnnnnnnnnnnnnnnnnnnnnnnnnnnnnnnnnnnnnnnnnnnnnnnnnnnnnnnnnnnnnnnnnnnnnnnnnnnnnnnnnnnnnnnnnnnnnnnnnnnnnnnnnnnnnnnnnnnnnnnnnnnnnnnnnnnnnnnnnnnnnnnnnnnnnnnnnnnnnnnnnnnnnnnnnnnnnnnnnnnnnnnnnnnnnnnnnnnnnnnnnnnnnnnnnnnnnnnnnnnnnnnnnnnnnnnnnnnnnnnnnnnncgtgccttacctcctcacccgcctcttcactctgaatcctcatcaggcctctcagccctggatttcctgctggcatcctcacccagcacctgcaacccagcacctgggcagggcaaggccggcacctctcaa

SEQ ID NO: 13489 - DNA, 766 bp, Macaca Fascicularis
  misc_feature (1)...(766): n = A,T,C or G
gagtccaggctccggggtccacagcacaggatgcgggagaaggcacagctggggaacctcaagaaaggaacggaccccatgtgtgggccccccacccccggcagctgggtgatcctgggcccccagggctggtctctgagtgggggtgctgggatgggttctgcctgggcccggccctcgtggggacattaaagggcacggttgctccacttgccccagttctgctctttgtgtacccctgggggtctgcctgggcnnnnnnnnnnnnnnnnnnnnggggtgggcagtcacctcagcagagcctcagtgccacctccccacaccacccaagcctagctgggtgggaagacggagcctgaagcctgcttgtggagggggtgctgcccaagggttgccttccccagcttgtgctccaggggagctccgatgctggtggggaggcaggatgtcgagggcccctnnnnnnnnnnnnnnnnntgccccgctagactgcccctccagcttgcacctggcaccatctgagtctaaccagcgtataaatgcaataacaggtagagtagaactgcttggcggcgaccgtcacacactgtcctcagcccaccgtacctggggaggccccttgtgcagcccctccttnnnnnnnnnnnnnnnnnnnnggtctttggcgtgcagcagcaggcgagctcccggaaggtggtggtgggcactgtgagaacgcagcctgccctcactggccagcggccacaggaaccctgggcctgagtgg

SEQ ID NO: 13490 - DNA, 671 bp, Macaca Fascicularis
catctttgaggacaaacaaagaaggaaaacagagtggtttagattagaatccaaacaaggaaaacgaatcaaaaacaggggtgagataaaggtcaatattcagtttatgaggaacaatatgaccgcaagtatgtttgacttatcaatgaaggacaaaaccagatctccttttgcaaagttaaaagataagatgaagggtagaaaaaatgatggaacattttctgatacgtcttctgcaatcattccgagtactcacatgcctgatgccaatagtgaattttcaagtggtgaaatacagatgaaatccaaaccaaaaaagccttttcttttgggtcctcagcgactctcgtcagcacattcaatgtccgatttatctgggtcccatatgtcttctgagaaactgaaggctggcaccataggtcaagcacatcttcttggacaccagttagattcctttggaacagttccagaaagtggaagtctcaaatctccacacagaagaacattaagctttgatacttctaaaatgaaccaacctgacagcattgtggatgaaggtgaattgtgtttcggaagacaaaatgacccatttacaaatgtgactgcttcattaccccaaaaatttgcaacactgccaaggaagaaaaatccattgaagaaagcagtgaaac

SEQ ID NO: 13491 - DNA, 751 bp, Macaca Fascicularis
  misc_feature (1)...(751): n = A,T,C or G
gtaaaggaaaagggaaatataatcacaggacacagtctgcacgtatcncaccagtgacttcaacatactgtctttcccctcgacagaaagaactacaaaaacagctagaacaaaagagagaaaagctgaaaagagaggaagagcaacgaaaaatagaagaagagaaagaaaaaaagagagagaatgacatagtatttaaagcatggttgcaaaagaaaagggagcaggtcttagaaatgaggagaattcagcgagcaaaggaaattgaagacatgaacagtagacaggaannnnnnnnnnnnnnnnnnnnnnnnnnnnnnnnnnnnnnnnnaaagcacgaagagcagatgaaagaaagaaagacagaagaactaagaaagcaagaggaatgcttattcttccttaaaggaacagaaggccgggaaagggcctttaaacaatggctaagaaggaaacggatagaaaaaatagcagagcaacaagctgtcagagagagaactagacagctccgactagaagctaagcattctaaacagttacagcaccacctatatatgtcagaagccaaaccttttcgttttactgatcattataactgaaagtttctattaaatattatttcagtgggcagctgctatcaaaattttggatataatttcttatggtctgtgtactttggttgtactctaaattatggaaatgatatttatcttttattgacagtgaatttttttaatactagaacaaaata

SEQ ID NO: 13492 - DNA, 751 bp, Macaca Fascicularis
  misc_feature (1)...(751): n = A,T,C or G
cagcccaannnnnnnnnnnnnnnnnnnnnnnnnnnnnnnnncatcaccattgagagcaccaagagtggtctgaagtcagagaagtcggtggaacagctcactgaatacagcacagacaaggaccagcctccgaaggacgtctttgatgaattatttaagctggctccggagaaagtgaatgcagtgnnnnnnnnnnnnnnnnnctttgtcaaccagaagctggaccgcctgggcctgtctgtgcagaatctggacacccagtttgcagacggggtcatcttactcctgctgattggacaacnnnnnnnnnnnnnnnnnnnnnnnnnnnnnnnnnnnntcactcccaactctcctgcggaaatggaggatttgcacgcatcttccnnnnnnnnnnnnnnntctcggctccgtggaaggtggtagttttatcttcatctcaaaccgcacatggaagaaaaatctctggannnnnnnnnnnnnnnnnnnnnnnnnnnnnnnnnnnnnnnnnnnggcagatgatcttttgttcggattcagtgtcattgaggaggagtgtgacaaacagaagcagatgtcataatttttagtgttnnnnnnnnntcccaaagcataagctccatgagggcagggggtctggtctgttttgggcactagttgcatggctagtacatagtagatgacaagtattttttaaataagtgaatgaacaaagttattcgaaaacattggtcccaggaggtgctctggacaa

SEQ ID NO: 13493 - DNA, 1202 bp, Macaca Fascicularis
  misc_feature (1)...(1202): n = A,T,C or G
ccgtggtggatgnngacgccaacaacgccaaggccgtggtcaagaccttccacgagacgctcgactgctgtggctccagcacgctggccgctctgaccacctcagtgctcaagaacnnnnngtgtccctcgggcagcaacatcatcagcaacctcctcaagaaggactgccaccagaagatcgatgagctcttctnnnngaagctgtacctcannnnnnnnnnnnnnannntgnnnnnnntgatcatgatcttcgaannnntcctgagcatggtgctgnnnnnnnnnntccggaacagctccgtgtactgaggccccgcagctctggccgcagggacctctgcagtgcccccgaagtgacccggacacttctgagggggccatcacnnnnngtgtatataaagtttccggtataactctgctatacgtagcctttttacttttgaggttttgtttttgttctgaactttcctgttaccttttcagggctgacgtcacatgtaggtggcgtgtgtgagtggagacgggcctgggccttggggactggagggcaggggtccttctgcccctggggtcccagggagttctgcctgctcagccaggcctctcctgggagccactcgcccagagactcagcttggccgacctggggggctgtgtccacccagcccgcccgtcctgtgggctgcacagctcaccttgttccctcctgccccggttcgagagccgagtctatgggcactctctgccttcatgcacctgtcctttctaacagtcacctccaactgtaatcacaacatcctgaatccgtcactaaaataaaggaacgtcaggcatgctaccaggcctgtccagcccctcagtgccagtggcgtctgagacctaggggttggccagagggcgggggagtccggcacgggtggggctcggctctgtggactgtgtgggctccagggtgagggggtgggttgggatccctggtgttcacaaaaggagtcactctgtaaaatttgcggannnnnnnnnnnnnnnnnnnnnnnnnnnnnnnnnnnnntctgacacagccccgggaggccctgagaactggtgcccaaggtggtctggctacttgaatttatacattttagggacataagacatcgatcaatacatctaagatgtatgttggtttagtcagaaaggtaggatgatttgaaggggagg

SEQ ID NO: 13494 - DNA, 772 bp, Macaca Fascicularis
  misc_feature (1)...(772): n = A,T,C or G
agnnnnnnnnnnnnnnnnnnnnnnnnnnntgtgatgtatatnnnnnnnnnnnnnnnnncttnnnnnnnnnnnnnnnnnnnnnnnnnnnnnnnnnnnnnnnnnnnnnnntgcttactgctttgctaatagctggccttgctagaatcattggtttcactgctgttcttcatgtgcttctgtgagatttactccaacaaaaataggactgaatttattgtgaagtaacattggcaatcttaacttattcatttagcttacctatttttatagctggataaatattgttagtcttagaatagctcacattttttgagaagcatgctttccctgtccacttgtcttataacatgacccagccctattttaagtcattctaaattcagcctcatataatgaaaatacattatgaaaacagatgtttaggagatttcctgtatagcagtcagccaattcatatgctttgtctctgctgacttctgttgccatgcattaacttttcacaatagcagaggaggcaaatatgagcatacaatccctttgttctaaagatattgttccagctagtggaatgatgttgaatctttaataaccgtgagaccaaattagttgctttttcagtatcttttgctttgtctgtgtctatccagtggcctaggaattaaagtgtaagttgttttcactgttatattggatatttatatatagagagagcgcgcaagattttcatgtgttatttaattctgtattgtttcttatatttgtagtaaaatat

SEQ ID NO: 13495 - DNA, 738 bp, Macaca Fascicularis
  misc_feature (1)...(738): n = A,T,C or G
caaacaaaagtacatgtaattaantactattgttcataggcagatactattttgtttttttgtttttttcctgatgaaggcagaagagatggtggtctattacatatgaatggaatggagtgtcctaatgccttatttcaaaacaattcctcagggggaccagctttggcttcatctttctcttgcgtggcttcacatttaaaccagtatctttactgaattagaaaacaagtggaacaaactttcctgagagcacacaggaatcttacttcttgggagctgcagtctgtccggatgagacatcagattaggttggatacgtggggaaatctgaaatgggtacatttcttatatttggctgtgtcgtcatacaaggtctacattacaaaagatagaattcagagacggacaggagaatgaacaaatgtgggagtttgttgttttccttgaatccaacttttaattaccagagtaagttgccaaaatgtgattgttgaagtacaaaaggaactatgaaaaccagaacaaattttaacaaaaggataactacagagggatatagtgagtattgtatctttgtaatcaaagaaggaggtaagattgccacgtgcctgctggtactgtgatgcatttcaagtggcagttttaccacatttgaatctaccattcataaccagatgtacatcagatgtttcactgacagttttcaaaaataaattcttttcattatattttata

SEQ ID NO: 13496 - DNA, 110 bp, Macaca Fascicularis
  misc_feature (1)...(110): n = A,T,C or G
ttgaacattgaacttaatagatgacttgacaaggtggagatctgatattttgagattttggagaccatttcctgtgccagaatcannnnnnnaactattccatgccatgc

SEQ ID NO: 13497 - DNA, 562 bp, Macaca Fascicularis
tgggcagcccggcccatatgcagggaagcggctgtcaggtccaaggctcctggcctcctgcgtggagccaagccaacgtgtctctggccagagagctgtggggccaccaggcggcccaggacccagggaggcgaagcccccaggcccatcctgggtgtgggctgtggcttggttggcaggtggccccggcccattgtccaaggtggccgaggccgcagtgggtggtgggagtgcaggacacgctgtctccgggcctcatttctcttctccatttctcgttaggtctggcaaaccacggacagaccaggcacatgggaccaagccggaacctcctgctcaacgggaagtcctaccccaccaaagtgcgcctgatccgggggggctccctgcccccagtcaagcggcggcggatgaactggatcgatgccccggatgacgtgttctacatggccaccgaggagaccaggaagatccgcaagctgctctcatcctcggaaaccaagcgtgctgcccgccggccctacaagcccatcgccctgcgccagagccaggccctgccgct

SEQ ID NO: 13498 - DNA, 713 bp, Macaca Fascicularis
  misc_feature (1)...(713): n = A,T,C or G
cagaagcatcgagcgannnctgaagtcgcccttagtctccaaggtcatcaccccacccactcccatcagtgtgggcctcgctgccattcctgnnnnnnnnnnnnnnnnnnnnnnnnnnntggagatcaaagaaatagcaagcaggacccgcagggaactactgggcctctcggatgaaggtggacccaagtcagaaggagcgccaaaggccaaatcaaaaccccggaagcggttagaagaaagccaaggaggccccaagccaggggcagtgaggtcatctagcagtgacaggatcccatcaggctccttggaaagtgcttctacttccgaagccaaccctgaggggcactcaaccagctctgaccaggaccctgttgcagacagagagggcagcccagtctccagnnnnnnnnnnnnnnnnnnnnnngctttctccgatgaagacattattgacttgaagtaacagagttcaaatctcatttgccatctttagttttcttatggagatttatactctttaaacagttctgctgtcatttctcaacaaaatgtggcttttagcctgtcagtgatctattggaccaaaccttctacacactcggccagttccctctccaatgtccggtgccatctttcctgacctttgtttctttctgttcaggaaccatcagtccccttgtaataaaggtggtagatttcattgaggttttaga

SEQ ID NO: 13499 - DNA, 707 bp, Macaca Fascicularis
  misc_feature (1)...(707): n = A,T,C or G
atcagaactccatatgcaacttcgggctcactggagaacaattaaggagcaccaaaccctctgaggttnnnnnnnnnnnnnnnnnnnatgtttgccttggataaaaaggctacctaccatgtgctatccagtaatgtacttaaataagccaatacttagatctactgtaaggcagatgctaattataagcattaagtaagcaagtagtgccctcagctactgcagaagaaaagtcccactaaggaaaagaaagtcttgtgatttttaaaggcaagttttcaagtgctctcctagttctatcctctgattccattgaatccatactatgagcgtcagtgagggttttcatagcttttggaaatactttggtctctgaactgtaattagcaagaagtaaaaacagaaacctcaaacatcaaatgcttgctttgttacctggaggactaaccgtagatgtctttagtatactttgtatgttcttaatattggaagataattttgtgaatctgtagattttattttttcagtcttaccttacgaatttcttttctatgaataatagagaggaacttacagcactctgccattgggtaatgaaaggaagtgcagaggatttagaaaagtacatgctccccaaaccacaacaaaccaaaacataaactcacgtctgtgtcccatgtcatagtcaaagattttgtacggctaaa

SEQ ID NO: 13500 - DNA, 678 bp, Macaca Fascicularis
  misc_feature (1)...(678): n = A,T,C or G
gattaaaaattcccaaatngcatttcttagtnnnnaaaaatgaagtgcaataaccaaatattgctctaatgaaaagttccagactagcctcaactaaacagttattggtcttctatggcacttttttctggtccaaataaccatgcattaatccttaccattacttgttactcaaattttatttgattacatacaacaaaaacaaataaaattaatagtctggataaacaaaattaataaatctctatcatcacatatttgttacagtaactaggaacaaagaaaggcagttggtggtaaaacactattacattgatacacatagaaaccctttaaagactctgaagtgttgagttcacatttaatgttaacctgtagaaacagccctttatttgaacacctttacacaatggcaggcctcaaggacccatccctttgctctacaactctccacagcaattctccatcactgtgccagtttcacaaacttgctttggtttcctagctccatgcgtactgtttccttttactttaccaaggcaatgcaaggccaaacaaaaatcaagaggctttcctaaaccttcttacattttnnnnnnnnnnnnnnncaatcttaaaactggccatttttgtttcatttgctgcttaaaataaaaattataaattagatttaaatgg

SEQ ID NO: 13501 - DNA, 684 bp, Macaca Fascicularis
  misc_feature (1)...(684): n = A,T,C or G
tgnnnnnnnnnnnnnnnnnntgctcctgggaactgtgcactgccagattgtttccacaaggacgcccaaacctcctctaagtacagggggtaaaagaagaaggaaattaagaaaagcagcccatttggaagtacatagggaaggagatggttctagtaccacagataacacacaagagggagcagttcagagccacggtacaagcacctctcacagcgttggcgctgtcttcagagatctctggcatgctgctttctttttatcaggatcaaagaaagcaaagaattcaattgataaatcaactgaaactgacaatggctatgtatcccttgatgggaaaaagactgttaaaagcagtgaagatggaatacaaaaccatgaacctcagtgtgaaactattcaaccagaagagacagcctggaacgcaggnnnnnnnnnnnnnnnggatggtcctagcaaagatacccaaaggaaagtaacaaatgtctctgatgaagtctccagtgaggaaggtcctgaaacaggatactcattacgtcgtcacgtggacaggacttctgaaagcgttcttcggaatagaaagtcacaccattataagaaacattacccataatgaggtatatactttgtccttaagtatatacatacatatctattttatatgttactaatttataactcttc

SEQ ID NO: 13502 - DNA, 661 bp, Macaca Fascicularis
  misc_feature (1)...(661): n = A,T,C or G
ctcttgcgttcaggcgcagacgggtaagcggagccaacatgccggtggcccggagctgggtttgtcgcaaaacttacgtgaccccgcggagaccctttgagaaatctcgtctcgaccaagagctgaagctgatcggcgagtatgggctccggaannnnnnnnnnnnnnnnnnnnnnnnnnnnnnnnnnnnnnnnnnnnnnnnnnnnnnnnnnnnnnnnnnnnnnnnnnnnnnnnnnnnnnnnnnnnnnnnnnnnnnnngcaacgccctgctgcggcggctggtccgcattggggtgctggatgagggcaagatgaagctggattnnnnnnnnnnnnnnnnnnncgaggatttcttagagagacgcctgcagacccaggnnnnnnnnnnnnnnnnggccaagtccatccaccatgctcgcgtgctgatccgccagcgccatatcagggtccgcaagcaggtggtgaatatcccgtcgttcattgtccgcctggattcccagaagcacattgacttctccctgcgctctccctatgggggtggccgcccgggccgcgtgaagaggaagaacgccaagaagggccagggtggggccggggctggagacgacgaggaggaggattaagcccagctttccctcctgggctgctggattgtctagtt

SEQ ID NO: 13503 - DNA, 859 bp, Macaca Fascicularis
  misc_feature (1)...(859): n = A,T,C or G
cactannnnnnnnnnnnnnnnnnnnnnnnnnnnnnnnnnnnnnnnggtttactgacctaggaaatacannnnnnnnnnccacagaaagtttagaatggagnnnnnnnnnnnnnnnnnnnnttaattacagtggaaatttaatggnnnnnnnnnnnnnnnnnnnaaagaaatttggaacaaacttcacaaagctggaaaagaaaactatccgaggaaagaaatatgattcagactctgatgatgattagagctccgtaattctttgtaaattgtccttttttctgcttcagatttaaatgtgtttttaaaatcctattaatgtctgtacattggtcatctaaatactcatattctcaagtttgatacagttgtatcacatcgaaaggcgtcttattttctgtgtggccatnnnnnnnnnnnnnnnnnnnnnnnctcagttcttaaattatctgggaagggtctggattctctatttttgagattgactttatcacaatatgattcttacgtctttataccacttacaattgtgttttgatctacagagctagaaattcaaaaactattccannactactacttaattggcattatttatacaagagatcaagtagccatttactggcgcagnnnnnnnnnnnnnnnnnnnnnnnaaacactcttctggaatatatttaaccactaaagaactgcttattaattctggacactgcatnnnnnnnnnnnnnnaannnnnnnnnnnnnnnagctattttgatttgtgaacacgctgccctatgtaaagggtctcgattgcttgtattttaagacattcgttaaaaagaaatcaggaaacactttgaaataacagcataaggaa

SEQ ID NO: 13504 - DNA, 758 bp, Macaca Fascicularis
  misc_feature (1)...(758): n = A,T,C or G
aactccacttgttcagtctgaaatgcagctccctgtccaagtgccttggagaactcacagcagcatgccttaatcaaanagtttgccagcctttggacactatgggaggagggcaagagtatcagtttgttaaaagcaaaaaaaccacagtgtctcttcactagtcatatttagaacagtggttaccatccaagactactctatcctgcaacactgaactctcaagagcaaatccacattcctctgcttctgtgtaaatagggcagctgttgtctatgccatagaatcacatgatctgaggaccattcatggaaagctgctaaatagcctagtctgggaagtcttgcataaagttttgcatgaagcaaacaggattaaatcaggtttggttccttcagccctctaaaggcatagggcttagcctgcaggcttccttgggctttctctgtgtgtgtagttttgtaaacactatagcatctgttaagatccagtgtccatggaaaccttcccacatgctgtgactctggactctcagtttttgaaagcagggttcctctgcctgctaacaagcccacgtggaccagtctgaatgtctttcctttacacctatgtttttaaatagtcaaacttcaagaaacaatctgaacaagtttctgttgcatatgtgtttgtgaacttgtatttgtatttagtaggcttccatattgcatttaacttgtttttgtaactccctgattctttcttttcggatactatga

SEQ ID NO: 13505 - DNA, 244 bp, Macaca Fascicularis
attgggagaagatatcccagaagctcgtgagagagtgatgacagaccccattaatgaccctatcttggtgtgtcgatttcccggggagatcatgtctttacacacgcagagatgtcgtggggattcctgtcttagtgtatctgtcggcgtgttgatgcccaatgttggtgagattgtgggaggctcaatgtgtcccagcgatggtgaagaaatactggcaggttataaaagggaagggattgcc

SEQ ID NO: 13506 - DNA, 718 bp, Macaca Fascicularis
tgtatacattcagattcaaacctttcaagtcaagcaatcacacatatttacagtatgtacaatctttctactagaatgaggataggtgtctagacaatgttattacaaatttcctgaatgtgggcatttctagtccctgtaattcataaagcaaatctgctgacttggcattaagactctaaaatagtgtgatcaaacttatatatatatatatatataatataataagaaggtgtttgcagaaataacatttacaaactgtctatacagtacacagtactagtacatagaaaatagattctaactttatgatcccctttgtgtaaggcaagactgaatctgtccccaaatttagtcagccagaggtacaagcaagaaacagtggtccatgaatgaatatgcaaatcaggtgcctgcgtattaaaaatctggagaaacgagagattccactttttatctgtgctgattctggcttgttggatacatcaactacatttcttaaaacaccaacatcacctgggtggcaacagattttgttcaagtggcagctacccaaaacagtttttgaagagtccagtatacaaccggaggactgcagccataccaggccaatttatgtagcacttacaaaagaaaaagtatcttaatactctattcatgctattgctatttaagcaacagcaatacaaaatattacaagacagatcacatatgattg

SEQ ID NO: 13507 - DNA, 727 bp, Macaca Fascicularis
  misc_feature (1)...(727): n = A,T,C or G
caggagaagcaactgacgacagatgnnnnnnnnnnnnnngcagatgcagccnngaagnnnnnnnnnnnnnnnnntaaaatgtgttcaaaccttctggagaaaatcagcaaagaggagcgagaatcagagagtggaggtctccggccaaacaagcagacctttaaccctacagacactaatgccttggtggcagctgttgcctttgggaaaggactgtctaactggagaccttcaggcagcagtggtcctggccagccaggccagccaggagctgggacgatccttgcaggaacctcaggattacagcaggtgcagatggcaggagctccaagccagcagcagccaatgctcagtggggtacaaatggctcaagcaggtcaaccagggaaaatgccaagtggaataaaaaccaacatcaagtcggcttcaatgcatccctaccagcggtgagtgtggctggcaacctcgactccctggtgctctttgcagagttgnnnnnnnnnnnnnnnttttgctcaaggctcacctagatgggtacaataaaaagaacatgggctttcagcaacagacaaatcccacttccaccactgactagctgtgtgaccttggacaagtgacctaattttctgagcctgtttctcatttgtaaatggtgataatacctaccttatagagttgttgtgaggattaaaatgaggaaatnnnnnnnnnnnnnttagcacagtat

SEQ ID NO: 13508 - DNA, 739 bp, Macaca Fascicularis
  misc_feature (1)...(739): n = A,T,C or G
ttgagaatatttgttgttaaaaacttntttttgcacaaaataactcattttgtattatctgaaaatatataatttctggtcatgtgtatgtttaaaatagaaaattttgaggaaaaatggaaatagggtggaaaagtacttggtaaacactagtaaccaacttcaaatattttcactccagattggtgttttctctggcacagagtagatcttttgggaaatatatataattaagtttgactacccttgtgtaagccacatctggatgagaacagttacaaagagtttggtctctaagttgattcgtacccagcaggtcaacttttgcaaaattccgtaacagtgtgttagtattagaatagtgaataaaatgggagttttacacgtatacttattatcttgctcagtattttatctcacttgttctagaattttctgtaaaccctgctactgggtttgaagagttttagtcatcccttaacaatttttaaaaatttagcttgtagattccatttggtaaggaaatcaatggaagtaatgctaaaatcttataatatgaaaagagatccactcatatagcttatggttattagatttgggctacttttaatcatggaataatcttatgtattggtgtaagagatgatgaatgactttagctgtatgaatatataatagtgaaactgcaaacattttgcatcccttttgtgacctaatttacagacacttaaattgtgtg

SEQ ID NO: 13509 - DNA, 699 bp, Macaca Fascicularis
  misc_feature (1)...(699): n = A,T,C or G
tgtccagcctgaaattctctggaatatccttggaccttttcagcttgtctcaggttaacctctgtgaggacaatgatgacagttccctgctgctgcagaacctcctgctgtccctctctgagctgaagacatttcggtatgcagacaagacatttactcaggcccctttacagccctgccctgccctgacacctcccgtcattcccagccctgggctcagaggactcagtgtctcaccctgtggacagaaaccacaggtggccctggagatgatttttaggggtacccagttgtaaacatgacctcaggaacattaagccacatggcaagaaagttattccctttttaatgttctttcattgcttttcttttaaaataactgcaaactaatacaaagtttcaagaagactgagaactgctgtgtgccatttacccaaattcacccttagagccgggcgnnnnnnnnnnnnnnnnnnnnnnnnnnnnnnnnnnnnnnnnnnnnnnnnnnnnnnnnnnnnnnnnnnnnnnnnnnnnnnnnnnnnnnnnnnnnnnnnnnnnnnnnnnnnnnnnnnnnnnnnnnnnnnnnnnnnnnnnnnnnnnnnnnnnnnnnnnnnnnnnnnnnnnnnnnnnnnnnnnnnnnnnnnnnnnnnnnncccgggaggctgaggttgcagtgagccaagattgtgccattgcact

SEQ ID NO: 13510 - DNA, 666 bp, Macaca Fascicularis
atgcaactatctatgcaaatgttcgtataaaaaaatcttcatgatccttttgtaaatacaaggtggttaccaagcttgttagttttgtttcttttactgatgaatgtaaaatattattgtaacttatttggataaagttcttcaaaagaaacagagctatataatgaggtaggatctggattatttgtctaagtgagagattgtgaatatcaaaatgtctgtcccacttcttctgtgaatgagacagagtagaaataaactcacttaaaaatagtattgaattttgaaaatcaagactgaatctcacatagctgcagacagggactaagccaccttctctgtatgtggtaacaagtacagtctaagaatgaaagatttactatccttgaaagctctaatgaaaattgaatccagcaatatatattcaactgtgtacagaggctttaagtaaacttattttatgaaggaagtagtagtgtgtagatatagattctgaagtctttaaatgtgtcttagtaaattaagattcactggcattgagctgagctaccacgtgacccttggggaccaaaaaaaccacacaagtgaattttacacaccagtataccttcaacaatatacttttgacacacacaaacctttgattttgtttcagacgattcctgc

SEQ ID NO: 13511 - DNA, 777 bp, Macaca Fascicularis
  misc_feature (1)...(777): n = A,T,C or G
cagcagcaaagccagcctggggcttgcatgttgatcctgagcaagcttaacggggtgaagctgaggctttctccccctgtgannngagtgcatgttgacaccagcactttttctgcacatgtatcttcaatccaacaaggccattttttttatgctgagtaacaggccaccaagcggctactgcattatgtcttctcagcaaccggccgcagtctcttctgcaccattttctacaccagacctgcttggcaccacagggagctgttttcccaccctgtacaatgacattccaaccaccannnnnnnnnnnnnnnnnccaaccttgctgattgtcacaagcaggaccttggggccactggcactgtcagaaatagtaagccatttcttgggaagaggaggaaactcctctccacaaatctgcttggnnnnnnnnnnnnnnnnnntcaaagagtccccatgcacttggagtccatgagccaatgggatatgcaaagacgcttaaacatttcagggctggtttctctgttcatatccaatcctggtgcttaggaacagggacccatgctgatgcccaagggcaaaaagccccacttcctttaaggaagtgaacaggcctgaccctgatgcccagtaacgggcaaccctaggctttttgtttttcttgcttttattcctttttgttgttggccttgtgctgggtttgtttacaaaagatgtattttgtttaaccaaatattaaaaatggaaaactccgtgtatgtctccttgtctgcctga

SEQ ID NO: 13512 - DNA, 717 bp, Macaca Fascicularis
  misc_feature (1)...(717): n = A,T,C or G
gtgtgggagagtnnnnagccaaaattcccanctcattcggcaccagaaagttcacactagggaaagaacttnnnnnnnnnnnnnnnntgggaatttttttatggacagctccacgctcattagtcatcagagagttcatactggagaaaagccttatgaatnnnnnnnnngtgggaaagtctttagatacaattccagcctcattaaacatcggagaattcacactggagagagaccttatcagtgtagtgaatgtgggagagtctttaaccaaaattctcatctcattcagcaccagaaagttcacaccagataaagaatgtgtatataaagcagacatggaaagacttcacacagaaatctactctgatttaacactgggacctatgttttaaaaaagtattcttgtagaatacagataacataaaatctaacatcataaccatgttaaagtgtatagttcagtactgttagtcattcacattgtgcaatgaatatctagaagtcttttcaatttatgaaactaagtctataccttttaaaaccttattccccagtccacccagcttcttgacaagcaccactctctatgaattttactaatctgggtacctcatataagaaaacttaagttttggtcttgtggattattttgtggcttattttgcttaatgttatatttttaaggtttcatgttctaatccattagaattccat

SEQ ID NO: 13513 - DNA, 275 bp, Macaca Fascicularis
aaaaaaaaaaaaaagaaaaaaatagaaaagaaaaaaaaaatcttctgaaccaacttgtttcgatattccagagtttgataattgttcgagactctcctctagcgtgcttgtgttccgtgtgtccccgtgtgcaagtgtgtgccaatcggcctcgagggggccccacccgtgtccgcggcgcccgccgagcccccgagggcctgcttgggagtgcgtgctggtgtgcagttgtacgtgtctttctggtccatgtttactggctgtaaataccattt

SEQ ID NO: 13514 - DNA, 301 bp, Macaca Fascicularis
  misc_feature (1)...(301): n = A,T,C or G
aattttnnnnnttantaatnnnnncctcacccccacccccacccaccagccctggcaggacccctgctcaggacccctgaggggagagcttgtgccaggaggctcctgctatgggcaggggggctctgcactgccaactgtcagccagggcaacaggggcccacgtgactgttgcaccctgtggcccagcagtgtctggcccacactcagttcctgagcgccctgggcaacccctgggggagagactagaaaacacagaaagcagcagcacagggagacccgctttgtgacactgactctc

SEQ ID NO: 13515 - DNA, 1137 bp, Macaca Fascicularis
  misc_feature (1)...(1137): n = A,T,C or G
caggagtttaaggctgcagtgcnnnatggttgcanntgtgaattactgcactccagcctgggcaacatagcgagacctcatctccaaaaacaaaaacaaaaacaaaaaaaggaatgacgttctgtagagattgcctttcactnnnnnnnnnnnnnnnnnnnaggttcttcctagctcggggcttttaaattttgaaatctatacattcattcccaccatcctttttgactattgaccttggttttctcttctaagtttctgtccctctgcttccttactttttttcttttttgaattctatctttatctgtcttttgttcactttttaatgctatatatgggcaggggtgagagacattactgagcaccnnggtgagcaagcctggctttaaagagttgagaagagcttctggcaccagagctctgtcttcctccagttctcaacacggtgttgctcttcagtcataccaggatctgaatcaaaaaagtatttttaaatatccatgattcctccctgtattgaggctggccctgatcatgctctttgtgcctgtcaccaggtctctcaagtgcactcatccagcttagcgctcagatgtgtttaaggagaccctatattcagggaagttgcgtggatactgcagtggagagaattgagaatagtcaggcctgtcagtctcacaggatcacccctctacctttaatattccacctagctgtagagtccatctgtttgtccatctgctgaaatgagaaaagaaaaatttatgcactgatttaaaacaaaccaaaaaagagaaaaaaaacaaaaaaaaatccctcctttctagctgaacaaaaatgtgcagttaattcttggtgcttgaaaatnnnagtagtgaatgtggaaccaagcctgtctgtatatctggtagctcttttcttgctttgtttttccttaccagtattctgcctaatgtttgcttctgtgatggttatattgcctagcaagcacacccgtggttgtgaaaatagtatagcaaaaaagaaaaatccctggttattgatgtactagatttgtgtatgtcttttaaacagttctagtttcaccttacacagaataatcaggaaaagtgtaaaaatcaaaaggaaataaaa

SEQ ID NO: 13516 - DNA, 722 bp, Macaca Fascicularis
  misc_feature (1)...(722): n = A,T,C or G
tcaaagtcacagactaattttttagagctggacaagaatccaannnnnnnnnnnnnnnnnnnnnnnnnntttctgctatctatactcttgggaagcacatcctaagatctttgcaaattatccggtggaaggaaaatgcctaaagtcaaaagaagccggaaagcacccccagatggctgggagttgattgagcnnnnnnnnnatgaattagatcaaaagatgagagaagctgaaacagaaccgcatgagggaaaaaggaaagtnnnnnnnnnnnnnnccatcttcaggatccaccaccagaaaacccgctacatctttgacctcttttacaagcggaaagccatcagcagagaactctatgaatattgtattaaagaaggctatgcagacaaaaacctgattgcaaaatggaaaaagcaagggtnnnnnnnnnnnnnnnnnnnnnnnngcattcagacaagggacaccaacttcgggacgaactgcatttgccgtgtgcccaaaagcaagctggaagtgggnnnnnnnnnnnnnnnnnnncactgtggctgccgtggctgctctggctgaggctagcgctctccaccctggactctggacttcgcaggttcctgcctgtggcgccacccccttcctgggagcagcgagcagtgccccaggcccaagttggagcacgggtctctacggggaaggcttcgctgtccatcagctgtgattgaaaa

SEQ ID NO: 13517 - DNA, 748 bp, Macaca Fascicularis
  misc_feature (1)...(748): n = A,T,C or G
tgatttaagggaaaacagggccagatannngggnnnnnaaccacaaggatagcatggccataagacagacactggatttgtccagtcagaagcacaaggacaggtggtgtggagggaggatgctgggtcctgtcccagggtaatgtctttgttctttctctttccctnnnnnnnnnnnnnnnnnnnnnnnnnnnngagagactcggctgcaggaggtgcgctcagccttcttggctgcgtacagcagcacggtggggcttcgggcagtagcccccagtccctctggtgccnnnnnnnnnnnnnnnnnnnnnnnnnnnnnnnnnnnnnnnnnnnnnggcatcagcagcaatgccttgtgaagaagccagccnnnnnnnnnnnnnnnctcctctctcagctgagccnnnnnnnnnnnnnnnnnnnnnnnnnnnnnnnnnnnnnnnnncaggtcaggggaaatttcactcccccatctccatcatgtacatggcagccccaaagctgagcaannnnnnnnnnnnnnnnnnncaatccccagcctcttgactggtgaccaccaccccttcttgtcactgtctcccacccaccccgtctttgctgggattcccatcaactctcagaactgtgtggggtttccctggggccttgtggaagccatgacttcacaaagaccctacctctcaattcttgtttcctggggaggagggatcacctnnnnnnnnnnnnnnnnnnnnnnnnnnnnnnnnaa

SEQ ID NO: 13518 - DNA, 768 bp, Macaca Fascicularis
  misc_feature (1)...(768): n = A,T,C or G
tagatgagcaagnnnnnnnnnnnnnnnnccagcacgaggtgagatannngcagtttnnnnnccgctggatgaacaacctgctgatgagggaggtgcccctgcgttgcaccatccgcctgtgggacacctaccagtccgaaccagagggcttttctcatttccacttgtacgtgtgcgctgcttttctcgtgagatggaggaaggaaatactagaagaaaaagattttcaagagctgctgctttttctccagaacctgcccaccgcccactgggatgacgaggacatcagcctgttgctggccgaggcctaccgcctcaagtttgccttcgccgacgcccctaatcactataagaagtgaggctgggcccacctgcagctggccacactgccccaggcgcgcgccccacctgcccggccgctggtaggcccctgtgagctggtcctgggctgccagaaggccttgcaaggtggccgcaccctccaggggagctggcgaggacgggccccaggcttggtctagggcggacaaggacagggacagcctctgttttctgggataccaaagagagccagaggagggccccggcttcggcggccagaggcaggtcaggggtcccctcgccctttccctgcagtgtccttgccaaatgactgcctcccgtagctcccagtccggggcagcctcggaggccgaccctctcgggaggcccgctgtctccagggccagaacaaggcagtggccatctcatacctactctgaaatgcaa

SEQ ID NO: 13519 - DNA, 723 bp, Macaca Fascicularis
cgctgagcaggctgagcgctatgatgatatggctgcagccatgaaggcagtcacagaacaggggcatgaactctccaatgaagagagaaatctgctctctgttgcctacaagaatgtggtaggcgcccgccgctcttcttggcgtgtcatctccagcattgagcagaaaacagagcggaatgagaagaagcagcagatgggcaaagagtaccgtgagaagatagaggcagaactgcaggacatctgcaatgacgttctggagctgttggacaaatatcttattcccaatgctacacaaccagaaagtaaggtgttctacttgaaaatgaaaggagattattttaggtatctttctgaagtggcatctggagacaacaaacaaaccactgtgtcgaactcccagcaggcttaccaggaagcatttgaaattagtaagaaagaaatgcagcctacacacccaatttgacttggtctggcacttaatttctcagtcttttactatgagattctaaactctcttgaaaaggcctgcagcctggcaaaaacggcgtttgatgaagcaattgctgaattggatacactgaatgaagagtcttataaagacagcactctgatcatgcagttacttagggacaatctcactctgtggacatcggaaaaccagggagacgaaggagatgctggggagggagagaactaatgtctctcgtgcttcgtgatctg

SEQ ID NO: 13520 - DNA, 760 bp, Macaca Fascicularis
  misc_feature (1)...(760): n = A,T,C or G
gaataagccatatatatgctcttaaacaaaagtttgaaattatccatatcgtctcagtgaacctactggtggactgactcccaattgacaagattgagcaatagaaaaaaattcctttccnnnnnnnnnnnnnnnnnnnnnnnnnnnnnnnnnnttcttgtnnnnnnnccatccaatgagacatgagacggatgctctgatgctctgaggcttctgggaggccgggccctggaggcacgtgctgcaggtgcactctgtcagagtgaatagcaccgtgagacaggccaggctcgtggctcggaagacaaaccccacacacactcaaggggacgaaaacaaaccccacacgagggctctctcctcctcctaggtagtatttattnnnnnnnnnnnnnnnnngcagtttttaatcctctacctattgcactgttgtgactcgttggccattatttgatttttgtacggaaaaaagctttgttatagaaatcagcatactatttttttnnnnnnnnnnnnnnnnnnnnnnnnnnnnnnaaagtatggtcgggtgtcagatataaatgtgcaaatgccttcttgctgtcctgtcggtctcagtacattcactttgtagctgctggcaatatcgaaggttccttttttgtttgtgtaaactctaatttctatcaaggtgtcatggatttttaaaattagtatttcattacaaatgtctcagcattggttaactaattttgccaggaccattatgatcaagcaaata

SEQ ID NO: 13521 - DNA, 428 bp, Macaca Fascicularis
gtcccagccatgtccaatgctccccacaagtccttgctgcccgagggcatccgccctggcacggtgctgagaattcgtggcttggttcctcccaacgccggcaggttccacgtaaacctgctgtgcggggaggagcaggactccgatgccgccctgcatttcaacccccggctggacacgtcggaggtggtcttcaacagcaaggagcaaggctcctggggccgcgaggagcgcgggcctggcgttcctttccagcgcgggcagcccttcgaggtgctcatcatcgcgtccgacgacggcttcaaggccgtggttggggacgcccagtaccaccacttccgccaccgcctgccgctggcgcgcgtgcgcctggtggaggtgggcggggacgtgcagctggactccgtgaagatcttctgagcagaagc

SEQ ID NO: 13522 - DNA, 637 bp, Macaca Fascicularis
  misc_feature (1)...(637): n = A,T,C or G
ccagaagccgggcacgtggcggggctccctggatgagagttctntgggctttggttatcccaagttcatctctcaccaggacattcgaaagcgaaactatgtgcgggatgatgcagtcttcatccgtnnnnnnnnnnnnnnnccccggaagatcctcagctgagtgcaggcagggtttgaggggaaaggacgatnnnnnnnnnnnnnnnnnnnnnnnnnnnnnnnnntggagagggggccggacccccgtcagctgcttctgctccctaggttctgttaccccattctgcctcccccaaccaccaccctcaggtgcctccaattggtgcttcagccctggcccctgtggggaacaggtcttggggtcatcaagggctggaaacaagtgaccctagggcctgtctcccttcttgggtagggcagacttgccttggtgccggtaacacaatacccggactgaggtgcctgctcaggtgctatgtcccaagagccataggggggtgggagttggggatggagaaagggtagtacaaagagtctgtcttgagatctgatttttttcccctttccctagctgtgccccctctggttatttnnnnnnnnnnnnnnnnnnnnnnnnnnnaggggagccctgctt

SEQ ID NO: 13523 - DNA, 719 bp, Macaca Fascicularis
  misc_feature (1)...(719): n = A,T,C or G
cacacacacacacacacacacacacacacacacacacacacacacacacactccttaccattcccattcaacccaanctgcttagttcgggnnngatccatttttctcctctccatagttccactacccttcactgctagtgtacagctcacagcatctcccctatcaccctgggaaaagtcacattctaggctggattctaccgaagtggaggcctggtggtttaacagccgaagacacgcgcctagnnnnnnnnnnnnnnnnnnnnnnnnnnnnnnnnnnnnnnnnnnntttttggagaacatctgcactttcttatatatatatatatatataatatttaaaaaaaagcaactgggtatatannnnnnnnnnnnnnntaggaagcacttttaatgttttctctctcacacacaaagattcaaaagaaatgtgcatatatttattctgtaatttcagtgattataaattgtaaaggtaatgtttaatcattgtatagtgattatgcgtctggtatagctttcctaataaaaagtttttgaaaaacataatacattatatatagaggatacaaagcttgaaccttaaactcnnnnnnnnnnnnnnnnnnnntgctcccattttaaannnnnnnnnnnnnnnnnnnnnnnnnnnaaagtaatttattaacgggtttgnnnnnnnnnnnnnnnnnnnnnnnnnntatcccaccatctcta

SEQ ID NO: 13524 - DNA, 740 bp, Macaca Fascicularis
  misc_feature (1)...(740): n = A,T,C or G
gctgttgtnannnnnnntatgcannnntgcaaacttactggattactgcaattattcagacagtcaagcagaacccacagnnnnnnnnnnnnnnnnnnnnnnnnnnnnnnnnctaaccacttctaagaaactccaaaaaaggaaacatgtgtcttccattctgacttaacttcatttgtcctaaagttcggatattaatttcaaggggagttgtaatagtgggagatggagaagagnnnnnnnnnnnnnnncactctatactaatctcactacttgtattgagcccaaaataaccgaaaggagacgaaaatttatgacaaaggattnnnnnnnnnnnnnnnnnnnnnagatgttatgaggattggtgacaaacattagaaatatatannnnnnnnnnngtggattttccgtcaaatcaaatgcctctaaggactttcctgctagatatttctggaaggagaaaatacaacatgtcatttatcaacgtccttagaaaagattcttccagagaaaaagggatctaggaatgctgaaagagtaaccaacataccattatagtctattctttctgagaacatgtgaaaccagaattgcaagactgggtggactagaaagggagattagatcaaacttatcttaatatgtcaaggaaggtagctgggcatggtnnnnnnnnnnnnnnnnnnnntccagcaggtggaggttgcagtgagacaagattgtgccatncactccagcct

SEQ ID NO: 13525 - DNA, 1318 bp, Macaca Fascicularis
  misc_feature (1)...(1318): n = A,T,C or G
cacacaaggacagtcatacattttgatatttgagccattcctaaagatttggggttttctaaaactaaagaatctagaaaccttgcctgcaaccaatcatggagccacatgagctgatcgtggctgcacctggggggagggtagggaagaggggcatgccacctaatgatcaagccctataattagcttctcattagagccgtgatggtgatgtgtgctgtctaaaatccaatattgtgggtagagagaatgagtttgtgactaggagagactaaacttttgttttccttacccagtataaatatatatatatatatttaatctatttttattagaagtttttctgctctttcttacataaaagaaccccaagcatgcatctttcatgtgtgtaaataattcatttctgggctaatttcaaaagaatcccaacattgctgtatagaaagagaactagcttgcacattttaggtctgtgaaattttgtgagacttttcctgcactggacagtaaaaaaaataataaaagacaaaaacaaattaaaaaaaaatttaagccacaaaaaaggcacatagggaattatgtcaaatgtgtttgtgtccttaggcaaagctgtgggagtcttgaaatgtcacagtagtaaataacttattactttttgacaagttctttttttctgttggaacactgaattcttctgtgcatatgtacatatgaatacaaatcgaaggcctctacctcctggagttatacaacttggcttgtttacctccacatgctgatgatgactatttttttttttttttaagttcagtgtggagacttgaaacttgaatgtcccttccaacttttatattaaaaataaaaagacaagaaaattgaagatcatttttcacctgtacaaggaatactaatggatcgtcttaaaattggtctaggaaaaaaccttggtgtgtgttatggacaattaactgttaaagttattgtaagttatctgtatttagcagagtattttcaacttgagtgatctgagctgaatttgaagactattaataagttatgtttggaagttttaacttcaatgaagtaattatttgctgtgaaagaaacaaacattgaattactaaacaaagatggtgcaatatctttgttttttttttatgaggctcctgagaatcaacccaactgaagcatttcaattcacttgaatgagaaacgtgtttagtatcaaaagagcccaagaagacactggtgtgaaaggtccaannnnnnnnnnnnnnnnnnnnnnnnnnnnnnnnntctggtcactttgtacaat

SEQ ID NO: 13526 - DNA, 875 bp, Macaca Fascicularis
  misc_feature (1)...(875): n = A,T,C or G
cagtgtttataggggtgcctaacataatgctatgtcaataatgaaaggcttgatgtaatatagctgtaatttaccttccatatgaatgcagtggttagttaggttcataaaagagaattgtgtgagtctgggattaccacatctaaaacattattctttaatgggataatacaattcattgaacagctaccacttnnnnnnnnnnnnnnnnnnnnnnnnnnnnnnnnnnnnnnnnnnnnnnnnnnnnnnnnnnnaaaattggattaacttttgagtgctggggtggctgcaataatttgggggctaactccatttggtttccannnnnnnnnnnnnnnnnnnnnnnnnnnnnnnnntaaaccagccacctaaccaatcagcnnnnnnnnnnnnnnnnnnnnnncaggcttttgtagagtgcagccaagctctgcagacttttctcatgaaggattgtctagcacaagtacctggctacttaaatgctgtcactcctgctgagataaatgtgtctttaaaaatagtctctgtggcaggtcactgggggacagtgtacagcatctggccatccacttctttttcatttcatgttctaccccaagagactcccgatgtcggctgtggagggttaaaaggatgaggctctccttcgtttagcaaatctgttcacagttcatgatgatgtattttatgatgccaagcttggagatagttgctttccgtagtcccaactgtattgtgtcatctcctgatactgatttttgatcttttgttttattaaaaataattagtgaaagaggtgtgcgtatctgtgaagtttgtagtacattatcctgaagttatgtaacaacccccaaccccagcgttccctgcta

SEQ ID NO: 13527 - DNA, 554 bp, Macaca Fascicularis
  misc_feature (1)...(554): n = A,T,C or G
aactcatcaacctctcatgataataatnntgaaaaagtaaatttatactcaggttctaattgtaatagggaaggaagaagatacagctcagtgcaccatgaagttgagacagagatagagacatcccagccccacctccccggaacaggaaagataaatggggagggaacacaggtcagcgtggggaagagggtcatggtggacgcaggggtggggtgttctnnnatgtagggaattttattagaaacgtatttccctcattatttatttattatttcaactccaatagaaacatcagagttaaaaatcaataccctgttttgtgctgacagttttgggggaagtctttaccccaatcctcaaggaaaaaccaaaaagccaaacacctttctaggaacttccctgattattttgcttttaaaaagtttcaagtgatatatctgggttagaaataattccttttgtagggagtgggggagttacaactgacatgtggactaatcagtcaaggacaactnnacatggaaaactgctaactatcactcttttgttgc

SEQ ID NO: 13528 - DNA, 668 bp, Macaca Fascicularis
  misc_feature (1)...(668): n = A,T,C or G
aatagtgggtatgacgtaaagctacagtgcactataaagtcaagtcattgaatnnnnnnnnnnnnnnnnnnnnnnnnnnnnnnnnnnnnnnnnnnnnnnnnnnnnnnnnattggtgagttcatttactggtgtacggaagagccagcaggagcggtgtgnnnnnnnnnnngtgctattacaggtgcttgtagtgagtnnnnnnnnnnnnnnnnnnnnnnnnnttgggtgtggcagatctactnnnnnnnnnnnnnnnnnnntcttcccatttagacctnnnnnnnnnnnnnnnnnnnnnnnnnnacaggctcaccttctctgtctatccaataattattaatgaagagnnnnnnnnnnnnnnnnnnnnnnnnnnnnnnnnnnaatgtaccaattattaannnnnnnnnnnnnnnnnnnnnnnnnnncttcagcgtcactatagaactgtcttgtgtcactttttacttccttctgggtggaggctttcagactcccaatcatgaaggcaagttaatctttctctccagttagtgacttttgccccatagttgggtaagcactncctctcccagtgcacaagtatttgcatttatggcattccaggagtccttctgcctctgactggtaatattctnnnnnttctnnnnnngtcttgggggttnnagtg

SEQ ID NO: 13529 - DNA, 732 bp, Macaca Fascicularis
  misc_feature (1)...(732): n = A,T,C or G
taactaggccctctcannnnntccctccttgggcctnnnnnnnnnnnnnnnnnnnncagggatattacctctcaaccctcacttctctactgaacccactggcatcatcagatgccagtaatttgtgaacaacannnnnnnnnnnnnnnnnnnnntggagtnnnnnnnnnnnnnnnnnnnnnnnnnnnnnnnnnnnnnnnnnnnnnnnnnnnnnnnnnnnnnnnnnnnnnnnnnnnnagtatcctaacctgttgtgtcctgacagcaatggtaaccccaagnnnnnnnnnnnnnnnncatttccacatggccccgagctcccttttcctcaactcaatgaggccaggatttgctctccaaaaggctttgctaatgtgttctatgggacctgctaccaggagtcctnnnnnnnnnnnnnnnnnnntctctctttttttctccccctctctctatgtgtatatttctaatggatctataagaacagcaacaagagagttctaacaattctagtgtgaagccaaatagtgatcttttagtgctttggggatgggtgggctggggtggatggatgggcaacagtgactttgattacccttgctgctctnnnnnnnnnnnnnnnnncttctgtttcttttatccgactgtttgactnnnnnnnnnnnnnnnnnnngttgtgtgttaaaaaaatgtttaacaaaaaaaatgttgtaatgacacaaagccttatgaaaa

SEQ ID NO: 13530 - DNA, 763 bp, Macaca Fascicularis
  misc_feature (1)...(763): n = A,T,C or G
ctactcatggatggggacctgggactgatcgcaggctggggccgaacagagaagagagatcgcgctcttngcnncgnnnnnnnnnnnnnnnnnnnnnnnnnnnnnnnaaagtgtagagaagtgaaagtggaaaaccccaaagcagatgcaggggcctatgttttcactcctaacatgatctgtgctggaggagagaagggcatggatagctgtaaaggggacagtggtggggcctttgctgtacaggatcccaatgacaagaccaaattctatgtagctggcctggtgtcctgggggccccagtgtgggacctatgggctctacacacgggtacannnnnnnnnnnnnnnnnnnnnnnnnnnnnnnnnnnaaaatagcacccccagnnnnnnnnnnnnnnnatacatcccaccagcctctctaaggggtgtgaccaatgcattgccttctgttccttatgatattctcattatttcatcatgacaaaaggaagacacgagtgaatgatttaaatagaacttgattgttgagannnnnnnnnnnnnnnagagaggtagagtttgatcatagaattgtgctggtcatacatttttagtctaactccttggggtcctttcccttgagtacctattgtagataacactatgggtggggcactcctatcttgcactattccacagggataccttaattctttgtttctttctttacctgttcaaaattccatttacttgatcattctcagtatccactgtctatatag

SEQ ID NO: 13531 - DNA, 679 bp, Macaca Fascicularis
  misc_feature (1)...(679): n = A,T,C or G
tgttgtgaccagcatggtgggtgttncnnnangtttttttttaatgggctgaggtaatttctcattacatgttttccttctaatttgggacagtctttgggatggatctctaaagttaatacccacacaattaaacnnnnnnnnnnnnnnnnnggcaatgtcagtaactacacagttttccctgctttggctacttaattgctgaagatgtaatgggggtgtgtgtgatggcactgttctcacagcctgttcccctgtccttccctttaggagacgagtgaaaaacccaaaaagaagaaaaagcaaaagccccaggaggttcctnnnnnnnnnnnnnnnnnnnnnnnnnctatccctttctccaaacccaagaaaaagaaatctttttccaaggaggagttgatgagtagtgatcttgaagagaccgctggcagcaccagtcttcccaagaggaagaagtcttcacccaaggaggaaacagttaatgaccccgaagaggcaggccacagaagtggctccaagaaaaagaggaaattttccaaagaggagccagtcagcagtgggcctgaagaggcagctggcaagagcagctccaagaagaagaaaaagttccataaagcatcccaggaagattagaatgcaaatggacattctctgggaggtgggacataccatagcc

SEQ ID NO: 13532 - DNA, 711 bp, Macaca Fascicularis
  misc_feature (1)...(711): n = A,T,C or G
cagacagggcagcaaagcagcttgtaattttgttcttgaaggaggtctgtacagcattacccaggtggagtatcggctccctggggtggtggtannnnnnnnnnnnnnntagtttcaagaggttgggtatttcnnnnnnnnnnnnnnnnttgatgctgtctttagaatactgggtacccctatggagagaggcatnnnnnnnnnnnnnngggacccacatgctgccnnnnnnnnctttcctgcttttcaggtggaccccannnnnnnnnnnnnnnnnnnnnttgccaagaagcacaacaagaannnnnnnnnnnnnnnnnnnnnnnnnnnnnnnnnnnnnnnnnnnnnnnnnnnnnnnnntgtcaaggccctcgtaaagcccaaggaggttaagcccaagatcccaaagggtgtcagccgcaagcttgatcgacttgcctacattgcccaccccaagcttgggaagcgtgctcgtgctcgcattgccaaggggctccggctgtgccggccaaaggccaaggccaaggccaaggccaaggatcaaaccaaggcccaggnnnnnnnnnnnnnnnnnnnnnnnnctcaggctcccaaaggtgcccaggccnnnnnnnnnnnnnnnnnnnnnnnnnnnnnnnnnnnnaacgtgaggacagaaggactggtgcgaccccccacccccacctctgggctgccannnnnnnnnngctg

SEQ ID NO: 13533 - DNA, 728 bp, Macaca Fascicularis
  misc_feature (1)...(728): n = A,T,C or G
gcggagcagctgctgggctggtggagggcctggtgcgggagcacaagggcgcccactactccaacgagttgtacgagctggcgcatctnnngcgctgggcaggccgggaggagcggcttcggagggtggcggagggcgtggccgcccgcatgcggaggaggccatggggcgcctggcttcgggccgggctgtgggcgtggccgaagccgccctggagctggaggctgggcctggcactgctgctggggggcgcactcctgttctgcgtgctgctccacaggcgctggtcggcggcctttggggaggtcgggcctgactgacactgnnnnnnnnnnnnnnnnnnnnnnnntggtcaagagaggctgaattcttggagctgaaaggacaactttattccaacggaaggaatcctgtagtttcaggcacagttttaatgacacagaaaactttgaatgctgcatcatctttgcaactttgccaaggctcagaatccactttttaagtttttgactcattttaaatgatgtgtatgcagagttttcaatttgtctaacataacttcctttggtagttttggtagtctaatgtcaagtagcttctggtggggacaaatgcgtggcacaggggaaacaagtgcctttatttttgaactttttaaaaaatttagactgccccaccttgataaatttctagttcatatacatgagtagatatgttcttttgtgatt

SEQ ID NO: 13534 - DNA, 724 bp, Macaca Fascicularis
  misc_feature (1)...(724): n = A,T,C or G
atcgtcctgcctccctacctggaagctgattaagtggaaactttccttgtatcaaattctgagtctttctacttcacgggttctagctatgacaaaggaccnnnnnnnnnccttctgtggcaacacagcctcttacatatggcttccatagcttctttctatgtgaaagggacgttcagattaagaaatttttctttttttgtctctataaattctgattctcaagacttgtctggctataacccctgtccctgtctaattcttccggtctaaannnnnnnnnnnnnnnnnatttttttctagtattttctcctgaagtattgaaacctattgatttacgggtagagatttgctaagtatgacgtgcttccacctcttgtcttcatgctctctaccttccttaccnnnnnnnnnncacactggcctttctgttccttggacatgcctggagacctgtccctgctcttcgttccctctggggtgctcttccccctccttataaatgttcaggtcagctgaaagtttctttcctctgagagctcctgtttggttaccagcctaaaggactcacagccctggcactctgtnnnnnnnnnnngcaacgccaacagctgaacttgcctctgtatctattgttttcccaatcaaaatgcttacgcaagattagcaattgttcatttctgcatccccagagcctagcccactgcttggtacacaatagatg

SEQ ID NO: 13535 - DNA, 764 bp, Macaca Fascicularis
  misc_feature (1)...(764): n = A,T,C or G
ttcccagataaggcaanacagttatggaatcttgctgcaggccctccctctactcttcctgtcctaaaaataggggccattttcttacccccagagagaggagggactnncacactggtgctgagtgacccggaggctgctgggcgnnngtgttccttaccagaaccattacatccctagaagagcacagagccctgaggggctgggctgtgctgggctgagcccccggtcttctctnnnnnnnnnnnnnnnnnnnnnnnnnnnnnnnnnnnnnnnnnnaggcatcaaagctagaatgtgaatataacttttgtggaccaatactaaaaataacaagaagcccagtggtgagccaagtgtgttctcccaacactgcctcctgttttctccctctcatgtccctccagggaaaatgactttattgcttaatttctgcctttcccccctcacacatgcacttttgggcctttttttatagctggaaaaaacaaaataccaccctacaaacctgtatttaaaaagaaacagaaatgaccacgtgaaatttgcctctgtccaaacatttcatctgtgtgtgtgtgtatgtgtgtgcgtgtgtgaagccgcctactcatctttttatatggggttgttgtctcatttcagtctgttttggtcccctccctcgtgggctcgtgctcgggatcaaatctttctggcctgttatgattctgaacatttgacttgaaccacaagtgaatctttctcctggtgactcaaataaa

SEQ ID NO: 13536 - DNA, 962 bp, Macaca Fascicularis
  misc_feature (1)...(962): n = A,T,C or G
ggccccacattaagtctcttgaagcctcacatttccctggggggtgctnnntcatcgggcgcccctcaccccacccggggaacctctatcttcaggtcaccccttttaagggtcctgggttgctcatgtcataagccactctcaaggcccgtgtcactctgtcctcagggcccgtgtcnnnnnnnnnnnnnnnnnnnnnnnnnnnnttgacctagctgggtccctcctgcacaccccagaccccctcccagggcagannnnnnnnnnnnnnnnnnnnnnnnnnnnnnnnnncatttagtgacnnnnnnnnnnnnnnnnnnnnnnnnngtgctgggcgggaggggctccggcctagggtcatcagccctggctggacgcgggcgtcccaaggccacatggctggccatgaaggtccccgtgccagacagccccagcctcgtcccagcctcctctggaggcaccttctcccggtactcggcccagagcctgtgcataaagccacnnnnnnnnnnnnnnncccgcatctcacgttctttgtagcagaccgaggnnnnnnnnnnnnnnnnnnnnntgactttgtcttgcgtcttttctctgtggactcttgaggacgcctgagccccagccctgcccctggccagcttcacccttgggtccaggggtctctnnnnnnnnnnnnnnnnnnnnnnnnnnnnnnnnnnnnnnnccttccccgaaggcaccctgcagagaggcggggcctccccagctcggccccatgtcaggcaaaggccagtcactatgcaatgctgcccccgggaggctccatgagggcacagtgggcgctggacccggcccctcaacactcttgcctgctgcctgtgaccctgaagaacagaacttattcttgctcctctccctgtgtgagcttgcccccacgacctgccccaggcccctgctgccgggccttacccccacccctc

SEQ ID NO: 13537 - DNA, 1006 bp, Macaca Fascicularis
  misc_feature (1)...(1006): n = A,T,C or G
gtcaatcccagtgtttacatgagagatcctttagtccacccaatggctgacattagcagcatctttaacacaactgtttgttcaaatgtacagtggggtccttttcagagttggacttctagactcacctgttctcactcnnnnnnnnnnnnnnnnnnnnnnnnnnnnnnnnnnnnnnnnnnnnnnnnnnnnnnnnnnnnnnnnnnnnnnngtctgtgcagtttctgacacttcttgttgaacatggctaaatacaacgggtatcactgagactaagttgtagaaattaacaaatgtgctgcttggttaaaatggctagactcgtcaggatcgttctttattctattttagttggtttgcatcttgcctatccaactcttggtattaccctcctaatagtcatactagtagtcatactccctggtgtagtgtaatctctaaaagctnnnnnnnnnnnnnnnnnnnnnnnnnnnnaagagtgaatggtctctttggctggaattacaaacctcaaagaannnnnnnnnnnnnnnnacatcctaacctatgaaggtaccctagagcttaaagtataataataataaaaaaaaacctatgaaggataaaagccccaaatggtggtaacttataatagcactaatgctttaaggtttggtcccactgtcacctaggtgagcgcatagagccagtcatgctaaatgctacatactccaactgaaattttgaggaagcagatagatccaaaacacatcaatttaaaaaaacaaaaaaaaaaacaaacaaaaaaaaaaacggagattccagtttacttgagttagcatactatgggggtcccctccactttaacttttacaaaaaggtaatgtgaagtaatgtgattttaaccaacgtatttatttctgtggttctgtttccttgttccgatttgacaaaatccactgttcttttattgtattgcccnagggggagcgattactgtacttgtagagtggagctgccttaattc

SEQ ID NO: 13538 - DNA, 761 bp, Macaca Fascicularis
  misc_feature (1)...(761): n = A,T,C or G
cagcatcagtagacagtgaagaagcnnnnnttaatcaaccatcctcctggaaactgaaggtcatccagctattcgaaacgcagagggtgcggcatggggtgatgaccctggggcccagtggggctgggaagaccacctgcatccacacgttgatgagagccatgacagattgtggaaaaccacaccgggaaatgaggatgaatcccaaagcgattactgccccacagatgtttggtcggctggacgttgccacaaatgactggactgatgggatattttctacgctttggaggaaaacattaagagcaaagaaaggtagaagataaattacaaggattattttagagatacacttctagataaaatccttggaggctatacagaattagtagagcaactgtattcaccgtataatatcttagccaagactaagaagtcataaatcagtatgatatttgtgaatgttgaaataatgaaattattgattacagtatttaaaatgctcccttttttgaaataatattttctaaaaaaaagtccatatccctgtgatgtcttagaataaaatagatggaaaaagctgttaaggaaaattgatagtattgaataaagtgattttaccataactattttcactgaatattttaccagtgttactctcatttaagtacaacctatttttaaagaattgatttctctataaaatcacagggaaaatgggttatttgggagagaaaattgtgtatagcaaaaatgaagtc

SEQ ID NO: 13539 - DNA, 1359 bp, Macaca Fascicularis
  misc_feature (1)...(1359): n = A,T,C or G
aggggttatcaggaaacacaatgttaggagtcagtcatgtgtcaccacaagtgttgggatgtgtgatattgatatcagaccaggtctctatggcagtgtaatagtggcaggaggaaacacactaatacagagttttactgacaggttgaatagagagctgtctcagaaaactcctccaagtatgcggctgaaattgattgcaaataatacaacagtggaacggaggtttagctcatggattggcggctccattctagcctctttgggtacttttcaacagatgtggatttccaagcaagaatatgaagaaggagggaagcagtgtgtagaaagaaaatgcccttgagaaagagttcccaagcttctaccttcctttgtcaccttacgtttcatagctttagtatactcaggaaaagaatgaccatcttttgtagaatgtttatacatttttgcatatttcaatttccacttaaattttttaaagctttaactggctctataaattaagataagtttgtgctttccttgaaatgcacttattcttattacaagcatttttataattttgtataaatgtctattttctctaaatattttgctttcagtaaaatgctttccaactctgtttagtatattaattaccagtggattggtagaattgctttttattgactagtaaaagttactgcctatgctttttaccttaggcttatagaattaaataaaaattagccattccagaaataaattttggactgtggtgcactgtgacttactactttaaggactgaatgtgtttatcattattttgaagcagtacccacatcctcttcatatcctattaacaacagaggtaaaattattactcaaattcagttattgcctttgccgtggcagttaccatcaccttcaccctctaagatagcaggcgacatttaaagcctgcttaaatgtcagaattcataaagtgggaatttaatccgaactttatacctgatttttagaggtaaattagcttctaccaaattagctaattagcatgccatattcacacttagaacaactgattaaagtcacttgactaaaaacagaatttctttataaaccacttaacatatttactcttgtacacagactattcaagaaaaacaaaatggtaaatttaagagttcagacatcttagacaagacttgacttctgcgcttcagcaagatgtggaaacttttttagaagaatttttgctttctttctctctaaattttccttccgtgctttgatgcgggctcgtttctcacgttccagtctgagaaannnnnnnnnnnnnnnnnnggcaaagaatcgtttcctattgtatctttt

SEQ ID NO: 13540 - DNA, 784 bp, Macaca Fascicularis
  misc_feature (1)...(784): n = A,T,C or G
acccaagtgatgggtgtggttgcagaccatgacttgagccactacagaactnnnagttccacttctttacctcgaatttctgtattcttgtatttctatattttgcttttttctaaatgacagataatgtataatcaagagaataagtgtagaataagtgccacattnnnnnnnnnnnnnnnnnnnnnnnngcattttacttggtttattttaccctcattttgtggagagaaaaagatacacattggtttcttcctattttccccagctattgacctgaagagtggttctggaaaagtgtaccaaggccctnnnnnnnnnnnnnnngatacaacaatcatactttcagatgaagatttcatggaggtggtcctaggcaagcttgaccctcagaaggcattctttagtggcagactgaaggccagagggaacatcatgctgagccagaaacttcagatgattcttaaagactatgccaagctctnnnnnnnnnnnnnnnntattaataaaaatgggataattaaatactctcttcacgcaaatatgcttgattgttctgcaaaagtgattagagctannnnnnnnnnnnnnnnnnntaacattttcagatatcagataactgcaggttttcattttctactaatttttcatgtatcattatttttacaaggaactatatataagctagcacataattatcctcctgttcttagatctgtatcttcacaataaaaaaatttcacctaagtnnnaatttccttagaatttgcgatagcattgataa

SEQ ID NO: 13541 - DNA, 592 bp, Macaca Fascicularis
gcagacatggatgggccacagacactcactttactgaagccggtgcttggggtcctgagagtgcgtgcacagaactggcaagactgtgtggcgtgggctcttggccactggaaactctgcttccattatggcatcaaacagctgctgaggcacttcccacctaataaagtgcttgaggatggaactcccttctggtcgggtcccaaacagtgtccccagcccttggagtttgacaccaaccaagacatgcacctcctctacgtactggcagctgccaacctgtatgcccggatgcatgggctgcctggctcacaggactcaactgcactcagggagctgctgaagctgctgccacagcctgacccccaacagatggcccccatctttgctagtaatctagagctggcttcagcttctgctgagtttggtgaggctcctggccctggccccccatgctgtctttcaaaggcctgaacctgaactgtcctcagcctgtgctgcagaaggaagataggccctaggggatctacagccaatttgctacctctcaggcctcctaacctcactcctccatagtttcaggcttattctc

SEQ ID NO: 13542 - DNA, 743 bp, Macaca Fascicularis
  misc_feature (1)...(743): n = A,T,C or G
tgagttatttttnnnnnnnnnngtcagaggcagtacatgctaagaattgagttaatggactggaagggaaaccgagcctactcacagtatgacagattccacataggaaatgaaaagcaaaactataggttgtatttaaaaggtcacactgggacagcaggaaaacagagcagcctgatcttacannnnnnnnnnnnnnnnnctaaagatgctgataatgacaactgtatgtgcaaatgtgccctcatgttaacaggaggctggtggtttgatgcttgtggcccctccaatttaaatggaatgttctatactgcgggacaaaaccatggaaaactgaatgggataaagtggcactacttcaaagggcccagttactccttacgttccacaactatgatgattcgacctttagatttttgnnnnnnnnnnnnnnnnnnnnattataaaaacaacaaagaaatctggagaagctgccaggtgagaaagtgcttgaaaacttcagaagcaannnnnnnnnnnnnnnnnnnnnnnnnnnnnggtagttatgtgaagtcaccaaggtccttgactgtgaatctggagccttttgagttcacaggagtctctacttggggaaacagtgctcacgtggctccactatagaaaactccattgactgtcgagctttaaaaagggnnnnnnnnnnnnnnnnnnnnnnngcttcaaactactactggaccttatttggaactatggtagccaga

SEQ ID NO: 13543 - DNA, 703 bp, Macaca Fascicularis
  misc_feature (1)...(703): n = A,T,C or G
ggcagggcccatcatcnatgtcntcnnnnnnnnnnnnnncaatgtgnnnnnnnnnnnnnnnnnnnnnnnnnnnnnnnnnnnnnnnnnnnnnnnngccgtcatcaaggagaaggcagaacctccaagacctctggctcacctttgccggctgcgggttcgaaaggccattgggaaataccgtataaaactcctagacaccttgccgctcccaggcaggctgattagatacctgaaatacgagaacacccagtaactggggccacggggagagaggagtagcccctcagactcttcttactaagtttcaggacgtttnnnnnnnnnnnnnnnnnnnnnnnnnnnnnnnnnnnnnnnnnnnnnggctgcctccctctcatcctggacagctaccaggatctcactgggtctcagggccagagctttggccagagcagagaacagaatgtgtcaaggaggagaagaatcatttgtttacnnnnnnnnnnnnnnnnnnnnnnnnnnnnnnnnnnnnnnnnnnnnnnnnnnnnnccattcctggggccagggcagagcttgaggtgnnnnnnnnnnggcgggctcagagccttccctgcgcccctgcactcgctctggaaaactcaccacttgacttcagagctttctccccaaagactaagatgaagacgtggcccaaggtagggggtagggggagcctgggtcttgg

SEQ ID NO: 13544 - DNA, 752 bp, Macaca Fascicularis
  misc_feature (1)...(752): n = A,T,C or G
actnnnnnnnnnnnnnnnnnnnnnnnnnnnnnnnnnnnnnnnnnnnnnnnnnnnnnnnnnnnnnnnnnnnnnnnnnnnnnnnnnnnnnnnnnnnnnnnnnnnnnnnnnnnnnnnnnnnnnnnnnnnnnnnnnnnnnnnnnnnnnnnnnnnnnnnnnnnnnnnncaaaaaaaaaataaaaagaaaccatttattttaaaaacgattagattgctatgcctcaactcatataagatggactcttcaagaaaacgtgaagtagaatggataggccagaaatgaaaacagccaaagtaaagtatttcttcagaaaacattttatcaaaccaaatgttgagtttccttttgtaaacctggattggagaagacttttcagtgggttatctctagtagttcaagacttaaaagctgcagagaaaactgaaaattatgttccagataactttccattgtttactaaattttcttggactcggtcatcatcaggaagcatttgtaaaaacaataatttccaaattactggcccatcccagactggctgaatccatttgataggattaatctccagtgaagctgtgtttacagagcattccaagtgattcttaccaggaaatgtgaaaaacactcctgcatgtaatcagttaatttaaaatttttcttaataagcaaacaattaatgaagatttcacctgtttacttagggtatctacccagacccatcgattctgagttcgagggatgatttgaaattatg

SEQ ID NO: 13545 - DNA, 763 bp, Macaca Fascicularis
  misc_feature (1)...(763): n = A,T,C or G
atcagttttgccaatccagaggtgtgtccgtgactgcttaccgtcctcttggtggctcgtgtgaaggggttgacctgatagatgaccctgtgatccagaggattgcaaaggaacacagcaagtctcctgctcagatcttgatccgatttcaaatccagaggaatgtgatagtgatccccggatctatcaccccaagtcacattaaagagaatatccagaactaaaaatcacaaagactatcctttccacatagaatactgaggacagcttcccattccttgtttctgctcagcccagatgcaccaacgccattggtgatgttgacccttctctgtcatcacagcgccagggcagctgtgcctgggatgagagccacacagtcaggggggctgcaagagccgccttctctgacacatctggagaattgagtgtgttctaagtgaannnnnnnnnnnnnnnncaggacagcctgtgtggcctctactctgaaaaaagacactgnnnnnnnnnnnnnnnnnnnnnnnnnnnnnnnnnnngaaaactttatcttacggaattattgaagccatctgcagagctgaggaaacagtgtaatgtgtctctgccccattgcccagctccaccaattgtgccccaggccagcccgtgtcaccttcacttccttctctgccctgccaatgacccccaggttattctaaagcggagtccttcccttcccccattggaaagtgaaatggggtaagtctgggacactgtcagagtc

SEQ ID NO: 13546 - DNA, 701 bp, Macaca Fascicularis
  misc_feature (1)...(701): n = A,T,C or G
gtcagggtagcaatcaatanctatatataataatgatntgtttagtcaggtaaatggaaagcattacagtcagtcatccaaannnnnnnnnnnnnnnntgatatctgttgtgtcaatatcttctaattccaaattatccaaatctacttctagttcgagtaaactctgcaaacaaaagagggtaattaagttttacagtactgttaaaggaaagttnnnnnnnnnnnnnnnntccaaagtgggaactaaaattttcttaatagtcaagaaaagcatcttcccnnnnnnnnnnnnnnnctctgnnnnnnnnnnnnnnnnnntaaannnnnnnnnnnnnnnnnnnnnnnnaatattgatggggaggaggatggggtagagggaggtttgagtnnnnnnnnnnnnnnnncttttcttctttgttggctgtgtgggaggccacaataactggnnnnnnnnnnnnnnnnnnnnnnnnnngttcctgnnnnnnnnnnnnnnnnnnnnnnnnnnnnnnnnnnnnnnnnnncaggaatttaaagttttcccccaagagaaggatgatcagaattaggaagtgggagatgatgtttaaaagtgaaccatctcagccaaatttatcacannnnnnnnnnnnnnnnnnnnnnnnnnnnnnnnnnnngagggctgaaagccttttgcctcttcnnntgacatttctctcttca

SEQ ID NO: 13547 - DNA, 745 bp, Macaca Fascicularis
  misc_feature (1)...(745): n = A,T,C or G
accgcacngnctgctatgacctcagcccgcctgnnntggccacccgctatatgccctatggcatggctctcactgtcatcggcttcctgctgccctttgctgccctgctggcctgctactgtctcctggcccgccgcttgtgccgccaggatggcccagcagagcctgtggcccaggagcggcgtggcaaggcagcccgcatggcggtggtggtggccgcnnnnnnnnnnnnnnnnnnnnnnnnnnnccacatcaccaagacagcctacctggcagtgcgctcaacgccaggcgtcccctgccctgtgttggaggcctttgcagcggcctataaaggcacacggccgttnnnnnnnnnnnnnnnnnnnnnnnnccccatcctcttctacttcacccagaagaagttccgccgacgaccacatgagctcctacagaaactcacagccaaatggcagaggcagggtcgctaagtcctccagggcctgggcagctttcatgtttgccattgtgtccagggcaccaggagtcccaccaaccccaaagcatgcagagaattagagctcagctcagctgggcatagggtaaggtccctcacaggacccagaagctcaccaaaaactatttcttcagccccttctctggcccaggccctgtgggcatggagatggacagacctgggcctggcacttgagaggtcctagtcagccatagagagctggggaaaccacataaagggctcacaaaa

SEQ ID NO: 13548 - DNA, 1064 bp, Macaca Fascicularis
  misc_feature (1)...(1064): n = A,T,C or G
cccgtgggaagcctccgccctggagccnnnnnnnnnnnnnnnnnnnnnnnnnnnnnnnnnnnnnnnnnnnnnnnnnnnnnnnnnnnnnnnnnnnnnnnncagcctgtagtagactcgggtcctatccacannnnnnnnnnnnnnnngcgctgtcctcacagagacatagtcgccccccgctgggctgtgctccactgtgacggtggcccggggggaggatgccagcagccnnnnnnnnnnnnnagctgtgctgtggcccagcagtatggcctgcatctggaaggacacaggttgccaaagcccctggcacagctctagcatatctgtgagcagatgttctctgtagccactgcccagcacctcnnnnnnnnannnnnnnnnnnnnnnnnnntgggggaagacctcagccacagctgtaagcagctctctgccagccacannnnnnnnnnncgaaaaactcccgtgggagattttggccccaacccacacaggccaatgcaagaggccaaggctggagaggtgtgccagcaaggccagggacggccggagggctgtgggctctgctatttgcaaatggatgccccagtgtccgggacgtgtggccagctgttgcaggcaggactccannnnnnnnnnnnnnnnnnnnnnnnnnnnnnnnnnnnnnnnnnnnnnnnnnnnnnnnnnnnnnnnnnnnnnnnnnnnnnnnnnnnnnnnnnnnnnnntgtctggnagaggcggcaggggcaacagggtttaggatttgggttatcataggttttnnnnnnnnnnnnnnaaggggcagtgggagttatggagtcatcaaggatcttgcctttctggaatctgtcaacccatttttgggctccaggtggatgggttgctttatnnnnnnnnnnnnnnnnngagaaactcttgcttcagctcttggcctttacccatgactcagtctgggggctggtgccggccttgcccgtagcactgtggctgaggactggtctgaaggccaggagccctgtgctcttgacatcactgtactccctctccctctnnnnnnnnnnnnnncc

SEQ ID NO: 13549 - DNA, 704 bp, Macaca Fascicularis
  misc_feature (1)...(704): n = A,T,C or G
tcaggagaaaaagaggaatcntttgttggcatttgaagcagctgaaagtgtaggcatcaaacccagnnnnnnnctcagtgagatgctatacacggaccggcctgactggcagagcgtgatgcagtacgtggcccaaatctacaagtactttgagacgtaaccatggagggcctggagcagccaacnnnnnnnnnnnnnnnnnnnnnnnnnnnnnnnnnnnngatcactgtccactgaccctgctttgcccaccacccnnnnnnnnnnnnnnnagaggcaggctcaatccaagtggaccaacacccaaataggaaagagtgggtcccactgtgtacctgtctcaaatgcaannnnnnnnnnnnnnnnnnntggggactctttgatctcccatgggatgcttctaaagagcccagcctccctccttccagaccaagaccccacacccaggcttgttttgctgattccattgggtgactnnnnnnnnnnnntgcagaatttnnnnnnnnnnnnnnnnnnnnntcaggcttttggttgctgttgttaaaannnnnnnnnnnnnnnnnnnnnnnnnnnnnnnnnnttggctcggtgtggtagctcgtggctgtaatcccagcactttaggaagccaaggnnnnnnnnnnnnnnnnnnnnnnnnnnnnnnnnnnnnnnnnnnnnnnnnnnnnnnnnnnncactccagnct

SEQ ID NO: 13550 - DNA, 763 bp, Macaca Fascicularis
  misc_feature (1)...(763): n = A,T,C or G
cgggcctgggccnnnncatcgagctcnnnnnnnnnnnnnnnnnnnnnnnnnncctgggcggcctggacgtgtgtggtgaggacggccagtnnnnnnnnnnnnnnnnnnnnnnnnnnnnnnnnnnnnnnnnnnncatcgccacnnngatgcccaccaaggacgnnnnnnnnnnnnnnnnnnncaagaagcgccacctgggcaacgatttcgtgtnnnnnnnnnnnnnnnnnnnnnnngaggacttcaagctcggcacnnnnnnnnnnnnnnnnnnnnntnnnnnnnnnnncatcaccccgctggactatgagtgcaacctggtgtccctgcagtgcaggaaagacatggagggccttgtggacaccagcgtggccaagatcttgtgtgaccgcaacatgccttttgtggcccgtcagatggccctgcatgcaaacatggcctctcaggtgcaccacagaggctctaaccccacagacatatatccctccaagtggattgcccgggtctgccacatcaagagagtctgccagcggatctgcgaggaagccgcctactccaaccccagcctgcctctggtgcaccccccatcccataccaaagggcctgcacagactccagccgagcccacgcctggctacgagatgggccagcggaagcgcctcnnnnnnnnnnnnnnnnnnnnnnnnnnnnnnnnnnnnnnnnnnnnncctccctgctgcgcccgccctggacgctattttgtgtcaggaaataaagtccggcg

SEQ ID NO: 13551 - DNA, 730 bp, Macaca Fascicularis
  misc_feature (1)...(730): n = A,T,C or G
tgacccccgagtgctgcactnnnatgccacnnngcagcggggcagggnnnncagtctggagtnnnnnnnnnnnnnnnaggcagnnncagaccaggagaacgtggacccaaaccnctgagcctcacctgcaaagagaagacaaagggtggcctccctgtcctcctgctccctagtgggccagggccccagggaataactggaggaggcgggcagtgtccccttctgtattttttaggggctctcagcctcctggcagggttaaagggagagtgctttaaatccatgtaccagctgtgcttcagtttgccctgggtgnnnnnnnnnnnnnnnnnnnntaaccctttctgtgccagttgagaaagagcctgtgtggtagctggtgttagaggacaaagnnnnnnnnnnnnnnnnnnnnnnnagctgcagagttgtgaacatccctcctttcaggctgcagaagggagcggcaatgaagacaggtgctctggaagcagcgtcagggctttcggaggggacctgggggggactcaggctgggtacagcctccaaacagagaacggaacttaggtatgtctccacggctaggcccagcctagcccagcccagaacaaacacccttcagagcctaactgaagaacataagctgcaaaatgtgcacccatattttaagctgctttttcaagggataaatagtgtttggggacattgaaatggatgttctcaggttgta

SEQ ID NO: 13552 - DNA, 619 bp, Macaca Fascicularis
  misc_feature (1)...(619): n = A,T,C or G
ccctgtccatccaccagctcgcagagcagggggagctcgaccagctgaaggagcanntgcggaaaggtgacaacctcgtcnacaagccnnnnnnnnnnnnnnnnnnncccctcatatgggcctcggcctttggagagattgagaccgttcgcttcctgctggagaggggtgccgacccccacatattggccaaagagagagagagagccccgtctttggccagcactggcgggtatacagacactgtggggctgttgttggagcgtgacgtggacatctacatatatgagtggaaaggagagacgccgctgctgtacgctgtgcgtggcaaccacgtgaaatgcgttgaggccctgctggcccgcggtgctgacctcaccacagaagccgactctggctacaccccgatggaccctgccgtggccctgggatacccgaaagtgcaacaggtgatagagaaccacatcttcaagatcttccagagcaaaatggtgcccgctgaccccgagtgaaggccgcccgctggggactcaagacactcagggaacaaaannggttggccagagctggggaaacctagaactggnnnnnnnnnnnnnnnnnnnnnnggtggtgggag

SEQ ID NO: 13553 - DNA, 740 bp, Macaca Fascicularis
  misc_feature (1)...(740): n = A,T,C or G
tgagtacacgtgagctcctcacacacnnnnnnnnccagttcagcagcctacagcaggggaagatgtttttcctcatcggcctcaccatggccaccatccagggcgcctatgcccggcggatccaccccggcggggaagnngctgncgtgaagcgggccctcctactgctggtgcctgccttcctcctcattggctggagccattctctgcccatgctgggcctggggctgctgctgtactcctttgccgccgccgttgtggtgccctgcctgtcctccgtggtcgctggctatggctcaccagggcagaagggcacggtcatgggtacactgcgcagcctaggcgctctggccagggccgcggggcccctggtggctgcttcagtgtactggctggccggggcccaggcctgcttcactacgtggtccgggctctttttgctgcccttcctcctcctgcagaagctgaattactcggcacagacgctcaaggctgagtagctgagccactgtgcccaggctgtgggcaccaggcagagtgggagcctgggtcagagccctgcccactgcctgacccccctccttcccagtccagggagaccctgtgggtgggagccggccccccagcaggaagcccaggcagctcctccagactcattgctattaatgactccaggcggcagcactccaaggctgtccgggttggtttgttttctaaactatgcacnnngttctctgatg

SEQ ID NO: 13554 - DNA, 756 bp, Macaca Fascicularis
  misc_feature (1)...(756): n = A,T,C or G
tcnnncnttttcaaatgtctaatgatattctcctattttcactgcccaactaaagtactattaatatttctttctttctttctttttttttttttgagacaaggtctcactatgttgcccaggctggtctcaaactccagagctcaagagatcctcctgcctcagcctcctaagtacccgggattacaggcatgtgccaccacacctggcttaaagtactatatcttattgaggtctaacctctatttcccctagccctgtccttccactaagctaggcaggtgtaataataaagtgaaaatgttaacatttgaatgccactttccaggtgtagagtgtttgcacatcatttaattctcatttnnnnnnnnnnnnnnnnnnacaagtctttacagctgtcattctagagtttaggtgagtaacacaattacaaagtgaaagatacagctagaaaatacaaatgccggtctttccatcgcccaaggaaacatcaaatatgtatgtttgttcacctactcttatagtcaatgtgttcatcatttcagcttaaaaataacagtctgcccctttagccagttttcatgtctgtgcaagacctttcaataggcctttcaaacaataattcctccagaaaactagtctaagagtgaggacccccaactctagcctccccctgtcttgctgtcctctgtttctctctttttgctttaaattcaaaaaaagcgacaccgagcannnnncnaccagcctggcaac

SEQ ID NO: 13555 - DNA, 752 bp, Macaca Fascicularis
  misc_feature (1)...(752): n = A,T,C or G
ggacccgcgagccccgccgccgttatgaanatcgnnaatgcgaggccagaggannnaatgaacatgcagcactgcaannnnnnctgcctgcccgagaactnnnnnnnnaaatactacttctaccatggcctttcctggccccagctctcttnnnnnnnnnnnnnngagaatgggaagattgtggggtatgtcctggccaaaatggaagaggacccagatgatgnnnnnnnnnnnnnnnnnnnnnnnttggctgtgaagcgttcccaccggcgcctcggtctggctcagaaactgatggaccaggcctctcgagccatgatagagaacttcaatgccnnnnnnnnnnnnnnncatgtcaggaagagtaaccgggccgcccnnnnnnnnnnnnnnnnnnnnnnnnnnnnnnnnnnnnnnnnnnnnnnnnccaaatactatgcagatggggaggacgcctatgccatgaagcgagacctnnnnnnnnnnnnnnnnnnnnnnnnnnnnnnnnnnnnnnnnnnnnnnnnnnnnnnnnnnnnnnnnnnnnnnnnnnnnnnnnacaaggtggagagcaaaggcaattcacctccgagctcaggagaggcctgtcgcgaggagaagggcctggctgccgaggatagtggtggggacagcaaggacctcagcgaggtcagcgagaccacagagagcacagatgtcaaggacagctcagaggcttccgactcggcctcttagagcctgccccatcccttcct

SEQ ID NO: 13556 - DNA, 700 bp, Macaca Fascicularis
  misc_feature (1)...(700): n = A,T,C or G
attagtcataaactacnnnnnnnnnnnnnnnnnnnnnnnnaagtattatgactttcaaaaccccattatnnnnaagtacctgagcaggcagctcaggaaacccaggcctgtgattctggacccggcagaccctacaggaaacctgggtggtggagacacaaagggttggaggcagctggcacaagaggctgaggcctggctgaattacccatgctttaagaattgtgatgggtcccccgtgagctcctggatnnnnnnnnnnnnnnnnnncagnnnnnnnnnnnnnnnnnnnnnnnnnnnnnnnnnnnnnnnnnnnnnnnnnnnnnaaacatatgagtgccctcatttctctcatagccccagcatactccaggcagcatccactccacaggcagaagagaactggacatgcaccatcctnnnnnnnnnnnnnnntcttagggaaaagggctccagtgttatctggaccagccccnnnnnnnnnnnnnnnnnnnnnnnnnnnnnnnnnnacaaaggtcctcagtgagctggtgtataatgcaggacagaacccaggtctcctgactcctagccttctatgccttctctcctatcatagataacattccccacagcctcgcttcattccacctattctctgaaaatattccctgagagagaacagagagatttagataagagaatgaaattccagccttga

SEQ ID NO: 13557 - DNA, 746 bp, Macaca Fascicularis
  misc_feature (1)...(746): n = A,T,C or G
gacannctgcttnccagctggnnnnnctgcaannncccacataagcaatgcggaagtgttgggaaacacgtggaataactgggaccatctgttttctcctgaaaactagtggtaggctggattctctaaagagtttctcaaggcatgttggaccagaacaacctgctcagagaagaggcgaggtccctgcctggtctctgaggtgttggaggcggggccagcccacccggacgctgtgaggcctggctgctgggaggaggcagaacccagaaggctgccaccatcctggggtgtctgagtccccacgtggcccagctgtgttcctgctggcccagcatccacacccttgtctctggatgtgtggtgggagaactgtctttctccacgcacaggccaggtggttccggggattgacctctctctcccaggcttggacaagcagagcatcctacatccccagctacagttactggctgatatggtttggctgtgtccccacccaaatctcatcttgaattcccacgtgttgtgggagggacccagtgggagnnnnnnnnnnnnnnnnnncaggtctttcccgtgctgttcttgtgacagtgagtaagtctcacgagatctgatggttttatacagaggagttcccctnnnnnnnnnctttctcttgcctgctgccatccttgtaagatgtcattgctccccctttgccttccaccatgattgtagggcttctcctgccacatggaact

SEQ ID NO: 13558 - DNA, 682 bp, Macaca Fascicularis
aggagcctgggccttgatgtagagggacacccccacgatggggatctacttcatcacctatgaagggctctgtcaccagtacacaccagaaggccagaatcccagttcagccacagtgctggtggcagggggctttgcaggcattgcttcctgggtggcagccacgcccttagacgtgatcaagtcccggatgcagatggacgggctgagacgcagagtataccagggggtgctggactgcatggataaccctatgtctcctctggccagaatccttcagtggctctcatcaccttcaggaaaagcccagactccttccaccctccaggttcctccctccccacgaggcttcgttctcctggggttgcttcctggaccctgaacaagctgtgctctcattgcctgggcctggccagcagtgcccggcagggtgactccaccattccccgggctggccccactctcctctgagacccaggctgaacctggtctcccggtccttccttgactcgcctccccacctgaggctgactttggggttcccagacaccccacccgcacacctgccttgatcatagcacttgcctgcgcttcttcagagtcgttaatttgcttctcggcttccccactggactgtgagctcccttgaggtcgagggattgcgctttggatggtttccaag

SEQ ID NO: 13559 - DNA, 657 bp, Macaca Fascicularis
  misc_feature (1)...(657): n = A,T,C or G
tgccttactnnntccccggagcggggatcccctcaacttgactggggtcccccagcccaccaagaaatgcccataaaccaaggaggagagggcaaaaaataggagaatacatggtagggaggaattccaaaatgattacccattaaaaggcaggctggannnnnnnnnnnnnnnnaagatggagccccaaaagtgaagggctgtgagtttagtttctctcctaaaatgaatgtgtgcccaccagagcaggcatnnnnnnnnnnnnnnnnnnncagctctggaaagagggtttacgatgttaggatgaggcaggcccagtcctcctccagaaaataagacaggccacaggagggcagagtggagtggaaatacccctaaattggaaccaagaactacaggcatatgggatgtaagatgttctttcctatatatggtttccaaagggagctcccttcatccattgtccccactgcccacaaatggctaacaaatatttattggacaccaactatgtgccaggcactgtgtagatgctgaaaagtggccaagggccgccccagctgatgactccttgcattctctcccctcacaacaaagaaactcnnnnnnnnnnnnnnngcgcttcttctagccactgctatcactatttaagaaccc

SEQ ID NO: 13560 - DNA, 753 bp, Macaca Fascicularis
  misc_feature (1)...(753): n = A,T,C or G
aagcaagagcaccattggagtagagtttgcncnnagaagcatccaggttgatgggaaaaacaataaaggcacagatatgggacacagcagggcaagagcgataccgagctataacatcagcatattatcgtggagctgtaggtgccttattnnnnnnnnnnnnnnnnaaacatctcacatatgaaaatgtagagcgatggctgaaagaacnnnnnnnnnnnnnnnnnnnnaacattgttatcatgctcgtgggcaataagagtgatctgcgtcatctcagggcagttcctacagatgaannnnnnnnnnnnnnagaaaagaatggtttgtcgttcattgagacttctgctctagactccacaannnnnnnnnnnnnnnnnnnnaccattttaacagagatttaccgcattgtttctcagaagcaaatgtcagacagacgcgaaaatgacatgtctccaagcaacaatgtggttcctattcatgttccaccaaccactgaaaacaagccaaaggtgcagtgctgtcnnnnnnnntaaggcatttctcttctcccctagaaggctgtgtatagtccatttcccaggtctgagatttaaatatatttgtaattcttgtgtcacttttgtgttttattacttcatacttatgaatttttccatgtcctaagtcttttgattttagctttataaaatcatctacttgtcccgaatgactgcagctttttttcatgctatggcttcagtagccttagtt

SEQ ID NO: 13561 - DNA, 731 bp, Macaca Fascicularis
  misc_feature (1)...(731): n = A,T,C or G
gaaagcattcttcctctggagtactggtgtactaaggggacagtacaccaaatttgttgagtttacaatcaagtctactaaggttggacttccttatcggtttgatagagtcccagggcagaataatcatccatctacaggtctctctttcctctccctcctcagcagtggagagcatcccagtgtttggggcactgtgttcctcttcgtccctgcaccagaccctggaagccttggccagagacctcaccaaactcgacttgcggcgnnnnnnnnnnnnnnnngatgctggagtggagcacgatgacgtagcagagctcctgcaggagctacaaagcctggcccagnnnnnnnnnnnnnntgacagcctcgtggactaaagttcccagtgtgggagagaggagctagtgtgcaataaacacagctggatgcaggagcccagtgtcttcgtgcagaggagctcaatgttgcaggactagctacaccaacatatgcactttttacatttagaaacactgtgattagaccacagaacaataaatatgtgccatcagaccaaaaaaaagtagagaaaggagctgagctccactctcactcgatgctatttacagaggagatctgtaaggtctnnnnnnnnnnnnnnnnnnnnnnnnnnnnnnnnnagagcccctgggtcctactccatcctccagcctttgtcctcgtcctgggctcctctctccggtctgtaa

SEQ ID NO: 13562 - DNA, 787 bp, Macaca Fascicularis
  misc_feature (1)...(787): n = A,T,C or G
tttccagaaagtccccactggcggaggaaggtagactgaactgcagcacnnnnnnnnnnnnnnnnnnnnnnnnnntggattattcctctgacagcagcgtcactccctctggcagcccctgggtccggaggcgccgccaagccgagatggggacccaggagaaaagccctggtgtgagtcccctgctctctcggaagatgcagactgcagatgggttacctgtgggggtgctgaggttgcccaggggccctgacaacaccagaggatttcatggccatgagagaagcagagcctgtgtataaataccttctatttttaataccagctccgctgaaaaccaccttcgttttcaagtttctgacaaatatctggcatgacagaatggaattcattcctctttgagagattttgtatacatatagacctcttaatttatctatctgtaatatatataaaccggtacgccatggtttgaagaccaccttctagttcaggactcctgttcttcccagcgtggccactatttcgatgatggctgatgtgagtgagtgtgatggccctgaagggctgtgggatggaggttcccttggnnnnnnnnnnnnnnnnnnnnnntctttggtatggagtttttcccttcagtgactgagctgtccttgataggccatgcaagggcttcctgagagttcaggagagttaccttgtgcaacaacaagtagttaagcctttagcatggtgtcttataggaccaaatcgatgttacctgtcaagaaatannntaaaacacccc

SEQ ID NO: 13563 - DNA, 628 bp, Macaca Fascicularis
  misc_feature (1)...(628): n = A,T,C or G
aagaggcttacgccgggnnnnnnaggagaactgctctccctcannnnagggaannnggnnnattccagagggnctgagtcagtagccaaagactcagcttcccctgcccttccccaagtcccttcacttcccctaccctctgacctatctatgaaagccaagttaggcgtttgtgtgtgtacacgagcttgtctttgtgtggtgtgtgtgtgtgagagagtgtacatgtatgcacacacacaggggttaaccacccctcacctagggctccagactccagttgtccctctcctcctgcctgtgtctccttgctttggggtcctgactgaagaaggtgtccagggggcagagtcagggccaagcactggggtgcctccactcacctggccagactctgacccacctacctcagctggggtgaggggcacccctcaaactcagtcatgtggttccaaactaccccattccccactccagactctgacccagcctcagtcctgactcctgaggctgggctgaggggaacaagcatttgctgaaacttgaaaaaacaaagcaaatcagaaacaggaaaaaattgtacctggtacttttttttagaaaaaaaaaagattaaaaaagaaagaat

SEQ ID NO: 13564 - DNA, 723 bp, Macaca Fascicularis
  misc_feature (1)...(723): n = A,T,C or G
cacgtggcagctgtggcgggcgagccccagccggnnnnnnnnnnnnnnnnnnnnnnnnnnnnnnnnnccgagctccggaccctgtgcacccagggcctgcagcgtatattctacctcaagttggaggacttggtgccccctccacnnnnnnnnnnnnnnnnnnnnnnnnncacgctgcccttctgacccccgcctgggaacacgtgtgcacatgtgcactctcatacgccaccccacgtgcctttagtccacggacccccagagcacccccaagcctgggcctgnnnnnnnnaatgactccaccttctcacctgctccaggaggttggcagggagctcaagcccttggggaggggatgcattcatgggggtgaccccatgatttgtcttattcccccagcctggccctggcctttatgttttttgtaagataaaccgttnnnnnnnnnnnnnnnnnnnnnnnnnnnnnnnnnnnnnnnnnnnnnnntacaggaagaaagagcttgaggtgggagtggggttgggaggaagggatgggccccacccacctgggcagcctttccagcctcttgctggctctctcttcctaccctccttccacatgtacataaactgtcactctaggaagaagnnnnnnnnnnnnnnnnnacatttatatttgtgtattttcctggatttatagtatgtgacttttctgattaatatatttaatatatgaataaaa

SEQ ID NO: 13565 - DNA, 708 bp, Macaca Fascicularis
  misc_feature (1)...(708): n = A,T,C or G
cgctgccntgagctcggcgggctggcatccggcccgggaaaaagcggagcaggtctgcgaggctaagtgtccccgcggcgcacctagcagcgagaatccggaggaggaggaaactgcaaggataggcccagaaaaacaaccagaaaaaaaatctcatcatggcaaatattcaccaggaaaacgaagagatggagcagcctatgcagaatggagaggaagaccgccctttgggaggaggtgaaggccaccagcctgcaggaaatcgacggggacaggcgcgccgacttgcccctaattttcgatgggccatacccaataggcagatcaatgatgggatgggtggagatggagatgatatggaaatattcatggaggagatgagagaaatcaggagaaaacttagggagctgcagttgaggaattgtctgcgtatccttatgggggagctctctaatcaccatgaccatcatgatgaattttgccttatgccttgactcctgccatttatcatgagattaatactgtgattcccgctgttttctttttccttgcattttcctaatatgcctttactgatccgtttgctgtgaaccctgttatttccatgtgtcaagtgggtcttgtgttgccagcttctatttggaaattgcctttgcactcggtctaagtttctgtcagccagtagtttcaccccatttgcatggaaaa

SEQ ID NO: 13566 - DNA, 1028 bp, Macaca Fascicularis
  misc_feature (1)...(1028): n = A,T,C or G
actgtcacttcaatgagcagcatcaacaacacagttgcaacnnnnnnnnnnnnnnnnnnnnnnnnnnnnnnnnnnnnnnnnnnnnnnnnnnnacaggagaaacagaagaatgacatggaacctagcaaaaccgttccactgaatgcatctaaacaagatggacctatgccaaaaccacacagtgtttcacttaatgatactgaaacaaggaaactaatggaagagtgtaaaagacttcagggagaaatgatgaagctgtcagaagaaaatcgacacctgagagatgaaggtttaaggctcagaaaggtagcacattcggataaacctggatcaacctcaactgcatccttcagagataatgtcaccagtcctcttccttcacttcttgttgtaatgccagccattttcattggattctttctagggaaattcatcttgtagagtgaagcatgcagagtgctatttcttttttttttctcttgaccagaaaaagatttgtttacctaccatttnnnnnnnnnnncggcccgcggtgaccnnnnnnnnnnnnnnnnnnnnnnnnnnnnnnnnnnnnnnnnnnnnnnnctcacggtnngaaaacccannnnnnnnnnnnnnnnnnnntcctggacaaattgtatagtaccgatcatcactagcagatgtcagttnnnnnnnnnnnnctttatgaaattcataaataaagaattgttctttctttgtggttttaataagagttcaagaattgttcagagtcttgtaaatgttattttaataatccctttaaattttatctgttgctgttacctcttgaaatatgatttatttagattgctaatcccactcattcaggaaatgccaagaggtattccttggggaaatggtgcctcttacagtgtaaatttttcctcctttacctttgctaatnnnnnnnnnnnntttttcttatcccttgtgaggcagttgttgactgagtttttcatccttacaatcctgtcccatggtatttaacataaaaaaaataaaac

SEQ ID NO: 13567 - DNA, 742 bp, Macaca Fascicularis
  misc_feature (1)...(742): n = A,T,C or G
ctgctgctgctgctcatgcagtacctgtgccgcgagtaccgcgnnnnnnnnnnnnnnnnnnnnnnnnnnnnnnnnnnnnnnnnnnnnnnnnnnnnnnnnnnnnnnnnnnnnnnnnnnnnnnnnnnnnnnnnnnnnnnnnnnncagagtttgggaactgggcgctgggattgtggaccgaggagggctttgacatctttgaagatttcccggatctcaactctgtgctctggggagctgaggagaggaaatgggtcccctaccgggtccccaacaacaannnnnnnnnnnnnnnnnnnnnnnnnnnnnnnnnnnnnnnnnnnnnnnnnnnnnnnnnnnnnnnnnnnnnnnnnnnnnnnnnnnnnnnnnnnnnnnnnnnnnnnnnnnnnnnnnnnnnnnnnnnnnnnnnnnnnnnnnnnnnnnnnnnnnnnnnnnnnnnnnnnnnnnnnnnnnnnnnnnnnnnnnccatggcagccgcccgcggagaggatgaggatgaggtctctgagggcccaggagaccccagaccacgccatcttccgctggctcgccatctccttcgcctccgcccacctcaccttgaccgagccctatcgcggaggctgccaagcccaggactacaccggnnnnnnnnnnnnnnncaacggggccaagtggaacccccggtccgggagtgagtcagcctggaaggggctgtgggcggggcctaatccggagaggggctgactttgggtctgtgtctgt

SEQ ID NO: 13568 - DNA, 731 bp, Macaca Fascicularis
  misc_feature (1)...(731): n = A,T,C or G
atccccaagaaaggannnnntggnnnnnnnnnnnnnnngcgggattgtttcaaccttttcactaaggaagaagagctagagtcggagaatgccccagtgtgtgatcgatgtcggcagaaaactcgaagtaccaaaaagttgacagtacaaagattccctcgaatcctcgtgctccatctgaatcgcttttctgccnnnnnnnnnnnnnnnnnnnnnnnttcagtaggtgtagactttccactgcagcgactgagcctaggggactttgccagtgacaaagccggaagtcctgtataccagctgtatgccctttgnnnnnnnnnnnnnnnnnnnnnnnnnnnnnnnnnnnnnnnnnnnnnnnnnnnnnnnnnnnnnnnncatgtctacaatgactctcgtgtctcccctgtcagtgaaaaccaggtggcatccagcgagggctacgtgctgtnnnnnnnnnnnnnnnnnnnnccaccccggtgcctgtgacaccctctctaagccctggcacctgtgaagccctttaaacacccttaagccccaggctccccgtttacctcagagacgtctatttttgtgtctttttaatcggggaggggggagggggtggttgtagctccattattttttttattaaaaaatacccttccacctggaggctcccttgtctcccagccccatgtacagagctcaccaagcccctgcccgtgtacagcccccagaccccctgc

SEQ ID NO: 13569 - DNA, 405 bp, Macaca Fascicularis
tagatacgcagtggtggcaggttcatgggcctgaggggcctgaactgacctctcttggctccaaaagcctttgctgtgttcccttcttcagcccctggccccccagctttggggctctggctcccccccggcggaagtggggggctgtttcctgttatcctgaacaagggaagcccagtagaggctggaactggacctctccagcctcctcaccagcaccgtgcccatctcaactggacttcccgccctccttctccaccttctagtgcccgtggcctgggattcaaagccactgttccccaggtccctgggctgggccctgacagggagccgccaccctccccatgctaacaaggaagcccagtttcgtgttcagtttcttttgtagaggaagcaagggctggg

SEQ ID NO: 13570 - DNA, 698 bp, Macaca Fascicularis
cacctctttaactgtcatgcaccagcttctggatctttcaggagattcttaactgaagctggattatggcatggtcttatctctgacaacctaaagccactgctgttaagatgctttctcatgtctaaaccacagaacggcttccttttctaagaagtttgtgaggtttggggaatggcagaaatgtagaggaaggcagaaattataatcaagttcaaactgtcattttcctgtttcttgaaccaggaagtagataaggaaaggagcactctgaaaagtcaggccactggactccagttagtgaccccaggcccatggaagactccttttttgtgccttagtttctcttagaaaatgagaagaaaggctttttggtcatcgtcattgtgtctatctttgtgtgtcttcttgtttatgtatgctaagggagtattttcacaaagttcaaaacagccacaataatcagagatggagcaaaccagtgccatccagtctttatgcaaatgaaacactgcaaagggaagcagattctgtatatgtaactacccaccaagagcacatgggtagcagggaagaagtaaaaataaagaaggagaatactggaagataatgcatgaaatgaagggactagttaaggattaagaaaatatcagaagacattaaatatactaacatagctatggaagaattgagggtga

SEQ ID NO: 13571 - DNA, 611 bp, Macaca Fascicularis
  misc_feature (1)...(611): n = A,T,C or G
cagaatncactgggctgccaagtgactcttgaagatctgtctgtaatgttgagtcttgtccatctgctcttgactctgagctggctaggtgactgttggttattcctgggacaggtgctgggtaggccaggtttcagcatcgcagacaagaagcgcaggannnnnnnnattggggccaaacacagaatcagcaaagaggaggccatgcgctgnnnnnnnnnnnnnnnnnnnnnnnnnnnnnnnaagtgaagtggtggaatgtggtgttggtgaatggagttgggatttggggatgcaaaatataggactatnnnnnnnnnnnnttctttaaaattnnnnnnnnnnnnnnnnnnnnnnatcaggggcttccagggatgatggtttaaaagaatatccagaactaggcctccccacnnnnnnnnnngggggtagctggaaggggaggaatatggctttaataggagccccctttctcagatgatagtgcnnnnnnnnnnnnnnnannnnnnnnnnnnnnnnnnnnnnnnnnnnnnnnnnnnnnnnnnnnnnnnnncaagttcatgtatcagtcagatttgaattctcaaannnnnnnnnnnnnnnnnnnctct

SEQ ID NO: 13572 - DNA, 760 bp, Macaca Fascicularis
  misc_feature (1)...(760): n = A,T,C or G
tatctnnggaatacagaagcagtgnntnnannttcagaggagaannnctagccaaggttatgggatttttagcagacaaaaaaccagaacaaggccagcgggtctcaggaatacttgttaaaagaaactttaattatcacatactttctccttgcgacnngtnnnnnnnnnnnnnnnnnnnnnnnnnnnnnntaaagcagacccaggccattccatatactggtccctttaatttgctctattaccagctgcagaagttgacaggtgatgtggaagaattagaaattcaagaaaaacctgctctgaaagtgttcaaaaatattactgtaatacaagaaccaggcatggtggtattagnnnnnnnnnnnnnnnnnnntaatgatatgtatgcggatacagtaacaactgtgatattggaagttcagtcaaatcccaaaataagaaaaggtgcagtacagaaggtttctaaaaaattagaaatgcacgtttatagcaagaggttggagatcatgcttcaggacatatttggagaagactgtataagtgtaaaggacgactctattcttagtgtcacagtggacgggaaaactgccaaccttaacttggagacacggactgtagaatgtgaagagggaagcgaagatgatgaatccctccgagaaatggtgnnnnnnnnnnnnnnnagactgtacgaggccctgacgccggttcacagacactgttcctgtatnnnnactttaaaaatccttgactgtacttc

SEQ ID NO: 13573 - DNA, 323 bp, Macaca Fascicularis
tttttttttttttttttttttttttttttttttttttttttttttttttttttttttttttttttttaccctccccttgctccccaccattctcccttggcacactgccttacacaagagtggtcataagggggtttgaattgagtcccactacctcgggggacacctcccctccccacttgttcaggctcctaaaccaggaggcctccattacctcttcctgtcccacccctgcagaggcctgaagctgggcctgggcaccccattcactcctgttctcatttacatctgttttcctgttgtatatatcaccttgtgacaaa

SEQ ID NO: 13574 - DNA, 658 bp, Macaca Fascicularis
  misc_feature (1)...(658): n = A,T,C or G
gcctggccaagcccacacccccagaccctccttcccatnnnctgaaatgggaccctgtgtctgtcaccagcccaccctctgtgttcatgaacctgggctggagtttggggacctgggcctccaccctcttcagggacaggcgttaggaaccccggctgtcgctctgtagctggtacaaaagctgtggctgccaggcttgggtcacatggcagcccaggggaggcccactgactaccagacccagccctgagtgggtaatggcccagcttccacaggtagggagttgtgaggcccctcaccccttgatgcccaggctagcggtggccaccccagttcttgttgacttgagggacctggccgtcttccctgttcttcatccttcttggtccctatttactgtttgtaaccacaagtgtctctatgtgtgggtgggtgagggcccctctgcccagtggtgtgtctcctctccctccctgccctccctcttctgccagtggcctgggggtgtccaggctcccacccgtggcccagcccctctcccctccctgttgattcccccctccctgccccggcttcctcttccatgttccaccctctcccacacctttgttcctcaatagcagggggctgggactcaggcctcctgcgggtgcctgcc

SEQ ID NO: 13575 - DNA, 682 bp, Macaca Fascicularis
  misc_feature (1)...(682): n = A,T,C or G
ttgcccaggccccgcctctcctccctaagagctaatggcaccaactttgtgactggtttgtcagtgtcccccatcgactctctggggccgatcgctcagtttttggcctttgctgcagccatcatactgttccaaatgtggcagcaggaacagaggcctctcctcaagcctcagtcatgatggaggtcccagccacagggaactatgaactcagtgctcttggaacagcgcactaagtcagtccttccttaacctcgaagtcagtagtggagtcacaaaacccatgtgttttgccatctaggccttcacctggtctgtggacttatacctgtgtgcttggtttacagannnnnnnnnnnnnnnnnnnnnnnnnnnnnnnnnnngggtatattgaagggcaaagaggaactgttgtttgaannnnnnnnnnnnnntggcttagtgctgggtcttaaacctcataacaatgaggttagtacttttagtccatgttttacaggggttagaatagactggtaaggggcaactgagaaagaatagagaagtgacagccagaggttgagaggggccagaaaaacacgaatgannnnnnnnnnnnnnnnngaaatctgccaccactttataactagatggttcctatcacaaccctgggtcaaaaagagaataatttgacctataatgt

SEQ ID NO: 13576 - DNA, 739 bp, Macaca Fascicularis
  misc_feature (1)...(739): n = A,T,C or G
gatatggagccagtgtcaatnttnctgttagtgaatgttttgaactagatgtttgttcccatccccaaaatttatatgtttgaagcccttatcagtgtgatggtatctggagatggggctcctccaactattccatcccacaacacccccgcctgaggacacagcgggaaggtgactgtctataagccagaaagaaagtagtcaccagaaacagaccatgcggacaccttgagcttgaacttctaacccccagaactgtgaggaaataaatttctgttgtttaaaccacccagtccgatggtattttgttagggcagtctgagctaggacagtgatgtaagatagacagctagtaaagtaaacnnnnnnnnnnnnnnnaaggaagatatacaagaaattgaaagaataattaagtcagtaagaggtagtattcagttttggcaaactcctctgacttgagttgaaaaggcttttttttttttagagtaaaaaccaaataactaattctaattgacaaaaaaaaaggtaaacaaacatcctaaatagctgctgaaaacgtgtcttatagtttccttaggtctgtgttcctaagatgcttaaaattttatcatgaaaaaatcctattttctctatacccttcctgtactattctattttggaactaagnnnnnnnnnnnnnnnnnnnnnnnnnnnnnnnnnnnnnnnnnnnnnnnttattgattcatgatacacttattga

SEQ ID NO: 13577 - DNA, 667 bp, Macaca Fascicularis
  misc_feature (1)...(667): n = A,T,C or G
gacaagtgagaggttcttgttnatgaagggaaagtgcactatacgtggacttaagannnntgggcagatgtttacatttcacttgcaagatctttattaatctgctaaatatctgcaaatcacaccttggattttgccaagaaaattcacatgcaagcaggcattttattcatgcactgaccccaaaggtcacatttaatcagctgaagacatagcagagtctttcccctcacaagcttctgcctcttctttctccccatacaggacgggctctacgagtgcattctctgtnnnnnnnnnnnnnnnnnnnnnnnnnnctactggtggaacggagacaaatatctggggcctgcagttcttatgcaggcctatcgctggatgattgactccagagacgacttcacagaggagcgcctggccaagctgcaggacccgttctctctataccgctgccacaccatcatgaactgcacaaggacctgtcctaagggtctgaatccagggaaagctactgcggaaatcaagaaaatgatggcaacctataaggagaagaaagcttcagtttaagtgtttccatgctaaacatgacttaaaaccagctcagagctgaacataatttatatataatttgagttcctttaaagatcttggttttccatgaatacag

SEQ ID NO: 13578 - DNA, 709 bp, Macaca Fascicularis
  misc_feature (1)...(709): n = A,T,C or G
gcggccctggnntnncaccaccccgtgtacctagtnnncagccaacaccaccaggtcccaaagctaaggagccaggcctgggggtggacttcattcgtcacaatgcacgagctgcgaagagggccccccggaggcattcttgctcgctgcaggtcttggcacaagtgctagagcagcagcggcaggcccaggagcactacaatgccacacagaagggccatgtgccgcattagtagcttgttggagcgcagggacctgtggcagcgggaggctgaggctcgcaagcagagccagccagaccctgccatgcccccaggccacacgcgcatgcctgaaaaccagcggctggaaacactgaccaagctgctccagagccagagccagctgctgcgtgagctggtactgctgcctgccggggcagactcactgagggcccagagccaccgtgctgagctggatcggaaactggtgcaggtagaggaggccatcaagatcttttctcggcccaaagtcttcgtgaagatggatacctgagcccctctgagggacagtggcagggagctccatgctgaggatcgccacatggctgcaaaggacagagtcggacccaatcccagagcagaggtctgaagacaggagcaggggggtggccagtgtccctagagcactcctcccagccaccagtggctgcagaagggccaccccagcc

SEQ ID NO: 13579 - DNA, 679 bp, Macaca Fascicularis
  misc_feature (1)...(679): n = A,T,C or G
taccaactgggagagtcccctccntccnnnantcctgggatggcagcaaggacatgggggctgctgttagcttctccgtcgggaggcctcatctcactgtaaccctggaacccagggcagagggcccacgaaggtggagtccatcttgcccttccccaatccagggttgggaaagaagctcagcctctcacagtggcctcaagtgtgatgccttgcaaaagcaccactcagaggggcagcnnnnnnnnnnnnnnnnnnnnntctgccctcctcccacagcctccctgccccacccatccctgcaaagnnnnnnnnnnnnnnnnnnnnnnnnnnnnnnnnnnnnnnnnnnnnnnnnnnggctggccactctctgcctcagtggcctccctacagcctggaagaaggagggtcctggttgccaaggaaacctcctcattgagctaagaagacactggagtctggagtgtggagccccacagtcnnnnnnnnnncacactcttcttgtacatctggtctggtcatgcccgctggcctctgcccctgccctgggtcaaaagggcccctccttgccaggggagagacagccatggtcttctttggcagctgtggttttctcacttcggcccatgttcttaggcgcatctgcctgccttcctccatctaactaatctctcctgct

SEQ ID NO: 13580 - DNA, 751 bp, Macaca Fascicularis
  misc_feature (1)...(751): n = A,T,C or G
cnnncatgtttagannnnncctcattnnnnnnnnnnnnnnagnnnnnnnnnnnnnnnnnnnntgtccagccctacaacttaaatgctctatgcctcagtttccccataatacccttgtccaacctacctcacaannnnnnnnnnnnnnnnnnnnnnnnnnnnnnnnnnnnnaatgctttgaaaatgtttttaagtgctatgcatatttatagagttgttattatagttattcaaatccattagcaggttatttttatttttttactgtttgaaaagaaataagtagtgtcgttcatatgagttcctgagtggatatgtgaatctttggtcttctcggcaggtgccctctctcttaccaccnnnnnnnnnnnnnnnntagcactcaaacacgtggcacttggaagaaaaagacccactgaatctgagaaagtnnnnnnnnnnnnnnnnnnnatgtatcattttagtatagttttctataaaggatatagcaacatcttttgataattgtgnnnnnnnnnnnnnnnnnnnnnnnnnnnnnnnnnnnnnnnnnnnnnnnnnnnntttcagccttgtaaatgggaaaatatatattaaaaatgattgtnnnnnnnnnnnnnnnnnnnnnnnnnnnnnnnnnnnnnnnnnnnnnnnnnnnnnnnnnnnnnnnnnnnnnnnnnnnnnnnnnnnnnnnnnnnnnnnnnnnnnnnnnnnnnnnnnnnnnnnnnnnnnnnnnnnnnnnnnnnntattgtt

SEQ ID NO: 13581 - DNA, 740 bp, Macaca Fascicularis
  misc_feature (1)...(740): n = A,T,C or G
tcagaggagcacacttcagatggatggacacatactggattcaaagagatatgccgttattggagccgatctccgannnnnnnnnnnnnnnnnnnnnnnnnnnnnnnnnnnnnnnnnnnnnnnnnnnnnnncaacactcnnnnnnnnnnnnnnnnnnnnnnnnnnnnnnnnnnnnnnnnnnnnnnnnnnnnnnnnnnagtgggcagccagcagttttgaggcagccatgttcataaactacgaacaggtgaacatgggtgatcggtttgggcagatcatgattgaaaacctgcgnnnnnnnnnnnnnnnnnnngcgggagtggagacttgcaagtcattagagtcacagaaagaacggctcctgtcgaatgggtgggaaannnnnnnnnnnnnngacatgatggannnnnnnnnnnnnnnacctcgagctgaagtgagcaggatagaatcacttgaatttctggatgaaatggagcnnnnnnnnnnnnnnnnnnnnnnnnnnnnnnnnnnnnnnnnnnnnnnnnnnnnnnnnnnnnnnnnnnnnnnnnnnnnaacttattaatctgttgaagnnnnnnnnnnnnnnnnnnnnagaagccactcgccctcctggaggatacctgcgagctccctgagtggtgggcgggcctcatctgcgggtctcatcccacaccctgagaagcctcgatcactannnnnnnnnnnnnnnnnnnnnnncctgttcctgttgacatgtcggt

SEQ ID NO: 13582 - DNA, 442 bp, Macaca Fascicularis
  misc_feature (1)...(442): n = A,T,C or G
gagtatagaagttcctgccaggcnnnnnnnnnnnnnnnnnnnnnnnnnnnnnnnnnnnnnnnnnnnnnnnncggatcacgaggtcaggagatggagaccatcctggctaacacgggaagaagcccgaggaagattgaccaattttgtaattctagaaacatggtccatggatnnnnnnnnnnnnnnnnnnnnnnnnnnnacttctctcaggaggagtgggagtgcctgcagcctgatcagaggaccttgtacagggacgtgatgttggagaactacagccacctgatctcactgggaagttccatttctnnnnnnnnnnnnnnnncnnnnnnnnnnnaagagaannnnnnnnnnnnnnntgtaaggaaagaaacaagcagatggtatccagatttggagtcaaaacatggacctgaaaaaatatctccagaaaatgatattt

SEQ ID NO: 13583 - DNA, 742 bp, Macaca Fascicularis
  misc_feature (1)...(742): n = A,T,C or G
tggaagacannnnnnnnnnnnnnnnnnnnncaaaaagggtccaacagccaacagtgcaacacagatacctgtttgaagaagacaatcnnnnncggtctacacaaaagctttctcattcaacaaaaccttcaggaagccctttggaagaaaaacacgatcaatgcaaatgtgaaaaccttataatgttccagaaccttgcaaacgaagaagtaagaaaattaacacagcgcttagaagaaatgacacagagnnnnnnnnnnnnnnnnnnncgcctgagatacagatgaagattagaaatcgcgacacgtttgtagtcattgtatcaaggattacaatgaaagcagtgcagannnnnnnnnnnnnnnnnnnnnnnnnnnnaataatgttgtgaagtaaaacaatcannnnnnnnnnnnnnnnnntgccatagaacaaagacaagaagtagacactaacttgtataaatttatctaggaaaaaaatccttcagaattctaagatgaatttaccaggtgagaatgaataagctatgcaaggcattttgtaatatactgtggacacaacttgcttctgccnnnnnnnnnnnnnnnnnnnnnnnntcatttgactatacgataaagtnnnnnnnnnnttacttctgtagaacactggccataggaaatgctgtttttttgtattggactttaccttgatatatgtatatggatgtnnnnnnnnnnnnnnnnnnnnnntacttgtggaa

SEQ ID NO: 13584 - DNA, 700 bp, Macaca Fascicularis
  misc_feature (1)...(700): n = A,T,C or G
gcagcagagaggccggtcnnngccaaggggccctgccccctcacaactggaaacccaggcggccctagctcccaggagcgcagctcaccagcaagttccattgcctggaggacccctgagcccatccctcagcaggccttgccgactttcctcccgctgttggtgctggtcctgctcctgaccttggcggtgatagcgatcctcctgttcattctgctctggcacctctgccggcccaaggagaaagccgacccctatccctatcctggcttggtctgcggagtccccaacacccacgccccttcctcctcgcatctgtcctccccaggcgccctggagacaggggacacatggaaggcctctctacttccacttctgagcagggaactgcccggtnnnnnnnnnnnnnnnnnnnnnnnnnnnnnnnnnnnnnnnnnnnnnnnnnnnnnnnnnnttgtactgctggaccctgagcctgggccaggtgggggcatggcccatggcactactcgacacctggccgcgagatatgggctgcctgctgcctggtccacctttgcctattcgctgcggccgagtcgctcgcccctgcgggctctgattgagatggtggtagcaagggagccctctgcctctctgggccagcttggcacacacctcgcccagctagggcgggcagatgcattgcgggtgctgtcca

SEQ ID NO: 13585 - DNA, 700 bp, Macaca Fascicularis
  misc_feature (1)...(700): n = A,T,C or G
aaagaagcaaaagagaaagaaacnntgattactatcatgaaaacattgattgactttgtgaagatgatggtgaaatatggaacaatatctccagaagaaggtgtttcctaccttgaaaacttagatgaaatgattgctcttcagaccaaaaacaagctagaaaaaaatgctactgacaatataagcaagcttttcccagcaccatcagagaagagtcatgaagaaacagacagtaccaaggaagaagcagctaagatggaaaaggaatatggaaccttgaaggactccacaaaagatgataactccaacccaggaggaaagacagatgaacccaaaggaaaaacagaagcctatttggaagccatcagaaaaaatattgaatggttgaagaaacatgacaaaaagggaaataaagaagattatgacctttcgaagatgagagatttcatcaaccaacaagctgatgcttatgtggagaaaggcatccttgacaaggaagaagctgaggccattaagcgcatttatagcagcctgtaaaaatggcaaaagatccaggagtctttcaactgtttcagaaaacataatatagcttaaaacacttctaattctgtgattaaaattttttgacccaagggttattagaaagtgctgaatttacagtagttaaccttttacaagtggttaaaacatagctttcttc

SEQ ID NO: 13586 - DNA, 768 bp, Macaca Fascicularis
  misc_feature (1)...(768): n = A,T,C or G
gaatatacagtttgacttttgnannnnnnnnnnnntatcctnnnnnngtacttgcttgtattataaatgtagattttatagatgttagggtatnnnnnnnnntaaaatttgtgtaaatttgtatccacacaaattcagtctcttactctgatacacagtaattgtgacaacagggctaaatgtttaaagaaatcaaaagaatctattagattttagaaaaacatttaagctttttaaaatacttattaaaaaattnnnnnnnnnnnnnnnnnnnnnnnnnnnnnnnnnnnnnnnnnnnnnnnnnnnnnnnnnnnnngaaaagtgatgtattttcatagtgacctgtgtttcacttaatgtttcttagagacaggtgtcttttaaacattattttttatttctgatttcataattcagaactaaacttttcatagaagtgtnnnnnnnnnnnnnnnntagtctggtcccaattaaaatactatgcannnnnnnnnnnnnnnnnnnnnnnnnnnnnnnnnnnnnnnnnnntatgcttactnnnnnnnnnnnatagaaggaagtgtgtttgcctaaaacaattcccttcaatttcatcccagaccaatggcattattaggtcttaaagtagttactcccttctcgtgtttgcttaaaatatgtgaagttttccnnnnnnnnnnnnnnnnnnnnnnnnnnnctaattcccaacatttcttaaattattttatatcatacagttttcattgattatatgggtatatatcatct

SEQ ID NO: 13587 - DNA, 693 bp, Macaca Fascicularis
  misc_feature (1)...(693): n = A,T,C or G
caatgaagggacaggcctggagttactaggacaggcctttgtgctgagtagcaatgtgnnnnnnnnnnnnnnnnnnngaggtacccctgggcaggagcctctacatccccttccccctcctctctccatgactcttgacgtcctagcttcttctaaggggggagggaaaggggggaaatttttatatatatatatacatatatatatatcaagttttaaattattgatagttcatctggattaccaaaatcactctgcagccctgcccgcggctagtaggctgcaaccctggtccccacccctaacctcctcctgctccccctcaagccaactatgcagcccacaagaaggccctgcgggccccccattgcccagcactgnnnnnnnnnnnnnnnnnnnnnnnnnnnngggccccaggagcatcagccccttgatcatctggggtttgtcatcaccatgttttctccctgctgtccccaccctgcccttctgccatcttctgggagaaggaaaccaaaggatctaaaactggggtttgggggacggtttcagcctctccccactccctttgccccacaccctttactccccagcccagagagacgctgcttttaccaggaaagactattgaaagatgatttattttatttttctctgacctttccatcctcgagaaaatggggaaaaaaaaaa

SEQ ID NO: 13588 - DNA, 719 bp, Macaca Fascicularis
  misc_feature (1)...(719): n = A,T,C or G
accattttagttnntagttgaatgnnnnngacaagctttcatatggttttgttatattttcatctacatgtacatgtgttattaattttattttaaatgaaaactaatcaccttcatgtggaaatgctttgagaattgtcctcaggcatttggtagtaaccagctaaccaagaagaaacggagaaaccagaacttcatatggcagtccattcagatgaagaatgatgatataaaatctggttccttcttagcaaaattaaaaataaacaagaaaagatactaaatgacatcagattttctttctttatgatttaaaagtccagttataacattaaaactctgtgacctagtttcttttaccaaaaccatgaacctactacccgtatcaggtattttggatggtttagaagtactcaaatcacattcaagttgttgttgttattttaaatttttaacaaatgtaaacaccagcaggtactatacttttacttgttcaaaaacattgggagggggcacttttcatagtcttggaatgttaagtttatttttaatattgtgacagaaagcattaagtatttaagagctctgtattatatttgatactcttacagttaaaaacttttcaaaattaatacattgttaattattgactggttttaaagtttgggtttaactatagttgaaatgaaaggactcttgttttannncttgtattaaag

SEQ ID NO: 13589 - DNA, 746 bp, Macaca Fascicularis
  misc_feature (1)...(746): n = A,T,C or G
gaagctagatgagatattggaaaccnnntannttctcatgcaacatacttggcccagagtttcctgcagacttgtggtcttactgaaggctctcttgaaactgatctgtgnnnnnnnaagggnnnnnnnnnnnnnnnnnnnnnnnnnnnnnngtgccctgctacaggaggcnnnnnnnnnnnnnnnnnnnnnnnnnnnnnnnnnnnnnngacgggtannnnnnnnnnnnnnnnnnnttccccaaagctgtgaagacagaaaggtggtgaactgtatcagaaaannnnnnnnnnnnnnnnnaggtgctccctacgatggaacttaagacttgcattactttcccaagaggaaaggattttcttcccatcccaatttgtatgaatggagttatttaagaaaaaaaaaatacttttacacgaaactttggaagtgagagctgctttttnnntctttctttccttttacctccataggagtagggaaagtagaacaagaaaaaaattgaactccttccatttctaaataaagtttgggagaaaaaaggacaccaaggaatgtagcatttaaaatttagaaatatttacatccgtcatctcatcccagatccaagaactcatctgttaagtttctcgggcacaagctgttacttcaacacatatgctataaaaatactcttgttcacaacttagctttcttcactcactccagatttcttgccccactgtcgtggcataaataataaaaac

SEQ ID NO: 13590 - DNA, 734 bp, Macaca Fascicularis
  misc_feature (1)...(734): n = A,T,C or G
aaccagagtgacctggaagtagatgttcnnngctccttgttnnnnnnnnnnnnnnnnnnnnnnnnncggctgctaagcggcagaggcgggggtcggcccccagcccccgggccagccatcccgtcgcaagcctgtgctggggatgctctttctgtttccagtcctgtcacggacttcccagccgccactgggccctgccggtcaccaggccactgtgcagtgggtgctcagcacagtcaggagtggcctacccgcactcctccaccaagatgagggccctccagagcctacaggtgtctgtggggaatcccagcctgcagcttctcggagaactgggtgggcctgaggatgaaggcaaaggaggnnnnnnnnnnnnnnnnnnnnnnnnnnnnnnnnnnnnnggtggctgagcnnnnnnnnnnnnnnnncggcctgccttgtccccagaggccacgccaggcactcacccctgagcccacagcctctgcttgggctgcctggcaccctcagggcggcccgctcnnnnnnnnnnnnnnnnnnnnnnnnnccgggggttgccaccagtgacggcnntgtnnnnnnnnnnnaggccatggagctgctgtgtgactgtgtcaggcctggacaaggcccttagggatgacgtccccgctgcatatttattnnnnnnnnntcttgtactcggcaagggaagtccactgtgtgattgtctgtattcttaatataatttgtaa

SEQ ID NO: 13591 - DNA, 767 bp, Macaca Fascicularis
  misc_feature (1)...(767): n = A,T,C or G
gctgggtgagaaggcggatgagctgnnnnnnnnnnnnnnnnnnnnnnnnnnncagctactggccgtggaggcaggnnncaggcggcagcagctggagacgctcgtgctgagctccgacctggaggatggctcacccaggagctcccaggagctctcgctcccccaggacctggaggacacccagctctcagacaaaggatgtctggccggtgcggggagccntgaacatccctttgcannnnnnnnnnnnnnnnnnnnnnnnnnnaccccccatgacgcaggcctgagcagcggggagccgcctgagaaggagcggcggcgcctcaaggagagtttcgagaactaccgcaggaagcgcgccctccggaagannnnnnnnnnnnnnnnnnnnngggaggcggaccaggagaccaccggcagcgacaacacggacactgagggctcctagccgcggcagcgcaggccccgtccagggcacacccaccggcccggcctcccgccacctgggggtgccgacgccctggggcgcagacttcccccgagccgtcgctggcttagcctggaaggaggaatctggtgccctgaaaggctgagccgggcagcctggcgttgggggctgtttgttaagcggcactcagcttgaggaggccatgcgggtgctcgccacccccatgcacacgccatctgtgtaacgtcagggtctgttctatttcaccatgtaacacacaatacatgcattcattgtagaagtgtgagaaaacacggca

SEQ ID NO: 13592 - DNA, 772 bp, Macaca Fascicularis
  misc_feature (1)...(772): n = A,T,C or G
agtcaaacgagcagcacaggcactggaccaatacaagttgcgacaggcaagcatccactccaaccatgtggctgggactgatgaggccatgcctggtcgtttccaggagctggacagnnnnnnnnnnnnnnnnnnnnnnnnnnnnnnnnnnnnnnnnnnnnnnnnnaatgctgccaccacccagaccctggaaggggactcatcagaagtgggagaccagatcaacagcaagagagctgagcagatggcagagaaaagccctccagaagcatctgccaaagcccagccaattaaaggagcccgaagagctccggattcttcatcggaatttgggaaggtgactcaaatgtgttttgctgtgnnnnnnnnnnnnnnnnnnnnnnnngtccccttcttgctgctcaacattctggatgcgagagtccaggctccccgggtggtccacatgcttgccnnnnnnnnnnnnnnnnnnnnnnnntgnnnnnnnnnnnnnnnnnnnnnnnnnnngaaccgccaattccgccaagnnnnnnnctcnnnnnnnnnnnnagggccctggagtttccgtaggctccattagaactgtgaccctagtcaccagaattcagaaccgtctcctctaggaccaaagtggccagctgataggagaataggtgaannnnnnnnnnnnggcattttcacaacaacctctccccagcctcccaaatcaagtctctccatcacttgatcaatgtttcagccctagactgcccaaagannntattattaacta

SEQ ID NO: 13593 - DNA, 697 bp, Macaca Fascicularis
  misc_feature (1)...(697): n = A,T,C or G
gcatggcaggcatgaaggaatcgcagatcagcgcagagattgagcttctgcctaccaacgacaagaagaaatgggctcgacccccnnnnnnnnnnnnnnnnnnnnnnnnnnnnnnnnnnnnnnnnnnnnnnnnnnnctacttgaaggtatnnnnnnnnnnnnnnnnnnnnnnnnnnnnnnnnnnnnnnnnatgggtgcgctacattggnnnnnnnnnnnnttatgaaactcgctgctagctgccnnnaggcagctagccccctccccaccccacnnnnnnnnnnnnnnnnaggtgccgctccctctcccaccacacatcagtgtctcctccctcctgctttgctgccttccctttgcaccagcccctgagtctaggtctgggccaagcacattgcaagtgggactggtggagtagcccctgggctccctggacagggaagttctgaggctcctgctctcccctccacctgtctgtcctggcctagtgccaggctctgagttctgtgaccaaagccaggtgggttccctttccttcccacgcctgtggccgcacctctggagtgggagggtcggttgcacccctcacctcagagctctcccaaaggccagtaacggatccccagccctcagtccctagtctgctttgggatagtgtgagcttcattttgtacacgtggacttcgtccagttataaacc

SEQ ID NO: 13594 - DNA, 755 bp, Macaca Fascicularis
  misc_feature (1)...(755): n = A,T,C or G
ctagccaaccacccagatgcccagcataagccaggcaccatcctcaccaagaagcgccgggaagagaccatctttgcctgacannnnnnnnnnnnnnnnnnnnnnnggcatctcnnnnnnnnnnnnatgcctgttcttcagaaacctcacatccctctttccaggtcctcactcctgggttacgggggcttaggaaaacagtcagactccctagcccagaccctcaggtcgggaggcctgcgtgtggggctgcaaaaggagaggacgannnnnnnnnnnnnnnngagaggaaattaccacagctttttggctcagctctgcccttctttgctttgggattgcactgggccatcagctcatgccaggctatgggggnnnnnnnnnnnnnnngctccccagactgaacagaaacctggctgcctgatgggacctcctttggcannnnnnnnnctgtgtaactgtataaactgcagcagcatcgttgccctagatgccccaggggacctggcaccatgaggattacagacagtggaatcttacnnnnnnnnnnacagctgttttcctgtttggatggtaaagaaagtcgagcgcctttagacctgtgcacagtcccgcaccaaggggtgctgtgtgctctaggcatcccctcccccaggggattttctgagtagatggggggacagnnnnnnnnnnnnnngtccatctttgtcactgagtgaaatctctgttttctattctctgagaagataagtttg

SEQ ID NO: 13595 - DNA, 741 bp, Macaca Fascicularis
  misc_feature (1)...(741): n = A,T,C or G
gaggatagggctggttaaggtttctgttttactttggtttttgcttctccatttttcatttgctttatttctacaatgtttctacttccgaggagtcttctgtcccaggaagagataccttttttgcaggagaggaaaggtctaaatcacaaggacagacatttatcaaagaagttaaaatggtgtggcaggtcattaggattaggcagaatctctcagagctgctggacaaggaggcctactgattttgtgtggatggtaattatggcgtgcacactgaatgcagttctgagcatggcaggggcctctgagggtcagatcagaattgcccacaatgcgttttttaactaggaccaggtgcagcatgctagtcttgattggaaagatttgacaggatgctaattactgaacagtgggtttttnnnnnnnnnnnnnnntcagaatatgaactgaggagtccaacagttggaaaccacacattgctgatttacattggatcttgccttacaaaccattgtctgcctgcctcaccagcctttcataaaatttaaacaaaactctttctacgtagtgatcctcaagcagtatttttgatatagcaagtgtcaaacttgctatagtataaaagccggnnnnnnnnnnnnnnnnnnnnnnnnnnnnnaactgaggtaaaacagatgcctgactgttttaaaggatcttttttaatgttttatgactgcctgtctgtttgaatactgg

SEQ ID NO: 13596 - DNA, 689 bp, Macaca Fascicularis
  misc_feature (1)...(689): n = A,T,C or G
agaatgcgcagccttcattaacagggtggtnctgnttccgtctgctcacattcatctagtaagccctcgcattaaagaggaggcggcgcaccgaggcctgcctagatctttccttcaactaataatgagtgtctaacctacaagaaactggagccgtggcagtttagaagcctgccaaggttgcatnnnnnnnnnnnnnnnttctgttgtgggagacaggaaaagaacaagtgaatcaactgaaattaaaaaattccaacttaaagctgttggaacttgaaattattcagagccttgcgaagaatgtggctacggggcctgagtcctatggcgtacagctgcaatgtctgccttgttttttcctgtaaataatcaggaagaccaaacagagacagaggtgcacacaccaagaaaggccatgtgagcacgcagcaagatgttgcctgtctgcaagctaggaaaagagccctcaccaggaactaaaacagctggcacgttgatgttggactttacagcctccacaacnnnnnnnnnnnnnnnnnnnttgtttaaaccacctagtctatgatattttgtnnnnnnnnnnnnnnnaaacaccaacgttttgccaattttgatttgttttttacatatatgatgtaaaaagtaatctttacaaagtatcatatgtctcattatttcatgcagaa

SEQ ID NO: 13597 - DNA, 762 bp, Macaca Fascicularis
  misc_feature (1)...(762): n = A,T,C or G
atgacatgaaagaccaactgttgctcaatgaaacaagcctggtgcctctacaccccggtgatccatctggcccagttccttacatcagttgtgctannnnnnnnnnnnnnnnnnnnnnnnaaccttatgtcctatactctatattcaaaagttctaggaccaaaacctcannnnnnnnnnnnnnnnnnnnnnnnnnnnnnnnnnnnnnnnnnnnngattcttgggcctatgttcatcagccaagtatannnnnnnnnnnnnnnnnnnnnnnnnnnnnnnnnnnnnnnnggaatagtagtgctcaccatcacactcctggnnnnnnnnnnnnnnnnnnnnnttgctctttctgtaaggtatgnnnnnnnnnnnnnnnnnnctagctaagactgtgatggaaactacttgctgtgtggcactnnnnnnnnnnnnnnnnnntagacaattgtgatgagccagtctccaagaatcagactacagatattgcagattttgaagaacaagaacatatgttgaataacagagagaattctacatgtgattgtgaatagtaggttatataaaaacatactagatcataatttccttatctcagaatgaaaattattcttataacacctttttgtggttgcatgaactaannnnnnnnnnnnnnnnnnnnataaatgtgaagttgtattcttaataccaannnnnnnnnnnnnnnnnnnnnnnnnnnnngtggaaccagaaagagggttttgttaagaattagctatagca

SEQ ID NO: 13598 - DNA, 718 bp, Macaca Fascicularis
  misc_feature (1)...(718): n = A,T,C or G
tcagaagagttcactgcagacacnnncaggtagncntcaaaaaggggnnngagaaatgttttgagcactggcaccatctttgaaataagtgaatagtgtcctgtgaaaagaatagcaggacttttagatgaaaagtattcttaaaaagaaaagtcaggcaccccaccttagacctcgtatgcttgatcctgtgagattgatgtttgtggctggagatggatttcatgccctgtggtgtttacagtgtatataatggttgtgttttcatagggctatgaaagtgcacattaaacctgagcgcctttacctttagatgagtgctttggcccctctgtaaatagcacgattaaaatccagttgtatataatggacagctaactgaacaacataatcacaatgcagctaggatagtgttgcggctataattgtgtgtgttttttttaattgtctagtcttaaatttgtacatcctgtataaaatatgaatgtttcccaaataaactatgaatgtttcctgtataatatatgaatgtttctgagaannnnnnnnnnnnnnnnnnnnnnnnnnnctgctcaaaggataccaaataatggtttaactggacaacctgaaaattagcatagaaaacaatccttcattatattttagtgatccacaacattgagagaatattatatagttagctcataacattcttgtctactttatcctgtctggt

SEQ ID NO: 13599 - DNA, 764 bp, Macaca Fascicularis
  misc_feature (1)...(764): n = A,T,C or G
tccagtctacgagaggaggagacctnntgagtgtgcccttggccacggacactgtgggaaccaaactctgtcttggagcctccttctagctcactccacaagtaaatggatttaatcaaaggtcacctgtctgcttttgattgtctaggtcacagtaatctctaggattttttcacccatttttaaccacttattctttttgtctttttaacaaacatctgaattttnnnnnnnnnnnnnnnctgatagtctctgctaactagctgaattgaccttttacaaagtttgatccctgagcatcctcaactaaatcgttgaatcctccaatcaggatattatctgctttactttacaaataaaagcaaatcttttgtcaaccggatgaaacccatcttaaaggaattggtgtgaagagagaagttagagaagggatatgcagtgaattactatctgtgtccatcaggaagtttgtgctgttaaccaaatggttactgcactaccagggttactggtttattttccagggagctgataaagcaggagaactgttgcagcatgttttctattnnnnnnnnnnnnnnnnnnnnnnnnnnnnnnnnnnnnnactcccaacactcagcagacttatttttgtatttttttctgtcttgtacattcttactacgtatttttttgacttgaaaagaatgacatctttagacccatttcagagccaatgatgatatttgctttagataattattatattattataaatatagcca

SEQ ID NO: 13600 - DNA, 763 bp, Macaca Fascicularis
  misc_feature (1)...(763): n = A,T,C or G
aggactggaggagctgntannnnnnnnnatggaaaatgaggtacttaaagtgctttccgaagctgctatttcagcaagtctggaaaagtttgaaattccagtaaaaattcgtttgagccctgaaccgtggacccctgaaactggtctggtgacagatgccttcaagctgaaacgcaannnnnnnaaaacacattaccaggcagacatcgagcgaatgtatggaagaaaataattactctcttctggcatcagtttgctacagtgagctcagatcaaataggaaaatacttgaaatgcatgtctcaagnnnnnnnnnnnnnnnnnnnnnnnnnnnnnnnnnnnnnnnnnnnnnnnnnnnnnnnnnnnnnnnnnnnnnnnnnnnnnnnnnnnnnnnnnnnnnnnnnnnnnnnnnnnnnnnnnnnnnnnnnnnnnnnnnnnnacttactttaccacctatgactgtacttgtcagtatgagaatttttctgaatcatatcggggaagcagtgattttaaaacctcaagtttttaaacatgatttatatgttctgtataatgttcagtttgtaactttttaaagtttggatgtatagaggggtaaataggaaatataagaattggttatttgggggcttttttacttactatatttaaaaatacaagggtattgatatgaaattatgtaaatttnnnnnnnnnnnnnnnnnnnnnnnnnntgaacaaaagatttgttgctgtgtaattattgtcttgtatgcattga

SEQ ID NO: 13601 - DNA, 712 bp, Macaca Fascicularis
  misc_feature (1)...(712): n = A,T,C or G
atagttacacagagtctacttggccctagaagaaaaagtnnnngagtgccagtcttactnnnnnnnnnnnnnnnngcctgtaaagnnnnnnnnnnnnnnnnnnnnnnnnnncagcggcgggggnnnnnnnnnnnnntagtttttggcctccctatcctnnnnnnnnnnnnnnnnnnnnngatgcatctcatgatctctggagaatttccccatctttctcttctttnnnnnnnnnngattcaatagtgtggatttgaaggctgccctgccccgactctcccaccgcaccccagtccgttgtaccttttgatgtttataagttcatggaagtagacgnnnnnnnnnnnnnnnnnnnnnnnnnnnnnnagagaatgccagtgaagatgagtgctggnnnnnnnnnnnnnnnnnnnnnnnnnnnnnnnnngcaggccctaataaaaccctctgccaggcctgggagtcccaggccatctgttcaacgctctgtgctttgtcagacttgcaagcaagcccccttgcgggggaggcctaggnnnnnnnnnnnnnnnccgcactgaagaactcttgtcctcactggctgatatggcagaactcttgggaaatgtcttagtcctgcannnnnnnnnnnnnnnnnntgatgcggagttgagatcatcactgcaaacnnnnnnnnnnnnnnnnnnnnnnnnnnnnnnaaaaaaatgggatt

SEQ ID NO: 13602 - DNA, 724 bp, Macaca Fascicularis
  misc_feature (1)...(724): n = A,T,C or G
tattagcaattataatgtttgtatatgcaaannnnnnnnnttgattttaaaaagaaaaacaaatctttaaaatctgctgtaaatttaaataattcccaaaatgaggaattctgtagttctgtgaaaaaattttttcttcagaatactaatattttgatgcatgtgtatcaccttattttgattaaatcttttccaattttgcaaacactacaatatannnnnnnnnnnnnnnnnnnnnctgtaaacacaaagcccttcatctaatatttgttgctattgccaatttttcaatgaaatgacctaaaaacaacaacaaaaaaataacctatacggtagttgctttagggggtggggggatgctaactgttagtgcttaaaagggggtaaatgcttgccgctttagaggtggatggtgctcataagaggccccagtcgggggtatttaaaacggactgaacagaaattcttagctagtagaatggnnnnnnnnnnnnnnnnnnnnnntgtattgtgtactggctataagatgtagacacctttcagtaagccaatcatttgtaaccattctagcagtgtcacattaggttaataaggctgctgtgttttcaagggcatttttatttgggttttggtgaaattctttaatttgttgattatattcacataaaatcagcattcattgacacatagctctaatgacatatgtatgaaaaaccatacactg

SEQ ID NO: 13603 - DNA, 706 bp, Macaca Fascicularis
  misc_feature (1)...(706): n = A,T,C or G
ggnnnnnnnnnnnnnnnnnnnnnnnnnnnnnnnnnnnnnnnnntaccacaggacgggctctgggtatagccgttccagtcaggggcagccgtggagagaccagggaccaggaagcagacagtatgagcatgaccagtggagaaggtactagccgtcctccagaaagagcgtggagagaaaaagaggcacacctggacgcagagccctgctagcgccctnnnnnnnnnnnnnnnnnnnnnngagaccatgcctgtgggagccgggcctcgcttgcatgaagaaggaaagatgccttttcagtggtgcctccgcccatcatgcagaagagcttttgttggcttctctcccgagcttgtgcctgattctgtggcccaaaacaatcattgttaannnnnnnnnnnnnnnnnttctgatctttcattcatatatatgatgcctagctaatttcattttaaaataaatggggatctgttgtattctgattttttattaacaacactagattatgagggattgtctcctgttattagaaagtcagaaaacactatatagtagtcctcccttatctgtgggagagacatcccaagaccctcagtggatgcctgagactgtggatagtatgtgtggaaccctacannnnnnnnnnnnnnnnnnnnnntcctctacgtacatactgtggcaaagcttaacaaggaacagtaagaga

SEQ ID NO: 13604 - DNA, 765 bp, Macaca Fascicularis
  misc_feature (1)...(765): n = A,T,C or G
aagtgtacgnnnnnnnnnnntcatgcatgtgttcataaactcaacactttaatnnnnnngttcnnnnncnnnaaaagcaaagggaaaaaggatgtgcaatggtgtacacagtctatgnnnnnnnnnnnnnnnnnnnnnnnnnnnnnttgttactttataaggtggttttattaacaaaccggaatcctggattttcctgtctttgctgtattttgaaaaacacgtgttgactccattttgttttacatgtnnnnnnnnnnnnnnnnnnnnnnnnnnnnnnnnnnnnagatacgcagcctacaagataactgtatttataaactactcttcaacagctggctccagtgctggttttagaacaagaatgaagtcatttcggagtctttcatgtctaaaagatttaagttaaagtgttacttggaannnnnnnnnnnnnnnnnnnnnntcgattacaggtacaaccatgttgactatggggtagaggcnnnnnnnnnnnnnnntgtcttaacatttgagtgaacctttaaaggaccctgacattaaatgctgaggctttagtaaaatacacacgtattttatcccaagtttataatggtggtctgaccaaggcacctgtaaataaatcagcatttatgaccagaagaaaaataatctggtcttggacttctatttttatatggaaaagttttaaagacttgggccagctaggtctacccacacaagaaatttgccttgtcccgttgtgcacaaccctgcaaaactgtg

SEQ ID NO: 13605 - DNA, 737 bp, Macaca Fascicularis
  misc_feature (1)...(737): n = A,T,C or G
tatgccctggtccaccnnnccagtcccctnnnnnnnnnnnnnnnnnnnnnnnnnnnnnnnntcccagctgctggccaggcnnnnnnnnatggcaagatctgtaccgtgacgggctggggcaacacgcagtactatggccaacaggccggggtactccaggaggctcgagtccccatnnnnnnnnnnnnnnnnnnnnnnnnnnnnnnnnnnnnnnnnnnnnnnnnnnnnnnnnnnnnnnnnnnnnnnnnnnnnnnnnnnnnnnnnnnnnnnnnnnnnnnnnnnnacagcggtggtccctttgtgtgtgaggacagcatctctcggacgccacgttggcggctgtgtggcattgtgagctggggcactggctgtgccctggcccagaagccaggcgtctacaccaaagtcagtgacttccgggagtggatcttccaggccataaagactcactccgaagccagcggcatggtgacccagctctgaccggtggcttctcgctgcgcagcctccagggnnnnnnnnnnnnnnnnnnnnnnnnnccacgctgggcctaggatgggacatttttcttcttgggcccggtccacaggtccaaggacaccctccctccagggtcctttcttccacagtggcgggcccactcagccccgagaccacccgacctcaccctcctgaccnnnnnnnnaatattgttctgctgtctgggactcctctctaggtgcccctgatgacgggat

SEQ ID NO: 13606 - DNA, 711 bp, Macaca Fascicularis
  misc_feature (1)...(711): n = A,T,C or G
aacaggcagcaggggaggccaggccagcaggannngcgggcgccacgccttggcaggtgccaggcaacaggatcgtgccatggcagtgacatgggagaatgcaggaacctgagaggtgagagggaataagtttccagaactcactctcaggcaggagacatgactcagctgagccagacagcgctcgttccccacgaatgcacgtatgagcannnnnnnnnngcagctaaacacacactgnnnnnnnnnnnnnnnnnnnnnnnatgactgcagcccatccacccgcagacgcaaactgaccacgttccacagccatgaccacagctctgactgggcagaagcctgacttcaggaacctcctcctgataagggacccccgaccgtggaccggctccggccgatttacagaggctccgccttgagtgcctttgtgttctgagaagacctgaggtttagggcctcattgcgacacactgnnnnnnnnnnnncccaccccagggtgaacacaggtcgtatgttacatgcatgtttgttcagtacgtgtgcagcaggacccccttcannnnnnnnnnnnnnnnnnnntttagccaacccggtcagcacggagctcctgccccggccacccctccccttcgaagtgcctcctcctggctcctctggtcttggcagaggccgtgcttcccagcctgggggacagggccttgcaggctg

SEQ ID NO: 13607 - DNA, 715 bp, Macaca Fascicularis
  misc_feature (1)...(715): n = A,T,C or G
tcccacccttccccccgaccacatataaaggcactgtagttcaagggtgaaaactctcacccaagaggaacagccctccttgaagcnnnnnnnnnnnnnnnnnnnnnnnnnnnnnngcagagaatggagtgagccagacagacttcacctcatcactggacacagggtcaaggtcaannnnnnnnnnnnnntccctttacgttctctacccgtgactactccctggaccaatcctgaggagggcacattttccagaagccacgtgataggggctggtttctgtggagccagaggcagagacactgaacttgagctcacctcctaacaccggcagtaaacttcctggaactttgccctcaagtgtggaggnnnnnnnnnnnnnnnnnnnnnnnnnnnnnnnntgtagaagactagattgatggtagtttggccttttggctcctgttttggccatgacttgtgcaggtggcaagtcacacaccctcgaagggaagctacacgggccaaattgggggagtggatggggaattgtctcctctccctcccctactgtaatagtatttaagacgtatcagctccagagatgagtcctggagccttgaattttaacaaactaattgtaggtttctctctttgtaataacaatgctggaaaagcagagaacctcttttatcctcatgtcttgcatttattgagatgactgtttctcatgcct

SEQ ID NO: 13608 - DNA, 649 bp, Macaca Fascicularis
ggcagggagcaggccccacctagggctgcgggcaatctggcctgtgccagcatgggctcctgtgcccaccagccctacaggtgctgtgctttgtgctcttggctgctgtgctgggagagaatgggatgtcaggaagagaagaaagggggtgcagtctgaggccaccaccccgcttcctatctaagggaggctgaagacaaggggctggcattcagtgggtggccgaaaggagaggccccttgaagctgctcagtcagagccctctgtccctccttttgccctccccaggactaaagacctgaaggggctgagtgtggggctggcttttggagtgtcgaggtgaatatgtgggagcagagatcatgaatagctcagggcagtgaatggcgcaccaagagcagggctgtgtgcgggaggctgaggccagaattgcatcagctcctccccctcaggctgggaggatagcatgggctgcgggctgggggtggagggtcttagctctgctgcccccaccccagtactagcctagtttcccaagctgtggcttagaggatagttggcttcctgcctctttcctctaaaacagcaagtctgggaaatcctggggtgagtggagtcaccccacccccagttgctggcagagactgag

SEQ ID NO: 13609 - DNA, 690 bp, Macaca Fascicularis
  misc_feature (1)...(690): n = A,T,C or G
tcgggtttgacctacagccgcccgggagaagatggccgccccaggagtgtccggtctctcccgnnnnnnnnnnnnnnnnngtacctctgtggtcagaccgtttgccaagcttgtgaggcctcctgttcaggtatacggtattgaaggtcgctatgccacggctctttattctgctgcatcaaaacagaataagttggagcaagtagaaaaggagttgttgagagtagcacaaatcctgaaggaacccaaagtggctgcttctgttttgaatccctatgtgaagcgttctattaaagtgaaaagcctaaatgacatcacagcaaaagagaggttctctcccctcaccaccaacctgatcaatttgcttgcggnnnnnnnnnnnnnnnnnnnnnnnnnnnnnnnnnnnnnnnnnnnnnnnnnnnnnnnnnnnnnnnnnnnnnnnnnnnnnnnnnnnnnnnnnnccactgcatctcctttagaagaagccacactctctgaattaaaaactgtcctcaagagcttcctgagtcaaggccaagtattgaaattggaggctaagactgatccgnnnnnnnnnnnnnnnntgattgtgcgcattggagagaagtatgttgacatgtctgtcaagaccaagattcagaagctgggcagggctatgcgggaggctgtctaagtgttggttttctgcca

SEQ ID NO: 13610 - DNA, 677 bp, Macaca Fascicularis
  misc_feature (1)...(677): n = A,T,C or G
aagggctgcgggtatngactgatggtccccaagggcctggaggcccagactactgggtccccaaggaattatgggtttagacttctgggtccccaaggagttacggaattagattcgtgggttcccagtgagtatgggtctagctttctaggtccccaatggcctagaggcctagactcctgggtcccccagaggcagctggtagagatgttggttcctgtctgccaggatcttggcccctgaataccctgtggggggcactcctgaccccgggcccatgcctggggttcctcccctcacccgtctcggccaccaggatgccgtggaggaccggctggacaggaacgtgtggcccttcgtatccgaccccgcccccacggccagctcccaggctgccgtcagtgcccgcttcggtcactggcacaagaacaaggccggcgtagaggcccgggcgggcccccggctcatcgtgtacgtcatgggtggtgtggccatgtcagagatgagggctgcctacgaggtgaccagggccaccgagggcaagtgggaggtgctcattggctcttcacacatcctcaccccgacccgcttcctggatgacctgaagacgctggaccagaagctggaggacattgccctgccctgacccctggacctgccccctacccctcccttcc

SEQ ID NO: 13611 - DNA, 754 bp, Macaca Fascicularis
gcgggcgacatggagtcattgggcgaagctgggccatgctgtttgccagtggaggcttccaggtgaaactctatgacattgagcaacagcagataaggaatgccctggagaacatcagaaaggagatgaagttgctggagcaggcaggtgctctgaaaggctccctgagtgccgaagagcaactgtccctcatcagtggctgccccaatatccaagaagcagtagagggcgccatgcacattcaggagtgtgttccagaagacctagaactgaagaagaagatttttgctcagttagattccatcgtggatgatcgagtgatcttaagcagttccacttcttgtctcatgccttccaagctgtttgctggcttggtccatgtaaagcaatgcatcgtggctcatcctgtgaatccgccgtactacatcccgctggttgagctggtcccccacccggagacggcccctacgacggtggacagaacccacgccctgatgaagaagattggacagtgccccatgcgagtccagaaggaggtggccggctttgttctgaaccgcctgcagtatgcaatcatcagcgaggcctggcggctggtggaggtgtgtgtgcccttcctctcttcctgcctcccttccttgctcctctcttcttccctccctcccgaagctgagcaggacagtgaaagcctggaaggtgggaaagtcagaggctgcttggttcttcttgctctattctggagaccaagggccag

SEQ ID NO: 13612 - DNA, 676 bp, Macaca Fascicularis
  misc_feature (1)...(676): n = A,T,C or G
tgaaggacatgcttgtgccgactgcagtctggagtgggggtcatgactggctnnnngacgtctacgacatcaatatcttactgactcagatcaccaacttggtgttccatgagagcattccggagtgggagcatcttgacttcatctggggcctggatgccccttggaggctttataataaaattattaatctaatgaagaaatatcagtgaaannnnnnnnnnnnnnnnnctacttatctgagaagcaaattcctgtnnnnnnnnnnnnactattttttctgagattaatgtactcttggagccagctactgtcattactgatcacatctgtgtgaaaccaaagccccgtggttgcccatgagaagtgtcctagttcattttcacccaaatgannnnnnnnnnnnnnnnnnnnnnnnnnnnnnnnnnnnnnnnnnnnnnnnnnnnnnnntagttttatatgtgtccttattttaaatatgcctgcttcacgtctctatgttgggaagtccatatttgtctgcttttcttgcagcatcgtttccttacaatnnnnnnnnnnngacaaaatgacaattaatgtttttctgatacagttactttggctgcagtaacaatacagtgcttgttattggctaatacaggcaggcagaatactactttgtaacttttaaagt

SEQ ID NO: 13613 - DNA, 774 bp, Macaca Fascicularis
  misc_feature (1)...(774): n = A,T,C or G
annnnnnnnnnnnnnnnnnncagcgacgagctccgggaggcctggcgtattttcactccactgctacaccagatcgagctggagaagcccaagcccatcccctacctttatggcagccgaggccccatggaggcagatgagctgatgaagagagtgggtttccagtatgagggcacctacaagtgggtgaacccccacaagctctgagccctgggcacccacctccaccctcgccatggccaccctccttcccgccgcccaaccctgagtcgggaggactctgggaccattggcctcagctgcacattcctggccctgggctccggccaccctggcccgccccttgctgctgccactacccaagcccagctacattcctcagctgccaagcactcgagaccatcctggcccctccagaccctgcctgagcccaggagctgagccacctcctgcgctcactccagcccaacagaaggaaggaggagggtgcccattcgtctgtcccagagcttctcggtcactggggctcactcctgagtggggcctggggcaggagggagggacgagggggagnnnnnnnnnnnnnnnnnnnnnnnnnnnnnnnnnnnnnnnnnnnnccacttgacattcctcgtcaccagcaacatcttgagcccctnnnnnnnncctgtcccaccaactctgcactccgtggccaccctgtgccacccataggcagcctccctgttacaagaaaagcagaagcagcagctnnnnnncctcccaacctcaatc

SEQ ID NO: 13614 - DNA, 709 bp, Macaca Fascicularis
  misc_feature (1)...(709): n = A,T,C or G
aggaatgaacatacacacaaaatgtgtatttcctcaagggacannnnnnnnnnnnnnnnnnnagtatnnnnnnngagtacaagaaggagtgagagagataaagtaatgagaannnnnnnnnnnnnnnnnnatgacagtttataagaaaaaaaaagatnnnnnnnnnnnnnnnntgtcttatttataacttttaaaaaagccaaagataaggaacagaacattttggccatatccaagtagacagtctatacaaagggccataaaatcacccaagcagagagccatgactgcagggcttttacctgctctctcctcagccagtctctcttctgttctcactcactgccctagggactatcatgcagttaattcactttctcacagaggtgattgcaggctgaatcctcaagagttcacctattcaagcccaatcccaaaaatggannnnnnnnnnnnnnnnnnnnnnnnnggtgagtgtctccactgggaggggctctgaggctgaggcagaaaagaaagaggagacaggagtagagacnnnnnnntggtctaggcacctcaacccctgaggcccagccattcccaataaataaatgactctctcagaatcatgttggggttgggaggaaggatatactcattaagccagggacggggannatgtgtgtgaagtgaaccctnnnncactaacatctgtgaactcttgtct

SEQ ID NO: 13615 - DNA, 466 bp, Macaca Fascicularis
ccacagtacatggggatgaaaccgttgcagacattggcttggatgagctcgtccttggagtagaagtggaatataatgacactctcgccgtctgacacgagggtcagggagatgcccaggcgcccactggcatgctcatggctatcagttggcagaaccttcagcaggaaattacggatgatctttaccatgttgaaggaggggtgcagggggcccaggaaccgcttccgggcctctttagatacctcaatgaacttggcaccagcctcacccaggcagaccccggtgaccagagccgtggccgtgagcgccccggccgaggcgccatagatgtgcttggcgttggccaccaggaagggcgcgtgctcggggaggcaggaggccacgccgacgtagtagacgccgaggaagccgcagcccgcgaacgagatgttccacgtcttggtcccggggaaacatcacggcg

SEQ ID NO: 13616 - DNA, 1092 bp, Macaca Fascicularis
  misc_feature (1)...(1092): n = A,T,C or G
gtaacagcatggatttaacttnnncntcgatgtcannnnntcacagagtgcactgttcattgtcaccctatccactagtgtcagtcttactaaaagtcaaacatcaacgttagtggtaannntggaggcctggcattgtagcgatatcccaagagaaaattgtnnngaacctttctgggaaaagttcacgtacgttttattcaaacactagtttttataacctcgctaccatgtggctttcctgaaggatgaaatttctgacgtccttcaagtagagagagataaaaatttttctagaacattaattgcccactcctctcatcccttctcagaaactaactgaattcnnnnnnnnnnnnnnnnnaaacccaaacacggtttnnnnnnnnnnnnnnnnnnnnnnnnnnnnnnnnnnnnnnnnnnnnnnnnnnnnnnnnnnnnnnnnnnnnnnnnnnnagggtctctgcatgggtatttccgagacccacaaaggatggtatgctcaagaatgtgaggaacaccggtactgtccatgggagtggtccggaactgcacgctagggaagaaggaacggcacgccagggaagggagaggaacagaacgctagggaaggagaatggctagaatacaaaatgttcatcttagtgctgcggacacagttcccagacgatcatcacctcaggctactagaaatcatcattctgacaccataatcctccaacacggggtttcccaactctaatgtaaatcattaattcagactataaaattgtattttgatgagattgtaagtccgtgtaagcttttccttatttttcaagatgctctgtcaataaaaatactagtgagatgatatttaaaccacataacatacagtcagtgctttaaaccaagcttgtctaacccacagcctgcagtccgcatgctcaggatggcttggaatgcatcccaacacaatccctacactttcttaaaacatttaggtcctctattttnnnnnnnnnnnnnnnnntgtccttagtgttagtgtattttgtgtgtggcctgagacagttgttcttctaatgtggcacagggaagccaaaagattgg

SEQ ID NO: 13617 - DNA, 758 bp, Macaca Fascicularis
  misc_feature (1)...(758): n = A,T,C or G
ccctagtcctagaaccagacacacattagactcagggagtttngtctgaagaccaggtcccactgcccaccccctccggctgaagagtctgctttagatgggaaaacaacgtaggagcaggggtctttaggcactttcagtattctcaggtgttctttgttctggcccttccagggtaataaggaaggcagaacaagacagatgagctcctgcctgctgtgagacaaggctggggtctcattccatttgcaacaggaaacatcctgttctatggtagtggggtcaggaaggtagnnnnnnnnnnnnnnnctgccaattccaccacccattcagtttgcttatacctacagagcagtgaatgaggttctatttttttttttttaaatttccatgtattttctgccatttttcagggtctaagattggtcctacattcccaatttactcnnnnnnnnnnnnnnnnnnnnngctnnnnnnnnnnnnnnnnnnnnnnccctaaaatacctcagtnnnnnnnnnnnnnnnntagagatctaaagggttaacaggatagggtagaaagattagagactcctggaaatctatggttaccatgatcttcagccccatttaatacctgttctttggacacagtctttttcctttggtgctctcttgcctttagctaccttctctaatatgtatgctaccatcactaataaagtgatgggaatgggtttgagagtcataatttatattaaaaagttgttggactttta

SEQ ID NO: 13618 - DNA, 765 bp, Macaca Fascicularis
  misc_feature (1)...(765): n = A,T,C or G
aaatgcttcatttactaaaatacaacaanacagttaaactaacagatcaggaaattaagtcagaatataaaaagacactaaaatgcagacttgagcaatgaggttctctattctggggcagaaattttatgaaaatatacttagtactttataaatggcaaagtgagtaaccaactcagaagtccaagttaatgttctgaatgaagtgaattatttttttaaatggtccaatttatttttgtactttactttctttgccatgtcctggatttatctgatccgccttggtaacagatgtcccattccttgtaagtgactctctcctagccttattctacttctgattgcttcctactttttctttcacttttctctgatcataaccaggacaaaactttttggacttaggactcacatcagagtaacccagagaaaaatctcaggatccttgttttgcatgggagggaggatgcaggaatcacatagtggggatatatatatattatctctgtgtttacagaatgcaccagactacctcaaagtaataaataagcagccaggatcccctgaagggagaagagtggcctcttctgggaaattggattttgtagaattttatagttgagcaaagggtggattaattgacattggtaactgtggggaagagggctatttgttgagaccatgctatatttctttccagctttcccccaagtatctttcaattttaagatatgtatttgttaaatgatgtacacttaaagt

SEQ ID NO: 13619 - DNA, 788 bp, Macaca Fascicularis
  misc_feature (1)...(788): n = A,T,C or G
agcgcctgggcagagggcccagaaaccctcggaccagagtgtgtggaggaggtgcctgtgtggcggccctggcactgcagagactggtccgggcnnnnnngaggcggnannnngcagcgctgggcctcgtgtcgcttgtcgtccgtcctgtgggcgctctgccccgtgtccttcgcgttcctcgttaagcagaagaagtcagtagttattctcccatgaacgttcttgtctgtgtacagtttttagaacattacaaaggatctgtttgcttagctgtcaacaaaaagaaaacctgaaggagcattcggaagtcaatttgaggtttttttttttttttggttttttttttcttcttttttttgtatgttggaacgtgccccagaatgagngcagttggcaaacttctcaggacatgaatccttcccgtttttctttttatgnnnnnnnnnnnnntgttttttctacctgcttgtcttatttttagaataatttagaaaaacaaaacaaaggctgtttttcctaatttggcatgaacccccccttgttccaaataaannnnnnnnnnnnnnnnagctccaaaaggaaaagcttgggcggtgcccagcgtgcccgctgcccatcgacatctgtcctggggatgtggagggtggcagcgtccccgtctgcaccagtgccgtcctgctgatgtggtaggctagcaatattttggttaaaatcatgtttgtgactgtaaccatttgtatgaattattttaaagaaataaaaatcccggaaagagccagaaaaaa

SEQ ID NO: 13620 - DNA, 762 bp, Macaca Fascicularis
  misc_feature (1)...(762): n = A,T,C or G
gnngcacatcaacgtgatggagctcttcagcatctccaaggaattctgggaggaggaggtggaagacattgagaagnnnnnnnnnnatcaggtcaatgctgacctcccctgtgaaatcgagagacagatccttgccttgaagcaaagaataagccagatgtaatcagagcctgagtgctttacctttaaaatcatcccccttcccatccataaggtgcgataggagcgagagagggcaagttttcccaaattgatgccaccataataatcatcaccgccgtgcgcagatctgaaaggcacactttgatttttttaaggggaagaaccacagaacaccagctagtagctaatgaaaatgagaagggaaatcttggcatgcctccagaaattcacacccaatgcatagtttgttcaaatttaaggttactcaggcatttgatctttttagtgttttttcactttagctatgtggattagctagaatgcacaccaaaaaatacttgagctgtatatatatgtctgtgtgtatatgtgtgtgcatgtacgtccacatgtgtctgtgtggtatatttgtgtatgtgtatttgtatgtactgttatcgaaaatatatttaatacctttggaaaaatcttgggcaggatgacctactagttttccttgaaaaaaagttgctttgttattaataagtgtgcttaaattatttttatacaccattgttccttacctttatataattgcaatatttccccctttactacttc

SEQ ID NO: 13621 - DNA, 765 bp, Macaca Fascicularis
  misc_feature (1)...(765): n = A,T,C or G
gatgaccgagatnnncngtttgacacaatccaacgcnnnaagaatcacnatcaaaaaagagcataccagtgtataaaatgtatggtagctctatttagtaactgtcctgttgcttaccaaatcctgcagggcaatggagatcttaaaagaaagtggacctgggcggtagaatggcttggagatgaacttgaaagaagaccatatactggcaatccacagtacacttacaacaattggtctcccccagtgcaaagcaatgaaacatcaaatggttatttcttggagagatcacatagtgctaggatgacacttgcaaaagcttgtgaactctgtccagaggaggagccagatgaccaagatgccccagatgaacatgagtcgcctccacctgaagatgccccattgtacccccattcacctggatctcannnnnnnnnnnnnnnnnnnntgcatggacagccatatacaggcccagcagcacatcacatgaacaaccctcagagaactggccaacgagcacaagaaaattatgaaggcagtgaagaagtatccccacctcaagccaaggatcaatgaaatgcacataattaactggttccatcaagactgtgcacccaggccttacagtccaacctttttctgtgtctggctaatatttaaaactagaaaaactattcctaatcaacatggagtggagagtttattcactgtcttatctgcagaaatttgctgtcaatatataacccgccctgcagtggaaagtgt

SEQ ID NO: 13622 - DNA, 145 bp, Macaca Fascicularis
tggggtggtaccagctctggggtggactgaacagcggcggctgtccctgtgcatcctttgattactctcatgctgcatttatagtttacatatgttttattgtacataggtttgtaaacattattgcgtatgatatttgtatata

SEQ ID NO: 13623 - DNA, 771 bp, Macaca Fascicularis
  misc_feature (1)...(771): n = A,T,C or G
gacagtatggaaaatgaagtgattgaaatcatgactgaccgaggcagtggcaagaaaaggggctttgcctttgtaacctttgacgaccatgactccgtggataagattgtcattcagaaataccatactgtgaatggccacaactgtgaagttaggaaagccctgtcaaagcaagagatggctagtgcttcatccagccaaagaggtcgaagtggttctggaaactttggtggtggtcgtggagnnnnnnnnnnnnnnnnnnnnnnnnnnggtcgtggaggaaacttcagtggtcgtggtggctttggtggcagccgtggtggtggtggatatggtggcagtggggatggctataatggatttggtaatgatggaagcaattttggaggtggtggaagctacaatgattttggcaattacaacaatcagtcttcaaattttggacccatgaagggaggaaattttggaggcagaagctctggcccctatgnnnnnnnnnnnnnnnnnnnnnnnnnnnnnnnnnnnnnnnnnnngctatggcggttccagcagcagcnnnnnnngttatggcantgtgcagaagattttagggaggagtctgctactagtcttatcagctcttaaaaacagaaactcacctgtccaagttcgtggcagaaaggaacatccttgtgaagacctttatctgagccactgtgcttcgttatcactgccatgcagttgacatgagctgttttgcagctcaaattccattttgtaaatggggttttt

SEQ ID NO: 13624 - DNA, 754 bp, Macaca Fascicularis
  misc_feature (1)...(754): n = A,T,C or G
ggaaacgttcaggctggagactatgtgctaatccatgcaggactgagtggtgtgggcacagctgctatccaactcacccggatggctggagctattcctctggtcacagctggctcccagcagaagcttcaaatggcagaaaagctnnnnnnnnnnnnnnnnnnnnnnnnnaaagaagaggatttctctgaagcaacactgaaattcaccaaannnnnnnnnnnnnatcttattctagactgcataggcggatcctactgggagaagaacgtcaactgcctggctcttgatggtcgctgggttctctatggtctgatgggaggagctgacatcaatgggcccctgctttcaaagctacttcataagcgaggaagtctgnnnnnnnnnnnnnnnagatctagggacaataagatatgtggtttcagagagagcaagaaggctgaggaggatgaggagggcggggtgaggctctctccccaggctgatgctctcctttcccttgtcttagtacaagcaaatgctagtgaatgctttcacagagcaaattctgcctcacttctccacggagggcccccaacgtctactgccggttctggacagaatctacccagtgaccgaaatccaggaggcccataagtacatggagaccaacaaaaacctaggcaagatcgtcctggaactgccccagtgaaggaggagtgggcaagacaggacgcggccacctcaggcctttctagagcaaacctggagaaga

SEQ ID NO: 13625 - DNA, 760 bp, Macaca Fascicularis
  misc_feature (1)...(760): n = A,T,C or G
gatggagcaaggtccagactaacannnnnccaccccagctgtgnctggcgcccctagatnnctgcaagggaggtgttacagcttgttctgagccttttgccttgtgatggtaagacaccagcctttacattctcccctgaggttgcggctgacagggcctacttggcccaactcttagtccagcgagctcctatatcannnnnnnnnnnnnnnnnnnnnnnnnnnnnnnnnnnnnnnnnnngctcacagtcctgggggctgggacgtccaagatcaaggggccagcagattcagactccgctgaggtctgtttcccattccatagatggtgccttcttgctgtatcctcaatggtagaagcacaaacaagcaagctccctcctgcctcttttataaggactctaaccccgttcatgagggctccgcccccgtgacccaatcagctctgaaggccccacctcctaatacnnnnnnnnnnnnnnnnnnnnnnnnnnngtgaatctgcagggggagggagggatacacacaaatgttgggaccatagcacccttcaccgcaccctcctgccctcggggtggctttcactccccggcccttctggtgggcatttggtacgtcctttctcttagggtgatttctgaggtttttagtnnnnnnnnnnnnnnnntggggagagtggatcttctcccgggtcccgctccagtcccctcacaatcccaggggggttctaatgcagctgctggggcctgacgccctgagt

SEQ ID NO: 13626 - DNA, 759 bp, Macaca Fascicularis
  misc_feature (1)...(759): n = A,T,C or G
acgccaaggtagctgagtttctggactggatccatgacactgttcaggactccctnnncngagtccggctgtttcctccagtctcaccgcacaccgccgcctcatgcttcctggggcctctagcagctccactaacagaggagaggcagcagcctccaatgcggaacacatggacctcctactactgtgcatgaggaacagtcaccacccaccggccagccacccagccgccaggtctctcctcttgggccctgatttcagagttctctttctcactagagactcaatgacagaagagaggctggggctgggttgggagtactgtggttgctgagggatgagggggaggaggagagaggtaggagctggagatgaagaggctgctggaagcagcaggaagcctaccatttttctgccctctcccctccctgcccttgtgtgagtcttctgggagggtgctgggaggtgcccccagtcctgccttttccctgtgctctcaggtgggctaagtgcctccctagaggactccatggctgagaggctcctgggcagatggggtcaaggctgggccagcccagatgaagcctacaggagtcaggaccctctccactctccctctccactcccctccctgttctcacctggctctggctggccctgtatggggtgggnnnnnnnnnnnnnnnnnnnnnnngagttggtctaggacattggttttaaatgacagttctgtgaactggtccaaggagtctgtataaa

SEQ ID NO: 13627 - DNA, 658 bp, Macaca Fascicularis
  misc_feature (1)...(658): n = A,T,C or G
cagccgaccaagatatttctgggaatggcacagttgtcaccaacattcccacagtatggatgagtttagcnnnnnnnnnnnnnnngatgccaacacccagaggagagtggttgaaggcnnnanagcaagtttgtgtcttgaagacacatcctgtgagtatgnntaccannggcgatttgcatgtactgcacacacacagggattgagtcctggctgttacgatacatacggtgcagacatagactgccagtggattgatatnacagatgtaaaacctggaaactatatccttaaggtcagtgtaaaccccagctacctggttcgtgaatctgactataccaacaacgttgtgcgctgtgacattcgttacacaggacatcatgcgtatgcctcaggctgcacaatttctctgtattagaaagcaagccaaaactcccaatggataaatcagtgcctggtgttctgaagtgggaaaaaatagattaacttcagtaggattcatgtattttgaaaaagagaacagaaaacaacaaaagaaattttgtttggactgttttcagtaacaaagcacataactggattttgaacacttaagtcatcattacttgggaaatttttaatgtatattatttacatcactttnnaattatcagtgttc

SEQ ID NO: 13628 - DNA, 714 bp, Macaca Fascicularis
  misc_feature (1)...(714): n = A,T,C or G
caaagcagaggaagaaggttattttgaagcattcaaaaatgaacttgaagctttcaagtcaagagtaagactttattctcaatcacaaagttttcatcctatgacacttcagaatcatgttccccattctggtgttggatctataggtttattagaatccttaccnnnnnnnnnnnnnnnnnnnnnnnnnnnnnnnnnnnnnnnnnnnnnnnnnnnnnnnnnnnnnnnnnnnnnnnnnnnnnnnnnnnccaaaatgatggacactgtataatttggttaagactgctgaggtcaagtgctattttgttacaagaaaggaagaacttggctattttcttgacacttttatgggtgctgcactttatttttgtttggtttttgatgggagggaaagagtactgaaatgttttgtaaacttttttttaatgtgctgctaggttttttgttttgttttgttctgaagagaggnnnnnnnnnntatgttgcaggaagtcaaactggactttttgtggctactaaatttgcctttaatcttattgttctcaattttggnnnnnnnnnnnnnnnnnnnnnnnnnnnnnnnnnnnnnnnnnnnnnnntgattctgggaggcatctgctacagtctctttttatatggatatgtacatgtcctattctacaaaaatgattaaagataaaaacgtacttgtatcccactgctaatttagctgtc

SEQ ID NO: 13629 - DNA, 768 bp, Macaca Fascicularis
  misc_feature (1)...(768): n = A,T,C or G
taatgatattggtataattacatttatgtaccaacagtttagtggagaatacattaacacaaagtatatatgccaaagatcattaaggctgggtttgcagcactcctttgcttctctccaagtctagttttgaacttgtatgccttcctatatttcattttttctttttttatatcacccaagtagtataatactttttatatctgctgaaaacatatacactatgtatttagtaataaaataacaaccaatttaaacagtaatgttctgaaaatgcagtcaagnnnnnnnnnnnnnnnagacaacaaggcagaaattatattgttgaagatggagatattattttcttcaaatttaacacacctcaacaaccgaagaagaaataaaatttagttattgctcagataaacatacaacttccaaaaggcatttgagttttttaaaattaaagtttttgaaaaccaatgggacaaataaagttggggagatgggaattttcaacaaataaattatttttatttgttttaaatttaaaatactgtgtgccccccccccccaatgaaatgcaagttcactaaatgtgaacagctttgcttttcacgtgattaagaccctactccaaattgtagaagcttttcaggaaccatattactctcatgatacttcattaatctccatcatgtatgccaagcctgacacatttgacagtgaggacaatgtggcttgctcctttttgaatctacagataaatgcatgtgtttnntactc

SEQ ID NO: 13630 - DNA, 714 bp, Macaca Fascicularis
  misc_feature (1)...(714): n = A,T,C or G
gagagcatgagtcaatgtgnnnnnnnnnnnnnnnnnnnnnnnnnnnnnnntgcactgtcactttgnnctgggtggaagtacattattggtgacttattttctctgtgtttgttcctacagccccattttcnnnnnnnnnnnnnnntccctttcccttcttggtgcttacacatctcagaaccattagccaaacccttgccagtgacagtattttggttttcagttctcactgttcctgnnnnnnnnnnnnnnnnnnnnnnnnnnnnnnnnnnnnnnnnnnnnnnnnnnnnnnnnnnnnnnnnnnnnnnnnnnnnnnnnnnnnnnnnnnnnnnnnnnnnnnnnnnnnnnnnnnnnnnnnnnnnnnnnnnnnnnnnnnnnnnnnnnnnnnnnnnnnnnnnnnnnnnnnnnnnnnnnnnnnnnnnnnnnnnnnnnnnnnnnnnnnnnnnnnnnnnnnnnnnnnnnnnnnnnnnnnnnnnnnnnnncgcgtcattgcaccctagcccaggccacagtgcaagactccatctcaaggagaaaaaaaaaaaaaagggacatagctatggagtggggtttagcttgaaaaggtgnnnnnnnnnnnnnnnnnnnnnnnnnnnnnnnnnnnnnnnnnggtcggcagtaaggtagggtcccctttttcactgagaagattgtgaatatttccatatggattttctattactaatgtactctgat

SEQ ID NO: 13631 - DNA, 771 bp, Macaca Fascicularis
  misc_feature (1)...(771): n = A,T,C or G
caaagaatgttacnnnnnnnnnnnttatgagnnncagcagctgtgatttcngtggaggaattagaaaagcagatgacgnnnnnnnnnnnnnnnnnnnnnnnaatcaatgaaattatcacagttcttgagcgtgaagcacaatcgagtgctctttttaaacaaaaacatcaggaactgttagcttgtcaagaaaactgtaagaaaaccttgacacttattgagaaaggcagtcaaagtgttcaaaagtttgtgaccttgagcaacgtgttaaagcattttgatcagacgaggctacaaagacagattgcagatgttcatgttgcttttcagagtatggtaaagaaaactggagattggaagaagcatgtggaaaccaacagtcgcttgatgaagaagtttgaggagtctcgagcggagttggagaaggtgctgcggattgctcaggagggcttggaggaaaagggggatccggaggagctcctgcggagacacactgagtttttcagtcagctggatcagagggtgctcaatgcgttcctgaaagcttgtgatgaactcaccgacatccttccagagcaggagcagcaggggcttcaggaagctgttcgaaagctccacaaacaatggaaggtgagtcaggacaggacggagacgccgtnnnnnnncaatgaagggagaagcttgagtgtgttgaggtccaaatgtaagagaaatttagaaattnnnnnnnnnnnactgtaactatttccctcattaaaaaatcaaaaaact

SEQ ID NO: 13632 - DNA, 710 bp, Macaca Fascicularis
  misc_feature (1)...(710): n = A,T,C or G
agacagggtctcgnnctgtcactgaggctggagtgcaatggcacaatnncagctcactgcaatctccacctcccgggttcaagtgattctcatgtctcagcctgctgagtagctgggactactacagaagctgagtatctatggtgacttggagtttatgaatgaacaaaagctgaacaaatatccagcttcttctcttgtggttgttagatctaaaactgaagatcatgaagaagcagggcctctacctaagaaagtgaatcttgctcattctgaaatttaagcatttttcttttaaaagaaaagtgtaatagacatctaaaattccactcctcatagagcttttaaaatggtttcattggatataggccttaagaaatcactataaaatgcaaataaagttactcaaatctgtgaagactgtatttgctataactttattggtattgtttttctagtaatttaagaggtggatgtttgggattgtattagtattttaataatatctgtagctattttgttttttgctttggttattgtttttttcccttttcttagctacgagatgatcantgtnnatttttaactccttccatgatactgaaaatggtatgtcatgnnaggtcattaactacttaataaaaaatgacgcatctgctcaggaatggcccacaaatctgtaatttgaaatttagcaggaaatgaccttt

SEQ ID NO: 13633 - DNA, 744 bp, Macaca Fascicularis
  misc_feature (1)...(744): n = A,T,C or G
ccagggactctcaggataacccttgagatcactcagctcccctctccttccagaaaaattcaaggtcctcctctagaagtttcaaatctnnnnnnnnnnnnnnnnnnnnnnnnnnnnnnnnnnnnnnnnnnncactcctcnnnnnnnnnnnnnnnntnnnnnnnnnnnnnnnnnnnnnnnnnnnnntggcggtttcaagtccccccttcctcgcccacttcacatctcccctaccagcagattctgcgaaagcaccaaatttcccaagaccctcttctccctagcttagcataatgtctggggaaacagccaaaatcgcagttttaacaatatgcctctccacccccatgcactttttctgacatggttttcaggtctaaatagtggctgctcaagtccatgaactcaaaggtttgaagccaccacccactgaactcccgcgtggtggtttcatgatgccccctccccgattcctcgcactttattctcctgggtggtttcaaactaccctcagtttctcagtggccatttgtcatgtccctcaggggcttaatgactcaaaatctgggatccttcccctcttagacacccctctttcagcttagaatttggggaacctatagagaagtcacagaatcccatgaaagggaatggggcaggggacaggggtgtttcttcccggtgcagggttgtgtctttgtgtctctgtctctgtgactgtaaatcctgccctgccccactccc

SEQ ID NO: 13634 - DNA, 663 bp, Macaca Fascicularis
  misc_feature (1)...(663): n = A,T,C or G
ggaagggtgtgtctcacctnnngccacagggactggctcccagtccntcccctgtccccaaatggttgcttgggggagannnnnnnnnnnnnnnnggtgttgtcacctccctgtttctccaccaagggcttgggcctctcggggctggggcctcccagggaatggggacccagaggtgcagtggctgcctgcatccatggcctaggagcgactgggcaggttcccggccacacatctggtgggctttttttttttccctcttcccccagatgtcttgacgggatcactggcgctctttgtgagtgagggtggtcaaactgctgccggaggagatggggtctcagagcgagagctggggagggggaggggaagaagaaggcctcacttttgctgctgcggggcccacacagccgctgctactttgggggctggggaaggggccaagctgcagacacacacagtcattcatttctgcccacacccctgtgggtggcgggtgtgcgtgtgtgtgcgcgcgtgtcggcactcacacacacatgctagcccactgattcacccagcccagggctggcagtctttgcggcacggggccatctcaccctnnnnnnnnnnnnnnnnnnnnnnntatttgtttttgtaatcccatatcnnnngttgctttct

SEQ ID NO: 13635 - DNA, 726 bp, Macaca Fascicularis
  misc_feature (1)...(726): n = A,T,C or G
catttnnnnnntgccaaaaaggaccaggaccataggtgagcnnngagcactaaaaggaggggtccctgaaactttaccactatagtgtggagttctatccctgaggnnnnnnnnnnnnnnnnnnnnnnnnnnnnnnnnnnnnnnnnnnnnnnnggggaggggaaaactcctccttgaagatttcctgtctcagagtcccagagcaggtggaaaggagaaatttctgctggacttcctctgggcagaggaaggatggaatgaaggtagaaaaggcagaannnnnnnnnnnnnnnnnnaacaaagagttcttctctgggagaagttttgtctcagagcaaggatggagaatggggacaacaaaggaaaagtaaagtatgacccttgggtttggacagcctagaggcccagctccccagtataagccatataggccagggacccacaggagagtggattagagcacaagtctggcctaggccacttacactgagtggacaagagctgaggggcctcctcagggtgacattcaccccagggcagcctgaccactgttggaccctcaggcattatcccatttggaatgtgaatatgggggcaaagtgggcacaggaccccacctgggaaccttcttccctcagttagtggggagactagcacctaggcacccacatgggtatttatatctgaaccagacagacgcttgaatcaggcactatgttgagaaat

SEQ ID NO: 13636 - DNA, 696 bp, Macaca Fascicularis
  misc_feature (1)...(696): n = A,T,C or G
ctgtnnncatnnctgtgcggggtgccccccaggactgcggctggccgccagctggtgggtggagcgaccagaggacggagagctcagctctgtccctgcccagctggtgggtggcgtgggccaggatggtgtggcagagctgggagtccggcctggaggaggccctgtcagcgtagagctggtggggccccgaagccatcggctgagactgcacagcttggggcccgaggatgaaggcgtgtaccactgtgcccccagcgcctgggtgcagcatgctgactacagctggtaccaggcgggcagtgcccgctcagggcctgttacagtctacccctacatgcatgccctggacaccctgttggtgcctctgctggtgggtacaggggtggccctagtcactggtgccactgtccttggtaccatcacttgctgcttcatgaagaggcttcgaaaacggtgatctcttactccccaggtcttgcaggtgttgactgtcttccggcccagctccaagccctcctctggttgcctggacaccctctccctctgtccactcttcctttaatttatttgacttcccactacccagaatgggagacatgcctccccttccccactccttccctcccaagcccctccctctggccttctgttcttgatctcacagggatcctatagggaggccattccccatcc

SEQ ID NO: 13637 - DNA, 987 bp, Macaca Fascicularis
  misc_feature (1)...(987): n = A,T,C or G
agccccagcgcgcagtnnnncgaggagcnnnnnnnnnnnnnnnnnnnnnncaacgtgcgcgagcgccagcgcacccagtcgctcaacgaggccttcgcggcgctgcgcaagatcatccccacgctgccctctgacaagttgagnnnnnnnnnnnnnntcaagctggccgccaggtacatagacttcctctaccaggtcctgcagagcgacgagatggacaataagatgaccagctgcagctacgtggcccacgagcgcctcagctacgccttctccgtgtggcgcatggagggcgcgtggnnnnnnnnnnnnnnnnnnnnnnnnngcgccacccacctccggaccggcccgccagggctgtccgtcgcgnnnncagcgcaagtgaaattgggatgcattcgagtctgtaacnnnnnnnnnnnnnnnaacctcaggaggccctcacctctgccctccaccagcgtcgagagaggggacagcagtgacatcggacagaagacccgggctcccgtcctcccccaggacggtccccacataggaagggcactcccagccctcttgctggtgatgttgtcatggtcatcttgtctctgttgggatttttcttctgggtcttatgttttgggggaggcttattctttctgaaaatgtctagattcaggaacacatttacgaggatttggattttgaatttgtatttccctctaagtgccttttttaatgtctatttttttaataaaacagaaatgcattattgtacaattctgttgaaactggaccaaggctctcagaagaggacccccgagttccttcccctcccccgagcctctgcatgattgtttcaagtcagcctggaattcttattttcatgccgctattctttttctttcnnnnnnnnnnnnnnngctagccatttaaaaaaaaatattctctgttcagtgtatatgttgcttgtttgttttatttattgagatattttcacaagct

SEQ ID NO: 13638 - DNA, 617 bp, Macaca Fascicularis
  misc_feature (1)...(617): n = A,T,C or G
cagccctccacacnnngtcacccccactcccacactcacacacacacgccccccannnnnnnnnnnnnnnnnnngtnnnnnnnnnnnnnnnnnggtgtgggcagagaagggcatctgggannnnnnnnnnnngaggagcnnnnnnnnnnnnnnnnngnnnnnnnnnaaggtgtnnnnnnnnnnnnnnnnnnnnnnctttctcaggggtttggtcacaaaggatggactcttcccacccagaggatgcagggacaacacactgtgtccnnnnnnnnnnnnnnnnnnnnnnnnnnnnnnnnnnnnnnnnnnnnnnnnnnnnnnnnnnnnnnnccctcactgccctcaaggacaacagcagggtctcacccagagcgtgatggggggtgccagcaggtacccccaggagtggggccttggcccaagcagaactttccctgaaggtgccatcagccagggcagctctgtcccctccctgctccccatcttatgtgtattctaaccagaaaaatgtgatagcacatgggtagcctaggcagtgaataaatacctcagatgtcctcctnnnnnnnnnnnnnnnnnnngttgtggttattttctatcttacagntctcgaatgt

SEQ ID NO: 13639 - DNA, 734 bp, Macaca Fascicularis
  misc_feature (1)...(734): n = A,T,C or G
tgaccatgggcnnnngccaggcatcggccatggagctgctgcgttgccccaccctccgccacctcttcctctgcctctccatgctgtggtttgccactagctttgcatactatgggctggtcatggacctgcagggctttggagtcagcatctacctaatccagaccagtccgttatccgaacctctcttgctgtgctggggaagggttgtctggctgcctccttcaactgcatcttcctgtacactggggaactgtatcccacaataannnnnnnnnnnnnnnnnnnnnnnggtagcaccatggcccgagtgggcagcatcgtgagcccactggtgagcatgaccaccgagctctacccctccgtgcctctcttcatctacggtgctgttcccgtggccgccagcgctgtcactgtcctcctgccagagaccctgggccagccactgccagacacggtgcaggacctggagagcaggaaagggaaacagacgccacagcaacaagagcaccagaagtatatggtcccgctgcaggcctccgcacaagagaagaatggactttgaggattgagaaggggccttacagaaccctaaagggagggaaggnnnnacaggtttcgggccacccacacaaggaggaggaagaggaaatggtgacccaagtctgggggnnnnnnnnnnnnnnnnnnncttcccaggggtccacctccctttataatccccaccaaaacca

SEQ ID NO: 13640 - DNA, 761 bp, Macaca Fascicularis
  misc_feature (1)...(761): n = A,T,C or G
cagtcgggctagaaagtccgttgaccactcagggccatcagcggctgaggccagggggcccatggggggcacttacccctgacccacggccgaccctcccacccccagatggagcccaccaccatcccagatgtccgtggcggatccctacagaatgctgtccgcgtgtggagcaacattccggccataaggaggtatttcccgggcagccaaaagtgttcagggtcaagggggacgtggacccagagcggagttcaccaaggaaatggggtctgcctagcagagccaaacccagagcagcctctgtgccccagtgggactgcggtcggcctccagggccaccctgagaccctgaaggcaccgaagcccaaggacgcccctttccccttggggaccttctccagcactggctctcagcttcttgggttccagcccctggacacccatatnnnnnnnnnnnnnnnnnnnnnnnnnnnnnnnnnnnnnnnnnnnnnnnnnnnnnnnnnnnnnnnncacctcccttgcacacccataagctcatgtgtgctcacactcagccacactcacacgnnnnnnnnnnnnnnnnnnnnnnnnnnntgtgtgctcatgtgcgcacacatacagtcagtcccacggtcacactcatccacacacagtcattcccacggtcacactcatccacacgnnnnnnnnnnnnnnnnnnnnnnnnnnnnnnnncccacagccacgctcatccacatgnnngcatgcactgtcagtca

SEQ ID NO: 13641 - DNA, 750 bp, Macaca Fascicularis
  misc_feature (1)...(750): n = A,T,C or G
gtnnnattcactnnngtgccatttttgtaaatacagtagttttgcacaacctctcacaaatgtctgtattaatttcacatacttaaaaagtagataatgtgccaaccagaagcacnnnnnnnnnnnnncaaaactctnnnnnnnnnnnnnnnnnttgtataatgagtagtttacaatctcgggcttatagaataccaaactgaaatcttagttcaannnnnnnnnnnnnnnagcttttcatttattactaatatccatgannnnnnnnnnnnnnntgcaaatacgatatgttgcttaggcatatcttttgtcctatgcagaacctttcattttgatttttatgaaagttgcaattcatgtaatttatatgaactttttaaatgtagaaactttttacttccgcactcaattttggagacactagagtaaaaggctnnnnnnnnnnnnnnnnnnnnnnnnnnnnnnnnnnntttttccccctttgttctttgactnnnnnnnnnnnnnnnngtttgttgtatatggaagcataggtgtctatatccttactcttttatgtaacacaataatggcattttccttctaatttctcagttgttaacctctctctctctttttttttttttttaagatagggtcctgctgtgtcacctcagctctagtgcagtactgcaatcatagctcactgccaccttactcctaggctcnnnnttaacctattcttgatccgtattattactaatattctac

SEQ ID NO: 13642 - DNA, 755 bp, Macaca Fascicularis
  misc_feature (1)...(755): n = A,T,C or G
aggagagaaggaagttgaggctttgaagaaaagtgcggactgggtgtcagactggtccagtagacccgaaaacattccacccaaggagttccacttcagacaccctaaacgttctgtgtctttaagcatgaggaaaagtggagccatgaagaaagggggtattttctccgcagaatttctgaaggtcttcattccatctctcttcctttctcatgttttggctttgggactaggcatctatattggaaagcgactgagcacaccctctgccagcacctactgagggaaaggaaaagcccctggaaatgcgtgtgacctgtgaagtggtgtattgtcacagtagcttatttgaacttgagaccattgtaagcatgacccaacctaccaccctgtttttacatatccaattccagtaactctcaaatccagtattttattcaaactctgttgaggcattttactaaccttataccctttttggcctgtaagacattttagaatttcctaacagagtttactgttgtttagaaatttgcaagggcttcttttccgcaaatgnnnnnnnnnnnnnnnaattttgtcaacaaggctattatccctaattagtaccaccagagtagacctgtatcattcatggtataaattttactcttgcaacataactaccatctctctcttaaaacgagatcaggttagcaaatgatgtaaaagaagcttattgtctagttgttttttccccccaagacaaaggcaag

SEQ ID NO: 13643 - DNA, 666 bp, Macaca Fascicularis
  misc_feature (1)...(666): n = A,T,C or G
tcccgatctggtcctagcagatggattactctgtccacttaacatnnnngctaagtcttgctttaattactctaacatatgaatgttccttggacttctggttaattcaagtctaaagcacaggacacttgccgattaataccttccttgagatgacatatttgtcttcctttgatgatagcaatgacttcaattttaaaaattagtcctctggcacacaggctgtacttcaaggatcgggattaatattagtgcatttttaaaatacataaagttttacaaatatatttgtgtattttctgttttggtgcctattttatagaggatgattgaagaatcactgaagattgaaatggaaaatgaattagaaatggaaaatgaattagaaatgagtaatcaagaaatgaaagacaaatctgctcacagtgaaaatcctttagagaaatacatgaaaatcatccagcaggagcaagaccagcagtcagcagataagagctcaaaaaagatggtccaagaaggctccctagtggacacgctgcaatctagtgacaaagttgaaagtttaacaggcttttctcatgaagaaccagatgactcttggtaaccgtgtttgctgcccagcttctaacttacataccatgagaagttacataacatttactcctt

SEQ ID NO: 13644 - DNA, 715 bp, Macaca Fascicularis
  misc_feature (1)...(715): n = A,T,C or G
gggnnnnngaagaggttggtggagggccaggtgtggggnnnnnnnnnnnnnnnnnnnngacaggaggcgtggacccccccattggagacgtggagtaccttacagccttcaggacagtggtgatgcccattgcccacgagttctcacctgacgtggtcctagtctctgctgggtttgatgctgttgaaggacatctgtctcctctgggtggctannnnnnnnnnnnnnnnnnnnnnnnnnnnnngaccaggcagctgatgacccnnnnnnnnnnnnnnnnnnnnnnnnnnnnnnnnnnnnnnnnnnnnnnnnnnnnnnnnnntgatgcctctgaggcttgtgtttcggctctgcttagtgtagagctgcagcccttggacgaggcagtcttgcagcaaaagcccaacatcaacgcagtggccacgctagagaaagtcatcgagatccagagcaaacactggagctgtgtgcagaagtttgccgctggtctgggccgttccctgcgggaggcccaggcaggtgagaccgaggaggccgagactgtgagcgccatggccttgctgtcggtgggggctgagcaggcccaggctgcagcagcccgggagcacagccccaggccggcagaggagcccatggagcaggagcctgccctgtgacaccctggcccccatccctctgggcttcannnnttgtgattttgtttatttttctataa

SEQ ID NO: 13645 - DNA, 904 bp, Macaca Fascicularis
  misc_feature (1)...(904): n = A,T,C or G
ggtaatcacagnnngtcaatgggnnnatgcctttggcttcctcttnatgctgccccagctctttgtgaactacaagnnnnnnnnnnnnnnnnnnnnnnnnnnnnnnnnnnnnnnnnnnnnnnnnnnnnnnnnnnntcannnnngacgtctttgccnnnatcatcaccatgcccacgtctcaccggctggcctgcttccgggacgacgtggtgttcctggtctacctgtaccagcggtggctttatcctgtggataaacgcagagtgaacgagttcggggagtcctacgaggagaaagccacgcgggcgccccacacagactgaaggccccccgggctgccgctggccacgtgcgacttgaattgtccatgagtatttttggaagcatttggtggaattccnnnnnnnnnnnnnnnnnnnnnnnnnnnnnnnnnnnnngacatttctcagacatctcccacgtccctcacatcagatttggagctggtggtgctcacggtgcccnnnnnnnnnnnnnnnnnnnnnnnnnnnnnnnnnnnnnnnnnnnnnnnnnnnnnnnnnntggtggctcccggcgcgcgagtgtccgggggtcggccatgtcctcacactggcaggtgcgggagccctcacaggcaagggggctgtgggagttccatttcaggtggttttctaagtgctccttatgtgaatttcaaacacatacggaattcattccgcgtggactctgggatcaaaggctctttcctcttttgtttgagagttggttgttttaaagcttaatgtatgtttctattttaaaataaatttttctggctgtggcatttttcttgacctggtataatgaaagtatttcagatgtttgagtttaacccttttccagaaagtaatacataatatggatt

SEQ ID NO: 13646 - DNA, 643 bp, Macaca Fascicularis
  misc_feature (1)...(643): n = A,T,C or G
taaatcaagctgaaacttttntgatgttcatatactcatatgtcttataggtggtaggtgtcacttgtgtgtatgtgtaagtgaagtatgatgcatgctcattcacttggtctctttgaagtaagggaaaggatcacagtgctgctgggccgtgatggtatgtagaagggtctgtcagcacacatggaaagcccccatttgcacagatgtagaactttaataatccagatgcaatcattggaagtatttaatatgcaattggtagcaccttagctaattaatctgcatatgaagcattttctcatatatttaataaaaggtgtagaagctcttcaagcattaactagagttgatgttttattccatttattttatccatcaaaaaatgcactctcacagtggagttgaagtctggtaaatgatacatgtgggcctgttaatcttcgaagcttccagatggtttgtgttttgaggtacaaaaaaatgctgcagatctagaaatgcatatatttagcaggtatttgaaagatagaagcattatttataactgaagagtatgacacttatcttcttaagtaaatgctctcataacttgtatacatttttgcaggtacaaattcaaaagtatgtaagcattgtataa

SEQ ID NO: 13647 - DNA, 747 bp, Macaca Fascicularis
  misc_feature (1)...(747): n = A,T,C or G
gtctacttcttcaaacgtaacaaatatatctattatgaagctnnnnccctagtatgccattataaagaaaaaannnnncgatggtatgcagtgtatctattctgtttgtaaaggatcatgtcaaaatgttctgcctctataatgataatagatggttttgtctttcaggagatttatccacctactgtcttcnnnnnnnnnnnnnnncacttggccatcatttttagacttgaacttaacactgttaagaaataactgaaatatgatggtacttacattaatttttgaaattcaatggtgggatagaattaggtcaggaaatggaaattgttccaatggtgtgagaactaggagacaagatgattcactttattatttaaaccaagcttcatttttagtttttgttgtttaaatgaactggaaagttaagtttttgcagggattgttttgaaataaagagatatgctaactcacagatgaactttgttgataagacccctttatttttatataaagtctaatatttgaaaagtgattgttataaagtaaaattctctcttcctattctaatatatatcatttatttcaggcttctatttgaaaacaggtataagagatgatatgatggaaccctataatgttttttgcttgattgacttatataatcactgtttcatgattactgcttttggaataataggaagttttgtgaaatgctggtcttgtgtatatcttagaataaataaa

SEQ ID NO: 13648 - DNA, 778 bp, Macaca Fascicularis
  misc_feature (1)...(778): n = A,T,C or G
attacaaaaataaacactaaactctcaacactttaaaagcaacccccaaattcaacctatggaatgtgattaaatcaaattaaatacataatatatatatttacaaaataatataattaataaacttcctacatctatagaatatataggaaattttatggtgtgcacatttgcattgggtccaaatcctaattgcagtttagtaaactttctagattttttctaatcttcagtatgtagtaagcattcacagattttctcctagaatctcaagtggaattggaatcatgaaaatgaatgagatttgaaaactttcacaaagattataaatgtagtttgatgttccttagaataaaaaatgaaacagtaacaacttaaaaaaaattttacataagagtcagcatctttagctttataatctaaggaaccaaatttaaaaaatgatggattacgctctgtgaaatgaaaagactatcaagttagttgatctcttgtactgggaaaagctacttttttcctaaagaacacagtggagtggatatgttcactttttttttctaaaacatatatacaaagtgttaaaagaatcgtgcctaatgtcaaaactttactggtttgagaagaacaatcaaaaaggatttataccaataggacttactattgtttttttaaggatcctctctcacggtggtaatgaaacattaactgtaacaaatttataatttatgtgcttatgaaattagttttatgaatgaacaataaannnatgcatataatg

SEQ ID NO: 13649 - DNA, 714 bp, Macaca Fascicularis
  misc_feature (1)...(714): n = A,T,C or G
gtgcccgggtgtggtctgggcnnnnnnncagnnnnnnnnngagcaaatcctgngtgccctatccctagccacagcccagcgctctccctgcacctcaacacacatccatctcnagaggaacannnatgccaggcactcagagctggaagggtatggagagcccagcccaccaggtcttgctttttgcggtgataacctctggcagagtgactctacaagttaactaggaaacccatgtgaggttcttctgacaggatcttcaacagcccaaagtatcattctcaggggcacccaggctaagggtattagccaaagatgccaggatgggcagctaacccatgtttagatccaggtctccaattcatggatgtcagagcatgcgttcaacaacccccaaagtccacgcagggtggcttgtagaaacctttgggcagcctcatgtctgctaaaacagccatcttcaagacagcccccgaaaagagaccaactcaggtcctgccctgctattctttgctggagatgaggaacaggctctggggctaaagtctggggtaaagcacaagggactagaggaactcttggagttggctgggtgagagggctctccatttgttacccgtagtagcccgcctcctaactggttgcttctccctagttccagccctgccctggtctgatgccccaacactgcttttgctttgtgntccatcacct

SEQ ID NO: 13650 - DNA, 747 bp, Macaca Fascicularis
  misc_feature (1)...(747): n = A,T,C or G
ggggcgccctcccatggggcagcctccttgtggagtaggaaacataagctgaagaaggaagctttaaagaaaggttggctcgttctcgcccgcaatttagaggggacatacatggcagaaatttaagcaatgaggagatgatacaggcagcagatgagctagaagagatgaaaagagtaagaaacaaactgatgataatgcattggaaggcaaaacggagccgtccttatcctatttaatgtgttcgccctttaattctgttttgnnnnnnnnnnnnnnnnccattgccacctggactttctgtgcgnnnnnnnnnnnnnnnnnnnnnnnnnnnnnnttttaactttttgtgaggatttattttagatgtttagcttgtaactcgcttaaagttggggtttccccctaaaatttacaagtttccctctttcagtcataagtcctatacatttgcatgaaagatgtacattatatattgtgaaacgaaaaaagcaattttcaaatggtatatattgtatcccatttttgtaaaaaatgtatatttatatattaatatgcaaagaaaaaacaaagtatatacttcaaaggtataacagtggttgtgtggtaagataataggtgatttttaaaaattttgctttatctgaatttctcattttttcaagacaaacattttacttgtgttgcaaaaatatataacgaaaaaatcacccaatttgaaaaaaactgtcaatcagcttataaaga

SEQ ID NO: 13651 - DNA, 851 bp, Macaca Fascicularis
  misc_feature (1)...(851): n = A,T,C or G
caacaagtnnnnnnnnnnnnnnnnnnnnnnnnnnnnatgaagaatttaaaaaatatgaaatgatgaaggaacatgaaaggagagaatatttaaaaacattgaatgaagaaaagagaaaagaagaagagtctaaaattgaagaaatgaagaaaaagcatgaaaatcacnnnaaagttaatcatccaggaagcaaagatcaactaaaagaggtatgggaagagactgatggattnnnnnnnnnnnactttgaccccaagacatttttcaaattacatgatgttaatagtgatggattcctggatgagcaagaattagaagccctatttactaaagagttggagaaagtatatgaccctaaaaatgaagaggatgatatggtagaaatggaagaagaaaggcttagaatgagggaacatgtaatgaatgaggttgatactaacaaagacagattggtgactctggaggagtttttgaaagccacagannnnnnnnnnnnnnnnnnnnnnnnnannnnnnnnnnnnnnnnnnnnnnnnnnttcttcacagaggaagaactaaaagaatatgaaaatattattgctttacaagaaaatgaacttaagaagaaggcagatgagcttcagaaacaaaaagaagagctacaacgtnnnnnnnnnnnnnnnnaggctcagaagnnnnnnnnnnnnnnnnnnnnnnnnnngatggaacaaaaaaaattacaacaaggaannnnnnnnnnnnnnncagctggagaattgaagtttgagccacacatttaaagtctgaagtccaccagagctcggaagaaagctgttaactcaacatctatttcatctttttagctcccttct

SEQ ID NO: 13652 - DNA, 754 bp, Macaca Fascicularis
  misc_feature (1)...(754): n = A,T,C or G
atacacgtcaaagtggacgaacgacnactccatggtgtgacaggagctgctatttaccacaaatattatcactacctgtactcccnnnnnnngccagccagcctnnngnacatggtggaccaattggccaattgtgaggacattctcatgnnnnnnnnnnnnnntgctgtgacaaaattgcctccaatcaaagtgacccagaagaagcagtataaggagacaatgatgggacagacttctcgggcttcccgttgggctgannnnnnnnnnnnnnnnnnnnnnnnnnnnnnnnnnnnnnnnnnnnnnnnnnnnnnnnnnnnnntgccgctgatccactctcagatgaggctcgaccccgtcctctttaaagaccaggtctctattttgaggaagaaataccgagacattgagcgactttgaggaatccggccaagtgggggaggggaagcgagaagggacgggggtcaagctgctttctcttcccagtgcagatccactcatcagcagagccagattgtgccaactatccaaaaacttagatgagccgaacgacaaaaaaaaaaaaaannnnnnnnnnnngaactcgactcctggctcctgggactgcaccggactgctccaaactcacctcactggcttctgtgtcccaagactaggttgtgtacagtttaattatggaacattaaataattatttttgaaatgattgctatgcaggtttaaactttttaatgatcaaaactataaaaccagat

SEQ ID NO: 13653 - DNA, 709 bp, Macaca Fascicularis
  misc_feature (1)...(709): n = A,T,C or G
gtgtggtccagcagggnnnngtagatgcacaccttgtgccattggaggagccagtgccctctcactggacagtggtgcccgaccaggatttcgtgctggtgctagcgctgctgcactcgcacctgggnnnnnnnnnnnnnnnggcacccatgggccgctgtgcagctggtgnnnnnnnnnnnnnnnntgtgcgggcgggagtgtctcgggccatgctgctgcgcctcttcctggccatggagaagggcagacatatggaatatgaatgcccttacttggtatacatgcctgtggtcgccttccgcttagagcccgaggatgggagaggtgtgtttacagtggatggggaattgatggttagcgaggctgtgcagggccaggtgcacccaaactacttctggatggtcagtgattgcgtggagcccctgcccagctggaagccccagcagacgccacctccagaagagcccttatgacccctgggccacgctgtgccttagtgtctacttgcaggacccttcctccttccccagggctgcagggcctgtccacagctcctgtggggtggaggagactcctctggagaagggtgagaaggtggaagctatgctttggggggacaggccagaatgaggtcctggggtcaggagcccagctggctgggcccagctgcctaaggccttccaattttnctaggacccccacccca

SEQ ID NO: 13654 - DNA, 737 bp, Macaca Fascicularis
  misc_feature (1)...(737): n = A,T,C or G
ccataatctnnngatgtatgtatttttgcatgcagtgaaagnnnnnnnnnncgaaactnnngaccagggtannnnnaggctnnnaactcattgggannnnnnnnnnnnnnnnnnnnnnnnnnnnnnntcacggaagtttttcacaatttctccaataattttatattttctggcaagtttctatacgaagtatgatccaactcacttcatcctaaacacagcttctctcctgagtgtgctaattcccaaaatgccacagctacatggtgttcggatctttggaattaataagtattgaaatcttttgaaacnnnnnnnnnnnnnnnnnnnnnnnnnnnnnncttataagaaaggagtggttatnnnnnnnnnnnnnnnnnnnnnaatgtgaaattaagaagtatttacattggannnnnnnnnnnnnnnnnnnnnnnnnnnnnnntgaagtgcagatttccattaaatgatgcctctgtttaatacatctggtatatttctgaagaggggctttataagcaggctgggcaggcccagcttataagttcaagggcatacacagtgagaggtgtagtagataaattcaaggaaataagagatttgtaaaaaactaggaccagcttaactataatgaanngggcnnntgtgttaagaaaagaacatttccaatcattcagaccatggttagttaaagcagacttacatgtaaaccggaatcatctcttatacaagttata

SEQ ID NO: 13655 - DNA, 732 bp, Macaca Fascicularis
  misc_feature (1)...(732): n = A,T,C or G
cnnnnnnnnnnnnnnnnnnnnnnnngagnnnnnggcagcggcgagcccnnnnnnnnnnnnnnnnnccaccgcccacggtggctgagctggnnnnnnnnnnnnnnnnnnnnnnnnnnnnnnnnnncacggccccccgcagccccaacaccgggccctaccccagnnnnnnnnnnnnnnnnnnnnnnnnnnnnnnnnnnnnnnnnnnnnnnnnnnnnnnnnnnnnnnnnnnnnnnnnnnncgagtctgannnnnnnnnnnnnnnnnnnnnnnnnnnnnnnnnnnnnnnnnnnnnnnnnnnnnnnnnnnnnnnnnnnnnnnnnnnnnnnnnggcctcactctatggtgccctctccaaagggtggagagggtagctctccaggccagagcttgtgtccttcaacagagaggccagcagcaactggcccgttcctggccaagggctccgtaggatcacggtgctggtgcaggatgcaggaattagttgtatcttcacctggttcctaccctcgtccctacctgtcctgatcctggtcccagccaggccctggagacccctcagaacaccttctcctggtggcagaccacttcccnnnnnnnnnnnnnnnnnntccaccccagagaggaacaggcaggcgggccatatggtcttctccttccgggccttggctggcctctggggcaggggtggtggagagannaagggcatcaggtgtggggaccctgccaggggca

SEQ ID NO: 13656 - DNA, 866 bp, Macaca Fascicularis
  misc_feature (1)...(866): n = A,T,C or G
ctgtgagactggaccagggagcccctctggccannnnnnnnnnnnnnnaggtgtatactacgtgatggtcacatctactctttcnnnnnnnnnnnnnnngaaaaagccgacctacagatttcggtgcttgaatgtcattttgtggttgggattctgggctgtgcagctgaacgtctgtctgtcacgaatctaccttgctgctcattttcctcatcaagttgttgccggagtcctgtcaggcattgctgttgcagaaactttcannnnnnnnnnnnnnnnnnnnnnnnnnnnnnnnaagaaatattttctcattaccttcttnnnnnnnnnnnnnnnnnnnnnnnnnnnnnnnnnnnnnnnnnnnnnnnnnnnnnacctcctatggactctggagaaagcccagaggtggtgcgagcggccagaatgggtccacattnnnnnnnnnnnnnnnnnnnnnnnnctcaagaacctgggcaccctctttggcctggggctggctctcaactccagcatgtacagggaaagcnnnnnnnnnnnnnnnnnnnnnnnnctcccattccgcctcagctctattgtagcctccctcgtcctcctgcacctctttgactccttgaaacccccgtcccaagtcgagctggtcttctacgtcttgtccttctgcaagagtgcggtagtgcccctggcatccgtcagtgtcatcccctactgcctcgcccagatcctgggccagccacacaagaagtcattgtaagggatgnnnnnnnnnnnnnnnnnnnnnnnnnnnnnnnnnnnnnnnnnnnnnnnnnnnnnntattgaagcaatgggtgctggtattggagcaagtgacatgccatccattctgcca

SEQ ID NO: 13657 - DNA, 753 bp, Macaca Fascicularis
  misc_feature (1)...(753): n = A,T,C or G
cccagccccacagcctgaacctcccannnnnnnnnnnnnngttgcatacannnnnncaggcctgtgcagacactcagggacggnnnnnnnnnnnaagggacttgcagnnnnnnnnnnnnnnnnaagcactgttctggaaccttctctcnnnnnnnnnnnnnnnnnnnnnnnnnnnnnnnnnngatactgtgttcccttccttgggtgagcctggcctgtcccattcagccattgggcccaggcttcctccccttnnnnnnnnnnnnnnnnnnnnnnnncatagtgactccccaggcaggactggccaggctgggagtgctggcttcctgtgccaaatagctgccaggccaggcaaagcgcctttacacaggcctcagaaaacaacggggtgagcacgagatgccccgtgcggctgcccaaggctccccgcccaccctggccggaccttgatctccctgaagtcttcacaggcactgcatcagggtgtctgctgcccgtttcctccagcctaaactgacatcatcctacggactgagccggccactccctggccgaagtggcagcaggctgtgcccccgagctgcccccaccccctcacagggcccctcagattttaggtgcccaggctgaggtgaagaggccttggggccctgcctcccgggcgctcctggaccctggggccagcctgtgacccttttctactggaaatgagttttatcatctttgaaaaataattcactatgaagaataacc

SEQ ID NO: 13658 - DNA, 727 bp, Macaca Fascicularis
  misc_feature (1)...(727): n = A,T,C or G
agtctcgggccntnnngnaataaaggccgggaggccctgtgggcattgggctcagcctctccctagggggcagctcccctacggctcctcggctcctcgctccccacctgcctgcccagccgccagccatgccaaggacaacagcaatagtcccctggggctctcccagcggccctcagccatagatggcgaggtgggcagcccgccccccatgggaagattcttatgtatccaggtctgctttcctcctcccttcagattccttttggcacattctcctcttgaggaagcaccggtcttttctgaaactgagagagggagggcaacgtcctttaaaaataccaaaaatgnnnnnnnnnnnnnnnnctgagctgcaggnnnnnnnnnnnnnnnnnnnnnnnnnnnnggtgaggcaggccttgctgactgccacccccaggcctgttagaatagaagccttagtcccactcccaccacacccccaggccccaggccccaccacctgccttctctttgatttctaaagagggattccgcagagacccccacccctccctggctcggtctgagtcccactgcccgccccgtcacagccttcacgtctcagcccctcctgtctggtctgtccatgtgccatctgtctctctgggccacgtgnnnnnnnnnnncccactctccccacccgtccctgctgtccctgcatcattgggcctgagtgtgctctgta

SEQ ID NO: 13659 - DNA, 734 bp, Macaca Fascicularis
  misc_feature (1)...(734): n = A,T,C or G
ctgtttagtgttgtatttcaattgtggagcctcattttaagtgttcattcttttaagatttaatgcttgctttttctttttatagctaatagtgaaatctacaaaccaaaacaagaacttttaaatctgggatataaattaaannnnnnnnnnnnnnntcaatttatgttcttgtaataagcttattagaaattggtgtttgtgatagcattttacttgggttactagagatgcttctagtagaccttaatctagcatagttgaacctgtgaatatgggaagattgtattcccagattctttnnnnnnnnnnnnnnnnnntattattatttgggaactccagggtgagtttattgactacccaaactgtattttgccaataaatatgcatatgatctttaattattgaagaaaagaataaagtgaggacttaaaacagttcatgaaagtggacctttaaaagcttgtcagagttgcacaaatctaattggtattttgtttttgtttttaggaggagatgttaaagtannnnnnnnnnnnnnnnnnnnntgaagattggtcttctgttgatctaagatgattattttgtaaaagactttctagtgtacaagacacgattgtgtccaactgtatatagctgccaattagttttctttgtttttactttgtcctttgctatctgtgttatgactcaatgtggatttgtttatacacattttatttgtatcatttcat

SEQ ID NO: 13660 - DNA, 764 bp, Macaca Fascicularis
  misc_feature (1)...(764): n = A,T,C or G
ctgcagagcagagatgtgcagccctctggtcagctggttcaggctggtctccaccgnnnnnnntcnnnnnnnnnnnnnnnnagcccggttgtcccaggcttcnnnnnnnnnnnnnnnnagaatttctgagagccggatgtgcatgccctgtggacaaaggtacagctcacctgcctgccccagccccgacaatcacatgcagctgacnnnnnnnnnnnnnnnnnnnnnnnnnnnnnnnggaacacctgccccctgactgtaggagccagaaggggactcaggtgtgcatagctctctgtagacattnnnnnnnnnnnnnnnnnnnnnnnnnnnnnnnnnnngtgcaagagannnnnnnnnnnnnnnagggagcccggctgcctcacctggccacagcctccatgccagatctgcacattgtcttgatccagaccagctctgtgatcagaaggaaattgggtccaatgtaggagcaagctggtcctgggcctggcaggcaagagtgtgggcatcctttcctggcctttctccactctccctcaannnnnnnnnnnggttgccttgaatgtggactctggaagagccaggggcccagagtgccggggcaggcttctgggtggcactcgtggaacaccgtccctctgccagccataggccctgcctccagtgtcagggaatggaggctgggctgcgagagtgctgctgccccctgtgtcgttcttctaatccactgtagaaattgtacgtaatgtatttaaatcaac

SEQ ID NO: 13661 - DNA, 724 bp, Macaca Fascicularis
  misc_feature (1)...(724): n = A,T,C or G
gaaaatggaccaaatgtaacctcagagaaacaactacaggaccactcacccaagtgtaagtgactggggcaggacacttcagctgtgggtgtggaagtactgttctgttcacaaggttttgtttgcgttttgtgtttttcttttaaacatttctctggttcgatgggttgactgtctacggccactgttaaaatatttctgaatatggaagagaaagtcaagtgacatttttatcttcttcagcatttacagaccttctatagattccagcaaaggggaaaaatgtgtccactatctaacactcaggtggagaagggagagaagggagagaagggagggggtttaagcttagtgagggcaaaattactccattccaccttctgagaccagttggggttttgagagaggtttctgctcaacctgggatctggagggagagctttgatgttggtaaatctgccttgaattcattggtttaacttgcatcaaaataccatgtgagtgtgctcattctcatagatccctaccatcatcaccaccattctgctgttcagtgtctcttgagagagcctctttgcatgttttccagaatctgtgtgtgcttttcctttcttctcctttgttctttttgnnnnnnnnnnnnnnnnntcactgcccctctggggctttcattctccaggagaaacatcccagaaccagcactgtttagcttactacctttcta

SEQ ID NO: 13662 - DNA, 789 bp, Macaca Fascicularis
  misc_feature (1)...(789): n = A,T,C or G
ggcccagaggccacaagaggnngctgaatgaagaggatgccgccagcgagtccagcagggagtccagcaacgaggacgagggcagcagctccgaggccgacgagatggccaaggcactggaggcggagctcaacgacctcatgtgagcgcgggcggcgggcagggactgaagcctggctggcctccagcagaattcggacgtccccggaccagccctcagtctcggtccacgctgctttcttcccaaaggaaatgtatatttgcagagctccacatacagaaacacattattttgcagaaataggtgtttttaagaagttttactacnnnnnnnnnnnnnnnnnnnnnnnnnnnnnnnnnnnnnnnnnnnnnnnnnnnnngaggctcacgtggcccaggctggcgccggctgctgtcccggtaaggggagggttggtgtgtgttcctctgggtaccagagcacattccttgggacagcattggactaggagtttaaacgggacagcgtgtgtgcacccggcgctgagccccccacagacatccccgtcgctccctcctaggggacccatttccggggaacgccgtgagtctcgggcggcctggagtttcctgcagcttcctccgcagggtccacgccacgtgacctgggctgccacctgccctcctcccnnnnnnntcnnnnnnnnnnnnnnnnnttttcctgggcgaccttttatgtcttggagagacctgatgtaaagtttctgtaaatctatttcatatctgacccaccaagcagngaattttctt

SEQ ID NO: 13663 - DNA, 730 bp, Macaca Fascicularis
  misc_feature (1)...(730): n = A,T,C or G
agggcagcagcctgagccgganntccaggaccagcgccccagctgcctctggctgtggccacagacaacttcatcagcacctgttcctcggccacccaaccctggtcccctagatcaggacctgtcctcaataacaatcccccagctgnnnnnnnnnnnnnnnnnnnnnnntgggctggggagccctggaaccgggcccagcatagcctgccccgggcggcagccctggagcggacagaaccctcgccacccccttcagctccccgggagcctgatgaggggctgccctgtcctggctgctgcctcggccccttcagctttggcttcctgtccatgtgcccccgccccacaccagctgttgcccgctaccgcaacctgaactgtgaggcgggcagtctcctctgccaccgagggcaccatgccaagccacccacacccagcctgcaactgcccggggcacgctcttagcattggagcctgtggtctcaggcctccaactttggccttcaggacaccctgtaagaacagagcacacttgctggacagtgccagttcnnnnnnnnnnnnnnnnncttctccctgtgtaggggagccccagcatggactcgagggacagagcacttccagttcaatccccggctcgtgttcccatggggatcactgaaccagacacagcattgctgacacatgagactaacacgtgcaattatttaaaaagatttcaataaaa

SEQ ID NO: 13664 - DNA, 652 bp, Macaca Fascicularis
  misc_feature (1)...(652): n = A,T,C or G
tctcctggctcattcctcnnngttactttctgttccaatacacagaaagcttgaacatctctgatcagccaaaatatcttttatttagcaaagctcaacttcccaagagttatgcatggtgtgcctgtctgaaggtggtgttagctctgcnnnnnnnnnnnnnnnnnnnnnnnnnnnnnnnnnnttatgattaaaaacaaacttttcatcaagaataaggacaaattctaattggcctttgtgatatgtaagataactcataaatgaatcacaatggattttatttcgannnnnnnnnnnnnnnnnnnnnnnnnnnnnnnnnnnaagggtttggagaatatttttaggtgccaaatagcatagtgaagattcaaccaaaagatgaatttnnnnnnnnnnnnnnnnnnnnnntaagtgttttaactaagagtttttaaaaatgctttatttacacaaannnnnnnnnnnnnnnaccttttaaagaggaggctctagtatcaggctgtcatttccaatagatctgaccttttcttcagataaataagcattattttctctgtttaagtccaaggaaaaacacaaggtaaatggaaataaagggaatatatataaggcaaacatttctccttttttttgcattatatcttatcag

SEQ ID NO: 13665 - DNA, 937 bp, Macaca Fascicularis
  misc_feature (1)...(937): n = A,T,C or G
cgctggcggaattccaggactactacagcggcgtgagtgcctccatgaacacagatgaggagttcgtggccatgatgnnnnnnncctggcagctatgagnnnnnnnnnnnnnnnnnnnnnnnnnnnnnnnnnnnnnncccacccccgctggagacctcccttccctgggccttttctcttctgggcagccacaccacagagcggggaggggcaggtgggggaatggaggctgcaggaccggctagaccaggtccctgctgggccaccagggggaggagggacaaaggtcctaacnnnnnnnnnnnnnnnnggaccccagggagaaaagctgtcnnnnnnnnnnnnnnnnnnnnntgaggccttgcagcccctgcggatgcccccgccaaggtcccctgatccccccacccggcctgctgctccccacccctcccttgcgcgtcccccaggaagccaggcaagcccaggtgggaggcggtgtgtggaggctatcctggaaggcagtctggacctgcccaggtgtggagtgaggggcaagggnnnatcctaacctcagaaacaaaaaaaaaaaagccttgaaaaaaacatctgtaaaacatcaacccccaatcagaagatggcaatggggaataaaatagtagttcacatgtccagcgagccccgtgtctacactctcatgagcagcccgaggctgggagccctgggcgggggcggaagacctgcaggagggttgggggtaaagtgtggggggcggtggagagaccagggctgtggctggattccagtgctggtgacacgtggggtgggagcatgaggccccaggctgccggaggtcctggcccggggaggtggaggccattagtggtcaagggcttcctgaggcccctggcgcatgcagaggtcggggttttagttaaaagtttaatgtagttcccaa

SEQ ID NO: 13666 - DNA, 556 bp, Macaca Fascicularis
  misc_feature (1)...(556): n = A,T,C or G
aaaataaaacctcttttcctagtgctacttgttttgttatagaaaaatatcacaaataaaaattagtgctattcaaggtgttcatttcaaaatcacatatgatacacaagtttcaagccattgtttttgtgtctcacactgaaacatcacgatacatgataggaaactgatttactgattaaatgtaccttgcccagcttggaaaacccattgtctactatgtggactgcttacaaatgagagtgagttaaaacattttcnnnnnnnnnnnnnnnnnnnnnnnnnnnnnnnnnnnnnnnnnnnnnnnnnnnnnnnnnnnnnaaacatgacaaaatttgtatttcttcctgatacaagaaatttgtctaaaaatctgtaattataaaacagatttgttttttgttttttagtaaagaaatggctaattgtttttgtggttggaatcttatttttaagatgattcagaattcggccgggcgcggtggctcacgcctgtaatcccagcactttgggaggccgaggcgggcggatcacaaggtcaggagatcgagaccac

SEQ ID NO: 13667 - DNA, 706 bp, Macaca Fascicularis
gaggcaggagaatcacttgaacccgagaggccaaaggctgcagtgagcccaatattgcgccactgaactccagcctgggtgatagagtgagactctgtctcaaaaaaaaaaagaaaaagaaaaaattcctgagttttaacttggtgactgttgactccctcctaacagcgaggcggtggtgaaccgagtgtttgacaagctgtcccccctgcaccagcgcatctactgtgcactctccggttcagctgccgatgcccaagccgtggccgacatggctgcctaccagctggagctccatgggatagaactggaggaacctccacttgttctggctgctgcaaatgtggtgagaaatatcacctacaaatatcgagaggacttgtctgcacatctcatggtagctggctgggaccaacatgaagggggtcaggtatatggaaccctgggaggaatgctgactcgacaaccttttgccatcggtggctccggcagcacctatatctatggttatgtggatgcagcatataagccaggcatgtctccagaggagtgcaggcgcttcaccacagacgctattgctctggccatgagccgggacggctcaagcgggggtgtcgtctacctggtcactattacggctgctggtgtggaccatcgagtcatcttgggcaatgagctgccaaaattctatgatgagtgaaccttc

SEQ ID NO: 13668 - DNA, 735 bp, Macaca Fascicularis
  misc_feature (1)...(735): n = A,T,C or G
atccagaatgaggagagtgtggtgctttttctggtcgcgtggactgtgacagagatcactcgttattccttctacacattcagccttcttgaccacttgccatacttcattaaatgggccagatataatttttttatcatcttatatcctgnnnnnnnnnnnggtgaacttcttacaatatatgctgccttgccgtatgtgaagaaaacaggaatgttttcaataagacttcctaacaaatacannnnnnnnnnnnnnnnctattattttcttcttataaccatggcctcatatatacctttgtttccacaactgtattttnnnnnnnnnnnnnnnnnnnnnnnnnnnnnnnnnnnnnnnnnnnntgtagaaaaggatgattaaannnnnnnnnnnnnnnnnnnnnnnnttccagaataaccaagattacctgagtccaagttttagtaacaagaataaacaannnnnnnnnnnnnnnnngattgtatggtttcttaaaatataactcgagatgtggcatttnnnnnnnnnnnnnttcttcttctgccagatctattttgtacaagaactgtgcaaatatcagtaactcttgggtaggtattgattattaagaaaataattaggtgtattatctggggggaaaaaaaacttttactaaatttttttgaaacatgctcaaagctttttaaatcaatatttagaaattaatgatttactattatacatgccagtgat

SEQ ID NO: 13669 - DNA, 658 bp, Macaca Fascicularis
  misc_feature (1)...(658): n = A,T,C or G
gcaannnnnnnnnnnnnnnnnnnnnnnnnngcagaaccntnnnnnnnnnnggccacattcccgccnncctgggcagattgggtagaaaggacattcttccaggaaagttggctgctgactgattgggaaagaaatcctggagagacacttcactgctccaaggcttttgggacacaaggaaatctcaacaagcagggatcaagagggtccaaagcnnnnnnnnnnnnnnnnnnnnnnnnnnnnnnnnnnntctacagaaggaagagatgctgctctagctctgggagccgaattccaagcccagggtttgactccttnnnnnnnnnnnnnnnnnnnnnnnnnnnnnnnnnnnnnnnnnnnnnnnnnnnnnnnnnnnnnnnctcagatcctataggtcagtgaaagggcaagtagtaagctacctgcctcccttcccctagacctctccctcataattccagagaagggtatttctgtctgtttaagcacggactaaggctgggacagtccatccttatcccttttctggcttgggccctgacacctaagtctttcccacggtttatgtgtgtgcctcattcctttcccaccaagaatctatcttagcacctcctgccagctgccctggtgctttctccaagggccatcagtgtcttgc

SEQ ID NO: 13670 - DNA, 597 bp, Macaca Fascicularis
  misc_feature (1)...(597): n = A,T,C or G
agtggagcatatgattttatggtaaaggtgtgggatccagagactgaaacctgtatacacacgttgcaggggcatactaatagagtctattcattacagtttgatggtatccatgtggtgagtggatctctagatacatnnnnnnnnnnnnnnnnnntggagacagggaattgcattcacacgttaacagggcaccagtcgttaacaagtggaatggaactcaaagacaatattcttgtctctgggaatgcagattctacagttaaaatttgggttatcaaaacaggacagtgtttacaaacattgcaaggtcccaacaagcatcagagtgctgtgacctgtttacagttcaacaagaactttgtaattgccagctcagatgatggaactgtaaaactatgggacttgaaaacgggtgaatttattcgaaacctagtcacattggagagtggggggagtgggggagtcgtgtggcggatcagagcctcaaacacaaagctggtgtgtgcagttgggagtnnnnnnnnnnnnnnnnnnnnnnnnnnnnnnnnnnnnnnctttgatgtggacatgaagtgaagagcagaaaagatgaat

SEQ ID NO: 13671 - DNA, 667 bp, Macaca Fascicularis
  misc_feature (1)...(667): n = A,T,C or G
ctgcccctgnnncactgcacggcagnnnnntgggaggccacacctccactcccctcgccacgcaccccctgcctcccacccaggtccacctgccacatggtgacccccttgagtacagaagtgttagtggggagagtattttattcaagtcacagcagnantggaaagaaaacctctcctgctttacccctcttgtgtttcagaaacagattctgttcttttaaagccttttcggtgtctagtcnnnnnnnnnnnnnnnnnnnnnnnnnnnnnnnnnnnnnnnnnacgtgtgtgtcttgctggagaggacgtattcgctgtccccgtgctgctggacgtgccgcctcacagcatcacgggtcccagccccagcccagtggaggtgggcgtggatgcattcccctcacgcttccctccgggtggcttgcnnnnnnnnnnnnnnnnacctccagggtgcggaatcaaacaggaagcgtgcagagactcggtagcttttcctctgatgtgtaagttatttggaacgtatctgtgcgggcacgtgtgcctccgtctcatggcgcagctgcgcgcccttgtgtgaccctccccataaaggcactttacagctttatgtctcatccactgtcaatttttttaannnnnnnnngtaaatggaattttaaaagca

SEQ ID NO: 13672 - DNA, 1317 bp, Macaca Fascicularis
  misc_feature (1)...(1317): n = A,T,C or G
atnnnnnnnnnnnnnnnagaagtggaaaacaaatgnnnnattaacatcatttctttgtcctgggattgtctttgctgacttctttataatgaatctgatcctctggggagaaggatcttcagcggctattccttttgggacattggttgccatattggccctttggttctgcatatctgtgcctctgacgtttattggtgcatactttggttttaagaaaaatgccattgaacacccagttcgaaccaatcagattccacgtcagattcctgaacagtcgttctacacaaagccctnnnnnnnnnnnnnnntgggagggattttgccctttggctgcatctttatacagcttttcttcattctgaatagtatttggtcacaccagatgtattacatgtttggcttcctatttctggtgtttatcattttggttattacctgttctgaagcaactatacttctttgctatttccacctatgtgcagaggattatcattggcaatggcgttcattccttaccagcggctttactgcagtttatttcttaatatatgcaatacattacttcttttcaaaactgcagatcacaggaacagcaagcacaattctgtactttggttataccatgataatggttttgatcttctttctttttacaggaacaattggcttctttgcatgcttttggtttgttaccaaaatatacagtgtggtgaaggttgactgaagaagtccagtgtgtccagttaaaacagaaataaattaaactcttcatcaacaaagacctgtttttgtnnnnnnnnnnnnnnnnnnnngaattattggcctagtaatccttcagaaacaccgtaattctaaatacacctcttcccacatacctttcccccatgannnnnnnnnnnnnnnctataaagcatttgtattgtgatttgattaagtatatattcggtnnnnnnnnnnnnnnnnnaaatttaaatattatgtgcatttgtaaatacagtagctataaaattttccatacnnnnnnnnnnnnnnnnnnnnnnnnnnnnnnaaataatactgatgaaaggcaggacacaggattgtaaataggattttctaggctcggtaggtggaaagaattatttttctttgaaggaaatgactttttatcatggtaattttgaaggatgattcctgtgatgtgtttaccaggggagtgtggcttttaaagaaaatcttgtattggttgtaactgttcatatcttcttacctttctgtgttgacttcattattcccatggtattggccttttaaactatgtgcctctgagtcttt

SEQ ID NO: 13673 - DNA, 1033 bp, Macaca Fascicularis
  misc_feature (1)...(1033): n = A,T,C or G
tactttactactgtgccttgcttgtgtttgtnnggnnnnnnnctcaaagcatggctaagggttttcagtagaaacgggattctatggaaggaggtgctgaaaaagaaannnnnnnnnnnnnnaatctattgaaggaggtgcttaaaaagaaaagaaaagaaaaaggaacatagatggaggaagtcttggaatttaggaaagagcagatccaaaagaactaagagannnnnnnnnnnnnnncaaacacagcagttgtgcagcagtcctaggcggctccaaaaagatggaaggagcagggagaagagatcaagcatttggaggtgctacttagcttctttggaatatttgaagattatttaatgacagagtttcatccatatgggagaatagtctccagatgactacaatttctagttttgtaggagcaataataaaaacacttcctattcctctgatctcatacattctctcctnnnnnnnnnnnnnnnnnnnnnnnnnnnnnnnnnncctttggctacgtggctggccttgttatttcaccactctggatatactggaatagaaagcaacttacgtacaagaacaattaactggagcaaagggagatacttctttgtgcagattctgtaagggctgtgcagaaatgtgtatggtcaaagccaagcagttccatttacagcactgttttttatgtagttacaacatgatgtgattgtagctttttaaactatgaaacccctgagagattgtaccttctagttgaaataaagtatttataatagattgtggcttcagatgctgcttactgcttcttaaacctttaaggaacattcttaataacctttatagaattctgaggacaggttttgttttctttcaagttttgaactgcttcattacctataaaaggtctgggtatagctgtagcatttcatttgctttctgagagaaatggacaatttccttggccactgaagatgtttctcacgtaattaaacaacagtttatannnctttgatcctattcttttttt

SEQ ID NO: 13674 - DNA, 796 bp, Macaca Fascicularis
  misc_feature (1)...(796): n = A,T,C or G
gatcagaaacannnnnnnnnnanaangtgcaatgctgtggacacagtccagaaagtannnnagaaaatgttggaatgtatgcacgggagcttcaggaagcaaccggnnnnnnnnnntcggctgctttattctgttcagaggcctcttnnnnnnnnnnnnnnnnnnnttcagtcttggcacacggacacccctgtgcaccggggtgtactttctactctgatcgctggacctgtggttgagataagtcaccagctacggaaggtttctgacacagaagagcttactcctccagagcatctttctgatcttccaccattttcaaggtcatttttggatgaattaaaggcgtgtgtgnnnnnnnnnnnnnnnnnnnnnnntgtgtgcctcacggctgctgtgcatattatcctggttattaatgcagatttctctatgaatcatcatcaagaactctgggagaacttttgaattcataaccaagccaacatctccagacatgtaaaatagggaaaagggattccaaatgaaattcctgtgtattttcctattgtttttaatgttaataacccatataatagcaaaagggtgggattttttttttgtgggagtgtgggaaggtgaaggttatggagtagagaactcaaaacttcaatttttgctagtgcctgcgtaaataatatatttaatataaaggactccaggtatgaatgatgtggaaatccatgattcgaagaaaaaacacttttctagcaaacctggttgtttttaaaatgacttttatatatgtaatattgct

SEQ ID NO: 13675 - DNA, 748 bp, Macaca Fascicularis
  misc_feature (1)...(748): n = A,T,C or G
ggagacctgggagctgngggctcattggaagaggacgatctttaactttttgtgtttgtgtatgtctgtgtatgtaagtttgtcttgtggcattaagactattttgttctggaatgcaccactccttccccagggcttaagagattgggggcagacagggactttcctctgccggctgcgtggagaaggaagcggctaaaaggtttgggccggggagttccccattcgttctccggggagggagggactttacacccacccctcaccggaaagctagacccgcttcagggccaggagtggcgtttccgcacaggatttcctaagacgagagggatttagccagcagcacagacttggattccttctgtccctccccacctttctctcccaatgaagaaacgtttatatcctgtgattactctaggaaaggggcatattaaccgtcctttgcttccccgcaggggagaaaaagcttgaacttcacagaagagttcaagcttggaaataatggagtttatagagaaaagatatatttttaaaagctgtaggtcagaactactacacagtgcttttaaaaagtgtttaatgaaagtttacagacagaagcccgaagtggaaagaccttatggttttgtagatatggtgactccagtctttgttatataaaggttgggggagctgataaggtttttgtacaatattttctccttcgttgtattgatttttgtataaaaatgtaacttctacg

SEQ ID NO: 13676 - DNA, 744 bp, Macaca Fascicularis
  misc_feature (1)...(744): n = A,T,C or G
gcacaagcggactggactnnnnnnnnngaacatatttagnnnnnnnnnnnnnnnnnnnnnncattagtcaacttttttgaaaagccactggacatgaaatccaaacttgaaaatgccaagatcaatcagtacaatctcaaaacttctgaaatgagccaccaatcacagtctgaacttaagctgagtaacttgtagcaagatagcagctgctatgcacactggagtctgccataccaaagcacggaccagactgtttcttggggtcagccctaaaccgagatttcagtctactttacaaatggggcatctggataaacaacctgacaaactggccaggggaaccgacacaaccctcaagcatttctatgtattctctgagaattgtcagcgccctagggtatccattggttcacttggtgccaacttgcaatttttaccagattggctgaaatgggcacttctactgtgatgctagtgtgattttgctcagatgaacacgatgtatcatactaaccaagaagctaagagagccccatactttcatttttcacttggaatgataatgggagaggtcaggaatcaagttcacgttcaagatctaagggagtccactatctgtgcaattgtatttggctttttttttgcactgtttcaatgctggtaattgaaaccattttaatatatttggttgtattcactttatatgtccttccaaaaatgttgtgtacaaaccatgctttcaat

SEQ ID NO: 13677 - DNA, 683 bp, Macaca Fascicularis
  misc_feature (1)...(683): n = A,T,C or G
ggacttagtagaaatagagcagaagtgtgaggctgtggggaagttcaccaaggccatggatgacggcgtgaaggagctgctgacggtggggcaggagcactggaagcgctgcacggggccattgcccaaggaatatcagaagataggaaaggccttgcaaagtnnnnnnnnnnngttcagttctagcggctatcaaggtgaaacagatatcaatgatgcaataacagaagcaggaaagacttacgaagaaattgccagtctcgtggcagaacacccaaagaaagatatccacttcctgatggaatgtaatcacgagtataaaggttttcttggctgcttccccgacatcacaggcactcacaagggagccatagaaaaagtgaaagaaagtgacaaactcgttgcaacaagtaaaatcaccccacaagacaaacagaacacggtgaagagagtcagcaccatgtcttacgcactgcacgatgagaggaatcactttcacagtaatagaatatatgagtacnnnnnnnnnnnnnnnnnnnnnntggagcagcaagtgcagttttacgaaacgattgcagaaaagctgaggcaggccctcagccgttttccggtgatgtaggacagaacgggcctgaagagaatgctgagcgctttctcctgactnnnnnnnnnnnnnnnnaaac

SEQ ID NO: 13678 - DNA, 1173 bp, Macaca Fascicularis
  misc_feature (1)...(1173): n = A,T,C or G
tgaagctcatgcccaacggnnngcgcggactcatgctggcggtcatgctggccgcgctcatgtcctcgctggcctccatcttcaacagcagcagcacactcttcaccatggacatctacacgcgcctgcggcccagcgccggcgaccgcgagctgctgctggtgggacggctctgggtggtgttcatcgtggtagtgtcggtggcctggcttccnnnnnnnnnnnnnnnnnnnnnnnnnnnnnnnnnnnnnnnnnnnnnnnnnnntctccagctacctggcaccgcctgtgtccgccgtcttcgtgctggccctcttcgtgccgcgcnnnnnnnnnnnnnnnnncttctggggactcatcgggggcctcctgatgggcctggcacgcnnnnnnnnncgagtctctnngggctcgggcagctgtgtgcagccctcagcgtgcccagctttcctctgcggcgtgcactacctttacttcgccatcgtgctgttcctctgctccggcctcctcaccctcctggtctccctgtgcaccgcgcccatcccccgcaagcacctccaccgcctggtcttcagtctccggcacagcaaggaagaacgggaggacctggatgctgatgagcaggaaggctcctcactccctgtacagaatgggtgcccagagtagggcaccatgccggcaggtggggctgggggagctgagttcccgcaaactaactgcagggcctcaatttcctgcccagagcccnnnnnnnnnnnnnnnnnnnnnnnnnnnnnnnnnnnnntctggttttgtggaatgagcaggggtggggtgggcagtcctccgccccttacccaggaggaggcagtggcagcaaccaggcggctggaggacatcagtgaggacccgagctgggcccgtgtggtcaacctcaatgccctgctcatgatggcggtggctgtgttcctctggggcttctatgcctaagaccaactgtgttggataccataagccacagcctcacaggaagtggtggggaggagcctgcggtgctccccaggaaaggggaaggggcagtggggtgagaaggatctggctctccttctcccagccttcctctgcctggggcccactgcatctgnnnngcagtcacttcccatgagggcctggcccacccgnnnnagtgcccta

SEQ ID NO: 13679 - DNA, 747 bp, Macaca Fascicularis
  misc_feature (1)...(747): n = A,T,C or G
ccatgacccttaccggcattgcttccctggtcctgctgggcctgtgggattatctgaacgaggctgccatcaccacgttctccgtccttgggctcttctcctcccaagctgccgccatcctcagcaccctccttgctgctgaggtcatccccaccactgtccggggtcgcggcctgggcctgatcatggctctaggggcgcttggggggctgagcggcccggcccagcgcnnnnnnnnnnnnnnnnnnnnnnnnnnnnnnnnnnnnnnnnnnnnnnnnnnnnnnnnnnnnnnnnnnnnnnnnnnnnnnnnnnnnnnnnnnnnnaagcgcaagctccnnnnnnnnnnnnnnngggatggggagctgtgtcgccggccttccctgctgcggcagccaccccctacccgctgtgaccacgtcccgctgcttgccacccctaaccctgccctctgagcggcctctgagtaccctggcgggaggnnnnnnnnnnnnnnnnnnnnnnnnnnnnnnnnnnnnnactgagtagggaaggcagggctgcccagaaggctcagaggtaccttacgccagccatcgcggagagctcagagggccgtgccctccctgcctcctccctgctgctttgcgttcacttccttggccagagtcaggggacagggagagagctccacactgtaaccactgggtnnnnnnnnnnnnctgcacccaaagacatcctcccagacctcattatttcttgctctatcat

SEQ ID NO: 13680 - DNA, 705 bp, Macaca Fascicularis
  misc_feature (1)...(705): n = A,T,C or G
tcagaatttccttggtttactatagataattggctttaagttgtttttgttttttaatgtacaatgttctgataaatttgactgttaaattgctatagctggcaatcattttacatatgtannnnnnnnnnnnnnntgtatttcatgtgtaatttaccaattaagtgcattttatatttaggtcggattatgcatgtttgggtaaacgaaagctgtgtcttatttgatttattctttaaaaataaagttccctgaatatttgatgcttttcttctaaaagcagatgcttttacagttatcttagtgtaccttttgtagttagtagaaaatgattttaaagaatgtttagtattgtacttaaaagaaatggtctgcagaggcacagatgtaagatttataactggaaataggtagtaagaaaaatatatagaaannnnnnnnnnnnnnnnnnttttccacttaggatttcctaatctccttgtcatccaattcaagctcaagataaagcacaattctttgatctcnnnnnnnnnnnnnnnnnntatagatcatctaatattgagcacagcattactcagttactcnnnnnnnnnnnnnnnnnnnnnnnnnacaagttgtcaattattgtatctgtttatctgttgggttgtatataatgttgctcaaaataataagtggacttccaaaaatgagatttccattgta

SEQ ID NO: 13681 - DNA, 707 bp, Macaca Fascicularis
  misc_feature (1)...(707): n = A,T,C or G
tagcgctttgggggcctaggcagggggatcatttgagctcagttcgaggcaagcctgggcagcatggggagaccctgtctctgcaaaaaatgtaannnnnnnnnnnnnnnnnnnnnnnnnnnnnnnnnnnnnnnnnnnnnnnnnnnnnnnnnnnnnnnnnnnnnnnnnnnnnnnnnnnnnnnnnnnnnnnnnnnnnnnnnnnnnnnnnnnnnnnnnnnnnnnnnnnnnnnnncatgagaccctgtgtttaaacaaaacaaaacgaaaacaaaaacacaccaaagttaaaagcttctctctgatttaaaagaccagcccgtcgaacgtggtgacacgccgcctctactaaaaatatacacaaaaaaattggctnnnnnnnnnnnnnnnnnnnnnnnnnnnnnnnnnnnnnnnnnnnnnnnnnnnnnnnnnnnnnnnnnnnnnnnnnnnnnnnnnnnnnnnnnnnnnnnnnnnnnnnnnnnnnnnnnnnnnnnnnnnnnnnnnnnnnnnnnnnnnnnncaaaaaaaaaagatgtagaactaaataggcctgctcattagaatatcaagatggttccagcttgacttttctttcctaacttatatgtactagtggctttattttaaatagtttcctttaaaaataatcattttgactagctatattatgtgtttggtggtaagggataagttgtatctataccatgccaa

SEQ ID NO: 13682 - DNA, 774 bp, Macaca Fascicularis
  misc_feature (1)...(774): n = A,T,C or G
agaggggcgtgctgggcacgnnnnnnctggcnngggngagaacacacgagcacatattggnnnnnnnnngcccttccctataattcccgagacatgtgtcagccatgcctctgtggggagcctgcctcccagactggctattgtatgtaatgtatttatgtatgtatttgtaaatgtgatagaagtctgggggagttcggggacggctgcagatgttagccaggtctgttctccccattcaagccccttctctactgtagcaaaataagtgcccccaccccatctgccttcaggtcctcttcatagcctgcactgcccagtgggccactaggggcagtctctggaagggctggttcaaggctgtttgggtaaaggggtcaggtaccaatgaagaatcacgacttgtctcactcctttggaaattatttttctttcctgtgtaattactttatacccctgtttttgagaaactgttcattttgtcatctgtcatggtctccttccnnnnnnnnnnnnnnnnnnnnnnnnagcgatatccctccagccaacacaaatatgggcacctgtttgtcttcaaacagcggcttctagtctggtcatgtccctagagacttactagagactggctgaccatgaaaaaaaataataatctnnnnnnnnnnnnnnntcagctcccctttaaaaatcaaagatatctccaagcaacacannnnnnnnnnnnnnnnnnnnnnnnnnnnnnnnnnnnnnnntcaggggttttctcttgcccaaccc

SEQ ID NO: 13683 - DNA, 1307 bp, Macaca Fascicularis
  misc_feature (1)...(1307): n = A,T,C or G
actggactatgcannnnnnactgggtgacccagtgttttacttgacttnnnngatgacacctgtcgctgcactgctgcccagattgttnnnnagatcccttcaggggagcgttttccccacccaacttcagctagcacgtcagttggccaggaagtcccccaggagacacaggactcccaaagagacctttgctcagggatgcctcccgaaggactcaggaaccgagcactcagcagggaggaccgtctctgtgcccctgtcccagccttcttggcacacacagcagccagcctgctccccagaggccagcggggagcccagcacggtggacatgagcatggcattgagggagcacaccctgctggaaaggctgagtgcaccggcgccgaggtcctccacgccaggggatgctgtcccgggagggtgtcctgaggagtccaaggtgagagctgccagcaccagcagggtgaccccgctgtcttccctcttcagcctgcccaccttcagcttactcaactggatttcctcctggtcactggtcagcaggctggggagcgtcctacagttcgcccggacggagcagcttgccgatggacaaacgggacgtggacttgctgtccagccccactcaggccgatcaggacttcaggggccggaccacagactacttataggagcatcttcaaggcggtcgcagtaaaaccttgaaatggccttttttaatatatataaataaatgttaatattatttatgtttattatttgcacagaagaattctagggagatgtattcctaaatgtttcccaggctaatacaggaagcaagaggtaccaaaaaagaaagtttattttttaaagttctgagtagagtatattgaaaagaaaaagaagagctttaacatatataaaagtttaaagaagagtgacagttgaaaagtgtgtttagatttattttttcatctcatttttaagaacaagcagtgtgatttgttttcttnnnnnnnnnnnnnnnnnnnnnncctgggtacaaacgtgtgacnnnnnnnnnaatgcaggcaggtgcgaacacgggggagcagtgagcagagatggcagagggcacagcacgtggcccccagacgcagagtccccnnnnnnnnnnnnnnnnnnnnnnnnnnnnnnnnnnnnnnnnnnnnnnnnnnnnnnnnnnnnnnnnngacctcaggaaacattcatggttgcgtgcatcccagcattnnnnnnnnnnnnnnnnnnnnnnnnnnnnnacttaggtgttacagcctggtgtagtattttgcctgtaaat

SEQ ID NO: 13684 - DNA, 995 bp, Macaca Fascicularis
  misc_feature (1)...(995): n = A,T,C or G
tcccccctcctcctaacctgcatgggcatcaccaccatctcccgttcgccccgggcactctccccccacctaacctgcctgtnnnnnnnnnnnaccctctacatcctaacctgccggcgaccaccaccatgccatcttccttgcctctcgggccggggctcggannnnnnnnnnnnnnnnnnnnnnnnnnnnnnnnnnnnnnnnnnnnnnncctcctgcccagtgccagcccactgccagacccaggcacccccctgcctccagaccccacagccccgagcccaggcacggtcacccctgtgccacctccacagtgaggagccagccagacatctctccccctcaccccctctggagatcacggttctatgaacagcccttcccccaccactgggaccctccccagcctggagagttcatcactacgtaaggaaagctccttccgcccctccaaagccctcaccatgcctaacagaggcatgcatttttatatcagattattcaaggacttctgtttaaaagatgtttctaatgtctgggagagaggataggatgggaatgctgccctaaaggaagggctggtgaaaggtgtttatacaaggttctattaaccacttctaagggtacacctccctccaaactactgcattttctatggattaaaaaaaaaaaaaagtagattttaaaaagccacattggagctcccttctacccactaaaaaataaccaatttttacattttttgagggggagtgagttttaggaaaggggaattaaaattccagggagagctctggggatagaacagggtgcagattctgtctctccccaagcccctttttagtgactgagtcaaggccccagctcccctagcccaccctacactgagcttattcgagtttattcgtactaatgatccctcctgcggcttcctcattgttgctgttttaggccaccccagctcagccaatgattcccttccctctgaatgtcag

SEQ ID NO: 13685 - DNA, 598 bp, Macaca Fascicularis
  misc_feature (1)...(598): n = A,T,C or G
cagctgatcatccacatgaaagtgtggnnnnnnnnnnnnnnnnagttttaatattaagcactcaggagaatgtaggaaagatgtcctctgctacagttttgttcagtatctagtaagtttgatagatgtatnnnnnnnnnnnnnnnnnnnnnnnnnntgttgtacatttttgannnnnnnnnnnnnnnnnnnnnnnnnngaaaatattttttcacccatgacttattttgttattgatgattttttgtaaagttgtggtattaagggagagttatctacatggatgagtcttctgctatagcacagtttagaaaaggtgtttatgtcttaattgtttaatgagtacattctttcaacactatacatgaatgaatccaatnnnnnnnnnnnnnnntgctgtannnnnnnnnnnnnnnnntattaagtccaagtttgttaatgagatatttatttagtattgaaagtaatttgtgaatttgttttgtatttataaaattagtacctggaaaatgttccttaatgttttaaacctnntactgcgtttttattcctctaacttccttaatgatcaatcaaaaaaagtaacaccctccctttt

SEQ ID NO: 13686 - DNA, 722 bp, Macaca Fascicularis
  misc_feature (1)...(722): n = A,T,C or G
aagtgaggcccaaaagcccacgggcagggcagcggggacggaagtgggagcctggagcacctccacctcccctctaaggaaggcggacagcgttggggaacgcctgggcctcccagaagctgtggatgagagagagaatgggtcctccagggcaaggggaacgggaaataggtctaggtgcctgcagggctgagcaacctgggtaccctggtgggggtgcagggaaggccggggcagagaaaatgaaggtnnnnnnnnnnnnnnnnnnnnnnnnnnnnnnnnnnnnnnnggactccctgagaaacagggccggctccccaacttaggggacccactgccccttccccgagagctgtcggaaccagatacaatccggcagcccagagaaccctcctgggaggctgnnnnnnnnnnnnnnnnncactggtgtccctgtccccagagggaggagcagacaggagagagaggggaaggaagtatgaatcccagtccccaggaacctagctctttgaactccagagaattcctggatgcaggaaaacacccccagcaggccaatcctgaaaacagaggggagggagggaggaaggagtcccagcaggagcacagccctggcctcctgtcactcaagagctgattcacaggaggaggggaggttgggggcgggagacaaaaaccacacctctttttatataaggtttcatatttaatttggtcatgaa

SEQ ID NO: 13687 - DNA, 827 bp, Macaca Fascicularis
  misc_feature (1)...(827): n = A,T,C or G
ttatacacctcaccaagaaagcccaagaggtgacaaggaaataccaggaaatgacgggacaagtttggtagaccctggacactagggaaggtcccttcacatgataaaaggcagactctgatgaggcaggcggagcagttcaccagccaatgatgagagcagaaaggcctannnnnnnnnnnnnnnnnnnaggcggctcacttctcccggatgcttctctaactcctgagcaccaattcctggattccagtcactggctcacctttagaatgtctgttgctattgtttactgttcccctcgctcctcttaccagcttggggaggtgaccaggagggactagacagttactnnnnnnnnnnnnnnnnnnnnnnnnnnnnnnnnnnnnnnnnnnnnnnnnnnnnnnnnnnnnnnnnnnnnnnnnnnnnnncagtgtgtgtatttatgcaagttattnnnnnnnnnngagcctaaattccctcatctataaaatggggataatattatnnnnnnnnnnnnnnnnnnnnnnnnnnnnnnnnnnnnnnnnnnnnnnntggcatgtgagggctannnnnnnnnnnnnnnnnnnttttctccctctctctcctatgtatttgctctggtccttgctttttaccctccagagctaagaggtagcagacagagtctcttgggatgagtggttcaccctctttcacttggccaccactgatgaggccaacaacaagtgaactataaacgtatttattgcagaagtaattaaaaaaaccaaaaccttgtatttgtacatctttattatttctaaagcactttctccaacctaatttca

SEQ ID NO: 13688 - DNA, 746 bp, Macaca Fascicularis
  misc_feature (1)...(746): n = A,T,C or G
tctagtagcaannnttgtatgcanctcatattcgaatacagacttaaaatatgtccaatttttaaagaagtttagattatgttttccatggaaggannnnnnnnnnngttcatggactgattttctttaagaggattattatattttacaatttcaattctagattacaattttgtatatgctgcatgccaaaaaaaaaaggagagagaaaactaccttttctggtgtagaggggaagaaaaactaatattctcccttactagtagagttcaaaagaagttttcactgagagccttttcagtaaaagttaaacaagtttgttttttgagcatttgtcagttattctgtttcagaagagtccaaattcaagcacgatgtattttgaaggctttgcaaactcctaaacccctgatgagtcctctcattctggaagtgggaatttgagtagatactggtttgtcccgtagtatggtagatgatggggaggtcttttccaatcaggcattcggaacacaggccagtatgttctcagccagtaacaatcatcctgaggacgaaggactctccgtttgatgcagacacaattgtaatggagatgtaaacttcttagcaatcagatnnnnncattgtttgctttttactttaaataggaaattgttttctaaaactaaaatacttgaattgtcagacaatataatctcagcttgttagttttgaatgctcccatcgaagaagtgtaacaatcc

SEQ ID NO: 13689 - DNA, 877 bp, Macaca Fascicularis
  misc_feature (1)...(877): n = A,T,C or G
agcttttgttnnnnnnnnnnnnnnnnagnaggccctgttactgaacagagggcagtggagggcaccccatggaaccacannnacannnnnnnnnnnnnnnnnnnnnncttcccagaagcaaccggtgggacttggcccttaccagccaggggtctactccattggctcttggtgcccacnannccccgttagaggaggcccagaggcctccagaggcaccatggaggcaaaatgggctgggtagacagcaggactggagcttcctcaccagggtgctgcctctggcctcgatctccccatctacacagtgnnnnnnnnnnnnnnnnnnnggacggccagtccagccccttcctggagtgaggcccccagccagcggggatgtggtggctgcttaactgttctgctttcttccctagttatcaaactgttacctagttatggtgtgcaggggaggggcagggacttaggaccaaaggtgggaggtaagctcctttttctacnnnggtaaatagccccagccttcttggggctatgctgattaagaaatgggatcactcaggaggatggcttaagcccaggagtttgaggctgcagtgagccatgatcgcaccattgcactccagcttgggagacagcaggaccctgtctctaaaaacaaagaaaaaagacaaggagatggaattaaagcccagaggtcctccctttctcaaagccaccactagttgtctgtgaccaaggaaaactaccctcagccccattgccttttgcctctggtcagtgggttttnnngggttnnnagttgtctcnnncacnnnnnncagctataggcagagcagttgggctggggtggggatgagctanngtagaacctggaagc

SEQ ID NO: 13690 - DNA, 673 bp, Macaca Fascicularis
  misc_feature (1)...(673): n = A,T,C or G
gggaggagacaggagttccctgggcttctggcacctgttnctaggtctaaccattagtacttactgttcagggatccaaaccaaggtctgagagacacagacaccccgaacgagcaccccaaagggcacaaagctgagtaacaaactgctgccttcaaacagaactagactcagttttcagttccatcctaaaactccttttaaccaagcttagcttctcaaaggcctaaccaagccttggcaccgccagatcctttctgtaggctaattcctcttgcccaacggcatatggagtgtccttattgctaaaaaggattctgtctccttcaaagaagttttatttttggtccagagtacttgttttcccgatgtgtccagctagccccgcagcagcttttcaaaatgcactatgcctgattgctgatcgtgttttaactttttcttttcctgtttttatttcggtattaagtcgttgcctttatttgtaaagctgttataaatatatattatataaatatattaaaaaaggaaaatgtttcagatgtttatttgtataattacttgattcacacagtgagaaaaaaatgaatgtattcctgtttttgaagagaagaataattttttttttctctagggagaggtacagtgtttatattttggagccttcctgaag

SEQ ID NO: 13691 - DNA, 737 bp, Macaca Fascicularis
  misc_feature (1)...(737): n = A,T,C or G
gagagtcttaaagaaagaaggnnngtggagggaaccctgacctaggcttcaggaggcccgcatcctacacaggctctgccacaggggttagaccccaggtctgacacttggccttcctgggcctcaagttccctcccctatcaaatgaggggatggacagcatgacctctgggtttctctccaactcatcagttctaaagaggatatcagattctattgtgacttcatagtgagaatttatgatagattattttttagctattttttccatgtgtgaaccttgagtgatactaatcatgtaaagtaagagttctcttatgtattattttcagaaaagggatggtggtgactcctttatattcatactgcactttgtttttccaaggaaatcagtgtcttttacatcgttatgatgaaccccacatgggccagtgatggtatgctgaagttcagccactgaacacacaggaatgtctgtggggtgactctactgtgctttatcttttaacattaagtgcctttggttcagaggggcagtcataagctctgtttgcccctctccccaaagccttcagtgaatgtgaaatgtgtgctaaatggggaaacctgtttaattctaggtatagggtaaaaggaatgaggaccttgaattagctatattcagggtatccggtattttgtaatagggaataggaaaccttgttggctatggaatatcagatgctttgaatcataca

SEQ ID NO: 13692 - DNA, 356 bp, Macaca Fascicularis
agatcgtggttcacacgaagatgatgattgaccccaatgccaagacgcgccgtgggggcggcaagcacctcgggatccggcgcggggagatcctggaggtgatcgagttcactagcaatgaggagatgctgtgccggaaccccaagggcaaatatggctacgtgcccagaatagcgctcctgcccctggagacggaggtgtacgatgacgtcgacttctgcgaccccctggaaaaccagccacttcccctgggacggtaaggccggtaggcatggggcaaggacagccggccagcccagcgcccgctcacccaggagccctggaacccggcgcgggagtcacagagctgcccgggc

SEQ ID NO: 13693 - DNA, 691 bp, Macaca Fascicularis
  misc_feature (1)...(691): n = A,T,C or G
ctgcaagctacttggagacttgnnnagtcctacccacccctccaggtcctgagaagggcctttccctttgctgtttgcctgctatataaggcaggatcctgtggctccgctggctcagtgtaggctgcaggaggaccnnnnnnnnnnnnnnnnnnnnnaggggggtttgggaggcttgtgcgaggtctcaggcctgtctggggagctggtgcctcttcctgcctgtatctttctnnnnnnnnnnnnnnnnnnnnnnnnagagactggagacgccgaggggagagtctaaaagggctagagcatttttaaaaatagacacagggtcttgggactggggtttcagattgagttgcaagcagggagaaaacctgaaggtcggtgcccctatggggctgaccagtagagaatttcctttactgtatttttgtatctggtcttccctctctggcttctaggacatctgtgccaggtgaggtgcctggggtcctgttacaagtcaggagccctgtagagagacccctccttttgtacaagtacacgaaagcggcaaccagcagatttttgtaaaattttatattagtttttaatgtcagtggcgactcggttcctggggctgcagccagcctgggacttttgtaagaatttttgggtgactcacttagatatcgtttccttcttaccccctcttcct

SEQ ID NO: 13694 - DNA, 774 bp, Macaca Fascicularis
  misc_feature (1)...(774): n = A,T,C or G
agaggggtatggccccagaacacctcctccccgggnnnnnnnnnnnnnnnggaggctgaggaaggcatgaagagtgggctccacctgctggcagactgagaaaagaatttccagaattggatcctattttacagatcggaaaactatggttcaaaaagaggggaaagggcttgagggaatctcctgattctccttatatgacctcaaactgaccatactaaatagtgtannnnnnnnnnnnnnnnnnnnnnnnnncagggtctcccgtccccnnnnnnnnnnnnnnntacagtcagtgtggagtagagggtttcctccacccgggnntgactcgggggccanctgggtcccattctggcctcaagatcccaaacaaggtgttcgttcaactcttggatttggagccaggccgacccggagcctctgtctggttagtgtcataacctctgtatgctcccgtttccccatttgtccagtganctcagcccccatccacctaacagggtggccatagggattactgagggttaagaccttagagctggcctagcacgatggataaggcctgtaatcccagcactttgggaggccgaggcgggcggatcacaaggtcaggagatcgagaccacagtgaaaccccgtctctactaaaannnnnnnnnnnnnnnnnnnnnnnnnnnnnnnnnnnnnnnnnnnnnnnnnnnnnnnnnnnnnnnnnnnnnnnnnnnnnnnnnnnnnnnnnnnnnnnnnnnnnnnnnnnnnnnnnnnccgcgc

SEQ ID NO: 13695 - DNA, 531 bp, Macaca Fascicularis
  misc_feature (1)...(531): n = A,T,C or G
acgctgcccaggagcacgaggaggtggagctgagagggagtggcttacaaccggacctgctagagggcaggaaaggggcgcagatagtgaagcgggccagcctgaaaagggggaaacagtgaccccgagccgctctctttggagtagcctctcgggaggatcacacctcgacacccaacccctgaaccccacacactctgccatgcacacaggaggagagctggacctgagggccaccgcagcggtgcacacgtnnnnnnnnnnnnnnnnnnnnnnnnnnnnnagggactcccactagtcccctctttgcatgannnnnnnnnngtagacgcatgacctccaggcttcaatcctgcctcttgcaatgacagctgatctgtcggaaccaggacacaaaaggagcaagaagcggggagagagagggatagaaaacaggcgcgggagagcgtgtgaacgcaaaagtgaatgagggctttttgtggctggggatgggttttggtttttggggtttttttttttagttgttttgac

SEQ ID NO: 13696 - DNA, 727 bp, Macaca Fascicularis
  misc_feature (1)...(727): n = A,T,C or G
ataaaaataatatatttcctctatcttacagacagtganctgacacaaacacaactgaagcaaacagaggtcctagtgacagctgaaaaattatcttcaaatttacagcaccatttcagcttgtcatctgtttattcacattactttcctgacactggaattccannnnnnnnnnnnnnncattcccgaagtgccataactgtggattatattttctactctgcagaaaaggaagatgttgctgggcacccaggagctgaagttgctttggttggtggcttgaaacttctagctagactgtcacttcttacagaacaagacttatggactgttaatggacttccaaatgaaaataactcttcannnnnnnnnnnnnnnnnnnnnnnnnnnagacttgagctctgacttctttgatcacatattaattttctctccaatttgtattgtttttcaaagaatgtaaagttcttaagtgtatgcatgttgtttatttttgcactgtggagtttnnnnnnnnnnnnnnnnnnnnnnnnnnnnnctctgtatcagaagaaacaactttataacaatttttttaataatgaaaaatatttttctgacaagtgagatctaaatactctttattgtaaaagagatgtaaaggttttgtattctaaatcctagtaaaattgacagtgatttttaaatataatgcatcttcctttgtctgctttaaaaaaattcattc

SEQ ID NO: 13697 - DNA, 756 bp, Macaca Fascicularis
  misc_feature (1)...(756): n = A,T,C or G
ggctgccaggcagnnngaagactgctgtgaaaatgggctgcttttgcaagagaagttcttttactccccattcctgccctctggaggccccccttctccctgccgtgttagaggtgtcaaccctggggtaagtggctggctggactcacccctgctgcctgttcgcctgtgcctgtgacctggaggtctgagctcccgccacacacagtttactggtgcctttccctgaagtcaccacccaggggctggctgtcatcagcccgttgttgtcccagcagggtaccaagggaatgagaaaacagaatgtgtttgaattatacacagaaatgttccctgcagcaggtcataaactctgtgaactaatgaagctgaaaaacagcgctggagtgcgtttcccctcaccctttcctcccagctcagcaaggggtnnnnnnnnnnnnnnnnnnnnnngttgattcaggctcaaccaggctctggcaagaaaaccttatcagattttattttcatgaatgggtgccagtcttcctgcctgccatgtccagctggcgtcaataagcatctttggggatgtcctgcctcctccaggaccagccatnnnnnnnnnnnnnnnnnnnnnnnnnnactgcaggccaagcaaagggctctgggctggaatagccctccctgagtgccttggactccgccactatctgccatgtgactttgggcaaattgttgaccacctctgagccttgaaaaagtagcaggttacttgta

SEQ ID NO: 13698 - DNA, 734 bp, Macaca Fascicularis
  misc_feature (1)...(734): n = A,T,C or G
gcagagcatggggtgnnntccggnnnnnggcgacctgcatttgttacccttggatctnnnnnnnnnnnnnnnnnnnnnnnnncaggccacaaagaactacaacaagtgtttcctgaatgtnnnnnnnnnnnnnnnnnnnnnnnnnnnnnnnnnnnnnnnnnnnnnnnnnnnggcgtggggggtggagcaaggcctgttggatcccagtgatatctctgagtctctgcttgataagtgcctctataccaaccgctctcctcaccctgacatcttgatacggacttctggagaagnnnnnnnnnnnnnnnnnnnnnnnnnnnnnncctctcactcctgcctggtgttccaacctgttctgtggccagagtatacattttggaacctcttcgaggccatcctgcagnnnnnnnnnnnnnnnnnngtgcttcagcagaaggcccgagacatgtatgcagaggagcggaagaggcagcagctggagagggaccnnnnnnnagtgacagagcagctgctgcgagaggggctccaagccagtggggacgcccnnnnnnnnnnnnnnnnnnnnnnnnnnntctcnnnnnnnnnnnnnnnnnnnnnnnnnnnnnnnnngcaggccttggaactcaagcgagctgactggctggcccgtctgggcactgcatcagcctgagtggggctggtcacctgccactttgccctgccctctgcctccagggccccactccccttccttt

SEQ ID NO: 13699 - DNA, 741 bp, Macaca Fascicularis
  misc_feature (1)...(741): n = A,T,C or G
aagcaggnatttttgtccccatttaaaaaatgaagaaattaatgctcagtagtaggatggtacnnngaaaggatctaggaagtggtagaatttctggtctgtacttttacaaatggagcccttgggaggtcggttaggtaagaagctttttacttaacattgtcttatttccagtctaattttacactgtagcagaaccagatggctgagaatattctggaactatggatcttgaccccaaggatatattattttattccaagaaagatcaggtaggcgaaaagatgacaggatgcagagtcaatccataaactaagtatttataactgtttgaattatagagagtctaaaaatatgtgtcannnnnnnnnnnnnnnnnnnnnnnnnnnctgtgttataaatatggcaagaaatatcagtaccagtatcaatagacttcttgaggctactataagttttgagaaataaggttcaaaaagtaagaatgctaacagttaagcttagactagagcttgcttgggtttcnnnnnnnnntacaaggtaaaaatgtgttaatgtttgtttttatttcagcttaggaaagctttgtnnnnnnnnnnnnnnnnatttaataacaagcaacacaaggtatatagaaataactttaattaaaaaacttacatagaagattataatatcagacatgacaaagatttgagtttatttgcctggacaacttgggtttgtctggcttttgttttc

SEQ ID NO: 13700 - DNA, 748 bp, Macaca Fascicularis
  misc_feature (1)...(748): n = A,T,C or G
gagaacaagaaacngannnnnactcaattgatagaccactatgggttagatgataaattgctgcactataacagaagtgaagaagaatttatagatgtttaattcctgatttttgctccagaatatctttgagaatgacaacttaattaaaagatatttaggcacttttttttttttttggnnnnnnnnnnnnnnnnnnnnnnnnnnnnnnnnnnnnnnnnnnnnnnnnnnnnnnnnnnnnnnnnnnnnnnnnnnnnnnnnnnnnnnnnnnnnnnnnnnnnnnnnnnnnnnnnnnnnnnnnnnnnnnnnnnnnnnnnnnnnnnnnnnnnnnnnnnnnnnnnnnnnnnnnnnnnnnnnnnnnnnnnnnnnnnnnnnnnnnnnnnnnnnncggcctcaggtgatccacccgcctaggcttcccaaaaccattagggctcagaggaatgtatcccgatgaacnnnnnnnnnnnnnnnnnnnnnnnnnnaaattataaactaacttctaaaaggaaaattagtattttggatagacttgccaaagaaaacttgacatttaaatcatgtttaaaaagtcatttgggcagttctggaaactagttttaannnnnnnnnnnnnnnnnnnnnnnnnnnnnattttaaatgttaaaaattgtccactctggtaaatgtctaaacctaaagtttaaaaatttctgcctcctaagtttatgcaccttgtttctatccatttaccacatatttccatctg

SEQ ID NO: 13701 - DNA, 723 bp, Macaca Fascicularis
  misc_feature (1)...(723): n = A,T,C or G
tctctccttattcggtttactatttattgttcggggtgttttttaattcctgtattgctcggcccggggactttcgccccctggccggctccgctgcgcggaggatggtgtggaaacggctgggcgctctggtggtgttccctctacaaannnnnnnnnnnnnnnnnnnnnnnnnnnnnnnnnnnnngctgcccgccaagctgcgggacctgtcgcgagnnnnnnnnntcatcacaggcggcgggagaggcatcgggcgtcatctcgcccgcgagttcgcagagcgcggcgccagaaagattgttctctggggccggactgagaaatgcctgaaggagacgacggatgatatccggcagatgggcactgagtgccattacttcatctgcgatgtgggcaaccgggaggaggtgtaccagacggccaaggctgtccgagagaatgtgggnnnnnnnnnnnnnnnnnnnaacaatgccgccgtggtccacggaannnnnnnnnnnnnnnnnnnnnacgatgccctcctcaagtcccaacacatcaacaccctgggccagttctggaccaccaaggccttcctgccgcgtatgctggagctgcagaacggccacatcgtgtgcctcaactccgtgctggcactgtctgccatccccgntnnnatcgactactgcacatccaaagcgtcagcctttgctnnatgganngctgnnnnnnnnnnnnnng

SEQ ID NO: 13702 - DNA, 733 bp, Macaca Fascicularis
  misc_feature (1)...(733): n = A,T,C or G
ttaaaatctcntaaagnnnnncttgttgctgttagaatagtgctatatatcagnnnnnnnnnnnnnnntttcnnnnnnnnnnnnnnnnnaggtttctactcagcaatacttagatgtctaaccatttaattgctacagagctttatagatacttagagaaaagacttaatcagttagtaaataaaattgcctatggcaggattctttcttgaattaatattaatccttaaattgatttttctgggattatacaaattcctttttatatcaaagtatattgtttaaaacagtagctatagccattaaccaaaggacagatgatatatatatatatatacacacacacatataagttcttttttagctgtacctacgtacttatatcagcaccatgtatgtaggtgtgatagtactttcaagcagcccctccacctggcctactctgttatttccacctgcttgggaagggccatttaacttccattatgccaaacttgggatgggattttcaaagcaggcaacactatttcannnnnnnnnnnnnnnnnnnnnnnnnnnnnnnnnnnnnnnnnnnnnnnnnnnnnnnnnnnnnngcccactcttgtttactgccttgtattctagttatttgtgtatttgtctcccnnnnnnnnnnnnnnnnnnnnnnnnnnnnnnnnnnnnnnnnnnnnnnnnnnnnnnctttcatgcacctagcatagtgctttgcacatag

SEQ ID NO: 13703 - DNA, 752 bp, Macaca Fascicularis
  misc_feature (1)...(752): n = A,T,C or G
cgacagatacatggccatgtgcagccgagtatgccaaagacttaaaaacacgtgcannnnnnnnnnnncgtgtgtgggagtctggataatgaccctgaccacaaccatccctctgctactgctccataaagacccggataaagactccacccccgccacctgcctcaagatttctgacatcgtctatctaaaagctgtgaatgtgctaaacttcacacgactgacattttttttcttgattcctttgttcatcatgattgggtgctacttggtcattattcataatctccttcatggcaggacgtctaagctgaaacccaaagtcaaggagaagtccataaggatcatcatcacactgctggtgcaggtgctcgtctgctttatgcccttccacatctgttttgctttcctgatgctgggaacgggggagaacagttatagtccctggggagcctttaccaccttcctcatgaacctcagcacatgtnnnnnnnnnnnnnnnnnnnnnnnnntttcaaaacaatttcaggctcgagtcattagtgtcatgctataccgtaattaccttcgaagcatgcgcagaaaaagtttccgatctggtagtttannnnnnnnnagcaatataaacannnnnnnnnnnnnnnnnnnnnnnnnnnnnnnnnnnnnnnnnnnnnnnnnnnnnnnnnnnnnnnnnnnnnnnnnnnnnnnnnnnnnnnnnnaaaatactatcaagtcccttttctctgaaaaaa

SEQ ID NO: 13704 - DNA, 699 bp, Macaca Fascicularis
  misc_feature (1)...(699): n = A,T,C or G
cccacatgccnnatctggtggnnnnnccggtgtcctcacaggacacttgacacaggacaaggcatggccccgagacactggcaggcttgtgagcctcctcccaccccctgtgcccccatccttgcctggctcctggtggctcagggcaaggagcagccctgggcgcctgtgtcagtcctgtttcctctgcccttatctcaaagtctgtggctgtttccccttcactgacagctagaccggtaagcccacccttcccacagggaatgggctgttcccacctgggtcctgctgtggccacggtgggcagccaaaaagatcaggggtggagggggcttccaggctgcactcctgccgccgtgggccccgttctagaggtgcccttggcaggaccgtgcaggcagctcccctctgcagggcactatccggtcctgtgccccagctgcgaaaggagagtgggggccataccccgcagtcagtgttggggggctcctgcctacagggagagggatggtggggaaggggtggagctgggggcagggcagcgcagggaatatttttgtaactgctgtggttggagcgaatgaaagtggggtgactttaagttattgttgccaaagagatgtaaagtttattgttgctttgcagagggatttgttttgtgttttgtttgaggctnnnnnnnnnnnnnnnnnnttttct

SEQ ID NO: 13705 - DNA, 632 bp, Macaca Fascicularis
  misc_feature (1)...(632): n = A,T,C or G
gccacatgcactttggggaggcgcnnnncggctgtgccccacgcttcaaagacttccagaggatgtacagggacgcccaggagaggggactgaacccgtgcgaggttggcatggactgaccctgggggtccttggggcgctgccctccctctcctgatgagtcacatgcttcggtgggtgctgcggtcccggtggggccgtgcagtgggggccacccgctggggaccgcatgcctggggcccaggcctgaccctggtgcccaagctgtggacgttctcaccacactcaaccccatgagctcccagccaaggacgccctggccaattggaaatgctgtaaaatgcaaactaagttattatatttttttggtaaaaaagaaatgtccataggaaaccaactcctgtgtcttaaaatgccttggtgtgccatttgatactgttctctaaagacgttttgagtcacggcgtctggtctggtgttgggggaagcgctggccattgggcacagtggacgtgtgaaaaggtgccattcagagttgttcgcacgacagaagtttatggagccaaataatatgttttttattttcattttatttttaaagaatgagcttggccagctgtagtccttttcgg

SEQ ID NO: 13706 - DNA, 577 bp, Macaca Fascicularis
  misc_feature (1)...(577): n = A,T,C or G
tggactagccatgctggttgnctnannnnngtnatgctacaaatcccgtagtgaatcnnnnnnnnnnnnnnnnnnnnnnnngatcccacagcaatccatcaatgaagccatacggacatcgaccctcccccgcaacagtggggcaggagccagcagcggcggcagtggagagaatggtcgggtggtcagccatgacttccccaagtccatnnnnnnnnnnnnnnnnnnnnnnnnnnnnnnnnnnnnnnnnnnnnnnnncacaggattgtaactggagcagatggannnnnnnnnnnnngcaggctcgggctccccagccccatcccaaacccttcagtgccaaaaacaacaacaaaatgaaacgaaaccaccaccaaccactgcgaccacaagaaggatgattcaacaggttttcctgaagaattgaaaaaccatttttctgtccctttcctttttttgatgttctttcacccttttctgtttgctaagtgaggatgaaaaaataacactgtactgcaataaggggagagtaaccctgtctaatgaatcctgtgtctctgacagtagagtcactgga

SEQ ID NO: 13707 - DNA, 949 bp, Macaca Fascicularis
  misc_feature (1)...(949): n = A,T,C or G
ttttgtacagttannnannnatgaaaggtgntgaaaggaccaaaaatagaaacacagtcttcctgaatgaatgacaatcaaaattccgctgcccaaagtaatccaacaattaaatggatttctaggaaaagctaccttaagaaaggctccttaccactggagtttacaaagtgctttcacattgttacttgttgtattatacattcatgcatttctaggctagagaaccttctagatttgatgtttataactattctgttgtgactatgagaacatttctgtctctggaagtcatctctctgtattgatctttatgctatgttactatctgtggttacagtggagacattgacattattactggagtcaagcccttatgagtcaaaagcatctatgtatagtaaaacattcctcaaatgttttttcatgcaaatacacatttctttctccaaatatcatgtagcacatcagtatatagggaaacattcttatgcatcatttggtttgttttataaccaattcatgaaatgtaattcataaaatgtactatgaaaaaattatacactatgggatactggcaaaagtgcacatatatcataaccaaattagtagcactggtcttaatttgatgtttttcaactgttttttattgagatgttttgaagcaattaggatatgtgtgtttactgtactttgtgtttttatccatttgtataaatgatagcaatatcttggacacatttgaaatataaaacgtttttgtctaccaaagaaaaatgttgaaaaataagcaaatgtatatctggcaatcaccttcacttttcataattctgtctcttagaaaaatacgtaatctaataaatttcttttttgatgcctatatacgtataaaatttgggtatactcaagactagtttaaagaatcaaagtcatttttttctctaataaa

SEQ ID NO: 13708 - DNA, 752 bp, Macaca Fascicularis
  misc_feature (1)...(752): n = A,T,C or G
gccagcgcagcatggccgccaccgannncgtgcaggagannnnnnnnnnnnnnnnnnnnnnnctgctcaagctnnnnnnnnnnnnnnnggctgagcccgctcaagctgtgagacttctcagtcatcgtccttttcacagcctgagtcccgtgctctcacccggccctccagccactgttttgctgttgctgctgatagcctgnnnnnnnnnnnnnnntcannnnnnnnnncctgagcagagaggcaggaaggtccaagtgcagccgacaccaccatgacggacaggggatggctgaggagaagctggagaggagatgaccaacgctatgacacnnnnnnnnnnnnnnnnnnnnnnnncctcacccctcaagaccaggttcccctggccccaggtctggcccggcccaggtacctggacactgacaacttgagccctaccaaggaaaccagggctggtataggtgcaaacctctcatctgccagtggannnnnnnnnnnnnnnnnnnnnnnnnnnnnnnnnnnnnnnnnnnnnnnnnngcttcttcgcctacctgcactttttaacaaaacaaggaagtaggggtccccataccttgatggagaacagcccccacctgtgggcaattggccctnnnnnnnnnnnnnnnnnnnnnnnnnnnnnnnnnnnnnnnnnnnnnnnnnnnngtgcaatagcttctgcatccgagctcctgnnnnnnnnnnnnnnnnnnngtattctagtccagtattgc

SEQ ID NO: 13709 - DNA, 720 bp, Macaca Fascicularis
  misc_feature (1)...(720): n = A,T,C or G
ttgtattnntagagaatctgttactgatcatgtaaacttgatcacacagctggagaagcctctgcagaactttaccttgtgttttcgagcctacactgatctctcccgtccctacagcctcttctcctacaatacccagggaaaggataatgagctagtagtttataaagaaagagttggagattatagtctctacattggaagacaaaaagttacattcaaagttattgaaaagttcccggcnnnnnnnnnnnnnnnnnnnnnnnnnnnnnnnnnnnnnnnnnnnnnnnnattttggatcaatgggacacctttggtgaaaaagggtctgcgacagggttactctgtggaagctcatcccaagattgtcctggggcaggagcaggattcctatggcggcaagtttgataagagccagtcctttgtgggagagattggggatttgtacatgtggaactctgtactgcccccagaagagatcctgtctgcctatcagggtaccccagtccctgccaatatcctggactggcgggctctgaactatgaaatcaaaggatatgtcatcatcaaacccctggtgtgggtctgaggtcttgactcaacaagatcacttgaaaatgaaatgaccgtctaagagatctgctcaaagcaactggatactagatcttatacctgcagctctttcttctttgaattcccctatctgtatgtctgccgaat

SEQ ID NO: 13710 - DNA, 679 bp, Macaca Fascicularis
  misc_feature (1)...(679): n = A,T,C or G
acatcactcaatgaaaaggataattccncgaannnnnnnnnnnnnnnnnnnnnnnnnnnnnngaggatnnnnccagagctctgtgtacacgcagatgtgcatgttaaagannnnnnnnnnnnnnnnnnnggactgattgggtatagaaggaagacagactcctgtctttactcttnnnnnnnnnnnnnnnnaatcaccctattatgatgggcatagtagggagccatctnctaggaagaaacgtgggagatgtgaattccaggagtcccctggacagggcaagtcatgttagtgtgggtcacnnnnnnnnnnnnnnnnaagcaaatgcaaaatagagnnnnnnnnnnnnnnnnnnagaatgggagatttaggccctgcaaaggcagagcattctttagtacctcacaannnnnnnnnnnnnnnnnnnnnnnntagggggtgtatagagaatggttagtacaaagagacagaacaatgtctggtttacttggcctacacagaatatacactgctggnnnnnnnnnnnnnnnnnnnnnnnnnnacaggagatgtgggtagttagactccaaagtttatattgagctcagtgcctgggaccgttccagctgtactgcagccaggggggatgccagcttcattcctcagagtaaaccaaccctgggagctgtgtgccagttcc

SEQ ID NO: 13711 - DNA, 703 bp, Macaca Fascicularis
taatgcagccccaggggagggaggagaccccaggcagggaggctaggggcagctctcttctctccccaggacccaggctgggagtcacggggcctgccagcttgagtgtagagggagagggactctacccctctcagccccaccagcccccctctgcccaaccacaattttcccttcatccgccttcctctccctctgctgtttacactccccaaatgcgcacaggctgttatcatgggtcctgagtcatcccacacacagcctgccccagcgtccctgcccccagctggccgcagggcccgccccatggagccccctgccgccctgggctaatgggagccagatggccgcctggtgactcagccaccgtgcctgtgggaacccaggcgtcccgccttcccatgcccccacacccagctcctgctcccccagcagacacacatacagaagggcctggccactgttgagggggcgcacaggccaagggtcagcaagatggggcctagggactcctcatgcctcttgagatggaatggtggtatcctgccgtggctgagcctgaaggaccctcagaactgcctcctggagcccacggttcctgacctctgagcctcagctatgtcctctgggtcaaccagaattagagccagacagggaaagtgagagctggacggaggcagacaagatgtcagagcaactataa

SEQ ID NO: 13712 - DNA, 767 bp, Macaca Fascicularis
  misc_feature (1)...(767): n = A,T,C or G
gagagagccctgtgnnnngcatgctactcttaactattctattcaagactgagtagaagtatttcagtcttgcagaggagaaaatgctcagagctnnnnnnnnnnnnnnnnnnnnnnnnnnnnnnnnnnnnnnnnnnnnnnnnnnnnnnnnnnnnnnnnnnnnnnnnnnnnnnnnnnnnnnnnnnnnnnnnnnnnnnnnnnnnnnnnnnnnnnnnnnnnnggtcaacacgccaagaccccgtctctatttttaaaaaagaaaaagaacagacttctgaatctcagctccactcatgattattacctcattatttcagctgtctgcacctatttccccacttgcacggcagggcagacaataaccgtagctcacacttactgagcacctgctgggtaccaggcaccattctcagtgtttccgttggatcaactgatgcgtccctcacctcagccctctgaagtgacagctgctattattttcattatacagatgaggaagctgaggccagaatggtgaagtcacttgcttaaggtcagacagcttaggaaggggcaaattgggggcttgaacccaggtggtcaggctctggagcccacaattgtcttacccagtatgcccctctctagtcatggtccccaagagaggcttggagactcacttagcaggtgaaagcaatggcagccttccttatttgattatgcacctaagaataaatggtatttgggcatgtattcccnnatatgtgtatatttatttataaagacat

SEQ ID NO: 13713 - DNA, 700 bp, Macaca Fascicularis
  misc_feature (1)...(700): n = A,T,C or G
tttgaccctgcttttgatgaattaccacattatgcnnngttaaaagaactcttaattcagatctttagtacaccacggtatcatcccaaaagccaaccattcgtggaccatgtgtttactttcaccattttggataataggatatggtttcggaactttcagatcatagaagaagatgctgctcttgtagaaataggacctcgttttgtcttaaatctcataaagattttccagggaagttttggaggaccaactttatatgaaaatcctcactaccagtcaccaaacatgcatcggcgtgtcataagatccatcacagctgcaaaatacagagagaaacagcaagtgaaagatgtgcaaaaactgagaaagaaagagccgaagactcttcttccacatgatcccactgcagatgnnnnnnnnnnnnnnnnngaggagaaaccaatagaaatacagtgggtaaaaccagagccaaaagttgatttgaaagcaagaaagaaacggatttacaaaaggcaaagaaaaatgaaacagaggatggacagtgggaaaaaaaaataagtcaatggaaacctgatttgtttttcagttactttatatttattttgtattcaatgtgtaaatacttttattatctgatactatcttatgtctaattagtgtagcatttagaagaaagaaaaattaagatcttaaaatc

SEQ ID NO: 13714 - DNA, 597 bp, Macaca Fascicularis
cctgtgccgccgcgctgggcgattcagggacaccttcacccaggagctacgccgcggcctccgtggccgttcggggccaccaccaggtagccagaggggccctggcgcaaacatttaagcctgggctgtgcggggccgaggcctttactttgccttccgggctctacactggcctcgacgtggaggggtcgttccgggcactgcgcgcggcttcgaaccccgactcggattgttggcctgcagacatcccacgcagaagagcctaggccagaccgcaggctccgctgaagtcctgtgattggacaagacaccgtgtggagaaagaccccgaagcctaacagagatgaagataggctgggtccagacaccgcacccgcggagagccacggaccgaagccagagagcctttcctctgcagatggaactgacactcttgacagatgctgctgaatctgcactggtgtagcaggacacttaattccagggacgatgtgaatgaaaagacaaccctacaactgccaaattcttttgattaaaaaaatgtatgagctggttaataggcatgagtgtgatacttctcaggcaagatatattgag

SEQ ID NO: 13715 - DNA, 753 bp, Macaca Fascicularis
  misc_feature (1)...(753): n = A,T,C or G
cacacgaccccccatgtttattaaagggggtgctggtggtgagccgtgtgtgcgtgtccctgctctgctgcccgcctggctgctctgtctgctgccccctccccccaggtgggtccctctgcttttcacccatccacgcctgagcttccccaacaggagcaggtttgaggagccaggcctcttggaggctcctcctgcttccttgggttctgcttccttccctaaggccccccttcacttcttagctggctcaggggcttatatgggatcctggaagttccttggggacttgcccagggtcccagggccacccacacttcatctgctccctcacaggccccatctccacgtcccggctgggtcccagaccccagcttcctgccctccaccaggggnnnnnnnnnnnnnnngtcctgggtggaggggcctttgtgaggctggacctggctcagggcaggtggaggagctgggcctcccacagggtgccccggcagtgccagcctggtggaggagggcagccttcaaacgtgcggggtccacagtcctcaggtctaggcagggctgccggttctccactcccccatccgcccccaggccccctgcctgtgcctgccttgcaccccctctgcttgggccatggtgtctctgcattgcctgccttttttgccttcacctcttttcttccccgccccctgcacattcggggtctcagcccccaggctgtgagctccttgggggcaggccctcaaaaaa

SEQ ID NO: 13716 - DNA, 686 bp, Macaca Fascicularis
  misc_feature (1)...(686): n = A,T,C or G
tatttcttcagcatggctcatatnctannnnnnnnnnnnnnnnnnnnnnnnnnnnnnnnnnnnnnnnnnnnnnnnnnnnnnnnnnnnnnnnnnnaagaaagccatcagtaaattgacaaccaggacagtaaagaagggtgacaaggaaactgannnnnnnnnnnnnnnnnnnnnagtctgcatnnnnnnnnnnnnnnnnnnnnnnnnnnnnnnnnnnnnnnnnnnnnnnnnnnnnnnntccacnnnnnnnncgtggatccctggcttagtgaacactgtacctnnnnnnnnnnnnnactnnnnnnnnnnnnnnnnnnnnnnnnnnnnnnnnnnnnnnnnnnnnnnnnnnncgtagcattcgatatggaaaggctcaccagaacccaagctgtaaaccgaagatcagcccttggcgaccttgccggcgacaactccctcggccttgagccacttcgaacttcggnnnnnnnnnnnnnnnnnnnnnnnnnnnnnnnnnnnnnnnnnnnnaggagaaatcaacattgcagtaacaaggtagaatggttttgaagaagaaaaacannnnnnnnnnnnnnnnnnnnnnnnnnnnaaaaaagaacctatttttgtgcatcatttaccaatcatgccacacaagcatttatttttagtacattttatttttnnnnnnnnnnnnnnnnnnnnaa

SEQ ID NO: 13717 - DNA, 729 bp, Macaca Fascicularis
  misc_feature (1)...(729): n = A,T,C or G
atgtgagatnnntatggannnnctagaagtactggaatgttatcatatcttgccctattttaatnctgctatagaaaactattgccttcacttttaaggattaatttgaatatgagtaactgtagtctagattttcatttaatgtgttagagacaaagtagtgaacatcaatgaacatctgatagagataaattgtaatcaggcaaaagcttgtttgtatgttctggcagtgaccaatcagaaaatgatgtaggtatgcccagtatcacttatcttctgtatttttcttctgtcgtgtaaatactataaacttttatggatnnnnnnnnnnnnnnnnnnnttcaatatacattctgctttgaattaattttttcaaatcaataaactatgtagacatttaaaaccaaatctcaactagaactgaaaaatgtgagttacataagttaaaaacttactttaaatcttatcttctataggtaactctaaataaattcatactgttatatctctctgtataccagttgagaaaatcattaaattgaagtgtgggggagggggaccttggtttcttgtatcnnnnnnnnnnnnnnntaatgtaaatggtatatttttgaaatgtgtttttcttagtaaaatgaagttggtactcttagaacagcaacactagaaacacgtagacattgagaaaaaggtcgagacttcataatgacattcaaatgtcctacaaat

SEQ ID NO: 13718 - DNA, 691 bp, Macaca Fascicularis
  misc_feature (1)...(691): n = A,T,C or G
cgcaggaacctnnacatcgagcgccctacctataccaacctcaaccgcctcatcagtcagattgtgtcctcaatcactgcttctctccgctttgacggggccctcaatgtggacctcactgagttccagaccaacctggtaccctatccccgcatccacttcccgctggtcacctacgcgcccatcatctctgccgagaaagcctatcacgaacagctctccgtggccgagatcaccagctcctgctttgagcccaacagccagatggtgaagtgcgacccgagacatggcaagtannnnnnnnnnnnnnnnnnnnnnnnnnnnnnnnnnnnncccaaggatgtgaacgttgctattgctgccatcaagaccaagaggaccatccagtttgtagactggtgtcccacaggcttcaaggtgggcatcaactaccagcccccgactgtggtgcctgggggagacctggccaaggtgcagcgggccgtctgcatgctcagcaacaccacggccattgcggaggcctgggcccgcctcgaccacaagtttgacctcatgtacgccaagcgggcctttgtgcattggtatgtcggagagggaatggaagaaggannnnnnnnnnnnnnnnnggaagacttagctgccctggagaaggattatgaagaagtggggactgattcgttgaagaagaaaa

SEQ ID NO: 13719 - DNA, 648 bp, Macaca Fascicularis
agaacacttttaagacagtactataagtaaacatgagagtattcactatacttatggctcaggcacatttgagcaggtcccagttgtgtgattaagaagtcaactgagtggccttttctgggttatcttctgatcgtggcctttcaacccaacaagggcccttccctgctgttccactgataaaggctcctggcccttcatcaggatctgtcccccagagaccacccagacactgcagggcctggtgatgctgtcctctacaccggaaatgacaggcactcgcagatttccactcttccgcctgtaggaaagctgggtgcttcttgttctgacagccagtctggcgagatgagtcttacgccgcttgagtcttggtggcaggctgctatccaagggggagaagtctctgctctgctctggactggacagaagagagacttttaccccagggcactcacacagccaagcttctgccaccacttcattagctgtattctccatagcgtggtgtaatagcaggtgcgtcttctagtgtattcctactggggacatttcctcaaagcagttttgctcccctgcaagggaacggtcagcctaagggtgatgtacagcccgtgctggagaaccgtggaagctgcacccctacag

SEQ ID NO: 13720 - DNA, 658 bp, Macaca Fascicularis
  misc_feature (1)...(658): n = A,T,C or G
aatatgatgcaaagtgtactaaaccagattgtcctttcnnncatgtgagtagaagaattccagtactgnnnccaaaaccaggtgagtgacttactgtgctactacatttgggtaaaaaatataaaatggcattttgtgactgtaaatggaattgaactaacaaaaagatggttttagaaataattttgacagcatcagttaatccagctagtctttaaagagcaagtattttgactagtgaatatataaaccttaccattttaatttaaaaatggttttcactctcaaaaacaaccatcagtagactgcattaaaaatggactttccaaacagattggagaccagtcctggtttttatttnnnnnnnnnnnnnnnnnnnnnnnnnnnnnnnnnnnnnnnnnntctgccgttacttccctgcttgtaagaagatggaatgtcccttctatcatccaaaacactgtaggtttaacactcagtgtacaagaccggactgcacattctaccatcccaccattaatgttccaccacgacatgccttgaaatggattcgacctcaaaccagcgaatagcacccagtcctgcctggcagaagatcatgcagtttggaagtttccatgtactgatgaaagacactctacagaacttgtcaaatctt

SEQ ID NO: 13721 - DNA, 764 bp, Macaca Fascicularis
  misc_feature (1)...(764): n = A,T,C or G
gtaattttctttgattacattaatgcttctaaaatattctttgtacaatcatatttttaagtcatgcnnnnnnnnnnnnnnnnagatttcataaggtttagttcttccctgcttcaattatttaaaatgaggcttccactactttccttttagatttgagaactaatgtgttaatattgaatgtttattaaatgataaaaaatattactatgcagaatgaaatctcaaagccaaaatttggaagtaacctggattcagcctaaggatgttttatttttaaataataccatgcagaattgattcatatcaggaaaactgtagttcatatggacacctattccagcaatgtcatttaggaaattcctgaatacagggtaatttgtgtagtgtgatcagatctcgtggatatcatgtgatgcctgaagacaatgctatctttcagactctnnnnnnnnnnnnnnnnnaattgaaagcaggaaattccagtggataaactggccattctgttagttactgtttgaatatacatacatcactattacatttctcttctggagtaaagtgagttgccctcaggaacacaatggaaacaaatcttatcccaaaatgaggccttaactgggtagaaacttcctannnnnnnnnnnnnnnnnnnnnnaataaaattgtgttgggtagagctattttcatgtaagtgaaaatacagtcactcttccatctttgctcacagccttaaccacaggcactggantgtgttgaagtca

SEQ ID NO: 13722 - DNA, 754 bp, Macaca Fascicularis
  misc_feature (1)...(754): n = A,T,C or G
gccnnnnncggtgagtactnncttcnnnctgacctgtgctcagggctggctctttagcaatgcggtcagcccaatttgagaacagcnntctgattcaagaggctgagttcagaggtcacctcctcgtcccatcagcccccagactgatgccagcaccaggactggagggagaagcacctcacctcttcccttccttctttccaggcccttagtcctgccaagccccagctgggggcctttcagtgccattgacgctgcccaagaatgtccaggggcaaaggagggacggtacaaagagttcagctcgtgccgcctccacagccgcgggcgccccagtgcctgccttagaaaggggcttcaggaagggatgcgctgtttccctgtacgtgcccagtcctagcctcgttctaggacccagggctggcttctgagtttccgtccagtcttcagccaagttctgttagtcacgcacacacatgcctacgaaaccttggagtttacactgagttgccccagctctgggcgccctggccaccctggtccttggagccccttcgccccccacctggtccgctccagatgccaaggatgggggagctcaggtggggcctctgccttggggatgggaatgtgttttattctcccaaacttgtttttatagctctgcgtgggctgggagatgaggtgggtctggatcttttctcagagcgtttccattctatggttggcatttccgttnntagaagagttgcat

SEQ ID NO: 13723 - DNA, 1039 bp, Macaca Fascicularis
  misc_feature (1)...(1039): n = A,T,C or G
tttaaatcaacaaaagaaatctggagaagtggctgttctgaagagagatgggcgatatatatattacttgattacaaagaaaagggcttcgcacaagccaacttatgaaaacttacagaagagtttagaggcaatgaagtctcattgtctgaagaatggagtcaccgacctctccatgcccaggattggatgtggtcttgatcgtctacaatgggaaaatgtnnnnnnnnnnnnnnnggaagtatttgaggcaacagacatcaaaattactgtgtacacactctgaaccagtgaacgttttggatgtttccgtgttctcctgtgtcatctctactgggccataggactgggcaaacctaccgtaaaataggcagaggaaagtttcatgagaagtagtgtgtttaacaagacagactttggttgctgtattcaagtatttggactatgactgtggaggaggggttgcttaggatatgttgtgttttttttgaagaaaagtaaggagtaggtggcttgataataggcagggnnnnnnnnnnnnnnngactatgaccttcttctccagtatgctacctgatttgtttggctggccgctaggtggcagcattggttctacttctctgctttttaagagaaatttcaggaaggatgatcagttagtttggcattttttgtcgtttgtgcacctaacttggtgttattcttatgtcatcagattcctcctaggggagagtttttgttttaattacaaagttaaattctacattgttaagaaatttgtggtgataaaaatggaaaaataaatatttgggggggtttagtgaggttctctgcttatgtgtgtgtgttctggacgtgggtaatggaagattcacctacaacttaatttcaaacagtcagacaaagggtccaagtgggaggagaaacaaagtgagaaataagagataaaactggacaagtcaaaaggcagttttttagaatctcctcatgggtgaacttttcctctcttttgtccactgcttggtttctgtgatgaatc

SEQ ID NO: 13724 - DNA, 740 bp, Macaca Fascicularis
  misc_feature (1)...(740): n = A,T,C or G
gacagttattggtggagccagagttcacatgtagatatnntggtaccagagtcctcactttgaaccactccacttaatacagtatcctttcgatagcatctaaattggtgttttatttttaactggttggtaggcaaagccttgtttcaaaataaaatcgacatgaagcctgtgggattnnnnnnnnnnnnnnnnnnnnnnnnnnnntgctttgaatgggagacctggacctgttggctctttgccctccnnnnnnnnnnnnnnnnnnnnnnnnnnnacactcagcattggnnnnnnnnnnnnnnnnnnnnnnnnnnnnnnnnnnnnnnnnnttgaacccacaagttaaaactccagacttttatttttttttttttctgagttcttatggcaaacttcagaatgaggtacctgaggaaatacagaaacctctgccttaagttgattatannnnnnnnnnnnnnnnctggtgcagttattgactatcttatctcttttgtcaggaatgtcttttttaattagaagacaggaagaannnnnnnnnnnnnnnnnnnnnnnnnntcagaaaccnnnnnnnnnnnnnnngggccttcaccgccaccagggtgtcccgccagacagggagagactccagccttctgaggccatcctgaggagttcnngtttgggggtgtgagggaannnnnnnnnnnnnnnnaaaaaannggctgtggcctgcccggcgtggtgggaggggagct

SEQ ID NO: 13725 - DNA, 766 bp, Macaca Fascicularis
  misc_feature (1)...(766): n = A,T,C or G
gaannnnnagctgcaggagctcgagggtgctgtcaagtccaagttnnnnnnnnnnnnnnnnnnnnnnnnnnnnaagnnnnnnnnnnnnnnnnnnnnnnnnnnnnnnnnagccaaggaacgagcagccgccaacnnnnnnnnnnnnnnnnnnnngaagaagctgaaagaaatcttcatgcaggtggaggatgagcgtcgacacgcggatcagtataaagagcagatggagaaggccaacgctcggatgaagcagcttaaacgccagctggaggaggcagaagaagaannnnnnnnnnnnnnnnnnnnnnnnnnnnnnnnnnnnnnnnnnnnnnnnnnnnnnnnnnnnnnnnnnnngggcctgagccgcnnnnnnnnnnnnnnnaagaaccggctgaggcggggcggccccatcagcttctcctccannnnnnnnnnccggcgccagctgcacattgaaggagcttccctggagctctccgacgacgacacggaaagtaagaccagtnnnnnnnnngagacgcagcnnnnnnnnnnnnnnnnnnnnnnnnnnnnnnnnnnnnaggcgatacagtgggacacttaggaacgcaccggtgccagcctgccttggggcctcctgcagatttaggaaattggcaagctacgggattccttcctnnnnnnnnnnnnnnnnnttaaggctctccagcctacgcatactgtatcccgcttcagacttaggtacaattgctcccctttttatatatagacacacacaggacacaca

SEQ ID NO: 13726 - DNA, 619 bp, Macaca Fascicularis
tgggtctctggctgcccatgaggctcacggagcagagggtgtcccggtcatagggagcagaaggagcaagtgggttacggaagcctgtgggggacctggcggatggagttgaccaacatcgctgggtggccacagccctctttaggaagcccagaaggacctttattattaaataatcatttttaaccctgctctatatcctgccctcttccagccccacccctctctggtcttgaaagaagactaatcagtggacacaccaagggccccgaggggcagggagatgccaccgtgcttctctgtcaccgtaaggctgaccagccaagtccacctcttctgtctgactgagttccttcctgtggccacagggaggggctggtccttcccctcggtgctggctctctgtcacaatgcctcaaaagacacagaacccaggcctacaaccgtcccaaatgctaattcttttcctttcattttgctttctgaaagcagtttgttatactattcataacactgtagagtttaatttcacgtcactttggatattatataaaaatgtgaggatttggatttttaaaaagaatgactccattttagatagccacttttgatgttaata

SEQ ID NO: 13727 - DNA, 1254 bp, Macaca Fascicularis
  misc_feature (1)...(1254): n = A,T,C or G
cnnnaactgctaaannnntnntttttacataaggtcacttaaatgaaaagtgattaaaatacatctttcctacattgccttctacataacatcaggtattacggatgttagattgcatctcagtgttaaatcttcactgatagatgtacttaagtaaatcatgaaaattctgcttataactatagaagtgaattgtggatgtaaaatggttataccatttgggtaatggcactaggcagcatttgtatagtaactaatggcaaaaattcatggctagtgatgtataaaataaaatattctttgcggtaaaatattctctttgttaatgttatagaagagggggatacaaaaaggaactaacaannngtnnnnnnnnnnnnnnnnntatttttgttttagtatttcctgttgtagtttatttgcatcttagaagagcataatgacattgtttgatgaaacctaaattatgctggactgttttgacctggtttaacccttctgataggtagttgtggatgttggggatgagaactgaataatctttgcctggagtgccactacactctagaatttccactttggagaatattcagttctcacttgtgattcctggtagaacaaactttatttttctagcccagcagtgatctagaagcagaggaatcccagtgccttttaaaagttattatgtggttttcttttaaaaagctgctgattttggaaggtagaatttatgggtacaatgtatgttcattatttgtacgtaaaataaaaccatttaaaaagtaatgtgatatttattatttaaaggcactaaacaaagatgaagtattgattatctggaagaagaaatcttcctccacacatcccatttaagtaggagatacatttaattaaagagaaatagatacttaatgtttctgtgtttttacattgtttacaattttaagtatgttaaagatactaagtaactatcagtttgcataatttttttttaaggtagaatgtagaaaaaatgactaattcttagccttccataattataaagtaatggctcattttttatttcagtattaggtagtaaaactaaagctgtagaccaatgcctggaccaagtgttaggagagctgagttccagtgtggttttgcctgggtatttttctttgtaagcaatattattgattgaagattaggggaaatgatacatgtgaggaaagacatttgtaaagtttcttgagtttttactacatacca

SEQ ID NO: 13728 - DNA, 727 bp, Macaca Fascicularis
  misc_feature (1)...(727): n = A,T,C or G
acagacaccagaacatacactcaggggagaagnnnattgtgtgcaaggactgtggccgggnnnnnnnnnnnnnnnnnnnnnnnnnnnnnnnnnnnaggacgcactcaggggagaagcccatggtgtgtggggagtgtgggcgaggcttcagccagaaagtcaaaccttgttgcacaccagaggacgcactcaggggagaggccgtatgtgtgccgggagtgcgggcgaggctttagccaccaggccggtctcatcaggcacaagcggaagcactcgagggagaagccctacatgtgcaggcagtgtggactgggctttggcaataagtcagctctcatcacacacaagcgggctcacttggaagagaagccttgtgtgtgcagagagnnnnnnnnnnnctttctccaaaagtcacacctcacnnnnnnnnnnnnnnnnnnnnnnggggagaagccgtatgtgtgcaagacgtgtgggcagggcttcagcctcaagtctcacctcagcagacacaggaagaccaagtctgtgcaccacagactgccaccgcatcctgaccctgagccgtgtgcggggcaaccttnnnnnnnnttatactctctctgaaggcaaagatggggacaaggactaacagtcagaatgttgacactttgatgaaatagnnnnnnnnnnnnnnnnnnnnnnnnnnnnnnnnttaactgtttactttccccacactaagtcttct

SEQ ID NO: 13729 - DNA, 652 bp, Macaca Fascicularis
  misc_feature (1)...(652): n = A,T,C or G
tcccctccctccttacccccnnnnnnnnntggcatgtgagccccacggtgatgcttgacaatgtgtaactgtgctgggggcacctctgatggccaaccgcagcatttctgtcctctgccctccccagagctgatgctggggcccagccccctgcagctctgtacccaccaaacctcccaattcctctgtacccaccaacctgccccattcggggcaaccctcaccaccccccaaatagcctgtagcccaagcccctgccctctgcacagggccttannnnnnnnnnnnnnnnnnnnnnaggggtttgctggcataacaccccagaaccaagggaaaaggatgggccactactcagtatcccaccatcctcagttcctggcctcatcccctcctagaatgagtcacccatagatcagggtctggggaagaggctgatccctggccctgcccggctccctcgctgtcctctggannnnnnnnnnnnnnnnaatagggctctttgaagaggaagtggaagccccagggtagatgagacagagacccctcctggcagtggtgaggtgggggcatgcaccctcctttttgtaccgtgtgtgctggctccatagttctctcttctgtacatataagcatgctgnnnnnnnnnnaagaa

SEQ ID NO: 13730 - DNA, 734 bp, Macaca Fascicularis
  misc_feature (1)...(734): n = A,T,C or G
tacagccgcatccaggcagnngaggagaagctgtgattccccccatccctnngagggccggtggatgctggatccggagccccaggttccgccccagaggggtcctggacaaggccagaccaaagcaagcggggcctggcacctccatcctgaggtgctgccccctccatccaaaactgccaagtgactcactgcctccccaacctttccagaggctttctgtgaaagtctcatgtccaagttaacgtcttctgggcagggcaggccctctgattcccaggctgagactgacgggtcttctcaggatgatgtcttgggtcagggtagggagaggacaaggggtcaccaagcccttcctagaaagcagggagcttataaatggaaccagggtagaagtccccagactcaggaagtcaacagagtggtcagggacagtggtcacatccatccggtggccaaagagaattatagccccagagcggcccaagttcactgggctccacccccacctccaggaggggaggagaggactggacatctataggtggcccctgatgcccatctatagtaggaggtcaggaccacgctcctggtctctccccactccccatcctcctccctagatggctgcctggctgtccctcaggcatagcctttcagtccttatgggtctatgtcacctccatgtcagtcttggcctggctatgagagaaggaggaatgggggagggggct

SEQ ID NO: 13731 - DNA, 766 bp, Macaca Fascicularis
  misc_feature (1)...(766): n = A,T,C or G
ggcagccggcacanncnnnntgagtgagcnnnacggggtccaggcgggcggcagcagcccaggggcctcaggcctcctccctgtccctgtgtccctccttgcttccccggggcaccctcgctctcacctccctcctcctgagtcggtctgtgtgtctctctccaggaatctttgtctctatctgtgacacactcctctgtccgggcctgggtttcctggccctggccctggccctgcgttctctcactgtgattcctctccttcctccgtggctgttttgtctctgcagttctgaagttcacacatagtctccctgtgtctcccttgcnnnnnnnnnnnnnnnnnntctgccttctgcccacatctcctttccttctccctgggtccctgtgactggctttttgttttttttctgttgtccatcccaaaatcaagagaaannnnnnnnnnnnnnnnnnnnnnnnnnnnnnnnnnnnnnnnnnnnnnnnnnnnnnnnnnntggttccatccatcactcatggcctcagcctcatcctggcttcactggcctccagctgagagagggaaccagcccgcctcccagggcaagagctccagcctcccgtgtggccgcctccctggagctctgcccagctgtcaccttaccctgggcatcccagccctgggcattgtcttgtgtgcttcctgagggagtagggaaaggaaagggggaggcggctggggaaggggaaagagggaggaaggggaggggcctccatctctaatt

SEQ ID NO: 13732 - DNA, 737 bp, Macaca Fascicularis
  misc_feature (1)...(737): n = A,T,C or G
cgcttctcgtcttcgccgaggcagcgcagccgctttcgccgaacaggcgaccgccaactttttccgcgtgttgctgcagcagctgctgctgcctcggcgctcgctcgacagccccgcggctctcgcggagcgcggcgctaggaatgccctcggcggccaccaggaggcaccggagagagaaaggcggtccgaggagcctcccatctccctggatctcaccttccacctcctccgggaagtcttggaaatggccagggccgagcagttagcacagcaagctcacagcaacaggaaactcatggagattattgggaaataaaacggtgcgtttggccaaaaagaatctgcatttagcacaaaaaaaatttaaaaaaatacagtattctgtaccatagcgctgctcttatgccatttgtttatttttatatagcttgaaacatagagggagagagggagagagcctataccccttacttagcatgcacaaagtgtattcacgtgcagcagcaacacaatgttattcgttttgtctacgtttagtttccgtttccaggtgtttatagtggtgttttaaagagaatgtagacctgtgagaaaacgttttgtttgaaaaagcagacagaagtncactcaattgtttttgttgtggtctgagccaaagagaatgccattctcttgggtgggtaagactaaatctgtaagctctttgaaacaactttctcttgtaaacgttcagt

SEQ ID NO: 13733 - DNA, 775 bp, Macaca Fascicularis
  misc_feature (1)...(775): n = A,T,C or G
gtnnnnnnnnnnnnnnnnnnnnnnnnnnnnnnnnnnnnnnnnnnnntccgcgnnnccgcgtaanaggaggtgaaacgcagcagccctgagaaatccgagaccccggtgtcctagcagaggcgccccgaatggggaagggcgtgcggccggcgctaccccagaggaaaagcccagcggagcggggctgggcaggagccggtggcggcggtgcgctgggccttctgccttggatcctccgcagtcggcaccacttccctgctcagattcgaacccagatacggctcccatggctccagggtgcccagtcttgcagccagctcgccgcccgaaccctggatggaagaagcgctcactggccgctacctctgctgtnnnnnnnnnnnnnnnnnnnnnnnnnnnnnnnnnnnnnnnnnnnnnnnnnnnnnnnnnnntggccnnnnnnnnnnnnnccctctgcccggctttgtgtcctggcatccccaccagagtggcccgctgtcctgcgnnnnnnnnnnnnnnnnnnnnnnnnnnnnnnggcacttcagcggcccaattcggagttttttgttttgttttgttttaagagattgagactgtgnnnnnnnnnnnnnnnnnnctcctcccgttgggcccaggagggagcctaatccaggcccacctggnnnnnnnnnnnnngtgcaggaagcccccaacnnntcctactcgtgtgcggcccttactgggcggccncgctgcagtggtcgagccgctgggcgtctgcaacacgggagctccc

SEQ ID NO: 13734 - DNA, 733 bp, Macaca Fascicularis
  misc_feature (1)...(733): n = A,T,C or G
gacctgtgtacattcnnnnnnnnnnnnnnnnnnnnnnnnnnnnnnnnnnaagcgggagagaagcaatttgggtttcatggttctgtagaggccaggctgaaacgtcctatctgaaggaagaaagcaacagctggacaatgtttctttgcaaagcaacannnnnnncaaaagatgcctcaatcccattttgatgtnnnnnnnnnnnnnnnnnnnnnnnnnnnntcttccacatcatgcgnnnnnnnnnnnnnnnnnnnnnnnnnnnnnnnnnnnnnnnnnnnnnnnnnnnnnnnnnnnnnnnnnnnnnnnnnnnnnnnnnnnnnnnnnnnnnnnnnntttgtnnnnnnnnnnnnnnnnnnnnnnnnnnnnnnnnnnnnnnnnnnnnnnnnnnnnnnnnnnnnnnnnnnnnnnnnnnnnnagtcttttgnnnnnnnntcaaaacttnnnnnnnnnnnnnnnnnnnnnnnnactttcagttagaatttattgccatttattcctttttataaatttctgtagatcatactggtttttttttgttattggcctagagnnnnnnnnnnnnnnnnnnnncntgactccattttcaaatgaccctgtaatagggaaatggttttgnnnnnnnnnnnnnnnnnnnnnntgtatgtacagaagggaggggttatttnnnnnnnnnntaatttatgatttctaatcctctaacgtgcccaggatatgnnnnnnnaggacaaac

SEQ ID NO: 13735 - DNA, 731 bp, Macaca Fascicularis
  misc_feature (1)...(731): n = A,T,C or G
ccccagtgaatacccgcattacaccacaatcnnnnnnnnnnnnnnagaggcaaaggatgctttggaactgaggccggcagagtgggagaagtgtctgaatttgcctctggatgtgcaagagggtgattttcaaacagaagtttaacaaaatcaaaatggactgaggtagagacaaaacaatttattgcactgacacttaagacttgggaagcctgacatttctatctggacagtgtgactatcttatgtcaggaccttcatgtgccaaatgtcagtggtgttttcatatggtaacttctcactagtcaggctagtggannnnnnnnnnnnnnnnnnnnnnnnnnnnnnnnnnnnnnnnngtacccgtggaatggatttgtaaggtaatctttatagataaacctcannnnnnnnnnnnnnnnnnnnnnnnnnnnnnnnnnnnnnnnnnnnnnnnnnnnnnnnnnnnagcacaatgtatatatttatgcagtttttaaagtttataacagtctgtttggccattactacactttttactttataatataaaagcaaagttttnnnnnnnnnnnnnnnnnnnnnngagctacattcttcattgctttaaatgcaataaagtaataatctcacttttatatgaataatatatttcacatctttattattgcagttttctctagaaagctctgagaagctttctctgctgcagctgtgtataaaatattaaaatg

SEQ ID NO: 13736 - DNA, 719 bp, Macaca Fascicularis
  misc_feature (1)...(719): n = A,T,C or G
ccaggtagtgcnnncaaaaaaccccccnnnaagcccagaaacagcctggtcccagcctaggaatgggagcctccacttctctcgccgacgggggataatgcactgaatccacttcctccttctccgaaccagcagaacccaggttgggttcaaccaaagggaaggagccaagagcctcaaaggaccaggtgctttcagaccctgagaccaagaccataggaaaggnnnnnnnnnnnnnnnnnngcagaacaccagcccgtcctcagctaaaccttacaccaatgggactgcctnnnnnnnnnnnnnnnaacaagaaggagttcagcttggaagaaatttacaccaacaagaattaccagtcacccacnnnnnnnnnnnnnnnnnnnnnnnnnnnnnnnnnnnnnnnnnnnnnnnnnnngacnnnnnnnnnnnnnnnnnnaaggaagctccggcgggctgtggaatttcgggacagcagccttcctcgatcacgacggccatcccgtggggtccgggctgcagggggcaggactgttcctccccannnnnnnnnnnnnnnnnatgtgggccccctgctccagcagcggctggaggagctagacnnnnnnnnnnnnnnnnnnnnnnnagtagatggggagcagccccactggacctaggtgccctatctgtcatccattcttaagggatgggaaatctcccatgcagttttttttttctct

SEQ ID NO: 13737 - DNA, 239 bp, Macaca Fascicularis
tcatccacgttgtatagcacagccacggaggccacaaaatacaatatttccccggtgggcagcaaataaagactggcccggcagtctcggccacagtagccatagctggagccacacccagtccagcttgagccggcaagaaggcagctccgagcgtgtgtccaggctgtaggtgggtgccagctcatctgggatcagcatgggcacagggcggcccctcaggaacattttcacggagc

SEQ ID NO: 13738 - DNA, 781 bp, Macaca Fascicularis
  misc_feature (1)...(781): n = A,T,C or G
cagaacggnnnnnnnnnnnnnnnnnnnnnnnnnnnnnnnnnngagactcctcattgtgtccacacccacagcccgaaacctcctnnnnnnnntccagctaggaatgctgcagcaagcacagtgtggcctnnnnnnnnnnnnnnnnnnnnnnnnnnnnnnnnnnnnnnnnnnnnnnnnnnnnnnnnnnnnnnnnnnnnnnnngattatgcctccagccctagcgctgcagctcaggctgttgctgcgaatcccactctactccttcannnnnnnnnnnnnnnnnnnnnnnnnnnnnnnnaaagagcgctatgtctccctggtgatgcctgtggctctgttnnnnnnnnnnnnnncttttcccttgagaaaagaagagatggtcctacaagccgaaatgggccagacctgtaacacctgacatgatggttcctctcttggcggttcctctcttggctgttcctcttcattgtctacatagtgacatgcacatgggaaagccttaaaaatatccttgatgtacagatttttatttgtaatttttaaagtctattttattatgagctttctttgcacttaaaaattagcatgctgctttttgtacttggaagtgtttcaaaaaacttaaatgactgtatttactctttctaactttcnnnnnnnnnnnnnnnnnnnnnnnnnnnnnagagaaattagaacccataaccatacacnnnnnnnnnnnnnnnnnnnnnnnnnnnnnnctaactcttttctgttttgttttttaaataagacttttata

SEQ ID NO: 13739 - DNA, 1348 bp, Macaca Fascicularis
  misc_feature (1)...(1348): n = A,T,C or G
gaccggccnnnnnntgccaggaggtnnnnnnnnnnnnnnnagcaggcaggcctggagaggatgaggcccggtgcctacagcacaggctacgggggctacgaggagtacagnnnnnnnnnnnnnnnnnnnnnnnncaccaccgacctgttcgggagagatctcagctactgtctctccggaatgtatgaccacagatnnnnnnnnnnnnnnnnnnnnnnnnnnnnnnnnnnnggccactgtgtccacatgaggggtctgccatacaaagcgaccgagaacgacatttacaacttcttctctcctctcaaccctgtgagagtccatattgagatcggcccagatggaagagtgacgggtgaagcagatgttgagtttgctacnnnnnnnnnnnnnnnnnnnnnnnnnnnnnnnnacagggccaatatgcagcacagatacatagaactcttcttgaattcaacaacaggggccagcaatggggcgtatagcagccaggtgatgcaaggcatgggggtgtctgctgcccaggccacttatagtggcctggagagccagtcagtgagtggctgttacggggccggctatagtgggcagaacagcatgggtggctatgactagatttgttaggaacatttgagttatttcaatcaaattttcacaggcagccaacaagcagttaagagcagttataatagaggaagctgggggacccattttgcaccatgagtttgtgaaatctggattaaaaaattacctcttcagtgttttctcatgcaaaattttcttctagcatgtgataatgagtaaactaaaactattttcagcttttctcaattaacattttggtagtatacttcagagtgatgttatccgagtttaagtagtttaagtatgttaaatgtggatcttttacacatcacagtgaacacactggggagacgtgcttttttggaaaactcaaaggtgctagctccctgattcaaagaaatatttctcatgtttgttcattctagtttatattttcatttaagatcctttaggttaagtttaagctttttaaaagttagttttgagaattgagacacaatactaatactgtaggaattggtgaggccttgacttaaaactttctttgtactgtgatttccttttgggtgtattttgctaagtgaaacttgttaaattttttgttaactaaatttttttcttaaaataaagactttttcacaatgactggcacagattactcagcaaaagatagcaaaatgggttgaagataattcattttaatcgtaatgtattttagtgtgaatttaaaaatttcatacatcaaatctatgatctccct

SEQ ID NO: 13740 - DNA, 517 bp, Macaca Fascicularis
  misc_feature (1)...(517): n = A,T,C or G
cgctgctcctgctgtccagcctctcccgctgctcagctgaggcctgcctggagccccagatcaccccttcctactacaccannnnnnnnnnnnnnnnnnccaccgagactgtctttattgtggagatctccctgacatgcaagaacagggtccagaacatggctctctatgctgnnnnnnnnnnnnnnnaattccctgtcacccgagnnnnnnnnnnnnnnnnnnnnnnnnnnnnnnnnnnnnnnnnnnnnnngagcgcccacgcaggcacctatgaagtcagattcttcgacgaggagtcctacagcctcctcaggaaggctcagaggaataacgaggacatttccatcatcccgccgctgttcacagtcagcgtggaccatcggggcacttggaacgggccctgggtgtccannnnnnnnnnnnnnnnnnnnnnnnnnnnnnnnnnnnnnnnnnnnnnnnnnnnnnnnnnnnnnnacatccaggcctgagggtggcaccccagccctgccctgct

SEQ ID NO: 13741 - DNA, 755 bp, Macaca Fascicularis
  misc_feature (1)...(755): n = A,T,C or G
tgcatacatcatcagagacaaacaataatnnnnnnnnnnnnnnnnntctgtatgtacaaaacctaggccacagagatccagtttaattcgtattctctatttacatcgttttcctcatnnnnnnnnnatctgttaaattnnnacccgggagatcaggggattgacggtcaccacactcactcctatacaaagacaaactatgtacagacacccaggaagcaactggaaaatgcaannnngtgctggggattaacatacagatagggagaaaaagtcattgaaggtgacctttgcccaccggctgtgcacagggagaacctgaaattccattcatcgaagcaacacaccacgattttcattcggcaaataaaaatacatgttgataagcgggagaaaaataaaatcagagcttttcatcacatnnnnnnnnnnnnnnnttggtttctctaatcttacataaaggctaaagttttaaaagtnnnnnnnnnnnnnnngggcctctggagatgaatatatcagccatttaaaaaaaannnnnnnnnnnnnnnnnnnnnnnnnnnnnnnnnnnnnnnnnnnnnnnnnnnnnnnnnnnnnnnnnnnnnnnnnnnaaggaagcatttgatttgagacatttcacatttttcctctcacactaatccaaatgcaaaaatgctcaactgggaatttatacacatacaataaactttgacttgccagctgcagcnnnnnnaaaaagagatgcattttaagtcatc

SEQ ID NO: 13742 - DNA, 371 bp, Macaca Fascicularis
caggctagcttccgtggacacataacgaggaaaaagctcaaaggagagaagaaggatgatgctcaagctgctgaggctgaagccaataagaaggatgaagcccctgttgccgatggggtggagaagaagggagaaggcaccactgctaccgaagcagccccagccactgggtccaagcctgatgaacccggcaaagcaggagaaactccttccgaggagaagaagggagagggtgatggtggcacagagcaggcagcccctcaggctcgtgcatcctcagaggagaaggccggctcagttgagacagaaagtgccactaaagcttccaatgataaataacagtcataaaaagcaggaaggatcccaagtca

SEQ ID NO: 13743 - DNA, 664 bp, Macaca Fascicularis
  misc_feature (1)...(664): n = A,T,C or G
cttaaagaccctttgctatgtagtctcatggtctagcatgcatcttgtagaaacaagacatgctggcagattgcagggttgagatgtgttttatctgttttatattttaaaagattctgccagaaaataannnnnnnnnnnnnnctaaagcccagggttatggaccaactcagtgcttcaggtcttaaggcctccatacctctttctcaccaactttagtagtagctgagatttaatgggcacctgttttgctacaaatctgacctgacctcttaccctaccctcctttgttgctgcttccctgaatgagtattaccccaggatgaggnnnnnnnnnnnnnnngccattgatgcaaatactagggaaagactaggaggatgagccagggctgctactaaggactaagtgtggcaccacggtttgccttttgtatttgcataaagaaaggagttggagctgggtgcagtggcttgtgcctgtagtcccagctacttgggaggctgaggcaggagggttgcttaagaccagcctaggtaacatagtgagatcctgtctcatttaaaaaaaaaaaaaagaaaaaaataggcatggtggcacacactgtagtcctagctactcacgacgctgaggctagaagatcctttgaacctaggagtttgagac

SEQ ID NO: 13744 - DNA, 462 bp, Macaca Fascicularis
ggcagagaagggggatcggggagatcggggcctccgccccctcggcggaccgggcgaagcacgtgccggccccgggggtcgggcggacacagggaacgcgctccccgccgaggccccggagctcccgcggcggcggccggacacaaaggagtggcccgcgcggggcgccgcggaatataaattaataaatacaacgccccagcccgagagctcccgaccgccaatccgcctgcagcaagtttgttcaactcgcaaggccgtaaccagagccaggaaaggggggtggggcgatggggcccccgctcactccggactggaaaaaggaggttagggaagctagggattccagcacgagtgccgccccagcaacccgattttcccccctcttggctttgaccgaaagtgctttaccacgactgccgctttgtcatttgtcaacatgcgctactgctgttttctaaa

SEQ ID NO: 13745 - DNA, 628 bp, Macaca Fascicularis
  misc_feature (1)...(628): n = A,T,C or G
cagccctggcgctcctgctggggggcagggcccatctgccgcctggggtcccggtgcggtgcaccgatccgaggagtgtgctcaggccgggctttccagaaggcnnnnnnnnnnnnnnnnnnnnnnnnnnnnnnnnnnnnnnnnnnnnnnnnnnnnnnnnnnnnnnnnnnnnnnnnnctcccgccacacgcttactccaggtttgtatagaaaaagcacagctctcactggccagtagctgccaaaaagaacacccatcgtatatnnnnnnnnnnnnnnnnnnnnnnnnnnnnncccaccaaccccctttctacagatagcctttgtggggttttttgggttcttttttttttttttgtcctgctgagtactatgtattacacccccaatccaagatcagttttcctagtctttgggaaacggttgtggtttttttcctttgctgtgttggatttccggtcccggctgataccccccttcgtgtgtgcgcccctccccacctctgcctttgtttcggtgccctgtgtccgctctctcatgtggggatgtttgtgctgcagacaaaaagaacaaaaaaaaatttttaaataccacaagatggaaaaaaaaacacaaaaaaatttaaaaa

SEQ ID NO: 13746 - DNA, 1189 bp, Macaca Fascicularis
  misc_feature (1)...(1189): n = A,T,C or G
aatcgagataaagacaaagaacttttaaaattaactcagtacctcaaggaaatagcaaaattagatgactttttggannnaaatcacaaatattgggaaagatatnnctcaaagaagcaaggacagtagttacaagttatactgnnnnnnnnnnnnnnnnnnnnnnnnnnaagaacttcttgcttttatgctagaaatcattatnnnnnnnnnnnnnnnnnnnnnnnnnnnnnnnnnnnnnntacttggtcttccagttttttgtaaatttaatnnnnnnnnnnnnnnnnnnnnnnnnnnnnnnnnnnnnnnnnnnnnntgtcccctctatgaatattctgttactcttgaaaaatannnnnnnnnnnnnnnnttgctgacccctcccccccaccccccaacnnnnnnnnnnnnnnnnnnnnnnnnnnnnnnnnnnnnnnnnnnnnnnnnntggagaaaaatgtatgctcaacaatgtcattttgtgactttggaaacaagttatgttttgtgtttttgtctcattgtgttattgtctgactaaatctaagaccaaacccatgttgaaactagtgctttcccctttaaaacaaaaaaaaaaagtttttgattaaagaacctagtttgttatgcttaaaattatcaagaattttttattcctttgtcatagacacaatttctcttctgtatgccactagttacatttctaaattctgagcggtctcagttaggcctgtatgtgtgtacatgtccaagtannnnnnnnnnnnnnnnnnnnnnnnnnnnnnnnnnnnnnnnnnnnnnnnnnnnnnnnnnnnnnnnnnnnnnnnnnnnnnnnnnnnnnnnnnctttttggtggctaagtataatctgcctaaaaccattgtcataaaagcagttaaaggcaataaatttttaaaagggacatatcactgattcattcctaaaaagcatgaacaaaaagtttttgttctgttccagctatatcttgtctaagtgctaacactgtttcagtgaaaatatctagccataagattaaaaaaatatattannnnnnnnnnnnnnnnnnnnnnnnnnnnnnnnnnnnnnnnnttttgtgttgacaatattgctttatacagttcttgtatttgaaaggaattgatccttnnnnnnnnnnnnnnnnnnnnnnnnnnnnnnnnggactaat

SEQ ID NO: 13747 - DNA, 838 bp, Macaca Fascicularis
  misc_feature (1)...(838): n = A,T,C or G
aggtggtacacctcaacgctgtgactgtggacaatcgcctggacaacctgcagctggtgccgtggggctggcggcccaaggctgaagagacctccagcaaacagagggagcaaagcttgtattggcttgcaattcagcagctgcctacagaccctatagaagaacagtttcctgtcctaaatgtgacccggtactataatgccaacggggatgtagtggaagaggaggagaattcttgcacctactacgagtgccactaccctcnnnnnnnnnnnnnnnagaagcagctccgggagttcaacatctgtgggcgctgccaggtggcccggtactgtggctcccagtgccagcagaaggactggccagcccacaagaagcactgtcgggagaggaagcgtcccttccagcatgagcttgagccagagcgatgacgggcgggagagccgcacacactcgcagcccccgggctctaccctgggcacagcagagacagactggtggttgaacctggaggtgccgaaaaagccagctgcgggcccaggacaaccgctgtgagactcccgatgtcacaggcagtctgtatggttatagcgcccctcagtgttcatctccagcagagacaacgaaggaggctcccaccaggacggttctcattatttatatgttaatatgtttgtaaactcatgtacagttttttttggggggaggcaatgggaagggtagaaattacaaatagaatcatttgctgtaatcctcgnnnnnnnnnnnnnnnnnncacgtgtctaaaaactgtcctgtagctgaagcttctcccctgggccacgggagccccatggag

SEQ ID NO: 13748 - DNA, 306 bp, Macaca Fascicularis
  misc_feature (1)...(306): n = A,T,C or G
ggccaccctccttccttcttgttccttcctntcctgtgtgaatcttatggtctggccaaacttgttgactcagttcagtgaaatcactgttagatatttctgtttccttgactgcacatgaatggccagtgggatccatgtgtccaggtacctgggctggaggtgacctctctcctctgagctctcacagggcactgctgctcctttcattccacacacgtcagctgcccagtgttagctttttcctgtgtgcattgcttatctcccagccgcacgcgcagtagactctgggacagccccgagtca

SEQ ID NO: 13749 - DNA, 678 bp, Macaca Fascicularis
gacttttgatggtgaagtcaagacggatgtgaataagatcgaggagttcttagaggagaaattagctcccccgaggtatcccaagctggggacccagcaccccgagtctaattcagcaggaaacgacgtgttcgccaaattctcagcgtttataaaaaacacaaagaaggatgcaaacgagatttatgaaaagaacctgctgaaggccctgaggaaactggataattacttaaatagccctctgcctgatgaaatagatgcctacagcacggaggatgccactgtttctggaaggaagtttctggatggggacgagctgacgctggctgactgcaacctcttacccaagctccatattattaagattgtggccaagaagtacagagattttgaatttccttctgaaatgactggcatctggagatacttgaataatgcttatgctagagatgagttcacaaatacgtgtccagctgatcaagagattgaacacgcatattcagatgttgcaaaaagaatgaaatgaagctgggctgttttctgtcttatttttcagttgagtgagtgaggatatgaaaagagtgtgttctatgcatttcccccaaataagtccttcacaaaataacacctgtagtgggatccactcaaccccaaatgatacacggccttgtaatttgt

SEQ ID NO: 13750 - DNA, 755 bp, Macaca Fascicularis
  misc_feature (1)...(755): n = A,T,C or G
cagccacaagtacagtgcccacagcagccatgtcaccaacgtcagttnnacacacaatgacagtcacctgatatcaactggtggaaaagacatgagcatcattcagtggaaacttgtggaaaagttatctttgcctcagaatgagactgtagcggatactactctaaccaaagcccccgtctcttccactgaaagtgtcatccaatctgatactcccacaccgcctccttctcagtccttaaatgagacagctgaagaggaaagtagaataagcagttctcccacacttctggagaacagcctggaacaaactgtggagccaagcgaagaccacagcgaggaggagagtgaagggggcagtggagaccttggtgagcctctttatgaagagccatccaatgagataagcaagcagggcgaagccacccttccagaggaccagcaagacgctttgccctcgtcctaacaccctggcttcagtgctactcttttccttcagctgcatgtgattttgtgataaagttcagataacaggatgggcagtgatggagaatcactgttgattgagattttggtttccatgtgatttgttttcttcaatatagtcttattttcagtctctcaaatgcagccaacttaaaggtttagtttggtgtttattgaaaattaaccaaacttaatattaggagaagactgaaatgatgatgatgtctcacaaattactgtgtacgtaagtggtgtgatgtaaatactga

SEQ ID NO: 13751 - DNA, 829 bp, Macaca Fascicularis
  misc_feature (1)...(829): n = A,T,C or G
gcattactcattgctaaaaatgtgtagcacagaactgcactagaattaatttgtttacaagaagaaatttaagctctacgtttggttttcacatacagcagctctatggaataacatgcatctgaattttaagttgcaaaggtatctgaatagttaatttttcatgtgcatcttttgtcgaatgttttggttcaagaaagaatgtttaaagctttttaaaagacttcagttcttaatataactgtaccctcctgcatggaaaatcataaccaacatggctgcannnnnnnnnnnnnnnnnnnnnnnnnnnnnnnnnnnnnngctgctttatcatattgtacttgggtgtaggactctagtgttcttgggtgtattgcatgggctgcattatctacagcattgtacaataacaactagaaaaggcagtatactnnnnnnnnnnnnnnnnnnnnnnnnnnnttctgtgttataatggaaggttttttgtgatgtatgaaacttgtgttttttatatataaatgagtatagttagtgttgtnnnnnnnnntgttttcatctgtaaatagttaagtatgtacacgaggcactacttctgattnnnnnnnnnnttcagtcctagtttttacttttattcttaannnnnnnnnnnnnnnnntcaattttatgtnnnttagttctgagttagacctgcagatgtgtacagatagttcatatttatgtattgcacataatcatgctnnnnnnnnnnnatgctatattgtattatgtaaataataaaaagccatgtacagagggaaacttcaaaaaaaaaaaaaaaaaaaaaaaaagg

SEQ ID NO: 13752 - DNA, 745 bp, Macaca Fascicularis
gagcgatggaacagggccaggctgattatatgggagcagattcctttgacaacatcaagaggaaacttgacacttacctccagtagaaacactgcatttttctgtgaacacattcacttcacaagccttgtttctgatacttagtatctagagctgggttgaaaaaagtctgttacagttgctagaggttttcattaaaacttatcagatgagaggtttttttaggataagaggtgagaactgggcaaaagttgtgaagcagcaattctgttatatggacagtgttctgctttaaaatcctatttagcttgtttcagaaattcttttgttgactgccaacatacaaagtaaggaaaactcaatattaagctattaagacagctgtatcaattcttaaaatctgcagagcctgcttcaaagtcagtccctcccttcagaagcagacatggcatctgttccttgcttgcttgttggttgtgccttcctttcacgagacctgaatcttagaattgcccagtgctgccagtgagtgagtgtaattctgctttcaggtaaagataagctatattaacactgctgagtgattcataaacgtatcagcaaatacctttaacccattttatttcctggtcttagtgtctgaagatgctcaccagttttctatgtacagtaaggcagcatgctaaaatgcttttgttcagttctgtatatttgaaaatagcagcgtgttctctgatggttacct

SEQ ID NO: 13753 - DNA, 789 bp, Macaca Fascicularis
  misc_feature (1)...(789): n = A,T,C or G
gaatgtatatacttttgctaatgttccagcaacactgctattatactatccaaatttttattgtaatgaaacctctttaagcaattggtgatnnnnnnnnnnnnnnnnnnnnntcttctgctnnnnnnnnnnnnnnnngaactaggaaaaattttttttcaggactgctctatggtttcctttaaaagaaaaaaaacttctgtttgtttttagtcgtcattatttacaatttgcannnnnnnnnnnnnnnnnnnnnnnnnnnnnnnnnnnnnnnnnnnnnnnnnnnnnnnnnnnnnnnnnnnnnnnnnnnnnnnnatttatttttttgggggggtgtctgaaaaggtaaaaatccattaaaaccttaagttaaatataaatgttacaactcaaatgtttgcttttagattttatacagtatttgtttcgttttggttttgagtgtatataatacagcattagcagtatggttccagtagaggagttaaatatatattattaaaggagacctgtagcagtcaaagattttattgatttaacgacaaaggaaattaattaaaatgttttcatttttnnnnnnnnnnnnnnnattaagctcacatgaaaatcatgattctagagtttggaatgcaaaattaattgtnnnnnnnnnnnnnnnggaatatttttcaaaataaatactataatatagatatcaaattattgcctccccatgttatgttgaaaatttttttattaaattgataaaactttatttccattatattcataatgttctgtaacaaacat

SEQ ID NO: 13754 - DNA, 836 bp, Macaca Fascicularis
  misc_feature (1)...(836): n = A,T,C or G
gcagccatggatcacatagacttccagatggtctcccgaaccgcctgnnncagccggtgccctcctcacgtcaggagcaagcagccgcggacccctaggccgagctgttgaaggccctccctcgccagccaggccnnnnnnnnnnncttgcaaatnnnnnnnnnnctttgagcccaaaatgggaatattggttttgtgtccgaggcttgttccaagtttgtcaatgaggtttatggaacctcnnnnnnnnatgccatcttcctgaatgttgnnnnnnnnnngggtgtgactcantcattcttnnttctcccttccctctggacagtgttacagtgaacacttagcatcctgtttttggttgatagttaagcaannnnnnnnnnnnnnnnnnnncttagacactacagtactaagacaatgttgaatatatcattcgcctctataacaatttcatgtattcagttttgactgtgcttcatatcatgtacctctctagtcaaagtggtattacaaacattcagtgacaaagaatcagtgttaattataaatccttgatcttatgcaatgtgattgaaaacacaaaccttttgggttaaaagctttaacatctgttaggaagaatttgtcctgtgggtttggaatcttggatttccccctttatgaattgtactggatgttgaccaccagannnnnnnccgcaaatatcttttcttgtattcccatatttctagacaatgatttttgtaagacaataaatttattcattatagatatttgcgcctgctctgtttacttggagaaaaaagcacccgtggagaataaagagacctcaataa

SEQ ID NO: 13755 - DNA, 680 bp, Macaca Fascicularis
  misc_feature (1)...(680): n = A,T,C or G
cacccatggcctnnnnnnnnnnncccagcccgagccctgttggctacagtcctatgacacctggagctccctcccctggtggctacaacccacacacgccaggctcaggcatcgagcagnnnnnnnnnnnnnnnnnnnnnnnnnnnnnnnnnntgaaggtgcgggacacctacctggatacacaggtggtgggacagacaggtgtcatccgcagtgtcacggggggcatgtgctccgtgtacctgaaggacagtgagaaggtcgtcagcatttccagnnnnnnnnnnnnnnnnnnnnnnnnnncgaagaacaacaaggtgaaagtgatcctaggcgaggatcgggaagccacgggcgtcctgttgagcattgatggtgaggatggcnnnnnnnnnnnnnnnnnnnnnnnnnnnnnnnagatcctcaacctccgcttcctggggaagctcctggaagcctgaagcaggcagggcgggtggacttcggcaggtgaagagtggtcgtccttccttccctggcccttggctgtgacacaagatcctgcnnnnnnnnnnnnnnnntcgttctggatttccttttatttttctttttagttttccatcttctccctccctggtgctcattggaatctgagtagagtttgggggagggtccctgccttcttgtacctcctccccaca

SEQ ID NO: 13756 - DNA, 631 bp, Macaca Fascicularis
tgttgataacccaattgagagcaataacatttttctggtggcccctttgatcatctgccacgtgattgacaagcgcagccccctgtatgacatctcagcaactgacctggccaaccaagacttggaggtcatagttattctggaaggagtggttgaaactactggcatcaccacacaagcacgaacctcctacatcgctgaggagatccaatggggccaccgctttgtgtccattgtgactgaggaagaaggagtgtactctgtggattactccaaatttggcaacactgttaaagtagctgctccacggtgcagtgcccgagagctggatgagaaaccttccatcctcattcagaccctccaaaagagtgaactgtctcatcaaaattctctgaggaagcgcaactccatgagaagaaacaattccatgaggaggaacaattctatccgaaggaacaactcttccctcatggtaccaaaggtgcaatttatgactccagaagggaaccaaaacacatcggaatcatgacagcaagataaccccccaagacagtcttttatcaagtttccatggtttatgccaggcactgtcagactgaaccagagctggaacacaataatgtgtctttcc

SEQ ID NO: 13757 - DNA, 705 bp, Macaca Fascicularis
  misc_feature (1)...(705): n = A,T,C or G
ccnnnnnnnnnnnnnnntcccggaggagaaggctgagacccgagaagggagcccagcctgtcccatnnnngcctgggaagccctgttnnngnnctgggccacagcagaggccaccaaggnnnnnnnnnncccatgcacctgccgcgccctggaaaccatggggctgtgggtggactgcaggggccgcgggctcacggccctgcctaccctgccagcccgcacccgccacctcctgctggccaacaacagccttcagtccgtgcccccgggagccttcgaccacctgccccagctgcagaccctcgatgtgacgcagaacccgtggcactgtgactgcagcctcacctatctgcgcctctggctggaggaccgcacacccgaggccctgnnnnnnnnncgctgcgccagccccagccttgctgcccatggcccgctgggccagctgacaggctaccagctgggcagctgcggctggcagctgcaggcgtcctgggtgcgctcaggggtcttgtgggacgtggcactggtcgccgtggctgcgctgggcctggctcttctggctggcctgctgtgtgccaccacnnnnnnnnnnnnnnnnnnnnnnnnnnnnnnnnnnnnnnnnccaggccaggggnnnnnnnnnnnnnnnnnnnccccagactccaccaagcctggtcagcccaaaccactagaagcccaaaaaaa

SEQ ID NO: 13758 - DNA, 653 bp, Macaca Fascicularis
gccagaggactgtcaacggagagaatgcagtaccaggctcctggccctggcaggtgtccctgcaggacagcagcggcttccacttttgcggtggttctctcatcagccagtcttgggtggtcactgctgcccactgcaatgtcagccctggccgccactttgttgtcctgggcgagcatgacctatcgtcaaacgctgagcccttgcaggttctgtccatctctcaggccattacacaccctagctggaaccctaccaccatgaacaatgacgtgacactgctgaagctcgcctcaccagcccagtacacaacacgcatctcgccagtttgcctggcatcctcaaacgaggctctgactgaaggcctcacatgtgtcaccaccggctggggtcgcctcagtggcgtgggcaatgtgacaccagcacgtctgcagcaggtggctttgcccctggtcactgtgaatcagtgccggcagtactggggctcagatatcaccgactccatgatctgtgcaggtggcgcaggtgcttcctcatgccagggtgactccggaggccctcttgtctgccagaagggaaacacgtgggtgcttattggtattgtctcctggggtaccaaaaactgcaatgtgcgcgcacctgccgtgtatact

SEQ ID NO: 13759 - DNA, 767 bp, Macaca Fascicularis
  misc_feature (1)...(767): n = A,T,C or G
gaagttgccatgctgtnnnnngagcnnnacagnnnnntnntcaagggacgaccattgtcctacaagacattcttaatatgggttttgattagcatctatcaagggagcaccatcannnnnnnnnnnnnnnnnnnnnnnnnnnnngagttcgtgcacatcgtggccatctccttcacctcgctgatcctcaccgagctgctcatggtggcgctgaccatcnnnnnnnnnnnnnnnnnnnngacagtggccgagctgctcagcctggcctgctacatcgcctccctggtgttcttacacgagttcatcgatgtgtacttcatcgccaccttgtcattnnnnnnnnnngtctccgtcatcactctggtcagctgcctccctctctatgtcctcaagtacctgcgaagacggttctctccccccagctactcaaagctcacatcgtaggccgtgtgctcgctggagggggccctggtctcggcgcttccctgatggacagagctcaagttccatttctattaatcgccacctgtggattttgcagcaattgctaacacgtgcagttttaatgggaagaggctctgcgcctaaacggagccctaacactgcatcaacgggagggaaggtcctgaaagagacccatctgggcctgtctgaacccctcgttcttcatgtctgagtgaatgtgaatatgttaaagctggtggctcagctgggaggtttatgtgggtcactgtgcgagcttccttatgacttgaatttgtcgtcac

SEQ ID NO: 13760 - DNA, 739 bp, Macaca Fascicularis
attatgtgcgttccaagattgccgaatatatgaacaatctcattgacatgggagttgcagggttcagacttgatgcttccaagcacatgtggcctggagacataaaggcagttttggacaaactgcataatctcaacagtaactggtttcctcaaggaagtaaacctttcatttaccaggaggtaactgatctgggtggtgagccaattaaaagcagtgagtactttggaaatggccgggtgacagaattcaagtatggtgcaaaactcggcacggttattcgcaagtggaatggagagaagatgtcttacttaaagaactggggagaaggttggggtttcgtgccttctgacagagcacttgtctttgtggataaccatgataatcaacgaggacatggggctggaggagcctctattcttaccttctgggacgccaggctgtataaaatggcagttggatttatgcttgctcatccttatggatttacacgagtaatgtcaagctaccgttggccaagaaattttcaaaatggaaaaggaaagctggtcttgaacttctgggctcatgcaatcctcctgcttcagcctccctaagtgttgggattacactcggccaaatttttaaaaattttgtttcagagagaaaaacattacttagtataaacatttttctgcattttcttctaaaatatgaatcaaaaacttaatttgtatccttttatcacaaacagctaaaa

SEQ ID NO: 13761 - DNA, 739 bp, Macaca Fascicularis
  misc_feature (1)...(739): n = A,T,C or G
gtgagggcagcaggtgtgagtggctgcacctctttnnaggacacaggactgggcttaaggaagggagggccagagcgcccgccttggtggatgcaggattcgctccttattagggcgtgagtgctacattctgaaaggatttattttaggacaaggcacaagcacaggggagacaggcaacaccagccctcaggctgcactctctatttggagcggaacttctttggcagccccaggtctcctgggatcttcctcggtgtcctgcggaggctctggctccagcaccagcatgggcnnnnnnnnnnnnnnnnnnnnnnnnnnnnnnnnnnnnctccggccaggcccaaggcgaggcggcttgaccggggtgggcggtggcgctgcagggcctttccggcccgaaagggcccttcggaggctnnnnnnnnnnnnnnnnnnnnngcgccgcagccgctgggccctggactccaccggctcctcgtccgagctctctccnnnnnnnnnnnnnnnctgctctgggcccagctcgnnnnnnnnnnnnnnnnnnnngggctctggtgccttctggaaagcgctggctgggacttcaccctcctccttgaagagcagaacgtggagcttcccgcgcgccaccagcagcccatggttggcctccagccgctgcacctgggctgcgcggcgcaccgcgcgctcttgggcggcgttggcgtgcgagcttacgcgctccgccttggccagc

SEQ ID NO: 13762 - DNA, 545 bp, Macaca Fascicularis
cacacccccctccccagatcaaagggaatattagtttttaatttgaatcgactgaggtgccaggagaaactgcagccccaggcacccagacaggaccaggatggcccctcgccccacccccactgcctctccccaccttttccaacgtgttgcatgctgggagctgggggggtggaggaaggggctgacggcttctttcaggaggctgaggtttggaggcaaaatcaacctgggagaccaccccggccgcggcgcctcagtggacaggtgggaggagaagaaaacttcttaccttgggggaggaacatcccgcttccttatccttagcttttttgtttcccctccccactgccccttttaatttatttggttgtttgcggagggaggggggaggggggaggctgggctgggaactgtccgaggtgctgagctgaggcgggacaggaatcctcccggtagagtaccagggacggggttgggcctggggccgtgtccaaggtgccaatgatgcgggccgacagagcgggccgcactgtctgtctgtc

SEQ ID NO: 13763 - DNA, 1055 bp, Macaca Fascicularis
  misc_feature (1)...(1055): n = A,T,C or G
gcatggattcatgnnaagcgttacgggttttgtnnngtctgttttaaggtatggcttgccagtgaacttccaagcaatgctacttcagcctaataagaaaactttgaagaaactgagagaagtattacatgaattgtataaacatctagacagcagtgcagcagctattattgatgctcctatggatattccaggtttaaacctgagtcaacaagaatactacccctatgtgtactacaagattgattgcaacttgctggaattcaagtgaaaatgggctcctcccccgacaatcctgtccttgtgttggtgtgtgctaacagaaataagttgcagtatggtcgtactttcacctctagtatcctttgcttgcttctgaccccctttcgtaggtgaattctcccacagtggtctgtatctcaacattttctttttaaaggaaaatatatatatatatagtttctttttattgatcaggtctgtaaatgtgtactaaaaaaatcagagtttatttataaacagaatagtttatttaaagagaaggtcttttccttattgatatcatggtatgcattaattccatttgttactattgtgcacaaaagccctgttcacaagggaatagtgtaaacatttatactgttttgttcactgtatttagtagacataactgttgaatagttactgaatcgtgatgtaaagaatatgtgaccatcttcaggtatgggatttctaaatgtttcaaatttcaatcaatgagcactgtcaacacccacaggaagaataaaattacctgtgcaaaggtgtattgtggtgtgtgtaacttaagattacagttcagtttgagagttaaatgatgtcatagctcacttgctatgatactgccaggattttgttatgtgctgaggtgtaaccatttgtgttatctgacgtatgatttaattgagccaaatttgggtcagaactaaatttgaagattacttctcagtatatgatgggtatttacatttgaacactagaattttaggtctctcaaatannntatagnnnnnngg

SEQ ID NO: 13764 - DNA, 688 bp, Macaca Fascicularis
  misc_feature (1)...(688): n = A,T,C or G
gagcagcaagctgtgnnnnngaccctgcaggaggacagagcatccctgaccctttcagggggccnnncngcactggcctttgaccnnnccaaggtaccaggcccagaggcagcctccagnnnnnnnnnnnnnnnactgggcctggcaaaacgcgtgtggagcctggagcggcgactggcagctgcagaagagacagctgccagccccaggaagagtccccggcctgcagggcctcagctcttcttaccaggtaaggcacgtatgcctgtgactcaagtagggctgtgtgctttaatctggaactcagtnnnnnnnnnnnnnnnntcatgctccagagagaatgcctgcctattcagagaaggttgtggaatgggattgctgccaggttcaggagcctccccatcatgttttcccacagacccagatccccagagaggtggccctggacctggggtcaggaggcggtgtccaggagagtcgctcatcaaccctgggttcaagagtaagaaaccagctggnnnnnnnnactttgatgagacctgaagnnnnnnnnnnnnnnnnnncccacggggagtctgcctgtgaggggacaggcagtcttcgaggccctcatcagagaccccccccccacaccaccaccttccacctgcctgtcctgggccaggactaaggcgtctcctcaagtcct

SEQ ID NO: 13765 - DNA, 845 bp, Macaca Fascicularis
  misc_feature (1)...(845): n = A,T,C or G
gatttnnnnnnnnnnnnnnnatatgnnaaacntnnnatactcattaattcttttgttaaatatttatttccatgatagcatcattcnnnnnnnnnnnnnnnnnnnnnnactggtgaggcaaatataatatatataaatatgctacatatatatttataaaatttctagtgggagttctatataaatgtttctttggtannnnnnnnnnnnnnntttaaagttttnnnnnnnnnnnnnnnntttcctaagttacttttcagttaggtaactnnnnnnnnnnnnnnnnnnnnnnnnttctataatgaggcacatattaatacagtttttatatggtatctatgaaagagttcacttcatagagaataatacttgagcaaatgtatccaagaaagcaagcaaatgaaaaggaacctatttatggaataaactccagatcagaaattcagtattnnnnnnnnnnnnnnnntcttcttaactgtatttattaaaacttgtaataatgtgatttttttcaagaatattagttcaaattgaaatggtttcaggccacatggaaatcttttaagttatttgttgaggtaccatatatttagggtgctaggggcaagtaatattaatatgtgcaataggaactactggtttgaatgtgtnnnnnnnnnnnnnnnctgagttctggcaacatccagcaaaactactgcttattctccaaagaatattgggagctctcaatcctcagtgatatgggaaagagaactgagtatttgccctatgactgagttttctataggaattttattaaagaatgtttaattttgttgtccttcttaatgttctcagtcaaataa

SEQ ID NO: 13766 - DNA, 763 bp, Macaca Fascicularis
  misc_feature (1)...(763): n = A,T,C or G
gttcagggaggacctggctgccctgataaggaaatcgagaaccggaatgcaaagctggacatgccgtacgagtanntgcggcccagcctggtggaaaacagtgtggccatctgagcgtcgccagcctttggttacttcagcccccctcacccaagccacaggctgaccccttggtggctacagtcctgccctcccaagccccacactcttcccatgtcccaccctccctcaagggccaccttttcatggtctctgcacccagtgaacacattttactctagaggcatcacctggggccttactcctttttccttcctccctcctttcctatcttccttcctccctctcttcctcgttcttcattcagatctatagggtaaataggcacaattatataaaccatttcaaggctagaataaggggataatacgtattactccacaccttttatgaatcaaatatgattttgttgttgttannnnnnnnnnnnnnnnnnnnnnnnnnnnnnnnnnnnnnnnnnnnnnnnnnnnnnnnnnnnnnnnnnnnnnnnnnnnnnnnnnnnnnnnnnnnnnnnnnnnnnnnnnnnnnnnnnnnnnnnnnnnnnnnnnnnnnnnnnnnnnnnnnnnnnnnnnnnnnnnnnnnnnnnnnnnnnnnnnnnnnnnnnnttatttcctaagctggaaataggattttgaacccaaattgagtttaacaataacaaaaagttatttacactaaagatggaaaataactaggactaaag

SEQ ID NO: 13767 - DNA, 742 bp, Macaca Fascicularis
  misc_feature (1)...(742): n = A,T,C or G
cannnagtcccggcaggccaacacaggcctcttcaannngcgtcagatcgtcctcgccaaggtggaccaggccctgcacacgcagacggacgcagaccccgccgaggagtacgcgcgactctgccaggagatcctcggggtcccggccacgccaggaaccaacatgcctgcaaccttcggccacttggcgggtggctacgatgcccagtactacgggtacctgtggagcgaggtgtattccatggacatgttccacacgcgcttcaagcaggagggcgtcctcaacagcaaggtcggcatggattacagaagctgcatcctgagacccggcggctccgaggacgccagcgccatgctgaagcgcttcctgggccgcgaccccaagcaggacgccttcctcctgagnnnnnnnnnnnnnnnnnnggactgcgagccgcaggtctgctgaggcccggcactgcgactgcccagactggcccgcgctcccgccgccctggtgccttagcccctggcccaggatggggcaggctctggcatagcgcccgggactggcagggtggctgagcggctgtctcttgtctcttgtcattgtctgtccccacccggtggcccacccggctagagacggcgtcctcaagacatctggagggctctcgtggctgccagggcctcgtctttgttgcactaacacgccccctccctggtaaacgtccctggtcaggagatggctnnnnttgaaaga

SEQ ID NO: 13768 - DNA, 737 bp, Macaca Fascicularis
  misc_feature (1)...(737): n = A,T,C or G
gctaaaaggcatctagtncccntgtttattcatatacatatatttttttctttttacccatttgttcatataagaatgatctgattgaccgtgttggtctgtactgattccatttgatgtggtgaaaagcagnnnnnnnnnnnattttatgtcaagggnnnnnnnnnnnnnnnnnnnnnnnatnnnnnnnnnnnnnnnnnnnnnnnnnnnnnnnnnnnnnnnnnnnnnnnnnnnctcaataaaattatagctctaatgtttgcatataagggaagtagttatcatgttagtannnnnnnnnnnagtataagccccaccccaaaattagccagtaatcctgtaggaaggtactgtatgatcaaatgtttaatcatataaatagaatnnnnnnnnnnnnnnnnnnnnnnnnttctagtgtatcaaaattcttttatttcatcattcacttcactgtgctgttgnnnnnnnnnnnnnnnnnnnnnnnnnggttagtgaaaggaagataaacctggatgttactccaaaacttagttaatgaatgtttaaataattcaaattttatctgcctctcttgtaatttggatctcttctcaatgtacatagtgctaacatgaagacctttttctgcactatatgcaaacagggtaactaaaacaaagccactttcaatccttgaaggtatatccaggtttatgacagtaattgtgtttacattttatggtgcctagtatgacaaa

SEQ ID NO: 13769 - DNA, 756 bp, Macaca Fascicularis
  misc_feature (1)...(756): n = A,T,C or G
cagagagaccgcctatataaggcatgcgcaggcgtgggagcgnccnnntcnnnncggcgcnnnnnnnnnnnnnnnnnnnnnnnnnngggccgccgccccgcccgttgttaccggtattgtaagaacaagccgtacccaaagtctcgcttctgccgaggtgtcnnnnnnnnnnnnnnnnnnnnntttgacctggggcggaagaannnnnnnnnnnnnnnnnnnncgctctgtggccacnnnnnnnnngatgaatatgagcagctgtcctctgaagccctggaggctgcccgnnnnnnnnnnnnnnnnnnnnnnnnnnnnnnnnnnnnnnnnnnnnnnnnnnnnnnnnnnnnnnggctccaccccttccacgtcatccgcatcaacaagatgttgtcctgtgctggggccgacaggctccaaacgggcatgcgaggtgcttttggaaagccccagggcactgtggccagggttcacattggccaagttatcatgtccatccgcaccacacctcacaagnnnnntncggagcttgaggccctgcgcagggccaagttcaagtttcctggccgccagaagatccacatctcaaagaagtggggcttcaccaagnnnnnnnnnnnnnnnnnnnnngacatggtggctgaaaagcggctcatcccagatggctgtggggtcaagtacatccccaatcgtggtcctctggacaaatggcgggccctgcactcatgagggcttccaatatgctgcccccactta

SEQ ID NO: 13770 - DNA, 587 bp, Macaca Fascicularis
  misc_feature (1)...(587): n = A,T,C or G
ctcccgagtaactgggcttgcaggtgcctgccaccatgcccagctagtttttgtatttttggtggagatggggtttcaccatgttggccagccctggtcttgtattcctgacctcaggtgatccgtctgccttggcctcccagggtgctgggataatacgtgtgagccaccgcgcccatcctggagtggccttttatgaggagaggggacccgtcaaatctgtgccttatggaggggtctggcagcggctacaattgtcttgtcccctccaccccgcgactccccccggaacacctcccccagacgttttcacagcaccgttcacagcggttgggccaaaaagagattttttcttcttcatttcctnnnnnnnnnnnnnnnnnnnttggacaccccaggctgccgcccctnnnnnnnnnnnnnnnnnnnnnnnnnnnnnnnnnnnnnnnncctgctgcctggagccctccccgggatgtgggccagtccccnnnnnnnnnnnnnatgccgctgggtgcccggaggcagccgtggtgtctcggtgganggcagccannntggnncacccatgggtcccgcgcccatgc

SEQ ID NO: 13771 - DNA, 695 bp, Macaca Fascicularis
  misc_feature (1)...(695): n = A,T,C or G
tgcatcaagctttgaaccacgatctttgatcacctctgataagggatttgtgaccatgactctggaaagcctagaggaaatacaggatgtcagctgtgcttggaaagaacttaacagaaagctgagtagtaatgcagtgtctcagattaccagaatgtgcctcctgaaaggaaatatgggtgtttgctttgatgttcccacaactgagtcagaaaggttacaggcagagtggcatgattccgactggatactctcagtgccagccaaattacctgaaattgaagaatattatgatggaaacacatcttctaattccagacagaggagtggctggtcaagtggtcgatcgggccggtcaggccggtcaggtggtcgatctggtggccggtcaggtagacagagtcgacaagggagtcgctcaggaagtcgacaagatggtagaagacgaagtgggaataggaatcgatcaagaagtgggggccacaaacggagttttgactgagtatttgatagttaatctaccagtgtgagcttgcctatttctgcctaatcatgtacattatccaccaaaaattaggtcatcatagttgaggtatgtgtctgctatttgcaaagaagttggtcgtatttttttaaaaagtantttcacaagaatggttgtaaacaaatctactttcccagtataccttgaaaaa

SEQ ID NO: 13772 - DNA, 696 bp, Macaca Fascicularis
  misc_feature (1)...(696): n = A,T,C or G
cagcttgcagtgagcaccaagctgagacnnnccgctcctgccccaccaccagccccagctgtagcaaggcacatgctgtttgtgagccagggatgctcccctccaggatggagtgggggtgagcatgtggaacgcagtgtgtttatattttattgttattttttgaaatnnnnnnnnnnnnnnnnnnnnnnnnnnnnnnnnnnnnnnnnnnnnnnnnnnnnnnnnnnnnnnnnnnnnnnnnnnnnnnnnnnnnnnnnnnnnnnnnnnnnnnnnnnnnnnnnnnnnnnnnnnnnnnnnnnnnnnnnnnnnnnnnnnnnnnnnnnnnnnnnnnnnnnnnnnnnnnnnnnnnnnnnnnnnnnnnnnnnnnnnnnnnnnnnnnnnnnnnnnnnnnnnnnnnnnnnnnnnnnnnnnnnnnnnnnnnnnnnnnnnnnnnnnnnnnnnnntctggccagaactcagtgtgtttagttctctggaccacagccaaaggggaataaacccaccttcccttctcctttacttgggagagggagaccatgaccgaagccagaattctgatttnnnnnnnnnnnnnnnagggcagtgacctggttttcacagcatagttgaaccccaaacattgtaaaatgtgtccctggcttctgagcttgcccaaagtaatgtctgactgttggtttttcccttcacaggggacga

SEQ ID NO: 13773 - DNA, 713 bp, Macaca Fascicularis
cggatacagccgacaccatgggtttcggagacctgaaaagccccgccggcctccaggtgctcaacgattacctggcggacaagagctacatcgaggggtatgtgccatcacaagcagatgtggcagtatttgaagccgtgtccgggccaccgcctgctgacttgtgtcatgccctacgttggtataatcacatcaagtcctacgaaaaggaaaaggccagcctgccaggagtgaagaaagctttgggcaagtatggtcctgctgatgtggaagacactacaggaagtggagctacagatagtaaagatgatgatgatattgatctctttggatctgatgatgaggaggaaagtgaagaggctaagaggctaagagaagaacgtcttgcacaatatgaatcaaagaaagccaaaaaacctgcacttgttgccaagtcttccatcttactagatgtgaaaccttgggatgatgagacagatatggcaaaattagaggagtgcgtcagaagcattcaagcagacggcttagtctggggctcatctaaactagttccagtgggatatggcattaagaaacttcaaatacagtgtgtagttgaagatgataaagttggaacagatatgctggaggagcagatcactgcttttgaggactatgtgcagtccatggatgtggctgctttcaacaagatctaaaatccatcctggatcatg

SEQ ID NO: 13774 - DNA, 1061 bp, Macaca Fascicularis
  misc_feature (1)...(1061): n = A,T,C or G
acattttatatatgnntcngggttcttnnngacttttttttcccnnnnntccaactgcatcctttttttttttttttttaagagggaattagaaaatattaaatnnngcatgtaatatatctgctgtcatcttagttggaccaacttcccatttatttatcttaaaactatacagttacatcttaattccatccaaagaagatacagtttgaagatagaggtgtactctctacaatgcaatttactgtacagttagaaagcaaaagtgttaaatggagaagatacttgtttttattaaacattttgagatttagataaactacattttaactgaatgtctaaagcgattatcattttttcccccaagttagtcttacatcttttgggtttgaatgaaggttttacataagaaattgttaaaaacaaggggggtgggtaataaatgtatataacattaaataatgtaacgtaggtatagattcccaaatgcatttggatgtacaaatcgactacagagtacttttttcttatgatgattggtgtagaaatgtgtgatttgggtggccttttacatcttgcctaccattgcatgaaacattggggtttcctcaaaatgtgtgtgtcatacttcttttgggagggggtttgttttctttggtttattttctgagactcctannnnnnnnnnnnnnnnaacttagagacatttaattttgttaatcctgtctgggacacttaagtaacatctaaagcattattgctttagaatgttcaaataaaatttcctgaccaaattgttttgtggaaatagatgtgtttgcaatttgaaaataactttctgttcaaaaggcaaaattaatgccatttaaaaaaatacaaactatgctactcttatacaggggacccatactttaaaatctccagacttgcttatatctannnnnnnnnnnnnnntcataaagtgaatgacaaaccctttgaatgaaattgtggcacaaaatctgttcaggttggtgtaccgtgtaaagtggagatggggtaaaaagtggttaacatactat

SEQ ID NO: 13775 - DNA, 756 bp, Macaca Fascicularis
  misc_feature (1)...(756): n = A,T,C or G
gcaacttcagcacagaggccacagaagtgagcaagaagttcccaggcatacggctttacctggctacactggcgnnnnnnnnnnnnnngcctgtgttgagggagtacctgatgtctggaggtatctgccctgtcaaccgggacaccatagactatttgctttcaaagaatgggagtggcaatgctannnnnnnnnnnnnnnnnnnnnnnnnnnnnnnnnnnnnnnnnnnnnnnnnnnnnnnnnnnnnnnnnnnnnnnnnnnnnnnnnnnnnnnnnnnnnnnnnnnnnnnnnnnnnnnncgacctggttcccatgtactcctttggagagaatgaagtgtacaagcaggtgatcttcgaggagggctcctggggccgatgggtccagaagaagttccagaaatacattggtttcgccccatgcatcttccatggccgaggcctcttctcctccgacacctgggggctggtgccctactccaagcnnnnnnnnnnnnnnntgggagagcccatcaccatccccaagctggagcatccaaccnnnnnnnnnnnnnacctataccacaccatgtacatggaggccctggtgaagctcttcgacaagcacaagaccaagttcggcctcctggagactgaggtcctggaggtgaactgagccaggcttcggggccaactccttggaggaacccagttgcaaatgcttttatgctctgtaaatttggaagcgtcatgggtgtctgtgggttattaaaagaaat

SEQ ID NO: 13776 - DNA, 1688 bp, Macaca Fascicularis
  misc_feature (1)...(1688): n = A,T,C or G
ctccnnnnnatgacagcacngcccaggagaatggctgccgcaagactctgagtgccgcctctgcatgtctgtgaccannnngnnnagnnnnnncagcgagcaggcnataccacaggcannnnnccaggnnnnnnnnnnnncttggctggacagggaaaagtgcaagcaatttgtggctcggcacacgccccagctgctgaccctggtgtccagggactgggatgcccacaccacctgccaggctctcggggtgtgtgggaccacgtccagccctctccagtgtatccacagccccgacctctgatgagaactcagctgtccaggtgagtccagctgcaaaggaagagccaagtgagacgggctctggggaccatggtgaccaggctcttcccctgctccctggcccttgacagctgccacactgaaaagaagcctcagatcccacaccaccctcctcgccgcccttcctcgggagtcacttccactggtggaccacgggcccccagccctgtgtcagccttgtctgtctcagctcaacagaatccgacgccagagccacttccatcctctctggtgtgaggcacagcaagggcagcatctggaagagctctgcagcctccacgcctaccacaacctcccagggctaggctcaggagaaaccagccactgctccacaggacagggagtagaagctgggccctgcctcacacccacccccatgcattcaaagactggcttttacagctatttgtaattcaaaattcagaagaataaaaaatgggaacatatagaactctaaaagatagacatcagaaattgttaagttaagctttttcaaaaaatcagcaactctccggcgtggtcgagggtggacactgcacactctggcatgatgagatggcgaccaagcaagctttcttcctcgagatgctctgctgcttgagagctgtcgctttgttaagatataaaaaggggttttctttttgtctttctgtaaggtggacttccagcttttgattgaaagtcctagggcgattctatttctgctgtgatttatctgctcaaagcccagctggggttgtgcacactagggacccattcctgtgtaatgcaatgctgcaccaatgctaataaagtcctattctcttgtatgagaaagaaaaagacaccgtcctttaaagtggtggctcacacctgtaatcccagcaccttaggaggccgaggcaggaggatcacttgaggtcagccaacatggtgaaaccctgtttctactagaaatacaaaaaattagccgggtgtggtggcgcgtgcctgtaatcccagctactcagaaggctaaggcaggagaatcgcttgagcacaggagaatcactggagnnnnnnnnnnnnnnnnnnnnnnnnnnnnnnnnnnnnnnnnnnnnnnnnnnnnnnnnnnnnnnnnnnnnnnnnnnnnncagtaaataaatacataaaaagtgctgcagtagctgtggcctcaccctgnnnnnnnnnnnnnnnggcctacctcactctctcccttggcagagaannnnnnnnnnnnnnntcctcnnnnnnnnnnnngctcccagcctgccctccagctgctgctctcccctcccagtctctactcaatgggatgaggtgaggtcgtgaggacaccaaaaatctaaaaataaacaaaaacccaa

SEQ ID NO: 13777 - DNA, 730 bp, Macaca Fascicularis
gagttatgtggacactaatatatgatactatttatgcccatcaggacaaaagagatgatgttttgattggtcttaagtccacggctctgcggtttggagaaaacaccaagctgtggctcagcggcttcagtgttgcaatgctgggggcgctgagcctagtgggtgtgaacagtggtcagactgctccctactacgctgccctgggtgctgtaggagcccatctgactcaccagatttacactgtagacatccacagacctgaggattgttggaataaatttatctccaaccgaacactgggactaatagtttttttagggattgtcctcgggaatttgtggaaagaaaagaagacagacaaaacaaagaagagtacagagaataaaatagaaaattaatgaatgaaatttttctaggaattattaaaacattttttttcaaaatataattagatttgaatataaaatctgatacaatatgttaaagaattaagaacctgaagatttagaacatatttacctggattttaattcaattatttgctagcaaaattcccccgtgtcacagaaaccagggactcttcaggatttgagatggccttgagtattttacttgatacattcttctgcccatcgtaattctcacctgaagttatgaggattgtacaagttttggcactttagaaaaagcctgatgtgggtctttcgtaaaagaatgtctctataagaaa

SEQ ID NO: 13778 - DNA, 886 bp, Macaca Fascicularis
  misc_feature (1)...(886): n = A,T,C or G
tttactcannnncaggaattcgaaatattggcatatggttcttttggattagattatataaaatcagaagaggtagaaccaggccccaagcactcctttttctctgcatgatacttctgcttattgtccttcacactagctatatgatttatagtcttgctccccaatatgttatnnnnnnnnnnnnnnnnnncttaatagagactaatataacttctgataaccataaangcaattcaacccttnnngtgccaaagagatgtgatgcagatgctcctgaagatcagtgtactgttacccggacatacctattccttcacaagttctggttcttcagtgctgcttactattttggtaactgggcctttcttggggtattcttgattggattaattgtannnngntgtaaagggaagaaatcggttattgaaggagtagacgaagattcagacataagtgatgatgagccctctgtttattctgtttgacagccttctctgtcttaaaggttttataacactgactgaatatctgttatgcatttttaaagtgttagactgacattaggatgagctaactagctttcatcaaaaatgggagcatggctataaaacaactatattttattatnnnnnnnnnnnnnnnnnnttgtatcatagattaacattttaaattaccataataatgctatgtaaatataaaactactggctttgtgagggaatgtttgtgcaaaattttttcctctaatgtataatagtgtttaattaaaaatcttccagaattaatattcccttttgtcactttttaaaaacataatacatcatttgtatctgtgccttaggttctccagagtgatgtggaatttnnnnnnnnnnnnntctgat

SEQ ID NO: 13779 - DNA, 1296 bp, Macaca Fascicularis
  misc_feature (1)...(1296): n = A,T,C or G
catttgcacttggacgatgagatccgctacatcctggacggcagcgggtacttcgacgtgagggacaaggaggacaagtggatccggatcttcatggagaagggagacatgataacgctccccgcagggatctatcaccgcttcaccgtggacgaaaagaactacgcgaaggccatgcggctgtttgtgggagannnnnnnnnnnnnnnnnnnnnnnggcccgctgaccattttgaagcccgcgggcagtacatgaaatttctggcacagacagcctagcagtgctgcctgggaactannnnnnnnnnnnnnnnnnnnnnnnnnnnnntgactgannnnnnnnnnnnnnnntttttctttgcttttagaggatagacttgaggctaggttatctctcctttgtaagattatttgaccagaatcttttgtaatgaaaggatctagaaagcaacttggaagtgtaaagagtcaccttcattttctgtaactcaatcaagactagtgggtccgtggccctgtgtgtgttcatgcgttcagttcagacctaaatgaaagtttcatctcacgaaatgcagctccatagatgctcgtctggatgtgacaccgtacctgccgtgtaagaaggtgcaatcatagataacagctcgccagatagaagacgcttttttctcccaaaattatgccttggggtggggagtggtatgggggaagagctctcaccttaaggggcacacactgagttgcttatgccacttccttgttcaaaataaagtgaatgccttaatcttatgctcatggcttggagttaccttatattcaggtatgtatgatattttgcctactttgttaaaatcgcctcatttagattctttatataattattcttatatatcaataatttatatatgagctgtgttagtattttttcagtgtgaggtctctggattctttcacaatcaagctgttgaattttaacaagagtattagtacataaatcttctgctcaacaattctgagacaggattatgcctagtttgttacatcatagaaaaaccccaagttaacttcatgttttggaagggcaggtcatttttaaagtatttccttttttaactggatgaaaaatcttcatgtcaggattaattttttaatcacctccacattggacagaagaaactcaagccttaaatgtttaagtaaactctgtctcaattttaggattaaagtatccacaggtggtgtgatgataacatacataccccagggcttgcttctgtcaagtatgactctatttca

SEQ ID NO: 13780 - DNA, 622 bp, Macaca Fascicularis
  misc_feature (1)...(622): n = A,T,C or G
tgccagtaaccgacnngatccnnaannnactgtccttccctctcctaccccaccccactcccagacagagcagaagtatttttataagcagagaattttttatgtcttaccagatagaaatgcagggaagggggggcctgctggggagtggggtttggggggccctatcnnnnnnnnnnnnnnnnnnnnngcagaaggcccctccagggggactgctccaacaggaaagggcccctcccccacttctaagcactgagttaggagtgctaactcctaaactgggaccccctcccctgttctcccctaaggccccgttcctgggagggtcacccctcaactgtcactttatggactgtctgtgcaattacgtccaccaaagacctgtgttggggggactgaaggaggggccctggggaccccctgaagcatttctgcctcattttatgtcacctgcttctcccctgttggggctaaggaaggagataggtggcccctaaaagaggaggccctcttctcacccaccccctcccctttggcacagctactcctggctgggggtggggccttgggggtctgggctgggcatccatggtcactgcctcagcccatctaggctgtgcct

SEQ ID NO: 13781 - DNA, 734 bp, Macaca Fascicularis
  misc_feature (1)...(734): n = A,T,C or G
gaccatcaggccctgggtgggcgatggggtgcctgggacctggctcagcccgactgccnnnnncccacagcctggcagcagnnnnnnnnnnnnnnnnatggtggcccagccggtgagggcaggccaaggcctgtgcagtacgtggagaggacccccaatccccggctgcagagtgagccccccaaccctgtccccccaggagaaaccccccagtccctctgatcctgacccaggccctgccaggttcccaccccaggggatgagggaggggactcttgtgcagaaacttcttcttcccagcgccnnnnnnnctcagagtccgggtgagtggcttgtggttagctccaggggagagatgctggccagcctgggaggcagcatcactgcccagcgttctctgcccacagacttcgtgcccattgacctggacgagtggtnnnnnnnnnnnnnnnnnnnnnnnnnnnnnnnnnnnnnctagtggctgttgggagagggcgctgctgcacagccgacctgtggccaggagagaagcatgatgccccacccacccaccgcgcctggctgggtgccggccacacctgaagtgccagcatttggacttttgcacctgttgttcccttggcccggctgtcccaaccaagctgccatggccaggggccgaacccatctgacctcagcccnnnnnnnnnnnnnnnnnnnnnngcgaccggcccctggggctggtggggaggagc

SEQ ID NO: 13782 - DNA, 701 bp, Macaca Fascicularis
attactaacctgtcccaagaatagtaacatccacttctagtttaaaacagcaacaggaacttttgtgaagacacattcatctctacagaacttcagtttaaatataatctagattaatgactgagaataagatccacatatgaactcattcctaagtgagcattgacatacccagttacaaaaagcacttctgttggtcacagaaacatgactagattttgcatatctccaggtagggaaccgagtagactaccttatcacctgctaagaaaacttgctactaaactattaggccatcaatggcttgaataaaaaccagagaagggtttgcccaggaggtctcatgtttggccctttggaattgtgggtagaaatcagaaacaaaatgaggggaagcagcaaggagtctaaggccctggcgatttggtcatctaccgcattggttcatattcagaaagtgttatctcattgattatattcttgttaaacaaatctgcttaagtaattattattcaaataagattatactaatgcatttatatgtcactgttttaaagagatatttaattttaaatgtgttacatggtctgtaaatatttgtatttaaaaatgccgtgcattaggcttgggaaacataatgttagtggaaatgtaaaatgtaaaaactttagatcgtttgtagtgataaatatttttaactt

SEQ ID NO: 13783 - DNA, 735 bp, Macaca Fascicularis
  misc_feature (1)...(735): n = A,T,C or G
gaaagaggatgaactagagctgagaaaagnggagatgtttttagtgtttgagcgctgccaggatggctggttcaaagggacatccatgcataccagcaagataggggttttccctggcaattatgtggcaccagtcacaagggcagtgacaaatgcttcccaagctaaagtccctatgtctacagctggccagactagtcggggggtgaccatggtcagtccttccacggcaggagggcctgcccagaagctccagggaaatggtgtggctgggagtcccagtgttgtccccacggctgtggtatcagcagctcacatccagacaagtcctcaggccaaggtcttgttgcacatgactgggcaaatgacagtcaaccaggcccgcaatgctgtgaggacagttgcagcgcacaaccaggagcgccccacggcagcagtgacacccatccaggtacagaatgccaccggcctcggccctgcatctgtgggcctgccccatcactcgctggcctccccacaacctgcgcctccgatgccaagctcagccacgcacactgctgccatcagtatcagtcgagccagtgcccctctggcctgtgcagcagctgctccgctgacctcccagagcatcaccagtgcttctctggaggctgagcccagtggccggatagtgactgttctcactggactccccacgtctcctgacagtgcttcatcagcttccgaacagtcagc

SEQ ID NO: 13784 - DNA, 864 bp, Macaca Fascicularis
  misc_feature (1)...(864): n = A,T,C or G
cagcaagatctgtccaagagtagcctgtgaanctgatcagttacttaaaaaatgactccttatttttaaatgtttccacattttttgcttgtggaaagactgttttcatatgttatacttggataaagaatttaaatggaattacgtataaattaatataaaatgattacctctggtgttgacaggtttgaacttgcacttcttaaggaacagccataatcctctgaatgatgcattaattactgactgtcctagtacattggaagcttttgttcataggaacttgtagggctcattttggtttcattgaaacagtatctaattataaattagctgtagatatcaggtgcttctgatgaattgaaaatgtgtatctgactagtgggaaacttcatgggtttccttatctgtcatgtagatgattatatacggatccatttacaaaagtaaaagcgggaattttcccttcgacttgaatattatccctgtatattgcatgaatgagagatttcccatatttccattggagtaataaatatacttgctttaattcttaagcataagtaaacatgatataaaaatatatgctgaattacttgtgaagaatgcatttaaaggtattttaaatgtgtttttatttgtaagacattacttattaagaaattggttattcttactgttctaatctggtggtaaaggtatnnnnnnnnnnnnnnnnnnnnnnnagattttcaaaactgaatgagagaaaattgtataaccatcctgctgttcctttagtgcaatacaataaaactctgaaattaagactcactttcagtgcattgtttgagattacaaatagtatttcttaaacttgcttaa

SEQ ID NO: 13785 - DNA, 729 bp, Macaca Fascicularis
  misc_feature (1)...(729): n = A,T,C or G
tatgctgctctgttttgtcttaaaggtcttgagggttgaccatgtnnnntcgtcatcaacattttgggggttgtgttggatgggatgcagagggagaggcagggaaccccgctccttggggcccnnnnnnnnnnnnnnnnnnnaggctccacctcctgtagcctccccaggcccagggccccgtggctgaggcnnnnnnnnntcactgccgctgtgctttgtggaaacgacagttccttgtttttttttgtttctgtttttgttttacattagtcattggaccacagccattcaggaactatcccctaccccgcaaataaaatgaacagttgtggggagacccagcagcacctttcctccagacaccttcattttgatgttcgggtttttgtgttaagttaatctgtacattctgtttgccattgttacttgtactatacatctgtatatagtgtacggcaaaagagtattaatccactatctctagtgcttgactttaaatcagtacagtacctgtacctgcacggtcacccgctccgtgtgtcgccctatattgagggctcaagctttcccttgttttttgaaaggggtttatgtataaatatattttatgcctttttattacaagtcttgtactcaatgacttttgtcatgccattttgttctacttatactgtaaattatgcattataaagacttcatctaagcaaaacgactggtacaataatt

SEQ ID NO: 13786 - DNA, 892 bp, Macaca Fascicularis
  misc_feature (1)...(892): n = A,T,C or G
gatgnnnnnnnntcctcacagctacagagggccggagctggagatgtggtctctgggagtcactctgtacacgctggtctttgaggagaaccccttctgtgagctggaggagaccgtggaggccgccatacacccgccatacctggtgtccaaagaactcatgagccttgtgtctgggctgctgcagccagtccctgagaagcgcaccaccttggagaagctggtgacagacccgtgggtaannnnnnnnnnnnnnnnnnctgactacacatgggaagaggtgtgtcaagtaaacaagccagaaagtggagttctgtccgctgcgagtctggagatggggaacaggagnnnnnnnnnnnnnnnnnnnnctcaggagctttgtgggggccccgttccaggcgaggctcctaacggccaaggctgtttccatcccggggatccccgtgtgctgaccagctaagcaccagcttcttgctgcttttctccacttggtttggaaaatcatagttttcagctccatctgtttggagaaaatacattctcaagcnnnnnnnnnnnnnnnnnnnnnnnnnnnnnnnnnnnnnnnnnnnnnnnnnnnnnnnnnnnnnnnnnnnnngtattattttaggcttattacatagatttggaattcactttttccatgacctagaaaaaaacattccagtgttcaactgttttatattattaaaggacttttaacttgtgagcctctgaaggctgagttttctctttctacttttgtagatgtgtgtgttctgtttcctctgacttggcacatgctcatctgagcgatggatgtgacggatatgtgaaatttgtagaactggttagtcaaacggccagactatttcattaatgtatttcctcaaac

SEQ ID NO: 13787 - DNA, 1599 bp, Macaca Fascicularis
  misc_feature (1)...(1599): n = A,T,C or G
atagagaggccaantnnncccannnnnnnnnnnnnnnnnnnnnnnnnnnnnnnnttgtgtnnnanagagtcaaaattcnnnnagattatgctggccttatacttttcctagaagaagatcactacttagccccagacttttaccatgtcttcaaaaagatgtggaaactgaagcagcaagagtgccctgaatgtgatgttctctccctggggacctatactgccagtcgcagtttctatggcatggttgacaaggtagatgtgaaaacttggaaatccacagagcacaatatgggtctagccttgacccggaatgcctatcagaagctgatcgagtgcacagacactttctgtacttacgatgattataactgggactggactcttcaatacttgactgtatcttgtcttccaaaattctggaaagtgctggttcctcaagttcctaggatttttcatgctggagactgtggtatgcatcacaagaaaacctgtagaccatccacccagagtgcccaaattgagtcactcttaaataataacaaacaatacatgtttccagaaactctaactatcagtgagaagtttactatggtagccatttctccacctagaaaaaatggagggtggggagatattagggaccatgaactctgtacaaagttatagaagactgcagtgaaaatcacaattacagaagcaaaagtgacagtcttctatttttgatatttgtccaaacaggacatacaattgaataaaagagtttaggaactggtttctgctttaatacaaaaacaaaatcttgtaaaaggtgtccaaatacatagtaatcttttccaattatgtctgattaagatttaaaactgaaggtttcattttgggagtaggattttaaagctcaatctgtatctgctaaaactgattattgttgattgatagaagaggggaaatttgatttaaatggcatctattaatctttttatctgaaactttgtacacttttccacttttaaaacctattttaagtacagcaaaatttatttaaaactgtcaaagcagtaaaaagtattaccatgaaatggttagggtattaatggaacaaacccagtttccctctattgacacacttactaggaagggattgcttcactggtttaataattaaaaagttatgtttattaaaacaccctgtcagaacagtcattttcagtattagattcctgtactgttgtgttttgagtgtgctttggaaccttcatagaacacactttcttttggaatgtatttgattgataagaaagtttaaannnnnnnnnnnnnnnntgtagaaaanncannggttttgttttttttttttttcttttagtgctgacaaaataaaatactcatttttgcataaaaaggttcctaatccttttgcagaataagttttgtttactctttatagcaagtttagtgaaggcattctacaagttttgagttagcattatattttaatatttattattgccacattgtataattgagtttgaaataaaacccagctcatgacaatgcattccctgnnnnnnnnnnnnnnnnnnttcaaatacccaccttt

SEQ ID NO: 13788 - DNA, 716 bp, Macaca Fascicularis
  misc_feature (1)...(716): n = A,T,C or G
tacacctccactgatcaggttcccatccaacatgaactcnnnnaaagantnnntctgtatgaccagacaaaagcacctccttttgtggctcgggagacactaagggcctggcaagagaagaatcatccctggctggagctctctgatgttcatcgggaaacaactgagaacatacgtgtcactgtcatccccttctgacccagtgtgtgcccttgattgctttctctgctgcccttccagggagctgccccccggtagggcatgtgcctgtttccctctcagcctggaggctggctggacatctcctacggtcaatgtgcctctcagnnnnttggcagggttgctggactggactcttgttcactttaccttttgccaaatgcagagagggagaccagtgtcagagtcagagtggcctggctcttagcactgaccaaccattgccatttctggcctcgctaggcccaggagaggagggaggcaagccagtcgggtttcctggagcaatgggtgcgccagccctgagcatgactctgccaagcatccagaccacaaatgcaggaatttggccgaggagcagctttaggtatggatgacgactaagccaagctacttcctgagcttctctcagatttccaagagccagagatgaattgtgctgcaacttgccccaattcttaggatttcttctcctctgccactgcagtgattgttag

SEQ ID NO: 13789 - DNA, 1085 bp, Macaca Fascicularis
  misc_feature (1)...(1085): n = A,T,C or G
actagctgtgtacattnnntcannnnnnagcttcctatggagttacgtactattgtttagttcacagctgttcagggcgacagtgagcagatccagacaccagatccagctaggctagatgtacagtatctaactttatctgaactgaacctgttttcctnnnnnnnnnnnnnnnnnnnnnnnnnnnnnnnnnnnnnnnctgtaatacagttctgaaagtacagttttatataataagatgctgatctctttattctttcaagtaagagtgatagtgaacaaattgtgttacttgccttgggattttttgaacgtttgtaaaatgctgtcttcctagtccaaacagctgcagctttgggcatttttctttttaattcttcttcctctgactttgtatcccttaatacctacactctccaattgtaagagaaagggggcagggaagcaatatagcttccattctaaggctgtattcctgttttatgaattactagctgattacagttcagagcattgatcctggaatgtgtgccggagaaatttaaaatactggggtttgtttaatggtgcctatttagagttggcagatgaacagctgttgcattacatacttttgcttttttattgaaannnnnnnnnnnnnnnnnnnnnnnnntttctgttctgttgaattgctatgttcaggatgttcttggggggtgggggcagggactcttttcataataagcacttgttttattttgtgtgtgtggagtataaaggctacacccttattgtaaaaaataataataaaatgaaaaacaatcaccaccaccattattaaactgtaacttgtctagtaaattgtcactagaactatttgctgtgggcatttcctctattctgttacatcattaacagtgccttactgtgcaaggcaccaaaggacataaatatgtacttgcaaagattccagatgagctgttcacgtgggccccttgctgactatattccagccacttaagggttgtttgtaatgaccattagagagaaggactggacctgcagaagaaaccggggtgtttttattctcatcaacaaaccca

SEQ ID NO: 13790 - DNA, 774 bp, Macaca Fascicularis
  misc_feature (1)...(774): n = A,T,C or G
aggtagctatgacgtgaaatatngtgatatggagtannnnngacacatgaacccaccaaactacgctttcttataacgcatatttcttctcagtttaagtgtatgtaaatatcaaagctatatggtatgatttataaannnnnnnnnnnnnnnntgcacattgagactggcacccatctatggtaccactgaaaccctgacccagnnnnnnnnnttgcttggacacccagtcttctttgtttctgcatttaaccaatattgatcacacannnnnnnnnnnctagtcctatgaaagtaatgacttcataaaaatggcattataatttttaaattgatactctgtaggtaggtgctgatataattagttttaataaaacatgctgtaaccatggtatacaacaaaaatacatttatttggtgattgaaattaaggccatatttacaatgacttaatataaggctgacttttatcctgcttcataacttgtacggggaactcaccaagaaagaattcaatactgtgaaatatgcaacaagaagattggcctttacctaggctgtggttcctaagctctgagttttaagcacctgtagatttgtattaaaaaaaagaaaaaatggggccttagtttctggcttttaattttgccagctaaggacataaaacaaaaacaaacaaacaaannnnnnnnnnnnnnnnnnnnnnnncatccattatgtaaaannntatattttagctcctaaaattaggaagaatgtaatctcagaataaag

SEQ ID NO: 13791 - DNA, 889 bp, Macaca Fascicularis
  misc_feature (1)...(889): n = A,T,C or G
acatgcctggtgacnnnncggcaagnnnngcagcccctacgcgtccccaagcacaaggtcccattagccaggtgtcagtggaccagcctgtggttaacacaaccccagagcccacccccaccctcacagtggtgaccaccaccaaggcacaagcccaggagccaactgccagcccagtgccagtgcctcacaccagcccaatccctgaggtggaggccacgtcccccacgacacagccaagccccacaccatacacccagagggccgctggtccaggcacaccccaggcaccggagcaggtagcaactgaggtcatgccaggtactgattccactgggccaacacccaggagctcagggggccctaagatgctagccacagactcgtgccagcccagcacccaaggccagtacctggtggtcaccaccgcgcccctcacccaagccgtggtggacaaaactatcctcctggtggtgctgttactcggggtgacccttttcatcacagtctcggttttgtttgccctgcaggcctatgagagctataagaagaaggactacacccaggtggactacttaatcaatgggatgtatgcggactcagaaatgtgagggggtggggcccggcgggaggccgagccccttccttgtcctttccttttgcctttgagaccaaaccaagtgcttccaaattcctttggtgcaatttaggagatatgccagatgcttaaacacatttaattgctgtcagattaattccatgatcactaaagagttgctgcttttttcatatttatttttgtaaatgatgctgtgcccaggagcagctgggggttccacctcagggtggggcgggcagggccctgtgcccccaggtgtcggagcctgac

SEQ ID NO: 13792 - DNA, 862 bp, Macaca Fascicularis
  misc_feature (1)...(862): n = A,T,C or G
gaacacatggcaagtataaaagttaaaaaaattactgtagaaacattgaataactagaacacaatccactgtttcagctccagaaaagagaaagggctttaatgttttttccagtgaaaataaaaataaatcctcttatattaaatctaagcaactgcttattattagtagtttatacttttgcttaactctgttatgtctcttaagcaggtttggtttttattaaaatgatgtgttttctttagtactactttacttgaattacattaacttagaaaagtacatatgttttgttattttgatctcttaagattaatgtcacagaaatttcttggcattttatttttgtaatgacagaaaagtgggcttagaaagtattcaagatgttacaaaatttacatttagaaaatattttagtatttgaatactatcaacttgtcagtgactttgcagacttaatgatattattaaagttctttttactgaagtttggaaagcatttgctttcagtttggcacaaacagttaaaattttgacattcatattctcctaatttacagctacaaaaactttcttgaaaatcttaattttgaacccatatttcacttaccttatttaaaataaatcaatgaagcttgccttaaattatttttatatggctgttggtctctaggtagcctttggtctattgtacacaatctcatttcatatgtttgcatttnnnnnnnnnnnnnnnnnaaattgttcagtgcttattatcatacctttctgtattttttccaggaaatttcattacttcatgtaatagtctatattttgtgtatttactatgatgaaaaaaannnngttttaattttgaatt

SEQ ID NO: 13793 - DNA, 755 bp, Macaca Fascicularis
  misc_feature (1)...(755): n = A,T,C or G
ccaatcacacggacccagaacccnnnnnnnnnnnnnnnnnnnnnnnnnnnnnnnnagttcgagggcggnnnnnnnnnnnnnnnnnncatgctgggatcctacggctccttggctcgtttccgcaacatatctnnnnnnnnnnnnnnnnnnnnnnnnnnnnnnnnnnnnnnnnntggggactannnnnnnntccagtatttgaagcaagttctcggccagatggtgattgatgaggagcttctgggagatggacatagttatagtcctagagctattcattcatggctgaccagggccatgtacagccggcgctcaaagatgaaccctttgtggannnnnnnnnnnnnnnnnnnnnnnnctgatggagagagcttcctcggttatgtggacatgcttggtgtagcctatnnnnnnnnnnnnnnnnnnnnnnnnnnnnnnnnnnncttggctcagcctctgnnnnnnnnnnnnnnnnnnnnnnnnnnnnngctaagccagaccgaggcccgtaacctnnnnnnnnnnnnnnnnnnnnnnntgtactacnnnnnnnnnnnnnnnnnnnnnnnnnnnnnnnnnnnnnnnnnnnnnnaaaaaggtgttgaaatagagggaccattgnnnnnnnnnaccaactgggatattgcccacatgatcagtggctttgaatgaaatacagatgcattatccnnnnnnnnagttataccctacttttaactttgaacttggctggttcaaagataagactcttcttt

SEQ ID NO: 13794 - DNA, 704 bp, Macaca Fascicularis
  misc_feature (1)...(704): n = A,T,C or G
tcgtgggaaagtgggcgcatctccagcannngctggagaaggactcccatcctcaccgaccccccacagctcctctgacagcacggctgctcggtaggtctggtacagaggttcatcctgcaggggcagctcccagttctgctccttcagcacctctagcccctcctcttccctgtggagaaagaaagggaagggagtcccccagggccacgactactgcccacctnnnnnnnnnnnnnnnnnnnnnnnnnnnnnnnnnnnngcacatgcagattgaatgtagggatcctgacggctccccacgtcaaacctcaggctttttgttttgtttgaaggggaaagnnnnnnnnnnnnnnnnnnncccaggctggtcttaaactcctggcctcaagcaatcctgccaccttggccttgcaaagtgtcaggattacannnnnnnnnnnnnttgcctggcccaaatttcagatctttttatgtgccttttagagaggagcccctgaactaagtgggccccattcctnnnnnnnnnnnnnnnnnnnnnnnnnnnnnnnnnnnnnnnctcagccctctcattgtctggaatgccctgtttgtgtgtcaaggaagctcaacgtggtggactacactctcacacctcccaccagcacgtgtaaccccttatccccccgctcatcatcacctctacccttctactaccaatctcc

SEQ ID NO: 13795 - DNA, 609 bp, Macaca Fascicularis
  misc_feature (1)...(609): n = A,T,C or G
tgggatctgaacatggcggcggtggtagctgctacggcgctgaagggccggggggcgagaaatgcccgcgtcctccggggcattctcgcaggagccacagctaacaaggcttcccataacaggacccgggcactgcaaagccatagctctccagagggcaaggaggaacctgaacccctatccccggagctggaatacattcccagaaagaggggcaagaaccccatgaaagctgtgggactggcctgggccatcggcttcccttgtggtatcctcctcttcatcctcaccaagcgggaagtggacaaggaccgtgtgannnnnnnnnnggctcggcagaacatgcggttgtccaacacgggcgagtatgagagccagaggttcagggcctcctcccagcgtgccccatcccctgatgttggnnnnnnnnnnnnnnnnnnnnnnnnnnnnnnaccctcctaggctattgactgtgaagccctcaggttccgcccggattccagttcttgcctctgaggtccaccagagggcgcataaagcccaggctgctgccaaaccctaccccgccccaccctaccccgccccacaccaaggagccagccaaaagca

SEQ ID NO: 13796 - DNA, 908 bp, Macaca Fascicularis
  misc_feature (1)...(908): n = A,T,C or G
gctnnntncatgtaacttacagnnncacaaataaatagaacttcagttgaaatactgacattaattaaatagagttgtaataaatacaggaatnntctttgtagactcttcacagcatccagaggcaccttccctgactgtcactggggctgcttaaagnnnnnnnnnnnnnnnnnnnnnnnnnnnnnnaaannnnnnnnnnnggccaagggtatgaagtgtccagtgaacagcataggaagggagactgtttgaaatgacacagggaatgaaccagtgggggaaggggggtcctgatctagacattcagagcttgtagaattgctgcatccaggtcagaagaatgtccacttccccaagggctttggtcagagctgcttctatgtccaactaaagggaaaagagggttgaaggtcaaccatgttagctatgagaatagtctttcttctaacccgccatggctaaaatagacctgactccaatccatgggatgggtcacctttgggatggcctctgatgagctcacctgcttgtcacttttcctccatctacatgtgtttgtctgcttcaggggtgaggacaaacaggctagtgagtatcagtgggcaaggaacaaggaaaaggcacatggcatgcctaacaacaggaaccacaaactccagtataaggtggatgtgtcccaccacctgaatccactgcacaggnnnnnnnnnnnnnnnnggctagtctccatcagatgttattgctcttcaccatttatttataggctgatgcatctcttcctcaaataaaaagtgatcaaaatcatnnnnnnnnnnnnnnnnnnnnnnnnngatatttgggttttctttgttgtcataatttggaaaagcaaatatttttctttgttgtcataatttggaaaagca

SEQ ID NO: 13797 - DNA, 745 bp, Macaca Fascicularis
gccaaatcatgaaaattatggaagactgttctgccacctgtgccccaagttggatgagcaaaccactttggatcaattcacagcattaattacaagtgaactgatcatcttctctatattcatttcacaagagctggcttaggtggggtaattaaattgccacctttatggttgtaaaagacaaataaaacgtggcaaatttgattaacacaaaatttcatcaactgctatacttaagtatgtttagaagattctgaaagcaagattatccagtgggtaaatgagagttgagtggattctgtcagttcaaaaaaggaaagaaacaaaacttctctacaattttcttgactaaaatttattgtatgtacactattcccactcctggcattttttggcaggtttaaaaatattcagcataaatccagcagaggtggctgagcttaattgcttaaataagttctagaaaatttaaaaatcattttagtagaattcagtaccgttgtcactgcaataagtgggttttagaaaataagtgtgaaaaaaatcaggtgttaatataatactaaggataaagctttagaagctattttactacataggtaaagaaaagataaactaacttgtaacaaagaccacaactgcatgttggattagattgtctcatatttcagaataaaatgtactgtatacttttcctcactttgttgtgcactgtaatgaaatgtgaacaatgctttatttagct

SEQ ID NO: 13798 - DNA, 777 bp, Macaca Fascicularis
  misc_feature (1)...(777): n = A,T,C or G
agcagnnngagcttacagcaagactgaaannngtgcttgagggacactgtggctgttactgacacccaaagcaagtcaagtttaagcaggccttggaagccctgccccagctctccagtggagcagataaaaagttactggaagagctcctgaacaagttcaagagtagcatgcacttgcagctcacctgtttccaagcagcttcttcaaccatgatgaaaacataaatacctgccaaataaaggaagtccaggaaaataacaagtaataagactgttcactttctaagtaccctaaaggtatttgctgtattaaacattgggtttgccatctctctcttttttccttcctctgatttcgaaaattgttggtatacatttcaactaaaatgacctcatttgaaatgcccaagaagtatttgttttgccattcttactagatcagatcctgtatgactttaaaatacgttttaaaatatactttgcatctcagcagaaggttgagtgcagcaggaagagctgcttctggagggaatgttctggaatggcgtggtacatattgaagcatttctcagtgtcccattcacgaaagtgcaggcagctcccgcgacacatggagagactgattgataagaggagatttggaaagttatatgtagacatctttggagctcttactgtcctaacctgtgcagctgtgcttaaaacccttatttcatataaatggccttaagttttctaattcaagcagattttggaaaaattnnnnctccataaa

SEQ ID NO: 13799 - DNA, 688 bp, Macaca Fascicularis
  misc_feature (1)...(688): n = A,T,C or G
cnnnnnnnnnnnnnnnnggcctcgtctcttcnnctnnnaggtgactcccggaggctcagctgcccgggctgggctgcaagtgggagatgtgattctggaagtgaacgggtatcctattgggggagagaatgannnnnnnnnnnnnnnncagctgcctgaggctgagccacccctctgcctgaagctggcagccaggtctctgcggggcttggaagcctggattcccactggggctgcagaggactgggctctggcctcggagctgctgtagagcacctctgcctggtacagacatacccaggggctactgtgtcttcactctccagcccgaggtggtggaggcaggattgctctctctaagccagactgaaggaactcaggcaccacccatcacaggctggcccaggtgctcccccgcttcctgcaggcccaccttctagcagagggtgtggatggaggcctcaggcaggttcctgaaggagtctgaggctccagaggatgtcatatgggagtttggagagctgtgtcccagggatgaaggtgtggctgtgggtctggctaggattgaagccatctggaccttttctagatatgactccaggacacttgagtgtaatgcaaaaatgtggagaccagctatgcctgcccgctgtgggtgccttagcattgccggagggtggtgcttggt

SEQ ID NO: 13800 - DNA, 746 bp, Macaca Fascicularis
  misc_feature (1)...(746): n = A,T,C or G
ccaagggccatnnnnntagtgatgggctggtgaagtccaaaaagcagaaatgaaagcttacatggaattagtcaacaatatgctgnnnnnnnnnnnnnnnnnnnnnnnnnnnnnnnnnnnnnnnnnagtaggggagatcactcatgctaggtatggatctccttaccnnnnnnnnnnnnnnnnnnnnnnnnnnnnnnnnnnnnagtgggaagtcaagcgtaagatgaaagctattggatggggaaagaagactctggaccaggtcttagaggatgtagaccaatgctgtcaagctctctctcaaagactgggaacacaaccatatttcttcaataagcagcctannnnnnnnnnnnnnnnnnnntttggccatctgtacaccattcttactacacagttgacaaatgatgaactttctgagaaggtgaaaaactatnnnnnnnnnnnnnnnnnnnnnnnnnnnnnngaacagcactattttgaagatcgtggtaaaggcaggctgtcatagaatgtgttagtctcagaagtcttaacttttgaaagatgttttacttgaatgttagatattgatgtcagaattttaaaaccaaattactgctttttgaaacctcaaaacaaattatataatgtatcttatatatgtgctttatattgttatttgtgtatacattaaaatctgaattatttcatctgatatgtcatattctgtatcttgaaattttnnntccttgaaacatgcatgc

SEQ ID NO: 13801 - DNA, 218 bp, Macaca Fascicularis
aaagcaaagaaactgccttttattttttaaccttaaaaagtagccagatggtaacaagacgggggggaggatgagcagagcctgtgctctcaggcagaggaaggcttggatggacaatgaaaatgcctggaactaagggcggtgaatcaagggaggcaatcacaccgaagtgggccttcatccaggaacgggatcccgcaggggtgtttttttaaata

SEQ ID NO: 13802 - DNA, 713 bp, Macaca Fascicularis
  misc_feature (1)...(713): n = A,T,C or G
gacatnnnnnntaattaccagaattagttcnnnnnnnnngggancnnnnnnnnatgattattaaggatatgtatgtgaatttttgggagacctctcggtgctggctggtcaacctgcagcgtggnnnnnnnnnnnnnnnnnnnnnnnnnnnaaggtccctagagatcactcacttgaaaaatgaggcttccgtgaaagtatttggttgctttctgctaccacttctcctgactttactttttgcatattttcaaaatattataaaatgtcaacatacaatttcagaaaggcaggtgggggtaggggagaaatgaatgaatgaattctctaggtannnnnnnnnnnnnnnnnnnnnnnnnnngagactaataaggctgcttacctaattattataatcatttcatttgcctgaatgttttaagcagaaagtagaaatacttcagctgcccaaatgtatcttttgttcctcttagaagtaaaataagctacaaacaataaaaatttatttcagaaccccatttctagaaaataccaccccagagtcctcctttgacagcatctgtttctgcagacctcatcattccacagtatttnnnnnnnnnnnnnnnnnnnnnnnnnnnngcatatataaaatgtatgcagttaactgtttaaatgatatttaagttttaaagattgtattttgttgacacatactttgtgcagtttttata

SEQ ID NO: 13803 - DNA, 726 bp, Macaca Fascicularis
  misc_feature (1)...(726): n = A,T,C or G
ctgcactgcctgctcaacaagaaggnnnnnnnnnnnnnccggaagtgggcctgcctagttgccagcgggagcaagtactcagaattcacctctaccacgtgtggcactggccacaatcagacccgggccctccgggcgtcagagtctggcatatgaaagcacatggttctggacggtccagcagctcctgtggccgcagcagctttgtacacgaagaccatccatcttcccttcgtccaccgctctgctccctccaccctccctccctaagccccgtgtgtgccaccaggagggagtggcagctatagtctggcatcaaagcccaggacacccagtggggtggagccggagccactggtcttactgctggctgcctctctcctccaccttgtgacacagggcaagtacaagggctggcccagggctgcagcatgttgccttggcacctggggctagtactcaggacagactgagggctcgtcccggcctggacttttcctctcacgtctgctgcagaaatgaaaagactaggtgctggggctcagcttccttcttaagcgaagactgatgtcagaggccccatggcagagccccttggggccactgcctgaggctcacggtacagaggcctgccctgcctgcccaggcaggaggttctcactgttgtaaaggttgtggatgttgtgtaatgtgtttttatctgttcaaactttcnnatgtgacact

SEQ ID NO: 13804 - DNA, 751 bp, Macaca Fascicularis
  misc_feature (1)...(751): n = A,T,C or G
ttttttattaaacagatannntcagtttaatgcaagagaacattttactgttgtacaatcatgttctggtggtttgattgtttacaggatattccaaaataaaaggactctggaaggttttcattgaggataaattgccataatatgatgcaaactatgcttctctatgataattataatacaaaggttccattcagtgcagcatatacaataatgtaatttagtctaacacagttgaccctatttttgacacttccattgtttaaaaatacacatggaaaaaaaaaccctatatgcttacagtgcacctagagcttttttataacaacctctttttgtttgtttgttttggattctttaaatatatattattctcatttagtgccctctttagccagaatctnnnnnnnnnnnnnnnnnnnnnnnnnnatttaatttagatattttccatatattggcccagctaaaatagaatatagcatctttcatatggtaggaaccaacaaggaaactttcctttaactccctttttacactttatggtaagtagcaggggggaaaatgcatttatagatcatttctaggcaaaattgtgaagctaatgaccaacctgtttctacctatatgcagtctctttattttactagaaatgggaatcatggcctcttgaagagaaaaaagtcaccattctgcatttagctgtattcatatattgcatttctgtattttttgtttgtatnnnaaaaatcac

SEQ ID NO: 13805 - DNA, 742 bp, Macaca Fascicularis
  misc_feature (1)...(742): n = A,T,C or G
ctgaggaaagtgggctggaggtgggccatgagggtgggggacagggagagggagagccatttgctaagaagagcccaggtnnnnnnnnnnnnnnnnnnnnnnnnnnnnnnnnnnnnnnnncagaaaggacgatggaagtggaagtcacagcagnnnnnnnnnnnnnnnnnnnnnnnnnnnnnnnnnnnnnnnnnnnnnnnnnnnnnnnnnnnnnnnnnnnnnnnnnnngagtcccgggaggagcggccctgtaggaagcggatgnnnnnnnnnnnnnnngcctcctggtattcgtgggaccacctgtgggcacaggagccatgtgggtcagacagctgggcagagggagctgctagtcagctgtttgcccacactctgcctgtcatggtgatctgtaccctacccccctggtcccagnnnnnnnnnnnnnnnnnnnnnncgttgaaagtannnnnnnnnnnnnnnnnnnnaggcaggacctggggctcaggccactcgaagccannnnnnnnnngcacaatgttcttgccacagnnnnnnnnnnnnnnnnnnnnnnnnnnnnagaaaggaaaggaggaagatactcctgtatccatttagggacccttgtagccgggcaggtgctgggagggccactagcccgaggnnnnnnnnnnnnnnnnnnnnnnnnnnnnnnnnnnnnnnnnnngtctcccttaacccttgtagtataataaaaaataaatattttgtctctgcccag

SEQ ID NO: 13806 - DNA, 795 bp, Macaca Fascicularis
  misc_feature (1)...(795): n = A,T,C or G
tcacggagtttgggcatcctgcaaccattannnnncccaagatagtggtgtataaggaggccgagaagagcccgcagctggggctggggctgcctctccttcccgcccccgggggccggggctggccctctcccgagctcagagagtaaatatgagatcgcctctgtcccagtctccctacagaccctgaaacctgttaccgacagagcaaacccgaaaatcggcataggaatgctggcatttagtcctgacagctacttcctggcgacaaggaacgataacatccccaatgccgtctgggtctgggacattcagaagctgaggctgttcgcggtgctcgagcagctgtccccagtgcgcacgtttcagtgggacccacagcagccgcggctggccatctgcacgggaggcagcaggctctacctgtggtccccagcgggctgcatgtcggtgcaggtgcctggggaaggcgactttgcagtgctttctctgtgctggcatttaagcggagactcgatggccctcctcagcaaggatcacgtctgcctctgcttcctggagacggaggcatcggtcagcacagcctgcagacagctgggcggccacacgtagcagtggtgcannnnnnnnnnnnnnnnnacaggggctactctgcgtgtttccagtgtgggaaaaaacagagcttcaccaggaagttctccacctnnnnnnnnnnnnnnnnngtgattgattctatttttctaaagcaaagcatttttgtaaatatgtatggtataaaactggagttactattat

SEQ ID NO: 13807 - DNA, 740 bp, Macaca Fascicularis
  misc_feature (1)...(740): n = A,T,C or G
cagttgccgggtganngggcacagcgggccaggccctgaccctgtcgtgacccacctgggcaccttcccggactagctccgcctaccctgtcctctctccagcaaggagccggaacacgcacccttctcccaccctccccaggggtaaccccaggccaagcacagacagctcagctgtgacctctggcctctggggacataaacagggcggctgggccggggcggaaggtgctccactttctctctctctgcgtggtccctttgacgggctggccacagtgtccggggtgcaacgctaggcctccaggccacgcatccatctccaagttaacaggccctatcctgcccaagctctggggcaggtaggaggggccatcacacacctgcccatgcgtgagtgacccgggaggggcttctggggggaggtggagccaccacgcccttcctcaaggggtcacttattaaacgtcctcgggccctctgcacagaagccatacgctggccaaccgcgcctcctcctctgtccacggaaccgttgccgatctaatctttgtaaaaacctgtctcctgtttccagccgccacctgtggttctagcaggttctatgccatctgcattgggatgtctggttgtttttatttctgacttttttaaaattccagggtgtgccgcacccactttctcgcagtgttttaatattacgtggagttgttgatacaattgtgaattcatacacaata

SEQ ID NO: 13808 - DNA, 704 bp, Macaca Fascicularis
  misc_feature (1)...(704): n = A,T,C or G
tggttnagccagaagtctggactctcaaagagaaatgcattctggtgattacatggnnnnnnnnnnnnnnnnncaagattgaagatggaaatgattttggggtagcaatccaggagaaggtgctggagagggtgaatgccgtcaagaccannnnnnnnnnnnnnnnnnnnnnnnnnnnnnagtacttctcagaacgtggggatgctgtggccaaggcctccaaggagactcatgtagtgagtggatagtccaccagccttttagctggaggtgggacgaggaggtgtggagaaagaggtcctccttgtcttgtttgtgactttcccaatgtgtagaatatttagctaaaagcattgcctnnnnnnnnnnnntagggcttcaacgactttgacccttttctctgctcagtcccttgggatcctatttcttggtgctaagaaggggttcattctcaagttaacttgtttcctataaaaggaaaccagactcatgtcccagcctcccatgggactgacacagctttnnnnnnnnnnnnnnnnnnnnnnnnnnnnnnnnnnnnnnnnnnnnnagatgaggcagcctatggggagctcagggccatggtgctggacctgagggccttctatgccgagctttatcatatcatcagcagcaacctggagaaaattgtcaacccgaagggtgaagagaagccatctatgtac

SEQ ID NO: 13809 - DNA, 760 bp, Macaca Fascicularis
  misc_feature (1)...(760): n = A,T,C or G
gcgggatgcacannnaggagttgtgactgnnnnagcaacttgctcacctataacaagctggttctgtgagggcgttgtnnnnnnnnnnnnnnnnnnnnngtgaggctctcaccaccacacagcacagggaggggacactctgagctgcctcagagactgggggtgggccagggcnnnnnnnnnnnnnnnnnnnnnnnggaaagatgctgggaacgtccccgaggaactccttgcctgcaagagtggccgcctgttctccagccacctgtgggagnnnnnnnnnnnnnnnnnnngggggtgtgggaagaacgactgaggaccccacttcaaggaggaagttcagcctgctagaatctcccgtaaactaggagggtaagaannnnnnnnnnnnnnnnnnnnnnnnnnnnnnnnnnnnnntttttcacttctaagggattcttaattttgcagatagagatgaaagttgggagagggaaaatgacatnnnnnnnnccccacaattgannnnnnnnnnnnnnnnnnnnnnnnnnnnnnnnnnnnnnnnnntgacccccagactgttcaatttctatgacattttgccaccatcacattcatcttagatgcatttttcaaaacagaggctaataacaagannnnnnnnnntgtttgaaacccttccccatgagctcatgggannnnnnnnnnnnnnnaacagtgctgttccacgcctgccccaccagctgaggattatgtgctccaaagataatctctgaagtgc

SEQ ID NO: 13810 - DNA, 957 bp, Macaca Fascicularis
accccagagcgcacccgttaggcgatgaaggcagtgcagcgtcgaaaaaacaaaagaataagaagaaaacccggaacagggcctctgtggcaaatggaggcgagaaggcctcagagaaacccgccccagaagaagtgcccctaagcgctgaggcccaggcgcagcagttggcccaggaattggcttggtgtgtggaacaactggagcttggcctcaagaggcagaaacccaccccaaaacagaaagagcaggctattggagcaatccgaaccctgcgcagcaaaagaacgcccctgccccggaagaggcagttgatgcactccttgtttggagactatagggctcagatggaagccgaatggcgtgaggccctgcgggctctcagatctgctgcttatttagcccaggtgcagcctgtagatggagccaccagaaagaagagccgaagggtctgcaggcctcgccctatagggcgaagcaaagccactctggacactcctgatgaagagtttcggttcaatttcttttagcttctcccccgacctggaacattccccctcccttggggtggtgtaggggtttgttttgagtgcagagccttttcaggacttctgttggcagagaaccctggggttggtctgtccctggctggtccaagtatttagagctgttgtgaaggtgtgagaccatcagataggcaaaagaccccatttgttttgtgatgaaatgttctctctttcagaacagagagaggtgcatttagaaaatatacaataaattgaagtgactgtttgaagtattgtagaaagaatattgtactcagtctttaggattagattaagtggctgttggtaacaaagattagtggagaagctatataattatacactgtttttcacttttgaaaggaattcctgtcaaatggtttagtgcttaatgctgttatgtcacattgcc

SEQ ID NO: 13811 - DNA, 703 bp, Macaca Fascicularis
  misc_feature (1)...(703): n = A,T,C or G
acccgtgcggccccatcatccangccacgcaccagnnnctgacttcctacagccaactgctgcaagtggtcgtggcagttgctgacacctctgcgaaaaccgtggagacggtgaagaagcagcaaggcgagcagatctgctggggcggcagcagctccgtcatgagtctaggtatgtggccaccctcctggtcctctgcctggggctgccccatgcgtgggctcccttttctgtgctccactaaccctggaggagcatttggggaccggccccttcttttgtttttcattttctaatgcatgttttccttcacttgaaaaaatgctttctgtggattatcaagtgaaaacactcatcttagaaaattgaggtaacccagtaatagaaaatgtgaagcaaatgatagcaaatgcctgaatggaatagtatttggcaattaaaaatgttacttgggccaggcgtgnnnnnnnnnnnnnnnnnnnnnnnnnnnnnnnnnagcggaggaagatggaccactttgagcctaggagtttgagatcagcttgggnnnnnnnnnnnnnnnnnnnnnntactaaattacagaaactagctgggcatggtggcatgcacctgcagtctcagctatgtgggaggctgaggtgggagggtcacttgagcccacgggagggaagttgcagtgagccgagatcacgccactgtgctc

SEQ ID NO: 13812 - DNA, 703 bp, Macaca Fascicularis
caggtcagcatgtatgcgttccttagggcgttcttctgttatggagagatctagccagtccgtgacttggcaacagacttactgactactggatcttaagacccatgtccaggaccaggaatcagcataaggatgctgacctctcctgggtgtgcctgtgactccagagtcctatcttactgtgacttaaagtttgatggagagaaagctgtagggtccataaattctgccaggaaaccagggtcttcctgttcctagaactgagaatgggcacccagtgatctgagaacacgttctgggctaacgtagtcctcacacagggctgagaaagaaagtgtcccctttcctgggaagcacatgtagaaattaagagcctgaatctcttctaaaccaataattgacctctaggcacctgccatactagtactaacttcagggaagaagacactactctttgtaacccagccaccaccaaaaagggaacaaaaagaaggaggattaagccattggataatactgaatttgtttccctaagtgacttagccttagagcaagcgtaacatccaggttaattttttataagacttatccttttattatcgccctcatcatagttcctgattgtctcttaaagtggtttatagacattactatttctgataataatttacaaactaaacaaatttataaacattactaattc

SEQ ID NO: 13813 - DNA, 739 bp, Macaca Fascicularis
  misc_feature (1)...(739): n = A,T,C or G
gagcatgaagctggcagataannnctgcaggactcatttttcatcatggctggctgatttctccatggattcataacagtattttgttatcttgcnnnnnnnnnnnnnnnnnnnngctgtttaacttcgagctgagtgaggggagaggggtaaagagaaagaaacttcagtttctttcatagaactccaccagtgtgggctttgacagccctaaagcattgtacctagtggtacctagtgactttcaaccaaggcctttgagtatgcactaagtaggtgagaagaaaggagagaaggttttaaggttagaaaccttttaactgatagaaggatatggtatgttgtaaagctggaaccaagtttgcatttttgagggcttgagatgaagggaagacccctactagatagtaagacagctgaattttcctcagttttctcgtatttaacagtagtggacaattctagcattttgtctggaggatttcagagttaacctcatggaatcaggatgttttagtaagtttacttttggttttatcttggcttttagtaatcatgttggctggtctggtcacaggtaactgtgaaacagatgtcctggtctttgctttcatcactctaggatcatgaagtgctatgctatttttttgtttatgttattaaggttggaatgacatttttattgattgtttagatcagagctcagttcctgtagaaaacgaactgtaaaagaccatgc

SEQ ID NO: 13814 - DNA, 720 bp, Macaca Fascicularis
  misc_feature (1)...(720): n = A,T,C or G
ccctnnnaatagtttatgtcatcccaaacagctagaggagtttattgtgatggaatgcagcacagnnnnnnnnnnnnnncgtgctgcaggtgctggaatgatatcaaaaaaacatgccctcggggaagtctgggtacagaagacatctgaaatgaatacagataaacagtatttttgtcgtactcatttgggacatcttctaaatcctggagacctggtgttagggtttgatttggccaattgtaacttaaatgatgagcatgtcaacaaaatgannnnnnnnnnnnnnnnnnnnntggtattaatcaagaagagctatgaccggaccaaacgtcagcgtcgtagaaactggaaattgaaagagcttgcaagagagagagaaaacatggatacagatgatgaaaggcaataccaagattttcttgaagatcttgaagaagatgaggcaattagaaaaaatgtcaacatttacagagattcaaccatccctgtggaaagtgacacagatgatgaaggagcacctcgaattagtctggctgagatgctcgaagaccttcacatttcccaagatgccactggtgaagaaggtgcatcaatgatgacataatgagatgttgtagactgtttccacatacatgggcttaagaagttggacaaaattaccttaagtgtctactctctatgcctccagatttcaagaggggaaatttagtttaaacc

SEQ ID NO: 13815 - DNA, 774 bp, Macaca Fascicularis
  misc_feature (1)...(774): n = A,T,C or G
ccatgctgctaangannnnnctgaccccaacnnnnnnnnnnnnnnnnncaaagtgtataccaggcatatgacatggatcccnnnnnnnnnnnnnnnnnnnnttttcccagagggcactatccgaccagtgcacgatgacatcctcatnnnnnnnnnnnnnnnnnnnnnnnnnnnnnnnnnnnnnnnnnactgtgtcaagnnnnnnnnnnnnnnnnnnnnnnnnnnnnnnnnnnnnnnnnnnnnnnnnnnnnnnnnnnnnnnnnnnnnnnccctgcttgagcccgtggaaggggaggcagctgaggagttgagcaggtgcttctcacctggtgttattgaggtgcaggaagtccaaggtaaaaaggtggccagagttgccaacccccggctggataccttcagcagagaaatcttccggcatgagaagctaaagaaggttgtgaggcttgcccgggttcgagatcattatatcttctctgttgagtcnnnnnnnnnnnnnnnnnnnnnnnnnnnnnnnnnnnnnnnnnnnnnnnnnnnnnnnnnnnngtgccggcgcttcttggatgaactagatgcggttcagatggactgagcttggatgttcctgaggcaagctgaagctttgggttctgactgacccaccctacaggactgctgtacagagagcccagtgtgactagggatcctgannnnnnnnnnnnnnnnnnnnnnnnnnnnnnnnnnnatacattttgttaaatgtgccataaaatgagacttttaggcctttgtaag

SEQ ID NO: 13816 - DNA, 666 bp, Macaca Fascicularis
  misc_feature (1)...(666): n = A,T,C or G
atgacacacagcgggctcacgannnnccaggtccnnngcggcggcgatatggagggcgtggctacaggaccnnnnnnnnnnnnnnnttactcatcttttatgctttggtcctgacctgtctcnnntggactnnnnnnnnnngccactatgggggttttgcatttgcatttctggaccgtgatacagttaagaaaaatcctgtttcagtccctatatgtaaagaaatatgtaacggttttatgattaatttggccccacaatgattttgaagatacgttaaaggaaagcccaaagcattttaaaaagccaaccaagaaagactaaaatcgtggctcttggaatcagatggatcaggcaaggggctagagacttaagagtattggaaaggcttccacagccaccccgaaatcagtccttttatgttaaacagggtacctggctcagtgcacctacttagtcaacactagattttactttctctacaaaagctagaacatacctagtatgtgctgacacgaacataccctaacccacagatgatgtaacaggtctactttttctcagaaataaggattgtctcacaacttgttcaaagaattagttatgtcatggtacatatatagaagtgcacaatttttgtaacatcttttatttgtatacaatata

SEQ ID NO: 13817 - DNA, 713 bp, Macaca Fascicularis
  misc_feature (1)...(713): n = A,T,C or G
gattggctgtgagctgctggaggatggaagcannnnnnnnnnnnnnnnnnannnnnnnnnnnnnnnnnnnnnnnnnnnnnnnnntaaannnnnnnnnnnnnnnnnnnctgtagataatgtggctcacaccgtcaagcgggcatgggaggccaatcagcatgagttgcgatatcaaaagaattggctggaaaaagaatgtattgcctggctaaagagattcctggagtatggaaacgacaccctacaaagaacaggtaaagagaaagagaaggtctcattcccacattgcctgaacaactgtttccatacgtaactcttttaatctaggttatatcgactgtatcctgaaagccatctctttagttggcctattgtgatattggctagagcccccatgagaactttccctggttacttttgagcagcatcttgacaagatttgacagttccccttgtcttgacagagtggagtacctccaagggcaccttgttttgggggggtctattgannnnnnnnnnnnnnncagggataagctgggaaattctnnnnnnnnnnnnnnnnnnnttacaaacatgtttagttaacaaagggctcacacaccaccagtaggagtaaaaatctggatttaccaggacaaacaaagggtctctgctttactaaaggattaatgaggttgggcatggtggctcacgcctgtaatcctagcactttg

SEQ ID NO: 13818 - DNA, 747 bp, Macaca Fascicularis
  misc_feature (1)...(747): n = A,T,C or G
ttatgtttctttatagatcacnnnnctcacacataattcaaaacccacacagaagctaaaagtctttacattaaatatattcttcctaaaaatccttactgtatgcgtctgtcctcaagcagtaaaatttgattatgcaccattttataatatgtcacatttacatagcaaaataatgaaggcacagctaatacaagcaaacttaaatcctttctacttctgagctgggggtaggggcacacacttggattggttcttcaagtatatattttttccaaacattagcttcagtgaagagttctgatgattttcacagctacaccctaaaagctacatgacagaaagacgtcacaaggatcaaagtacataacactggatacacatgctttacagaatttgctacattctacatctcttcaagtaaattaatatttctaaaacactaggtaaagtgatttaatacttaaacatatttggggtattttttacgnnnnnnnnnnnnnnnnctactaagaaaacacaaacatgagattgtaactaatgaatacatatgttgacagtattttacaggttttacaccctccttcttggaaccatgttattctctaaattcaaatactcaaacatttttcagaacttgaaatggcagttttcctggccttattaacagtagtgtcatgatctccattgcagtcttcctcagtgccatcaatctcctgtgaagtgtaaagctgatgtctgcgttac

SEQ ID NO: 13819 - DNA, 694 bp, Macaca Fascicularis
  misc_feature (1)...(694): n = A,T,C or G
taatagttatggaagtgtgaaagatgtgtgcactgcaaatttggctccnnnnatttttttcatcttannnnnnnnnnnnnnnnnnnnnnnnnnnnnnttctctgcaacagaaatgacactgcctgggatgagctgaagctcacgtgtcagacggcactgcatgtcctgcagttaacactcaaggnnnnnnnnnnnttgttgggaggtnnnnnnnnnnnnnnnnnnnnggctgcatatatcagacacaagactcacaacgaccccaaaagcattctcaaagatgatgaatgtactcaaacagaacttcaactaattgctgaagcattnnnnnnnnnnctagaatctgttgttggctctttagaacatgatggaggtgaaattctcactgacatgaagtatggacacctttggtcagttcaggcagattctnnnnnnnnnnnnnnnnnnnnnnatttgctttcacattgtggctgtggattatacaatagccaggaagaactcagctggtctttnnnnnnnnnnnnnnnnnnnnnnnnnnnnnnacaannnnnnnnnnnnnnnnnnnnngtgggctcagccagcaacctgaccttggactgtttgactgcaaagcttagtggcctacaggtggctgtagagacagccaatttgattttggatctctcatatgttattgaagataaaaactaagaga

SEQ ID NO: 13820 - DNA, 702 bp, Macaca Fascicularis
  misc_feature (1)...(702): n = A,T,C or G
acaggatggggttnnntnnacnnnnngcccctcacggcnnnngcaagnnnnnnnnnnnnnnnnnnnnnnnnnnnncagggtcagggtgacctgggaggagagctcaagacagggcacaggctactcagagttgagggnnnnnnnnnnnnnnnnnnnnnnnnnngaggggctgggcctgtgctggcccttggccagagttcactcccttcctggctgtgtcaccccaagcaactcttccaccgtggaggttataggcccaaggcaagttccctggagagtcagggtcccctgtggcctgtgaggaaggggccctgccactctccccaagagggcctccatgttccgaggtgactcaacacggatccttgcctggcccgggggcaccgtctgaactcctggctgtcaggataagctctgtgggggcacaggagcccagacnnnnnnnnnnnnnnnnnnnnnnnncagagggcgtctgccagggttagccccagggaccctgggagggggctgcagaagctctccnnnnnnnnnnnnnnnnnnccacgtgctggccacacccaggaaggagggacagtgtgggcaggaggtggggatgcggggacctcgtggtttggtgttgagggctcacacgtgtgtgaaccatcagggccctcaggatggggaatgtggtaaaatctgccatctcaggcctggctcgctcct

SEQ ID NO: 13821 - DNA, 742 bp, Macaca Fascicularis
  misc_feature (1)...(742): n = A,T,C or G
ctgggcagagacaaaatatttattttttattatactacaagggttaagggagacnnnnnnnnnnnnnnnnnnnnnnnnnnnnnnnnnnnnnnnnnncctcgggctagtggccctcccagcacctgcccggctacaagggtccctaaatggatacaggagtatcttcctcctttcctttctnnnnnnnnnnnnnnnnnnnnnnnnnnnnctgtggcaagaacattgtgcnnnnnnnnnntggcttcgagtggcctgagccccaggtcctgcctnnnnnnnnnnnnnnnnnnnntactttcaacgnnnnnnnnnnnnnnnnnnnnnnctgggaccaggggggtagggtacagatcaccatgacaggcagagtgtgggcaaacagctgactagcagctccctctgcccagctgtctgacccacatggctcctgtgcccacaggtggtcccacgaataccaggaggcnnnnnnnnnnnnnnncatccgcttcctacagggccgctcctcccgggactcnnnnnnnnnnnnnnnnnnnnnnnnnnnnnnnnnnnnnnnnnnnnnnnnnnnnnnnnnnnnnnnnnnnnnnnnnnnctgctgtgacttccacttccatcgtcctttctgnnnnnnnnnnnnnnnnnnnnnnnnnnnnnnnnnnnnnnnnacctgggctcttcttagcaaatggctctccctctccctgtcccccaccctcatggcccacctccagcccactttcctcag

SEQ ID NO: 13822 - DNA, 853 bp, Macaca Fascicularis
  misc_feature (1)...(853): n = A,T,C or G
tctgtcgctattgatcttcatctatnnnnntaggtattctaacgtttcctcnnnnnnnnnnnnnnnnnnnntttcccctctctttcctgaatcagcaatactggagtaaccgcttcctaaaccattttgcagaaatgtaagggtgttcggttgcgtgcatgtgcgtttttagcaacacatctaccaaccctctgcatgattgatgttggggaaaaagaaaagtaaaaaagttcccaactcactgtgtgttatgtggaggaaatgtgtattaccaatggggttgttagcttttaaatcaaaataatgattacaaatgtacaatnnnnnnnnnnnnnnnnnnnnnnnnagagaagtttggtttctttgctgcaagaggaatgaggctctgaaaccttatctaagaacttggaagccgtcagccaagtcgccacatttctctgcaaaatgtcatagtttatataaatgtacagtattcaattgtaatgcannnnnnnnnnnnnnnnnnnnnnnnnnnnnnnnnnnnnnnnnnnnnnnnnnnnnnnnnnnnnnnnnnnnnnnncagtttgcttatttataaattcattaaaaacactacaggtgttgaatggttaaagtgtaggcctccagttttcagttattttctgagtgtgtagacagctatttcgcactatattaaatgtaacttatttaatgaaatcagaagtagacaggttggtgcaatacaaatattgtgatgcatttatcttaataaaatgctaaatgtcaatttatcacaacgcatgtttgactttagactgtaaatagagatcagtttgtttctttctgtgctggtaacaatgagcgtggcangaca

SEQ ID NO: 13823 - DNA, 563 bp, Macaca Fascicularis
  misc_feature (1)...(563): n = A,T,C or G
aatcagaataaacagggaatcttctatacttccaacacgtaaaatccaacaaattacatttatttggttctttacaggtgacacagtacttttacataattatttcactcaacccatattcaaaattaggatgtgaggcactaccaagatcttgaatatttaatactttcaggaaataaaaaatatgtctgttcagttttagaaatatagtcgagggttaaacaaaaaaaggttttaaaatgtaaactttgaatattctacttaatgttttaataaacttaatttcaaaatgatataaaaagactgggcacannnnnnnnnnnnnnnnnnnnnnnnnnnnnnnnnnnnnnnnnnnnnnnnnnnnnnnnnnnnnnnnnnnnnnnnnnnnnnnnnnnnnnnnnnnnnnnnnnnnnnnnnnnnnnnnnnnnnnnnnnnnnnnnnnnnnnnnnnnnnnnnnnnnnnnnnnnnnnnnnnnnnnnnnnnnnnnnnnnnnnnnnnnnnnnnnnnnnnnnnnnnnnnnnnnnnnnnnnnntgagcacagatcgcatcacggcactccagcc

SEQ ID NO: 13824 - DNA, 603 bp, Macaca Fascicularis
tattatatctttatgccatttgaaagatatcagccttgattgaaaatgaccctgaaacttgcatagtttgtaatttgtctctggatcatggctgtgctcctatatacaaccgatgtgtccgtgccaaaataaaggttgatatgattagtcaaaccttggtaagcccaccagagggaaaccaggaaatttgcagggataacattctatgacgaagattacatatgtatctaatgtgaaccctggtgtgattgtggcaccagcctcagtgttaagggcagtggcaaagcgagagtatcataaatttataaaacgttttatttcttacgtccaagaaaaatctgcaggaaagcctattttgttctagtattaacagtgactgaagcaaggctgtgtgacattccatgttggagaaaaaaagaaaaaaaaaaaagctgaatgctataagctggaacgtaggatctatagccttgtctgtggcccaagaccttggccttgtgtacaaaaatgacaaaatattgcaatagcaaagttgaacatctaacactagctatctcttgctagatctccttgctcagcatataactataaatacatgtaaaatta

SEQ ID NO: 13825 - DNA, 721 bp, Macaca Fascicularis
  misc_feature (1)...(721): n = A,T,C or G
ttatattaatagtgagnnnnnngnnnntgggcattttgtnnnntgtaattatcctatggtgatgctgtttctcgttgttagtggcagtagtgcctccgtctcctagtgataatgctccaagtctatgaactgttaaatcagcattcattttaagaaaagcaactttagtttcaaagatacttttaagcttctaaattgatcatttaaactatttctttaaataagagagccaaattagaggctcatactttagcttgtgaagaagataatgaattttttaaagggaactttttatgcaatgttcaggataannnnnnnnnnnnnnnnaatcagtgtcatctcctgggtaaattttgatgtcacgttataaagatatgcataattgatggtttctagattatctagtccaaacaatagttttttcttcatttgaaccaacatgctacagtagctaagaagtattaaaactatatacatccatataaagatgaaatacgaactatctcattagaagtcatagttgaacacagacatattattcttctgaaagagccacattttatttgtcacatgatttcttttctgatggatgaaaagtatgaaaggaaacttttatatctgttgcctagttttgtacatggatctcattttacaagagaatctctctgcaaaaaaaaaagtttaaaaatgcatgaaagcagagttctgaaatgagtaaagt

SEQ ID NO: 13826 - DNA, 761 bp, Macaca Fascicularis
atcggcaggctagcatcttaaaatctgagctcttcaggtgctcaacttctgtcccttttaagggctcacaactctaaggggtccacgtgagagggtcgtgatcgattgagcaagccagggggtacatgacagcagttgcaagcactggtggtcacagtgaaacagaacagaatgggaggtctcacaatgtctttccatacaatgtctggaatctataggtaacatcagttgctaggttaggggtcgaattttaactaccaggcttaggtcaggcagtcccaggcctggtttcgggtctggttcctaggcaccgggctacctgcctttagttttgcttctctttccttttctgagcataaaacaatataaaacaatatgagagggtctctctctctctcttccctcatttcccccctttgagattctcacttttttatttagtgggagttctcactcttattttcgatacttatgtctttttgtgcaatagactaatagtgattcatatagtacacttgtgttgacgcattctggtgaactgaggtagtgatgaggctttttatcatttgaagaagtacaggtagcaaacaagggagcagtaagcaggtttctattactattataactgctattataagagttttaaatcctcctagtgctgggaaccaccttctaaacatggcttcagggtggaatccgtgctacacttgtacaggcacatgtgccagttttgtcatatttctaactatgtctttaactac

SEQ ID NO: 13827 - DNA, 702 bp, Macaca Fascicularis
  misc_feature (1)...(702): n = A,T,C or G
gatgctgaggctgatgtgagagaggatgattcttaccnnnntcgactggacaacaaggatggagaggtgtattgcattgatgcccgttactatggcaacatcagccgcttcatcaaccacctgtgtgaccccaacatcattcccgtccgggnnnnnnnnnnnnnnnnagannnnnnnnnnnnnnnnnnnnccttcttcagttcccgagacatccggactggggaggagctagggtttgactatggcgaccgcttctgggacatcaaaagcaaatatttcacctgccagtgtggctctgagaagtgcaagcactcagctgaagccattgccctggagcagagccgtctggcccgcctggacccacaccctgagctgctgcccgagctcggctccttgccccctgtcaacacatgagaacggaccacaccctccctccccagcatggacggccacagctcagccgcctcctctgccaccagctgctcgcagcccttgcctgggggtgctgccatcttttctccctaccaccccttcacacannnnnnnnnnnnnnnnccagccaggccctggaggtctgacagcccctccctcccagagctggttcctccctgggagggcaacttcagggctggccacccccctgttcccatcctcagttgaagtttgatgaattgaagtcgggcctctatgccaactggtcct

SEQ ID NO: 13828 - DNA, 718 bp, Macaca Fascicularis
  misc_feature (1)...(718): n = A,T,C or G
gaggctgtgagtgctaaccccggccgcttccacacctcgcagcggatccgaggggttctgagcgtcatcactgaggagctcccggacgtgcctcnnnnnnnnnnnnnnnnnnnnnnnnnnnnnnnnnnnnnnnnnnnnnnnnnnnnnnnnnnnnnnnnnnnnnnnnnnnnnnnnnnnnnnnnnnnnnnnnnntcgctctcccacgcctgtaagaacgctgtgaagacagatgcccctgcctccgccnnnnnnnnnnnnnnnnnnnnnnnnnnnnnggaatgtccggtgaaacgggaacgactatcagagaccagcccagcgttccgcattctcagtgtggaacccaggctgcaggccaacttcaccatccgggaagnnnnnnnncccagctcccgccagcgaggacnnnnnnnnnnnnnnnncaacccggaggccaactggggtccccggcctcgtgcccggccagggggcaaggcggccgacgaagctatggaggagagacgcaggctgcttcagaacaagcggaaggagccgccggaagatgcggcnnnnnnnnnnnnnnnnnnnnnnnnnnnnnnnnnnnnnnnnnnnnnnnnnnnnnnnnnnnnnnnnnnnnnnnnnnnnnnctactcccacagccccccgacacccagggtttctgctgatgctgtccctgactgtccagagacctccaaccagagcccccgtggacctgggg

SEQ ID NO: 13829 - DNA, 707 bp, Macaca Fascicularis
  misc_feature (1)...(707): n = A,T,C or G
gccgagccagattnnncgcacacgtgcnnnacgattccacacagcccgggccnntcgcnnnnacacaatnnntagggaacggttagaacgcgctctacacccgctttaaagacagaagtctagacgtgagatccgcgtcgggacagagttttaagtgacaaagaagggcgagtagcctctctgggctagattcgtatcccagcacagcgcccttctaatgggcgggaggaggcccgctgctcgcagggctaggtggagacacaattcccagaccactgcaggcggattttgccgggcgagctcctggccgttcggcctcccttccgggtgacttcttcattccggtctccttcccaagctcccggctttttctaatcaggcgtctgtctaccctccctacttctgggctggagcctccccaagcaccactgcgccaacctggctgggatcgccttcggacttccctttccgccccgctcctgctcctacctgcagcactcccagctccgactccagactctctccatcaggcctccccactccaagctccgggcgccccaactccaacaccgcctcccgccgtgcaggttcttccccgcgcggaggagcgcgcggggtgggcggctaaccatagcaagtgatcctgcgatagggaacgcgcccctgccccgaggctgcactaccacaggaaataacatatgtaaata

SEQ ID NO: 13830 - DNA, 705 bp, Macaca Fascicularis
ggcaacactatatgctctctgttatatagcaggtgtcacaactgacttgtctttagccttggtgctttgatccttctgtattttgaccccacaagtgtggtccagtttacttaatcaggaaatgggccgaagaacaaaccttttcccttcatgataacatccatagacaacttattagaagggactagagttttcacaaatttccctgctggacggggcagatagctatacttagtatacgcctaaacatggttaattggatagtaaatggttttctagttccattgctgtatatttgcctaaatggacttgtgttcaaattatttcttcagttgtcatagataaccctctaccaaatggggaagaattaggaaataatcatgttgtctaatggtactctggattcagggcagcaactgccatttaaatgttgtcttgtttatttctaaatctgttaatgaagtttaggttttccctgaaactaagttgaattattttccaaaacgaaataggcttctcagggacatatccaattcttcccagtctgcctttggattaaagcaccaagcagagaccacattatttcccttcgctatactgtgatccttagtatgttcaattcttaagaaaccaaaataccactgaaagaaggctggcagaacacaggtgaattttttcactatgggaagaaagatcaagtgacat

SEQ ID NO: 13831 - DNA, 711 bp, Macaca Fascicularis
  misc_feature (1)...(711): n = A,T,C or G
aaaatagcttcctgggcagannnggtaaatgctcacnnnnnnnnnnnnnnnnnnnnnnnnnnnnnnnnnnnnnnnnngggcctgcctttgnnnnnnnnnnnnnnnnnnnnnnnnnnnnnnnnnnnnnnnnnnnnnnnnnnnnnnnnnnnnnnnnnnnnnnnnnnnnnnnnnnnnnnnnnnnnnnnnnnnnnnnnnnnnnnnnnnnnnnnnnnnnnnnnnnnnnnnnnnnnnnnnnnnnnnnnnnnnnnnnnnnnnnnnnnnnnnnnnnnnnnnnnnnnnnnnnnnnnnnnnnnnnnnnnnnnnnnnnnnnnnnnnnnnnnnnnnnnnnnnnnnnnnnnnnnnnnnnnnnnnnnnnnnnnnnnnnnnnnnnnnnnnnnnnnnnnnnnnnnnnnnnnnnnnnnnnnnnnnnnnnnnnnnnnnnnnnnnnnnnnnnnnnnncttggtgtttgaatgcttcagatacatttttgtgaagacattgaagatgtgacagtccccctgnnnnnnnnnnnnnnnnnnnnnnnnnnnnnntcctgcttagattcttccacagggcctgtgtaagaataggttctggagttatcatggactttaggaaatattgagtaatttgtaatcactgcattgatactataataagttcattctcaagcttgctttttttgagnnnnnnngtttgttagacagcnnnnnnnnnnnnnnnnnntaggg

SEQ ID NO: 13832 - DNA, 751 bp, Macaca Fascicularis
  misc_feature (1)...(751): n = A,T,C or G
gagcgcatgcaccgccacatcgagctggcctggnnnnnnnnnnnnnnnnnnnnnnnnnnnnntttcctggccgaggtcgtgctgctctgctgggtcaagttcttgcccctcaagaagcagccaggccagccgaggcccaccagcaagccccccgccagtggtgcagccgccnnnnnnnnnnnnnnnnnnnnnnnnccgggccaggcagccgccatcgcctcgaccaccatcatggtgcccttcggcctgatctttattgtcttcgccgtccacttctaccgctcactggtcagccataagacggactnnnnnnnnnnnnnnnnnnnnnnnnnnnnnnnnnttgctcgcttacaggaccagctggaccacagaggggaccaccccctgacgcccggcagccactatgcctaggcccatgtggtctgggcccttccaattctttggccttacgcccttccccatgaccttgtcctgccccagcctcacggacagcctgtgcaaggggctgggcttcagcaaggggcagagcgtggagggaagaggctttttgtaagagaaatttctgcactttgaaactgtcctctaagagaataagcatttcctgttcttccagctccaggaagagccggagggggccaaagtggggccacacactcgctgtgtcccctctcctcccnnnnnnnnnnnnnnnctgggtgcctcctcctgtccgtctcaacctcccttccgtccagcgttgagtgtgtacatg

SEQ ID NO: 13833 - DNA, 717 bp, Macaca Fascicularis
  misc_feature (1)...(717): n = A,T,C or G
tccagnnttggnnngccctgagcaaccttggacaaacccttccccctctnnnnnnnnnnnnctgcccacgccagnnnccagtgcggagtctgagacccttgccacctcccctacaagtgccctcgggtctgccctccccgtctggacccccccccagccactatcccttgctgggaggctcagctctttggggggtctggggtgacctccccacctcctggaaaactttagggtatttttgcgcaaactcctctaggattgggggactctgaagggaatgggacaaaccttaagctgttttcttagcccctcagccagctgccattagcttggctctttaaggnnnnnnnnnnnnnnnnnnnnnnnnnnnnnnnnggttttccgactgttggaggtgcctttggggctgctcctttgtctggagccactgggggcttccgagggtctcccccgaccccctgtcatcctgggatgactgccgggagctgtgtctcctgggttctgtcccctggctctgttatcaggcactttattaaagctgggcctcagtgggttgtgtttgtttcttgttcttctggagcctggaagggaagggcttcaggaggaggctgtgaggccgggggaccagatggaggaggccagcggctagccattgcacactggggtgatgggtgggggcggcgactgccgcagacttggttttgtaatgattgtaca

SEQ ID NO: 13834 - DNA, 321 bp, Macaca Fascicularis
ttggaaccagaacgaagtatttcaatctgcagatttttttcagatttttaaatatattatgcatatatttgccggttgagcattccactgagaatgtgaaatccaaaatgctccattgatcatttcagcatcagatgttccactcaaaaactttcaagtttcggatttttgattcttgaaatatgaaatgctccacctatcataaatttcctgtcctgcgagtggctttcaggttttttttttatagttatggttgtgttgtccaggatggtctccaggcctcaagtgatcctcccacctcaacctccaaaagcaacaaac

SEQ ID NO: 13835 - DNA, 741 bp, Macaca Fascicularis
  misc_feature (1)...(741): n = A,T,C or G
cannnnnnnnnnnnnnnnnnnnnnnnnnnnnnnnnnccacnttaaggaaatattctcttgcaattgtctttaaagatcttttgcagctttgcagatattcagacnnnnnnnnnnnnnnnnnntgtcttcctattgactcctttaaannnnnnnnnnnnnnnnnnnnnnnnnnnnnnnntgcagttaggtgtacatgtgactgagtgttggccagtgagatgaagtctcctcaaaggaaggcagcatgtgttctttttcatcccttnnnnnnnnnnnnnnnnnnnnnnnnnnnnnnnnnnnnnnnnnnnntgtccccagaagatcaaggccacacccaaagaggaaggcagattagagaccagaaagaccttgactacttccctacttccactgctttttcctgcatttnnnnnnnnnnnnnnnnnnnnnnnnnnnnnnnnnnnnaaattaatcctttctgccctacagttctttatcctgatactgtttaacactgtctgaattaactagactgcaataattcttacttttgaaagcttttaaaggataatgtgcaattcacattaaaagtgattttccattgtcaattagttatactcattttcttgccttgatctttcactagatattttgtatctgcttggaatatattgtcttctttttaactgtgtaattggtaattactaaaactctgtaatctccaaaatattgctatcaaattacacgttttctatcattctc

SEQ ID NO: 13836 - DNA, 677 bp, Macaca Fascicularis
  misc_feature (1)...(677): n = A,T,C or G
cgctgtattcggctgcggagccgcaggctcgactgtgcagtttgcggggaacggcccactgtgactgatctgctgnnnnnnnnnnnnnnnnnnnnntcnnnnnnnnnnnnnnnnnnnnnnnnnnnnnnnnnnnnnnnnncagaggagcgtatttctgtcaccgactataagcnnnnnnnnnnnnnnnnnnnnnnnnnnnnnnnnnnnnnnnnnnggcctcaggtggaggtggacatttgtcgtttgcctcatgccctacacatccctctgaaacatttggaacgcagggatggggagagcctgaaactcttaaaagaagcaatctgggaagggaagcagggcacacaagaagaggctgctgtccccatttatgtgatttgcaaactgggaaatgactcacagaaagccgtgaaggtcctccagtccttagcagcagctcaagagttagactctttaacagttcgggatgtggtggggggcctcatggcctgggctgccaaaatcgatggaacatttccgcagtactaaggtgaccggtatagtctgatgggaaagatgtggattgctgtaatgcctcaaagatacatttatttgaatttttcagtaatatgcataggagctggggattctacagtatctgtgaatacatggactcctttttttataaggagttttaa

SEQ ID NO: 13837 - DNA, 558 bp, Macaca Fascicularis
  misc_feature (1)...(558): n = A,T,C or G
agcttcannnnnnnnnnnnnnnntgtttggccaacctttgcccagagactgctgaggagtccaaggctctaatcccaagcttggagggacggtttgnnnnnnnnnnnnnnnnnnnnnnnnnnnnnnnnnnnnnnnnnnnnnnnnnnnnnnnnnattaatctccaaacannnnnnnnnnnnggagaaaccgcgtccgcaggcgtaacaccaccttcnnnnnnnnnnnnnnnnnnnnnnnnnnnnnnnnnnnnnnnnnnnnnnnnnnnnnnnctttggagaaaacagcccggctcggcgtggggttaggttgctgtttcaaataactcataggcccaggacatggaatcttggagcagccttgtgcagtggctgccagtggcttcctgaacgtgcctctgggaagtgtgagatagggccacactactnnnnnnnnnnnnnnnnnnnnnnnnnnnnnnnnnnntcttttttcttaatatttcatgttttaatttcagtgcgtttatactttttgaaactagaccagaatatagtagactttatagagaaagaccagttcac

SEQ ID NO: 13838 - DNA, 739 bp, Macaca Fascicularis
  misc_feature (1)...(739): n = A,T,C or G
gagggagccgtggccaagtacatgggtgcagcggccatgtacctcatcagcaagcgactcaagagcaggcaccgcctccaggacaacgtgcgcgaggacctctacgaggctgccgacaagtgggtggctgctgtgggcaaggaccggcccttcatggggggccagaagccgaatctcgctgatttggcagtgtatggcgtgctgcgcgtgatggaggggttggatgccttcgatgacctgatgcagcacacgcatatccannnnnnnnnnnnnnnnnnggagagggccatcaccgaggcctccccagcgcactgaatgtccccgcccagaacaggggaaaggcagcggaagacgccagctgccagggcctggggtccctgggccagtgcctggcgatgctggcgggggcagcatcattctgccccttgtctacccacccccaccagccctcttgctcctaacacagggcacctgctgggtcccagggatgctagggacgagttccacccctgcgcctgccctggggcgatccctccgtgtccctgtctccctgctctgccgcccctctcccagagcctcagtggctgtcccgtggctacatcctgtgggtggggggtcatcgacaggacagcaggacggttcgttctcggtggaatcccatccctgggttcccctagttcccactcttcccaagcctcccgggatggggacatgttgcaataaaggaaaggtttgggcg

SEQ ID NO: 13839 - DNA, 785 bp, Macaca Fascicularis
  misc_feature (1)...(785): n = A,T,C or G
aaaaattttnnanngacagtgccatagttggacagtacctttcaatgattaattttaatagcctgtgagtccaagtaaatgatcactttatttgctagggagggaagtcctagggtggtttcagtttctcccagacatacctgaatttttacatcagtccctttaaagaaaatctgtatttcaaagaacctttctnnncagtaaatctcgcagaggaatttgcactattacacttgaaaattgttactgttaacctttttggcagctcaataggaaagctgaacgttttaaacatggtagtactggaaattttacaagacttttacctagcacttaaaatatgtataaatgtacataaagacaaacnnnnnnnnnnnnnntggggaaatggtcagaccttgtattgtgtttttggccttgaaagtagcaagtgaccagaatctgccatggcaacaggctttaaaaaagacccttaaaaaagacactgtctcaactgtggtggtagccccagccagctctctgtacatttgctagcttgtagttttctaagactgtaaacttcttatttttagaaagtggaggtctggtttgtaactttccttgtacttaattgggtaaaagtcttttccacaaaccaccatctattttgtgaactttgttagtnnnnntttatttggtaannnnnnnnnnnnnnnnnnnnnntacagttcatgtatattgattgtggcaaagttgtacagatttctatattttggatgagaaattttcttctctctataataaat

SEQ ID NO: 13840 - DNA, 1154 bp, Macaca Fascicularis
  misc_feature (1)...(1154): n = A,T,C or G
cccannncacaggcagnnnnnnnnnnnnnnnnnnnngtcatcacaaggttgcctctgcctagtcaggtcctggtgtccagagtaaggacgtgtggcccccaggcccctgcacacctccctcagcgccaaggcagggatcccctacccacgtgtcccatagtggctgcctgtggattcccgggcttcgtgtacaggccaggcccttccactgattannnnnnnnnnnnnnnnnnctcagattctgtggcatctaaggcctagcaggggtgggcacacgggtcacccgaggcccgcaccaaggctctgtgcctgccccaggcccagtctcaaaggaagccacgaggcacgggggccgctgaggaaggaaatgttcattttcattcatccataaccaccttaagttttaagtatatcaatcttgatgctttttaactattgctttttaacttgctgagatttagaaatactgttataaaaaaacttttttaatttctgtattttttctgtattgtatcttcacgggacattaggggttttctatggtaagcacacctacggttttggtaacattatcaaatatatatccagacggttcttccctagaagaaaaatctttacacctgataagatattttgaaaagagaggtgttctttttccttattggtgctgaaaggaagnnnnnnnnnnnnnnnnnnnnnnnnnnnnnnnnnnnnnnnnnnnnnnnnnnnnnnnnnnnnnnnnnnnnnnnnnnnnnnnnnnnnnnnnnnnnnnnnnnnnnnnnnnnnnnnnnnnnnnnncctccnnnnnnnnnnnnnnnnnnnnncaagtctgcctaaatccgaggannnnnnnnnnnnnnnnatacaggcggctcggctgnnnnnnnnnnnnnnncacctcctgagctgggagccagaggccactgggttctctcacttggtgtctgctgttacctgagagctgcaggaggggctttccaatccgagggcggtacagggaacagggctgcctcgcggctcctctgatagccactttcctgggnnnnnnnnnnnnnnnnnnnnnnnnnnnnnnnnnnnnnnnnnnnnnnnnnnnnnnnnnnnggttaccagctggtgcagcactgaggccagacacctatggatgtggcttgaag

SEQ ID NO: 13841 - DNA, 757 bp, Macaca Fascicularis
  misc_feature (1)...(757): n = A,T,C or G
taatgagtggttctgactgtggccacattttcatctggnnnnngcacactgctgagcatttgatgnnnnnnnnnnnngataatcatgtggtaaactgcctgcagccacatccatttgacccaattttagcctcatctggcatagattatgacataaagatctggtcaccattagaagagtcaaggatttttaaccgaaaacttgctgatgaagttataactcgaaatgaactcatgctggaagaaactagaaacaccattacagttccagcctctttcatgttgaggatgttggcttcactgaatcatatccgagctgaccggttggagggtgacagatcagaaggctctggtcaagagaatgaaaatgaggatgaggaataataaactctttttggcaagcacttaaatgttctgaaatttgtataagacatttattatattttttttctttacagagctttagtgaaattttaaggttatggtttttggagtttttcccttttttggggataacctaacattggtttggaatgattgtgtgcatgaatttgggagattgtataaaacaaaactagcataatgtttttaaaactttttgccatgtatgaggagtgctagaaaatgcaaagtgcaatattttccctaaccttcaaacnngggannttggatcgatgttgaagaataattttcatcatagtgaaaatgttggttcaaataaatttctacacttgccatttgcatgtttgttgctttct

SEQ ID NO: 13842 - DNA, 1115 bp, Macaca Fascicularis
  misc_feature (1)...(1115): n = A,T,C or G
gnnnnnnnnnnnnnnnnnnngcagcagttggagagtgaaatagatgaactttacatccaatatatcaagcacaatgatagcaaaaatatcttccatgcagctcgtannncagccacactgtttgtagtcatctttatcacgtatgtgattgctggtgtgactggattcatcggtttggacatcatagctagcctatgcaatatgataatgggactgacccttatcaccctgtgcacctgggcatatatccggtactctggagaataccgagagctaggagctgtaatagaccaggtggctgcggctctgtgggaccagggaagtacaaatgaggctttgtacaagctttacagtgcagcagcaacccacagacatctgtatcatcaagcttttcctacaccaaagtcggaatctactgaacaatcagaaaagaaaaaaatgtaatccaaattttaagaaatacaggtgcatgaccaattgtcaattaaatattcagttttatgtctccatgcaaacattcaaagtgcttccatcagaacagagtaaaatactaaacacctctgaagactgcaaactggattagttcttttacttcagtgtttaataagcagatgtatgtatgcatggttatactattttgttaacatgtacaatttcctgatttttcttcaaaaatgctgttataaagtatttgtctatttatgataacagtacctgtgttctgcttgaatttactaaattctactactgggttatcattaaaccatgtgatattccacgtttggatatgctcatttaatttctacagaaaaaatgttaaaattatttcacatagccatttgttaaagcacagcatcannnnnnnnnnnnnnnnnnnnnnnnnnnnnnntcttatatatatcacaatcttatttttaagcacatttaagagtccttcagttgctttatcaaaaactatctattgcttttacatgatttaatagaatataaacctcttgataaaaaatgcacaaaaaaatcactttgtatatgtgagttnnnnnnnnnnnnntattttttcatttggtacacaaagaatgtattcttcataggtttattcttttaatatgtgaact

SEQ ID NO: 13843 - DNA, 742 bp, Macaca Fascicularis
  misc_feature (1)...(742): n = A,T,C or G
gctgggaatttagaaatttaagagttatttcattttcattctaagaatgatgggagagaaatgtccaaaagagatctgctgatcggctgagaatttcaaacaaaaaaaaaatcatctctgtgtgtgtgttggataaagtctacagattgactaacatgcattagcaaatggaacatcagtaggtnnnnnnnnnnnnnnntatgtaactgatagcttctgtccttattagtacacttaacatttgagactagtatttattgatccaggcaaattaattaatcatgcttgggcttactttttcagtttgtaaggttaatcacatgtgcatgcgtccgtgtgtatataaatgccttttccatgtcttaaatgtccctgatgaggagagcagtcatcaattaaatatataagctcttaaaatgagaatgggggtgtcagacccagtatacctaattgctgatgactgttatccagtttacaactttaccatcgatgtacacacttgatatttgtgcagtaaatagaccttacctataaaaattttattgatgtttatgatcatgtcagctatcagagggctattggaagagtgatagctgaggtgtttttaaccactttttctctcctagattcgttttcattatttatgctaggattttcctatggttgacatttgatgacaggaagcaatcatgactcttcgagtgagctcacagaaacctttcatgtcgtctgttccaaaacg

SEQ ID NO: 13844 - DNA, 1206 bp, Macaca Fascicularis
  misc_feature (1)...(1206): n = A,T,C or G
tcatgnnnnnnnnnnnnnnnnnnnagactcaacccaggatgtgactgcagagcaccacacgagtgatgacgaatgtgagcccatcgagnnnnnnnnnnnnnnnnnnnnnnnnnnnnnnnnnnnnnnnnnnnnnnnnnnnnnnnnnnnnnnnnnnnnnnnnnnnnnnnnnnnnnnttccgacgactggtgggaaggccggcacaatggcatcgacggactcatcccccatcagtacatnnnnnnnnnnnnnnccgaggacggtgtcgtggagaggtccagccccaagtctgagattgaggtcatttctgagccacctgaagaaaaggtgacagccagagcgggggccnnnnnnnnnnnngggggtcatgtagccgatatttatcttgcaaacatcaacaactttcattgtggctgttagcaacatcctggggttttaactccacccacgcccgatctggctgtctagagggattctacgcctgcgtgctgctgcctccccaagaggcattcgggttattggagaactaatctcatctcaaggggccagacaccaagtcccaaagcctacagacctctttccgccagaccctgaaacctggccccgnnnnnnnnnnnnnnnnnnnnnnnnnnnnnnnnnnnnnnnnnnngattggagatgatgtacagtttttattcccctctggcttttgaggaannnnnnnnnnnnnnnnnnnnnnnnnnnnnnnnnnnagcctctggacactgagactggaaggagaataaaggatgcttgttgtttttaaactataccaggtttcccagatctcttggcttttnnnnnnnnnnnnnnnnnnnnngggagtggttggggcacgtggctcttttccatctctttcaccctcaagttagtaaagtcatttattcagatcacttactgagtgtagttataatttaattcagaccagttaaaaaaaannnnnnnnnnnnnnnnnnnnnnnnnnnnnnnnnnnnnnnnnnnnnnnnnnnnnnnnntcaaggaactgtgggctaatcacattttttttcttatttacaattctatgttaattataaccctacaatcaaaaggccataatcctatacttaacccagaaaccaaggcagggtgggtggaggaagagttagataattagttaagtacatatttttaagccatcatatatttgataccatttgtgcatagaaatg

SEQ ID NO: 13845 - DNA, 761 bp, Macaca Fascicularis
  misc_feature (1)...(761): n = A,T,C or G
cataacannnnnnnntccattnnngaggaacatccttgtatagagaatgaaatatgctgcaaacannnctgcatccttactcctcacccccaaagaaaaaaaaaaggcctagcagggaagcagcatgcaggcttcacagcttaatgccaaggacagcgagtgaggctgggagcttcttttaggcctgctgggtctctaggctcttggaatagggacagtcattattggtgccccaaggtgggacttggagaatattttgcttggcatatgtttggtctgaatgatatagttgctggttccctagagaggaaaaggtggcaggcccnnnnnnnnnnnnnnnnnnnncttaatttcccattgaaaccctagtagaattgtgaatgaaaaccccaaagttgagcccctctgccaagcagcagaggtagcagaaggggatgcaggggcaaagcactcaattgccaagcaaggannnnnnnnnnnnnnnnnnnnnnnnnnnnnnnnnnnnnnnnnnnnnnnnnnnnnnnnnnnnnnnnnnnnnnnnnnnnnnnnnnnnnnnnnnnnnnnnatgtaatggtttaaaacaacacattcataatcggctctgtgcaggatgtcactcaatcagtttgggtttgctttattttattatatatatatatatattttttggtatcctgtacattgcagtgggtgtgaagatagtattttaatatttgtacaaagtttaatttaattttaattgttctatgtatataactgca

SEQ ID NO: 13846 - DNA, 698 bp, Macaca Fascicularis
  misc_feature (1)...(698): n = A,T,C or G
ctttccagatttgacccaatcatacacatgagaaatgtatattcatacacaagccttttcacacagcacttcnnncagacaccctcagagagttcacactgatgggaaatgaccataggaccaccaagctctaggtcgtccatccctgcatccaaatagtagggaaatgtgaagataatcagcactcaggaccttcaccctcgaatgcccattagtgctacgttatagaacctacaaaaaagaaatggaacaagtgtagtggattcagggaaagcttttgtccaaggactcaccatattccaaaccagagatgttcagattggtgagaaacccaacaaatgcctttcatatgtacaagaaccaaatgaagtcagaatttgccattgttgcacatcacgttttgtggggggaaagtgcttatgaatggtgcaggttgactctgatattcccaaatgacaatatggcagagtgttccagaaatgagagtggcatctttatggaatcactatggatactgactgtctcagtaaaaagctgtctggtttgtgtgtatattgtttgatnnnnnnnnnnnnnnnnnnnnnnnnnactggaattccatatgacaaagtatcagtgtactataaacaggtttttagttatccctgctttatttttgcaattaatctttatatgcaatgagattgaaaagctttgta

SEQ ID NO: 13847 - DNA, 199 bp, Macaca Fascicularis
  misc_feature (1)...(199): n = A,T,C or G
caagaannnnnnnnnnnnnnncgtagagattggactggctaaggannnnnnnnnnnnnnnncatgggttttaagtgcttgtggctcactgaagcttaagtgaggatttccttgcaatgagtagaatttcccttctgtcccttgtcacaagtttaaaaacctcacagcttgtataatgtaaccatttggggtccgctttt

SEQ ID NO: 13848 - DNA, 737 bp, Macaca Fascicularis
  misc_feature (1)...(737): n = A,T,C or G
gaggggatgacagcnnngaattccagacataattggccatgccagggcagggcaggccaggggccctggaagggtgtggccaacaccaagcagacatttcagaggattcacactaatcctaaccctggcaggccttgggtccccannnnnnnnnnnnnnnnnnnnnnnnnnacagagattctttctgctcctactcaatttccctcccaccacctcnnnnnnnnnnnnnnnggaatagatgctggttgtcaggacagccacatgccttcctgttctatatcacctagtaacctcaaagggaaggtttgttatttaatttatggattgttcagcctttggctttgttagcttgtttgctagttgcctccagctgaccatatgaccagagtgaggcagtacttcacatcctgggacatatgcccttggaacccatgaatgttattttgtattattttattttcatgatgtgtattttttctatgtaaaaggaaaatgactgtaatatttgccttcaagatggttcaaacacaaaatgttaaatgagctgttttttaaaannnnnnnnnnnnnnnannnnnnnnnnnnnnnntgcttatagacccaaatggaatagacagaatagttaattcataatacatggaattccggggcatagggtggaatttgtactgnnnnnnnntattcataccacttgatataaatcttataaagtttaaaaaatatttatatgtaactca

SEQ ID NO: 13849 - DNA, 733 bp, Macaca Fascicularis
agtgcagctgtttaaaactgtagcaagggctgcaatcttgtagagatttaaagagaagttttaaagtttctaatgcctctttttgataaatacaagttttataaatcttgccctgggatcctgattcccctttagtcaagaagatttgtcagacttcaccttctataatgagaaaacacagttataagaacagtcagtttttataattttccaaattaaaaaattgcactatgattttgaataagcatttccaattatattacccatcttgcatgctataggtgggagtataattggcacaacctttaggaatgtagttttctggggtttattgaaactgtttgaaccttttggcctactaagttcatttctagggaactgcctaatgggaataatctgacaagtgtacacaagcaaattcattgcacctttgttctttaatacttaaaactcaaatgtcctgtcaataagggatggtttaatagatggttcctttatgcaatttgtttctaagtattcattaagtgagtgaggaatgtctggattattagggcaaaatttccaaactttactcttagttaaaaaaagttgtgcaagcattttttgtgaacaacttaatgctccaaaatataacaccacattactaacagtggctttgttaggaagcagaattatggaagaactttcacgactggctttacatatttctatgttttaattttctataagcatg

SEQ ID NO: 13850 - DNA, 826 bp, Macaca Fascicularis
  misc_feature (1)...(826): n = A,T,C or G
tgtgtccagccccaacacggccggnnngnggagccttcaaggaaaggctgagctgcgccgcctgctgaccaaggtgctgcaggagagggatggcttacagggagcgcacaggccggcagtgctggtgaagatcgctcctgacctcaccgcccaggacaaggaggacnnnnnnnnnnnnnnnaaagagttgggcattgatgggctgattgttacgaacaccaccgtgagtcgccctgctggcctccagggtgccctgcgctctgaaacaggagggctgagtgggaagcccctccnnnnnnnnnnnnnnnnnaccattcgggagatgtatgcactcacccaaggccgagttcccataattggggttggtggcgtgagcagcgggcaggacgcgctggagaagatccgggcaggggcctccctggtgcagctgtacacggccctcaccttctggggaccacccgttgtgggcagagttaagcgggagctggaggcccttctgaaagaacagggctttggcagaatcacagatgccattggagcagatcatcggaggtgaggacagcgtctgttgggaagcctgatctggaaccttcccaaggactcaggcaagcctttatggctggattgtgagaggagggactctgtcttgagccatgtccctcagccgtggcatagctgcaccataaacgccagtcaggggtcaccaggatcatccgcaggctttcttcagtcccttggtcagactataaactgtgtttgtgattctttgtggattcaaaccctaggatccgtcagtcttgcaaggacatgaatatnggggaaaaag

SEQ ID NO: 13851 - DNA, 1181 bp, Macaca Fascicularis
  misc_feature (1)...(1181): n = A,T,C or G
catacagacaatccannnnnnntcttgccgggtccaccgtggaagatgtcctgaagaaggcccatgagttaggaggattcacatatgaaacacaggcctccttgtcaggcccctacttgacctccgtgatggggaaagcggctggggaaagggagttctggcagctcctccgagaccccgacacgcccctgttgcaagttcaccccgcctagctcaatctgattctccaaggatggagaaaccattgagctgaggctggttagctggtagcccctgaactccctcatcccagcagcctcgcacactccctgggcttctaccctccctcctgatgtccctggaacgggaacttgcctgaccctgctgccacctcctgtgcacttggagcaatgccccctgggatcaccccagccacaaccccttcgagggccctacaccatggcctaccctggaacagggagccaagcgccttccctgggaagtctttctggccaggtctggccagcctggccctgcaggtctcccacgaaggccaccccatggtctgatgggcatgaagcatctcagactccttggcagaaggaaaaggagtctgcaggccgcaggtgttgtgaggaccacttgttctgtggttggggtcctgcaagaaggcctcctaagcctaggggctatggccctgaccccagctctccactctgctattagagtggcagctccgagctggttgtggcacagtagctggggagacctcggcagggtgctcagtgcccgcctctgacaaaattaaagcattgatggcctgtggacctgctgcagtggcctagtgcctcatnnnnnnnnnnnnnnnnggtagggacaagagaagggggaagtaaccccatcggggaggagtggagggtggctgagccatctctgggcattgggggagnnnnnnnnnnnnnnncactgacgacattgactactactgactgagcacccactactatctgctgagcactcacttgctagatactatcttgaacaactttatgaggttgctgatattttcatttttatcctgctttaccaatcaggaaactgggaggccgggcatgnnnnnnnnnnnnnnnnnnnnnnnnnnnnnnnnnnnnnnnnnnnnnnnnnncacaaggtcaggagttcgagaccagcctggccaacat

SEQ ID NO: 13852 - DNA, 697 bp, Macaca Fascicularis
  misc_feature (1)...(697): n = A,T,C or G
agtggagaaatttgccacnnnacgatcacggattagctagcacctttaagccctgcatntttccaactgacaagtgggtgggggtgatgacacattcagtgaggctatgaagagcgaatcctctctattatttaaatagattactgtagttnnnnnnnnnnnnnnnnnnnnnnnnnnnnnnnnnnnnnnnnnnnnnnnnnnnnnnnttgcaactaagtatctaactttacaggcccactcacatttgaggcaagggacttttgattatgtggagagatgtagtgatttaaattctgattatttaagttggatcagctgaagtgtgttttagacccaaaccatctggccccttcgttttgctcagaggaagtaaatgttcacttaaatgaaattgaaaacgcaatnnngcactacaaaagagctctnngtactttctccacgctgcctcagaagtcctgtgattttcggggtcagtgtcccacccttcacttcccgagggtgggtgagtggatagcagagccgggagctctggcagctgtggacagatgtgcttcctgagcacgggttgtgcctcccatcagtaaaaaaatgtttagttcacttccttaattgtataattatttatttgtaaattatatacatgtactactgtactaaaatatcatgtacattataaaacatacacaaaaatagaaat

SEQ ID NO: 13853 - DNA, 663 bp, Macaca Fascicularis
  misc_feature (1)...(663): n = A,T,C or G
tcccgtggagtgcgaannnnnangtcntggggcnnnaagagggagtgaggtcctggatccagggagtcggggcaaggatgcctggctgagtactcagtgggggaagtggaccccaggtcctggaaaggggagagggaggcagggaagccaccgtttctgggatgaaagacggctgtctcctgaaagcagtggactgaggacgcctccttagggagggaacctgtccccaggcagtacgtggttgtggatcctgcgttctgggcctcgggggtggggccagagaatgccccaccgcggacgtagcctcactgcattgcgctcggccctgcaggtacttgctgggacggattcttgccggaagcgcggactccgagggggtggcagccccgcgccgcctccgccgtgccgccgaccaggatgtgggctccgacgtgccccctgagggcgtgctgggggcactgctgcgcgtgaaacgcctagagaccccggcgccccaggtgcctgcacgccgcctcttgccaccctgagcacagcccggatcccttgcaccctgggacccaggagtgcccccgccatcccgccaccaggactgctccccgccagcacgtccagagcaacttaccccggccaaccagccctcccacccgaggaccctacccccgg

SEQ ID NO: 13854 - DNA, 734 bp, Macaca Fascicularis
  misc_feature (1)...(734): n = A,T,C or G
tggggaaggacatcatnnttcagtgccgaggannnntgccaggtgttgaatttgtcctagaannnnnnnnnnnnnnnnnnnnnnnnnnnnnnnnnnnnnnnnnnnnntttgtcatcaacaatgtagaaggaaaaggcattggaaactannnnnnnnnnnnncgcctccaggcctaccctgatatctggtcagaacctagtgattccctggagctggtgggggcagcagggcctgtggctcaggagtgcacagtagggaacattgtccgaagtagcctaatcgtggtggttgttgtagccttgggggtagtactannnnnnnnnnnnnnnnnnnnnnnnnnnnnnnnnnnnnnnngctcagagacagacggaagagaccagaccattgcccttgaagagtgtaaccaagaaggagaaccaggcacccccgccaattctccttcatcaacctctcggagaatctctgtggaactgccagtcccaatataataatctcctcctttacaagagctttcctctcctctatcttgctttcagagacctgtaaatccaactagttaccctgcaannnnnnnnnnnnnnnngttccttggtctcnnnnnnnnnnnnnnnnnnnnngggtattctgggagnnnnnnnnnnnnnnnnggtgagatgtttcctgaagagaggttccccacccctgtaactcctcactgtactgatttactgnnnnnnnnnnntctataaaaatgc

SEQ ID NO: 13855 - DNA, 755 bp, Macaca Fascicularis
  misc_feature (1)...(755): n = A,T,C or G
cagactgaagccctnnnnnnnnnnnnnctcatcagacacctgctgtccgacgggatggacagtgcatcagaaaagctgcttttacatctcacctacttcgaaaacttggcaggagagccaaaaacattgtgaaactctgtcttccaagctggtcacattcagtgaaatttatcaacaatcacgttacttcatcttaaattcgctgttgccaaatggtggttcagggaattcatactggactggcctcagctctaacaaggatgagaagtttactgatgatacacaatacattagggtttatgttcaaagttcaaaatgtaccaaggtacaaaaaaattggtcatggtattggacaacggagaaagaggcatgtggaagtcctcttcccttcatctgtgagatgnnnnnnnnnnnnnnnnnnnattaggacaaccctttacactgaactgacactcatgccaacaagaaactgtgcccctccttcctaacctgaggcctgcgggtcctcagaccatgtcctccctgtgttccctcattctgggcagtgtccagccaccagctgatccacacctgacacttccagccagcctgctgcctgctccctcttcctgaaactggactgttcttgggaaaagggtgaagccacctctagaagggactttggcctccctgcaagaacttcccatggtagaatggggcgggggaggagggcgcacgggttgagtggataggggcggcccggagccagccaggca

SEQ ID NO: 13856 - DNA, 782 bp, Macaca Fascicularis
  misc_feature (1)...(782): n = A,T,C or G
atgaatatgcannnnnnnnnnnnnnnnnnnnnnnnnnnnnnnnnnctcnctcccatcaggcttcgcannnnnnncgaccagtggctanntcccagaagccggggggccgagaatcagccctgccctgccaagcttcccctcttcatcctgccttggcataccctcttccccagtcacccattgtccgagccttctttgggtcccagaataacttctgtgccttcaatgtgacgttcggggcttctacaggccctggctactgggaccaacactacctcagctggtcgatgctcctgggtgtgggcttccctccagtggatggcttgtccccactagtcctgggcatcatggcggtggccctgggtgccccagggctcatgctgctagtgggaggcttggttctgctactgtaccacaagaagtactcagagtaccagtccataaattaaggctcgctctctggagggaaggacattactggacctgtcttgttgtgcctcaaaactctggaggttggagtatcaagttccagtcggccccttcactcccccgtcttgcttttctgtggaacctcagaggccagcctcaatttcctggagacccccaggtggggcttccttcataccttgcggggggaactttggaggggatggaggacagggctattgataaggtccccttggtgttgccttcttgcatctccacacatttcccttggatgggacttgcaggcctaaatgagaggnnnnnnnnnnnnnnnnnnnnctgaaaggnnnnnnnna

SEQ ID NO: 13857 - DNA, 713 bp, Macaca Fascicularis
  misc_feature (1)...(713): n = A,T,C or G
caatgtgggcttaatgtcaagaatgtgtctgtcaaggatnnnnnnnnnnnnnnnnnnnnnngtgacagcaaaaacgacccaccaatggaagcagctggcttcactgctcaggtgattatcctgaaccatccaggccaaataagtgctggctatgcccctgtgttggattgccacacagctcacattgcatgcaagtttgctgagctgaaggaaaagattgatcgccgttctggtaaaaattggaagatggccctaaattcttgaagtttggtaatcagatgccaacatagatatggttcctggcagcctatgtgtgttgagagcttctcagactatccacctatgggtcgctttgctgttcgtgatatgannnnnnnngtggcggtgggtgtcatcaaagcagtggacaagaaggctgctggagctggcaaggtcaccnnnnnnnnnnnnagaaagctcagaaggctaaatgaatattatccataataccgccaccaccaccattaatcannnnnnnnnnnttatcacagcattattgtgacagccacgaacccattgcccacaacccttccacccttggtcaccccgnnnnnnnnnnnnnnnnnnnnnnnnnaccaaatcacgatgatgagtatttgggggtgggtgggtaagggggggagtgggaggggacggaaccaacttttctgtattttgtattgtatgttttcttc

SEQ ID NO: 13858 - DNA, 742 bp, Macaca Fascicularis
  misc_feature (1)...(742): n = A,T,C or G
acccagttcataaatctcctaaacatttacagttgactctcatgagctgatggagtcagctggaacataccactgcctctagactaaggtcagcagattcgacaaatacagactgnnnnnnnnnnnnnnnnnnnngataaatgaaataaatttttaaggttaagtatgtccccagaattgcatggaacatgcttatcctaaacaatgatttgttgttcacctgaaattcaaatttagctgggtgtcctgtatttcatttggcaactctacttcagacccaagtgtaaggtacatggatgtgctttggtcaaggaatatgccaaggcagatatccatgtctgcatgacttagtgggtttggtgcacaggcacacacctccacttgttatataacctgtttgtgtaagttcatacttggtctgagccactgttgtctgtaaaaggtaattgtcctgctaatgctgtacaggggctcttggggttcggcttagctcaacatgacttgacatggtgggcgcgctggcgcccagagaaagagagagagccaaagctgtccatcnnnnnnnnnnnnnnnnnnnnnnnnnnnnnnnnnnnnnnnnnnncatgcccagaggaagaaagagttaagctgctgaccctgaaggcaagggagagcaggctgcacagctgtgtgtgggagccctgggctcaagcagtcgagacagggcggacagtgtgagagagctagtgtgagtaagctgttg

SEQ ID NO: 13859 - DNA, 745 bp, Macaca Fascicularis
  misc_feature (1)...(745): n = A,T,C or G
agcgaccgcaggccaaccagaagcgaatcaccacaccatnnnnnnnnnnnnnnnnnnnngcccgtgtgctgggcacccgagcgctccagattgcgatgtgtgcccctgtgatggtggagctggagggggagacagatcctctgctcattgccatgaaggaactcaagtaagtcattcaaatcatggttcacttctccaaatctctgggaggcatctgttgggttctctgttgcacccttttctcccacttccctggctgaagaagttgatgcttattcctacagatcattaggaacagctcaccaggaggtaggaggaagagagaagaggaggcagggaaaggggggagggcactgatgagaccgggaccttttctggctgttggagtttccctgttcctgctgcaggaggccttaccaataattctatcactcttccccctcttgtctgatataaaaactttctttttcttgtaattgctttcttacaannnnnnnnnnnnnnnnnnnnnnnnnnnctcctaagacttctctttccttgtgttttgcacacaatctgttccttctgcggcagagctggggtcaccagccctcatgtacttgtgacttttcccctgccacagggcnnnnnnnnnnnncatcatcattcgccgttacctgccagatgggagctatgaagactggggggtggannnnnnnnnnnnnnnnnactgagctggagtcatcttcctgcccttgcccaattt

SEQ ID NO: 13860 - DNA, 679 bp, Macaca Fascicularis
  misc_feature (1)...(679): n = A,T,C or G
tatcaccatctggaaagaactttcattggactgcctaataaaatcactgagtatagcaacaaaagagaagacaacatagggtgggggatggagaaagtacaacaagcacaatgtaatatcaatatctgaatcaattataccttcagtnnnnnnnnnnctgcttgatatttgtggaaactgaaagagcatctgctaaaatcttggtatgcactcacctgtgtaatatatcttcaaaagcctgtaagaaaaaaaagaaaaagaaaggctcagtgctttccacatgatgcaatttccactaagttcactgtgagatttggaggcagtttctgagatggtattttcctacagttttccctcctggaaagcattttttgtttcttttctcatgaaaatcccagtctgtcatatgtcatgaattaatgtnnnnnnnnnnnnnnnnnnnnnnnnnnnnnnnnnntccaagtgaaggaagaggaggcccccagagtctgtgctctgctgtaaccataaagaagctactcagtcatcttccctaagccctgttaccaaacatgagtggatctcaaaataatattaatgtgatcctagattccccaacttctccatcatgctgtgtctccaaatcaacctaagtgcaaatgaatcactnncnatctcatccacgacacaatacacacac

SEQ ID NO: 13861 - DNA, 745 bp, Macaca Fascicularis
  misc_feature (1)...(745): n = A,T,C or G
agcggcccctccnngattgcgtggcccagcagcagggggcctggctgccccatgttgctgactttcggtggcgggtagatgtagcaatctctaccagtgccctggctcgctccctgcagcccagcgtcctgatgcannnnnnnnnnnnnnntgggtcagcataccgcttcgaggtccccacagccaaattccaggagctgcggtacagcgtggctctggtcctgaaggagatggcagatctggagaagaggtgtgagcgcagactgcaggactgacccctcacttggccagtcnnnnnnnnnnnnnnnnnnnnnnnnnnnnnnnnnnnnnnnnnnnnnnnnnntgactcttcccaggacagctctgtccttgccatgaggcaggctcttaagtgagagtgtttgaacgtaattatgtagttttctgtttaattgaaaaagagaactatgcctttttttctttttttgaagtaaagcagctgtaaacaacatgtttctctaggcgggtgttgaacctcacaccctccctttccctgtacatttgtctttgctgctgggcgtggctatgtggccaggttgaggccctttgtagacaccatacagttgctcagcctggccccatgtagccaggtgcttttgtagatcttgtattttaggttgggcattttcattcttctgccttaaatccctgaccccaccgagctgacattctagtggggctgagcacccgcctagagaaacatgtg

SEQ ID NO: 13862 - DNA, 732 bp, Macaca Fascicularis
  misc_feature (1)...(732): n = A,T,C or G
caaaatatgtgaaacaatggnnngcaagacaccaaataccaggcagtgaaggatagtgattcctgagacggcaaactcaggaggggagccctgtgattgtccagctcatgctccgaagagggtcccagctgcagtgtgcatgcggcgggggggcacccaggtggagcttgccagcctccctgcagtaggaaaacaatgccagggatccagggagactaacatggccggaactcgcgnnnnnnnnnnnnnnnngagacatacaaataagtcatgggccagagggagctccctcaactaggcagcagagccccactgatcagcgcatgtgtgtaaggaaccacctcaggccagagaaagccatgtgagaggattagagggaacaggggtgctgacacaggacctagggtagggcctgttcnnnnnnnnnnnnnnnnnnnnnnnnnnnnnnnntgaggcactgggtagaaaacacaagggagaaatcctagatgggcactnnnnnnnnnnnnnnnnnnnnnnnnnnnnnnnnnnnnnnnnnnnnnnnnccaggacaaagctcaaaaatacttctgagactccaaaaaatactcagtgcccaagaaggtaaaatgtacaaggtttagcatccagtagagaagcatgaaaagcaggaaaatacattgcataatacagagaaaaattaatcacaactgacctggaactcagatgctagaaatagtagacaaagatgtt

SEQ ID NO: 13863 - DNA, 241 bp, Macaca Fascicularis
aagatacccttggatcccgggaccttgttaatcctggaaggagcgacacaagctgactggcagcatcgtgtgcccaaagaataccactctagggaaccgcgagtgaacctgacctttcggacagtctatccagaccctagacgggcgccctggcgacctcagagctttgagagagaagcttcaatgaaacggagcaaaccttccagtgagaagcgacttccagaggctggtgttgctagat

SEQ ID NO: 13864 - DNA, 1314 bp, Macaca Fascicularis
  misc_feature (1)...(1314): n = A,T,C or G
agacgtcagagtgatgggacattttggtgaccgctactgtgcatnnnacaacagggcaacaggcgctgagcaggaggcccagagggcacagttgnnnnnnnnnnnnnnncgcgtggtgagggagaacaagggaggctgctacactaataggatgtaccaaagggccgaggaggagatccagaagcaaacacaagcaatacaagaacactatagagtggagctggagagagagaaagcacggataagagaggagtatgaagagaaaatcagaaannnnnnnnnnnnnnnngagcaggaaaagagaaaggcacaaatggagaaaaaactagcagaacaggaggctcnnnnnnnnnnnnnnnnnnnnggggcaagaatggaagtggagagtcaggataggatacttgaatttatcatgagagcattagagattgcttcctctatttttttacnnnnnnnnnnnnnnnnnnaaacttaatgaaaatctctttgtattttctgtatattctctagcaaccttgccccannnnnnnnnnnnnnnnnnnnnnnnnnnnnnnnnnnttctgtctctcaggtgctcataactaaggaccaccattggccattagtagatatttgattgacttaacaagagagggacaaattttcaatttgtgaaactccaaagcagaaagtattggtgcttactaacttgtgaattcttccttagtcacgcagagaaaatgtatgcaagagaccaaagaagatggctccaagctatatcatgttacctctaataaaatattttcttctagattctttctatattagcagataatctccctttgtagcttccactcacttactcttgcattcagagtcacagtgatcatcttacccatgtggtttgttagaaagaaagaccaattatttgtttgcagtaggtaatcttagagacggagatgattgtagaattatttctagatgagtgtcaatttatttaattccattgtcatataaggagtcaaattgtttcttatcatttgctcattaaggaacagagatgtgtctggaaaatcgatctctacgaattcaactaaannnnnnnnnnnnnntgctgaaagagtgaaagacagcaannnnnnnnataatacagcaatgtttagtatattcaggtgtatctgtagaaactctttgaccaacctcaatttaaccaatttgatgaatacccggttctctccttttcttgagaaagatagttgaacctcacctccctcactcaacactttgaatnnnnnnnnnnnnnnnggttatcccacttctgcctccactgcattg

SEQ ID NO: 13865 - DNA, 719 bp, Macaca Fascicularis
  misc_feature (1)...(719): n = A,T,C or G
aaaatgaagctgcattnngnnnnnnnnnnnncatgaggaatgatccatatatggtgagtacaaaactcaattatagaattatttcttagctagtaccagatactccaaattacaaatgcttaagtaaaagtaaaatacgatttgccatactaaaaggctagaagtgaaatatgacagaatttaaaccagcagatataaatgcagcacctagtgtgtatattgattaaaaatcaaatatgtggggaaaaaaaaatatgagaaaagctctggccttaaacacatctcacctgaaatccaaccnnnnnnnnnnnnnnnnnttttagcaattttaattcattgtatgagaaaaaaaaaattatgaatgctaggagaatccagtgacaaaaagggcacttttttggttaaaactacnnnnnnnnnnnnnnnnnngagaacattaaggaaaacattttaaatcattttcaaaatgtctagttgatacgatcttcagaaaaacagtccgtatagaaattcatcttgaaataagaatgaggcagtgattttttttaaagggatatatatatatcctttagatcagtgtagtatgactgtgatcatcttacaaataaaactcaaaatcaattcagagagcagcgtggccttggagaccacccacacccaacataattgtacacactggactttgctgnnnagctaaggagtgagnnnntgagttcggt

SEQ ID NO: 13866 - DNA, 752 bp, Macaca Fascicularis
  misc_feature (1)...(752): n = A,T,C or G
ctatcactgtcgttggntggaaaggggtcggtggacttggctcgggctgtgagagaggctgcgagtaaaagaagccgattccagttcctgtatgatgttcagcttccagttgtggacaagataagaaccattgcccaggctgtctatggagccaaagatattgaactctctcctgaggcacaagccaaaatagatcgttacactcaacagggttttggaaatttgcccatctgcatggcaaagacccacctttctctgtctcacgaacctgacaaaaaaggtgtgccaagggacttcatcttacctatcagtgatgtccgggccagcataggcgctgggttcatttaccctttggtcggaacgatgagcaccatgccaggactgcccacccggccctgcttttatgacatagatcttgataccgaaacagaacaagttaaaggcttgttctaagtggacaaggctctcacaggacccgatgcagactcctgaaacagactactctttgcctttttgctgcagttggagaagaaactgaatttgaaaaatgtctgttatgcaatgctggagacacagtgaaataggccaaagatttcttcttggttcaagataaattctgttcgcagcggagtgtggcattcagcaaaaggacctccaccaagactgaaagaaactaatttatttctgtttctgtagagtttacattatttctactgcttacactttagaatgtttattttatggggactaag

SEQ ID NO: 13867 - DNA, 1209 bp, Macaca Fascicularis
  misc_feature (1)...(1209): n = A,T,C or G
aaagatatattagaaactttagaaaaatgctgaaatactttgcttcagaattggnnnnnnnnnnnnnnnnnnnnnnnnnnnnnnnnnnnnntattaaatagcaaagaataattagaacccacatctttttttgtgtggatggagaaaatgttttaaaattcagttatttaataccagtttgagagagaaaattgttttttaaaaatatacatatgcattgaaatgatggcaatgcttatagtatgatcaagtatgaaaggagctttaaattnnnnnnnnnnnnnnnnnnnnnnnnnnnnnnnnnnnnnnnnnnnnnnnnnnnnnnnnnnnntttgttagtgttttatatttaatactaaaatcacagtcatgaaatcannnnnnnnnnnnnnnttcacatagtagtcatccgtgttatttttcagtttgtaatattaaattatggcaattttatttcaaactaaagtttgaacactggaaaatcattactcagtgatttgtaatttgggacttggattatttatctagagatgtttgtatattttgtcagtaactaatattgcgctgccatcatggtgactgtcatggttctacagaaatgccctccatgtgtccctctaatgttgcatgtttcagtgggttagaagttttgtatatttattgtattaacacagagtgtcataaaataaaatgctgtttactggatgtttgtttgtataattttgaacattataatagcaattcagagacagacattgttaaaggtttgatgtatatagaaattccatgtttgattttttaaaaatatgtgtataagtctgtcatgtgctaaacaaaataatatgaaagacctagttaaaaactctgagcaacataaaatgaccatttttctgttgcattagacctttacaggtagtagaacaggagtttcatccatattaaatagtttggcccctttaaggtcaaaatacagatcatctagaagttagattcaaaatggaaaacctattcgtggctcagatatttcattgtggattaaaaatgggtgtctctgtactagtattgtatttattcaattgtattctgatttctaactttgctacctattgctgttttatgtactgatgaaagtacttatttgtgtatattggatttttcacttggttagctaaagaagatgtaaaaatatctaaaatatnncatggtgaa

SEQ ID NO: 13868 - DNA, 729 bp, Macaca Fascicularis
  misc_feature (1)...(729): n = A,T,C or G
gacccannnnnnnnnnnnnnnnnnnnnnnnnnnnnnnnnnnnnnnnnnnnnnaaccaaagatggccgagcctgatcagtcctgagccaccgcaggccacctcctgcagcagggggttgtataaggccgcagcctcggcgcaactcatcctgccgtgcccacggagaatgggctgannnnnnnnnnnnnnnnnacaccccctttccaaacggctattcttaacggcagttatctcccctcctgactaggaagggtgctgagaggattcaaggtaacattcagtcacaggctggccggaccctgagtcttattgacaaccagctgaaatgacctgtaccacggcagggacagatgacatcgcctggtggagtggtgggcagtgggggaacttgtggagtcggggagggcccatcccagcatcaacactgagcatgtatcaatgtgggacaacgcaggaggagatgctacggatgctgctttgcctgccacgcactccttccccttcccgtggatgacacaactctgacttcatgtagagaagtgattcaaagcatgctaaatacagttcatcccagggcttccccagacaccaccagaacagggtgcctgctnnnnnnnnnnnnnnnnnnnnnnnnnnnnnnnnnnnnnnnnnngaggagccgggagtgggggcgcagagctggaggcagcagcnnnnnnnnnnntccacatttcnnnnaggataccaaaa

SEQ ID NO: 13869 - DNA, 654 bp, Macaca Fascicularis
  misc_feature (1)...(654): n = A,T,C or G
cagagctgggactacaggagatnnnnntgtgtagctccctcnnnnntagaactttaccccacacatttgaggacacatccggatttcagacctcggtttggccatggagatcccagaagggcagatggctcgaggaagagttggaacagtcggctacatggcacctgaagttgtcaataatgaaaagtatacgtttagtcccgattggtggggacttggctgtttgatctatgaaatgattcagggacattctccattcaaaaaatacaaagaaaaagtcaaacgggaggagatcgatcaaagaatcaagaatgatactgaggagtattccgagaagttttcagaggatgccaaatctatctgcaggatgttactcaccaagaatccaagcaagcggctgggctgcaggggcgagggagcggctggggtgaagcagcaccccgtgttcaagaacatcaacttcgggaggctggaggcaaacatgttggagccccctttctgtcctgatggctgcctgaccatggtccccagtgagaaggaagtggaacccaagtgatgctgagcatccccctgcagaccgcagagcagaccctggcgccaggagggagcaggtgtgggcgtctcctcccaactggaatnnnataaatacatcta

SEQ ID NO: 13870 - DNA, 731 bp, Macaca Fascicularis
  misc_feature (1)...(731): n = A,T,C or G
ttacagaccggagagaggagcccaggacgaggacaaaggctggaggatggagtaggacccaggggctctnnnnnnnnnnnnnnnnnnnnnnnnnnnnnnnnnagaccttacagatctcctctgtaaatagcatcgagtgagagtggagctcagctcctttctctacttttttttggtctgatggcacatatttattgttctgtggtctaatcacagtgtttctaaatgtaaaaagtgcatatgttggtgtagctagtcctgcaacattgagctcctctgcacgaagacactgggctcctgcatccagctgtgtttattgcacactagctcctctctcccacactgggaactttagtccacgaggctgtcannnnnnnnnnnnnnctgggccaggctttgtagctcctgcaggagctctgctacgtcatcgtgctccactccagcatcnnnnnnnnnnnnnnnncgccgcaagtcgagtttggtgaggtctctggccaaggcttccagggtctggtgcagggacgaagaggaacacagtgccccaaacactgggatgctctccactgctgaggagggagaggaaagagagacctgtagatggatgattattctgccctgggactctatcaaaccgataaggaagtccaaccttagtagacttgattgtaaactcaacaaatttggtgtactgtccccttagtacaccagtactccagaggaagaatgctttc

SEQ ID NO: 13871 - DNA, 740 bp, Macaca Fascicularis
  misc_feature (1)...(740): n = A,T,C or G
tttcttctttacagaggatatatttggcttctctcttaagactctgagattcacaatcagcagccctaaaaaataaaggagcagtttggcttccggaaggaagaggaggcaacactcggacctggttcttgtacaacaagaaaacatcgctggggccccactgaggctgaggctggtctttgggggataccacccccaccccatcctcttgtcagacccccagggtaccccagagcttgggtgggtgggtgttccactagcttacacaccactgaagccacagccagccagtaactaaggagcaagaagagcattgtccaagccgcctcttggggcctcctgttggccacaagggccccccctccgcaccagaaccacctcgattgcagcagatgcgcagggagtgtgtgacgcaggaggtaagctcccccaaagtgggttggggctggtgtgaagttggcagccgcatcccggtgtgtgcacggatgggacgtgggtgatcgaaggcctggcccccagggtcatttggtggaataccagcgggtaggggctggcgtctcccgggagcctcggcctcagctctggggcaggaagctttgtggatagctgcttcctccagcagccggagccctggctgctgccccacggattctgggaatggtctcctgggccctgcccctggaaaaggcttggctcagcctcagngnagggagtgggttcctggcttnnngggtggtggc

SEQ ID NO: 13872 - DNA, 748 bp, Macaca Fascicularis
  misc_feature (1)...(748): n = A,T,C or G
cttccatcactaatgctgagcaaccaaacattacagttatgtgataaggaaaaattctctcctgcccaggacctgcgccatcctttaggcccaccttggtcacataccaaattcaataaaatccaatactggtnnnnnnnnnnnnnnnnnnnnnnnnnccaggtttctcagaaactgacaagaaagtctgaccttcttctatacttttttgtttacttacccttgggctgcttggagttgaaaaatgcacacagccaagagttgctttctgaatagggctggaaactttcaaagaaaacccccaaacttttaagccacaaagtctgatttaagaagctaagatcatgtcagtgagttcaatgttagtattttccttaagaccaaggagatattttcagtcagagaagataaatgcccagtcccagactactgtgctttctcggcaagaaagaccgagacactgaggatgtgaacgtcaaagcagtaagcagggactaaaggggatggggaggtcaaaaggcaagcatcaaaacacctcagtggggagctgggaatttgagtattaaaggacctcaagagggcagctgagaaaataggccagtggtctcaggccgaggcattccagtctctgtgggaaagtcacaaagcnnnngcctgantnnnccaaagaannnnnnnnnnnnnnnnncttgttaacctcaatgagggctggaagaactagtagctgaccaccaaggtacctgacctg

SEQ ID NO: 13873 - DNA, 768 bp, Macaca Fascicularis
  misc_feature (1)...(768): n = A,T,C or G
ttagtaatatgcaacattgtactgtaaannnnnagtcaacatgacaacttataatgagtggagatttcatattagacactaaatattatagtattattgctattttgtttttccaagtaagaagtatggtttattttattttgtggtctttatcattaactttaattctttctgtactgtgtgtaatatttttatattactggccttaccacaaaattatttagaaaggttgtcagaataacttatacctctttggcaatagacagatgtatacatctacctaccgtgatctacaattttagattaagtgaagcttgggagggctactgacttgtttaccttcttgttgtctcttgtctcaaagatttaaactatgtacctttgtatagctctcctgccccattttgacttctgagatgaaagtatgtactaaaatttaaaaaaaaagataaaaactttaggttactaactttatgggtttctgaagtgatggaaattttcaaggatatatttaataagcataaacttactaataatcacttccaaaaataaaaacaggaatattacttttacccagtgtggtttatagaatacatttgtactgaagcatataggggtgttaatgtgatcttttcctgacagattatgaaagcattatgacttgtaacaagtttacttgtatatcactatctaacaggtttagaagacataaatgttagtgtgttttgcctacatgatgtatttaaatctattaatattttcctattg

SEQ ID NO: 13874 - DNA, 731 bp, Macaca Fascicularis
  misc_feature (1)...(731): n = A,T,C or G
gagaaaccatttctttgctatnnnctgncttcccaagtccctcttgggttggttcaagcccaagcttgttcgtgtagcttcagaagttccctccctgacccaggctgagtccatactgcccctgatcccagaaggaatgctgacccctcgtcgtataaactgtgcatagtctccagagctgcaaaggcaacacgagctcgcaactctaagatttttgtaaaccacaaaaaccgtggttagccatttcacnnncagccttatcacttccctccctttaaaaactctctccctgctgtatattaaaaggagcaggtagagagtcattttccttcgtcctgcatgtctctaacattaatagaaggcatggctcctgctgcaaccgctgtgaatgctgctgagaacctccctctatggggatggctattttatttttgagaaggaaaaaaaaaaagtcacgtatatatacacataaaggcatatagctatatataaagagataagggtgtttatgaaatgagaaaattattggacaattcagactttactaaagcacagttagacccagcctatgctgaggtctaaacctctgaaaaaagtatagtatcgagtaccccttccctcccagaggtgggagtaactgctggtagtgccttctctggttgtgttgctcagcgtgtaagtgtttgtttccagggatattttctttttaaatgtctttcttatatgggtct

SEQ ID NO: 13875 - DNA, 716 bp, Macaca Fascicularis
  misc_feature (1)...(716): n = A,T,C or G
ctccttcaagggtatctgcattcctgttcccacagcccccagcattccttatcctttagctgcctggcttctctaggcacctgagtttatgatcctgggttagaagctgcagaggggactatgctgactccctcaactaagggttggtactaccgcctgctcctctcagcagctgacgtcccagagatcagtttcctttctgggagggactcctcattgagnnnnnnnnnnnnnnnnnnnnnnnnnnnnnnnnnnnnnnnnnnnnnnnnnnnnnnnnnnnnnnnnnnnnnnnnnnnnnnnnnnnnnnnnnnnnnnctttagtctctcttctgtttcttctttttggctttctnnnnnnnnnnnnnnnnnnnnnnnnncttcttggcatgctgctgcctcttcctcttacctctnnnnnnnnnnnnnnnntgtgctccgctccctgcttccctagccccgccatcctcctcatcctttacatccaagatgtcctcctcctcttcatgctgctgtcttttcttcttgcttctcnnnnnnnnnnnnnnnnnnnnctctgcttccctggttccaccacctaaaacagtttcctcatctccatcttctaggttcaagtcctcctcctgttgctgcctcttttttcnnnnnnnnnnnnnnnnnnnncacgctctgctctttacctcctctgtcctgacgctgcctgcagcctcctcgccttt

SEQ ID NO: 13876 - DNA, 797 bp, Macaca Fascicularis
  misc_feature (1)...(797): n = A,T,C or G
gcactgacggaggatgacnnnngggctttgtgcgccaggagatgagtcagcactgtgcctgccagggccagttnatcgcatccggatcacgacccctacctagttatgctgcagacactgctggctcccagctccatgctgtgcctgtgctccgcgtctctcatgcagaggaggaagagcgggtgccccctgaggatgatgagtactccgaatactccgagtattccgtggaggagtaccaggaccctgaagccccttgggatagcgatgacccctgttccctgcnnnnnnnnnnnggctcctgtactgcctacaccctgcgctggtaccatcgggctgtgccaggcagcacagaggcctgtcacccttttgtctatggcggctgtggagggaatgccaaccgttttgggacccgtgaggcctgtgagcgccgctgcccaccccgagtggcccagagccaggggataggtgctatccaggactgaggcccagatgatgagctgagattcagcatcccctagaggagtcagggtctcagcagaacctgctgtccctccccttggtgctagaggcttgtgtgcacgtgagcgtgcgtgtgcatgtctgttatttcagtgacttggtcccgtgggtctggccttcccccctgtggacaaacccccattgtggctcctgccaccctggcagatgactcactgtggggggtggctgtgggcagtgagcggatgtgactggcgtctgacccgcccctgacccaagcnnnnnnnnnnnnnnngctgattctggggggcataaag

SEQ ID NO: 13877 - DNA, 621 bp, Macaca Fascicularis
ctttcttggcatatagccccacttaagaccccttctctacttccttctgagtcctctacgaagatatctgggtactacatttccatcccttccctattttgacaccaaaatatggtgtagacagccctcccccaaccccaggcctgtcaggcacaatccccccacctcccaaatgtcctggactgcacagacttcccactccagaccatccaggcctggttcccaagacctgatccttcccctacgaccagacagtccacaactgccccgctccagcccattttctgctgtgaaaccccagccagccacaccagactctggaaccctcttctgaccaccctaattcttggacacctatcccaggccaaccagaacacccaaccacaaactgtacagactctcccacccaaacctccccagactctgcacgaatgtcctaggccccctccctaactctaaccagaccccgtccccctaagtccctttgtcttgacccccaagtcttcttcaaccagataatcctcggcaacccacctctcaccctcctcctcttctccttcaagacccagctgagcaccggctctgattccctacagcctttctccctgccaccactccctt

SEQ ID NO: 13878 - DNA, 684 bp, Macaca Fascicularis
  misc_feature (1)...(684): n = A,T,C or G
ggannncttacaagtattacattaaaaagatactatgactgccannngctatttaccttctaataaccctgccatgtggtttgcagaaagagatggatatagtagccttagaagaaatattttatgtgggtttttttgtttttcattactagatttcatggatgaggggatatggttgaccttttactctttaatggagcagccactttttgttaattactcacctgtaaattgtgagattctgaattccttacctgctattcttgtacttgtctcaggccaaatctatgctatggttcttatgagacttgtatgaannnnnnnnnnnnnnnnnngattcaccacaggaatactactgccatgtaatctgtatagttccagataatttgacatgaacattgacagaatgacagttttttgtatttgctttttctccctttaagagcacattcttctgtaaggagaaaggcagcattctggctaaaatgtgtggaaagctaatttactacacttataaaatagtgttacttttgtgaaaattttgaattagctttcatatgaagtgccttaagtagactcttcatttacttttctagtaatggtttaaatatcatttgttatgcatttttaagatacaattcagaaagacacattgtagtggcaaagaaaccaaatgtctggctg

SEQ ID NO: 13879 - DNA, 674 bp, Macaca Fascicularis
cgcggccagcatgaccgccagcatgagtccgcgcagaccgttgggcatgagcttcacgacgagccgcgggtaggcaatgttggagcagcccacctccgtgccgcacacgcgcctgcacacctcaggcaccacgcacgccacctcgtccgggtacagaatgcggctgatcattcctggcatgaccatgaggaacatgggcgtcagcttcaggtacccgcacaggatgcagcccgccttgatgtgggtcaggctcttcccggccaggcagcgctgcacaatgacctggtcgctgcaccagtaccatcccgagacgatcgtgagtcccaggagcagcgcgggccacggcagatccccggtcacggggtgccggagcaggtggtaggagtcgggccggggtcgatagcaggagctggagatgtttcccacggcgtaacccatgaggatgcaggagccccccaggatgacgaaggtctgtaccgtgtccgtgtacatcagcgcggccagccctcctgtcaccgtgtaaatcatggtgatgcccagaagtgcgatgacggaggcatagatgttccagcccagagcctgctggatgaatacagctccggagaacatgtccaccgagatcttgggaagatatacaggaaaagggagagcacagacaggtagaggcggatgcg

SEQ ID NO: 13880 - DNA, 1013 bp, Macaca Fascicularis
  misc_feature (1)...(1013): n = A,T,C or G
tggggttactgatcagtgtggtgattttaacttcatttagtaattactctaggagattttaccttgactcatatttttcatgacgtttcatgatttgctgttggtttcaaatgaaactacaaatctggcatgttttactgtgaacacttttgttatttgtttgtttacccttttttgtcttgtttttctgttttagttgtcttttgaaaaaagagagtccttccctctgtttctgtcctcggatgatctccctcccctacctgtaaactttctttgacataattgttcatatcaatgaaggtgctgaccagctcaatacaaagttaagcacaagatctaaagctcttgaaaatgccggtgaagagaagactgaatgttaatgaatttaatgagtctagcaagtttgtcttatcccttataaatgtagtgtttcattggatttattttatgctaggtgatattaagttgaaatagtctatgatgaaatgtcctcatccatgcacagaatatgaatggcagcaaatctttgtgcaagaagtttggaacttattgggaaaagcctcccagttgattaattgttcatatcaggagatttagggtaagtcatggattgaggtgtcagatagtaatatctgtttgttttgtacatgtatatatctaggaaatttgtaacaatacatctttaataatgttaaagtttttttcatttttaatattttaaactaaaaactgtacttcaatctcagtttctaaaattaaaaataatttatactgatctatgtattttttctttttgaaagatttcattaagattgatgggtaactttcaaatgannnnnnnnnnnnnnnatcggaatgcgtgagatcccatgatcttgtgtattgagcttattgttgaaagggatttttgaaggacagaacaattactccatgatgaatcttcctttctccgccttctgagcaccgcctttaatttcnnnnnnnnnnnnnnnnnnnnnngttgatgttaattg

SEQ ID NO: 13881 - DNA, 735 bp, Macaca Fascicularis
  misc_feature (1)...(735): n = A,T,C or G
gcagttcacagagcatatcacctatgagaagtatatcagagaattccctggtagcaatggacttctcaggccagaaaagcagagttatagaaaatcccactgaannnnnnnnnnnnnnnnttgaagagggactcgcttggaggaaaaaaggatgtttacgcctgggcacgcacggtagccccactgcctcttcannnnnnnnnnnnnnnnnnnnggctatccaccggtcccagccatggtttcaccacaaaatttctagagatgaggctcagcgattgatnnnnnnnnnnnnnnnnnnnnnnnnagttttcnnnnnnnnnnnnnnnnngagtaaccccaaaactttcgtactgtcaatgagtcatggacaaaaaataaagcactttcaaattataccagtagaagatgacggtgaaatgttccacacactggatgatggccacacaagatttacagatctaatacaactggtggagttctatcaactcaataagggcgttcttccttgcaagttgaaacattattgtgctaggattgctctctagctaaaccagaagtgacttattaaactattgaagaaaaaggactcaagaaaaataataaaagaccataaataagggtgaaaatgttaccatgtgaaaagaatgtattttacctgcaagttacaaaaaaaatagtttgtgcattgcaaataagcaaagacttggattgactttacattcatcattaaaaatt

SEQ ID NO: 13882 - DNA, 1018 bp, Macaca Fascicularis
  misc_feature (1)...(1018): n = A,T,C or G
aataggctccctnnnnncccccatttctgtgtcctttgttgtagcatgcngtctgcaagggagcccctagcccctggcagacatagctgcttcagtggcccttttctctctgctagannnnnnnnnatgcactggaggtcttttagcccgccctcgcatggcacctgctggaggaggagagagctctgctggcatgagccaacagcttcttgannngaggccatcaaccctcttggctggggcctttttctgagccctgacatgtgcttgggcactggtgggcctgggcttctgaggtggcctcctgccctggtcagggaccctctcccctttcctgggcctctcagctgtacaaagcagcaaaacaaaggcagttttatatgaaagatnnnnnnnnnnnnnnnnnncaggcttttaaatgatttaattcccgctgtaatagcacagggattttggaagcagctgctggtggcttgggaccccagtggggccacggtttctctgtccctggttcaactgtgatttggctttcccatgtctttcctggtgatgccttgtttggggttctgtgggtttgggtgggaagggggccatctgcctcaatgtaacctgctagctctccaaaggccccgcgggcctggcttgtgtgagcgtgtggacagtggtggccgcgctgtgcctgctcgtgttgcctacgtgtccctggctgctgaggtgctgctgcagcctgcacccctcccccgtctcatagaggctccttttgacctttcttttcaaataaatgtggatggcgagttcctaggcctgtggctcctgttagagggcggcatgctgaggggtctgctgggtgtgggttggacgctggggtgtgggttggatgctgtctgcagcccacttgggcacccatgcttctgtctacttctggttgccaggagacagcaagcaaagccagcaggataagcagttgctattaaatggactttgtgagttttgttttgcactaaagtttctggataac

SEQ ID NO: 13883 - DNA, 739 bp, Macaca Fascicularis
  misc_feature (1)...(739): n = A,T,C or G
gcggacagaacagcccgaggnngagagnnnnnnngccgatannnaccagaggcagcaaggtcaaggagagcaggtgcaggaggccaggaacaccttcannnaggtnnnnnnnnnnnnnnagtttcagaatattccaggggagcannnnnnnnnnnnnnnnnnnncggatgagcagggcaacattgtcaccaagaagatcattcgnnnnnnnnnnnnnnngatagacttgtccagcgccgacgctgcccaggagcacgaggaggtgactgtcacggggcccctggaggatcccagtgagctggaggtcgatattgattcctttatgaaacatgccaaggatcacacctcgacacccaacccctgaaccccacacactctgccatgcacannnnnnnnnnnnnnnnnnnnnnnnnnnnnnnagcggtgcacacgttcctctgggctgacggcatgacctctgtaagggactcccactagtcccctcttcgcatgaatgactgactgtagacgcatgacctccaggcttcaatcctgcctcttgcaatgacagctgatctgtcggaaccaggacacaaaaggagcaagaagcggggagagagagggatagaaaacaggcgcgggagagcgtgtgaacgcaaaagtgaatgagggctttttgtggctggggatgggttttggtttttggggttttttttttttagttgttttgactttgtacnnnnnnnnnnnnnnnacctca

SEQ ID NO: 13884 - DNA, 762 bp, Macaca Fascicularis
  misc_feature (1)...(762): n = A,T,C or G
ccaggaaccaaaaaancnnagctanttctgaccaaaatgtgtttcnnnnnnnnnnnnnnnnnnnnnttccacacagaactggcaggagccccgtgtcctgctagctgtctctcttgttgatttccgtgaaaatgcagtgtttgaagtcnnnnnnnnnnnnnnnnnnnnnnnnnnccaaccctgtcagaatcgggctgttctctttgctgacactgtgaccctgggtcgggacataccagcagcagtctgtctttagaatctctttccttcctccccttttgcccccgtggggctcccggcatcctgaaagccagcaaagcctccagcatctttgccatcnnnnnnnnnnnnnnnnnnnnctggcttgtctgagcaagtttcatcagccccagggaaaacccagccctccttagaacctccttaccnnnnnnnnncggacaccttagatggaggtgcctgagggtggggtggcatttgtagggtcattatcagaacaagaggataactttcttgccccagctctgtagccacctccttggcatcagcctctgtatttgtcataaggtggcgtgggcgaggcctgacacaggccagccttggcacagggggggcccggggttctgagaaacgctgccctatgagagccacactggccttcgtctccatctcgttgatgggctgtccgtgtgcctcctgtgtgtctgcagacaagtcttgctgtgctttatttgtgaaagtttaatgaggaaaaaacaaataata

SEQ ID NO: 13885 - DNA, 726 bp, Macaca Fascicularis
  misc_feature (1)...(726): n = A,T,C or G
gaattggattnnngnnnnngcctccagtactgtagtacatctcaagcgatttcttacagtcgatacatgagagacaannnnnnnnnnnnnnnnnnnttccctatcaatgacttggatatgtcggaattcttaattaatccaaatgcaggtccttgccgctataatttgattgctgtttccaaccactatggagggatgggaggagnnnnnnnnnnnnnnnttgcaaaaaataaagatgatggaaaatggtactattttgatgacagtagtgtctccactgcatctgaagaccaaattgtgtccaaagcagcatatgtannnnnnnnnnnnnnncaagacactttcagtggaactggcttttttcctcttgaccgagaaactaaaggtgcttcagctgccactggcatcccattagaaagtgatgaagatagcaatgataatgacaatgatatagaaaatnnnnnnnnnnnnnnnnnnnnnnnnnnnnnnnnnnnnnnnnnnnnnnnnnnnnnnnnnnnnnctggtggtatctatggaaatgatgaagttacccaccacattaaaacaaaagtctgagatggggagtttcagataaccgaatgtaaatcctttatcagattttaacttgtgcagtacttgaagtgaaacacaatgaaaactttaannnnnnnnnnnncttaatacatttacagtcttgtatttacaagctaaatatatataggaaat

SEQ ID NO: 13886 - DNA, 344 bp, Macaca Fascicularis
gcccgcggagcccgcgccccctggccccgcgcccccgggcagtgcccctgaggccccggcagcggccgtagccgggggaagccccgcagcggtgaggtccatcctgacgaaggagcggcggccggagggcgggtacaaggccgtgtggttcggcgaggacatcggggcggaggcagacgtggtcgttctcaacacgcccaccctggacgtggatggcgccagcgactccggcagcggcgacgagggcgagggcgagggcgcggggcctggcaggggtccccacgatgagcccggcggcgatgactcgtacatctaagcggcccctccaccctcttcccctgccg

SEQ ID NO: 13887 - DNA, 755 bp, Macaca Fascicularis
  misc_feature (1)...(755): n = A,T,C or G
cctcactggccatgtggctgnnnnnnnnnnnnnnntactctatgtgggtgatgcnnnctggcatgagnnnnnnnnnctcaccaccatggatatcacacatgacgggtttggcttcatgctggcatttggggacatagcctgggtgcccttcacctacagcctgcaagcccagttcctgctgcgccacccgcagcccctggggttgcccatggcttccgccatctgcctcatcaatgctattggttactacatcttccgtggggcgaattcccagaaaaacactttccgaaagaatccttctgaccccagagtggctgggcttgagaccatctctacagccacagggcggaaactgctggtgtctgggtggtggggtatggtccgccatcccaactaccttggagacctcatcatggctctggcttggtccttgccctgtggggtgtcacacctgctgccctacttctacctcctctacttcaccgcgctgctggtgcaccgtgaggcccnnnnnnnnnnnnnnnnnnnncagaagtatggcctggcatggcaggagtactgccggcgtgnnnnnnnnnnnnnnnnnnnctacatctactgaagcggctccaccaccccaggtgggggcatatgcccactcatccaccagcacacccaggaccaggagcctggacacacttgggactcaagggcttgtaccccacccagccctgaggatgaacagcctcagagaagaggtggttagagcaagaaaa

SEQ ID NO: 13888 - DNA, 728 bp, Macaca Fascicularis
  misc_feature (1)...(728): n = A,T,C or G
acatttaaaagctatgacttcacannnatggattnnnctgcagtttatgtgttaagtagtatggctcgccagcgtcgtgcatctttgtcttgtggaggacctggtggtcaagactttgcaagnnnnnnnnnnnnnnnnaactgtggctcacctggatcatcacagctctcttccaattctttgtatgctaaagctgttaaaaaccacagctcagggactgtgagtgccacttctcctaataagtgcaaaagaccaatgaatgcnnnnnnnnnnnnnnnnnnnnnntacagagttgaatatactcagatgtatccagggaaagataacagagccataagtgnnnnnnnnnnnnnnnggtggaagaaaatgaagaatgaagagagaagaatgtacacattagaagcaaaggctttggctgaagaacagaaacgtttaaatcctgactgttggaagaggaaaagaaccaattcagtatgtttcaataaatagtgtttaaaattatcttgcctcgtccctgcaggtgtactggcatgttggagcagttgttacaacctttaagaggttgtgttgatgttatctctagcatttttatacttcaaaacctaataatgttttcgcatcatcatataaagactgcctttcctcaagtgtcatttactgtcttagcatggaaagtcgaaatctcaggcaaactttaaaaagaatgtttttctaaacattggtggaaa

SEQ ID NO: 13889 - DNA, 720 bp, Macaca Fascicularis
  misc_feature (1)...(720): n = A,T,C or G
atgaaattcagtcccannngagagatgaattagaggtaccctgtggnnngagcgcagttcaagccaagaccccaattggcnnnnnnnnnnnnnnnnnnnnnnnnnnnnnnnnnnnnnnnnnnnnnnnnnnnnnnnnnnnnnnnnnnnnnnnttgcctggggataacaggaggatttgacaacaaaatgttgtatttatcaagtgaccacaggaccctcctgaaatcgtctaagaggtcttggctccaggaagnnnnnnnnnnnnnnnnnnnnnnnnnnnnnnnnnnnnnnnnngctgccatccctgacccccagttacgcctggaatatgaaggcttccccgtnnnnnnnnnnnnnnnnnntctcatcaatcactgtcacacaaatcggggactggcagcccaccggcatcttttcttaagcacctattttggaaaggaggctgaggttgtagctcacacatacctggattcacacagagttgaaaaaccaaggaaccactggatgttggttactgggaatcccagggatgcctcttccaccatgttggatctgcccaaaccgcccgcagaggacactcgagccatggagcaggccatgggccttgacacgcagtaacgcgccaagcnnnnnnnnnnnnnnnctggtcccgctctcatcaatgtagctttaaaagaaattaacaaacttggtcatgcctcaagctattttgaatcagatg

SEQ ID NO: 13890 - DNA, 720 bp, Macaca Fascicularis
  misc_feature (1)...(720): n = A,T,C or G
gtaatccttgtagcaaccctgaggtaggtttttgttatccccacttcacaaatgagtaaactaatgtccctaggttaggttacttgccgaagatcacacatttattagtggcaaagccactgatcattccaaacccaaggggactcttttgagtagnnnnnnnnnnnnnnnnnaggaaagcagaggagaaaacttcaaaggggcaggactggatcattgactggagcttgaggggctcaagcaccagggatgaacgaggcacattcacaggccaagaccagtactgagcagaagcctagagcatgtgcgagtggtcaagcaggaagaggtcttgaagtttggtgagagttgacaatgtcatcaaatacacacagagctcagcttccagggactggagaaacaagaaggcctccagcagctaccagttcagggactggccacagtcagtcagactcaaagacagctgaaaggcaacaagtcttccagacccaggaacctctggcatctcagtggtaactccattccagcaatcaccctgttccaggcagggcaaggccaggcagagctgccacagagtgatgccatcctagcttggnnnnnnnnnnnnnncctcagggcagcggtnnnnnnnnnnnnnnnnnnnnnnnnnnntctgacaaaagccataaaacctncnccacagagatatacagacacacatgtacaaacaatattttgcgt

SEQ ID NO: 13891 - DNA, 880 bp, Macaca Fascicularis
  misc_feature (1)...(880): n = A,T,C or G
gctttccagtccagataacttgaatacaagtatctaccagtgatatggggtggataattaataatgcttggctacttatataaaaacagtgttacttatttttcaaaactttttttttcttttttaccaattaaattattcccttctccccaagaggtgggcagaaaagcattgttaatctccttttacagatgaggaaaaacaagatcagaggtgctcagtgctgtagcctagtgccaggtcttctgtctccaattctgggttctccccaagcccatgtttctcctttctcacaatctttacttcttcctctgaccctccccaccacccaaaatacttttaattctggaaaagaaacccaactgcacnnnnnnnnnnnnnnnnnnnnnnnnnnnnnnnnnnnnnnnnnnnnnnnnnnnnnnnnnnnnnnnnnnnnnaaagnnnnnnnnnnnnnnnnnnnnnnnnnnnnnnnnnnnnnnnnnnnnnaggacctcaagtaatgttnnnnnnnnnnnnnnnnnnataccatagattcattgtatatttaacaacatnnncatacnnnnnnnnnnnnnnaaaacctcttaacctacaccctggatcccttcccaaatttgagaaaagaactagggtggacacagtgctttttccatgtcacgtcttctgtgatggnnnnnnnnnnnnnnnnngcagagaatggggtgggtgggtggagcgtgtgccnnnngannnnnnnnnnnnaatgggagggggcctctgctttnnnnnnnnnnnnnngctcctctcannnnnntgcctttcattgcactcagctgtgatggtagcaagaacacnnncacactgannacnnnnnagngagccttgtgctctctctgcatct

SEQ ID NO: 13892 - DNA, 658 bp, Macaca Fascicularis
  misc_feature (1)...(658): n = A,T,C or G
tactttgcaaccattnnnntgcaggacatcactttagatgatgaccaatttatnnctgacttgaacaccagccatcaggttcagcagagaaatggcctaaccacagtgtgctctcatgtcaaccatccgtttgcaggacatcactctagagatgtgaacgagataattgggagagacatgtcccagatttctgtttcccaaggagcaggggtgagcaggcaggctcccctcctgagtcctgagtccctggatttaggaagatctgatggactataacagtgctcaccgcagccttgtgtccaccaccaacttctcagcatgtttctctccttggaccttgggtttccaactctgcagccttcaggtctggcaccaggagtgggactcaccatttgtggggaaagcagtgttcctccacctcaggccttgggtagattttgtaaaagaacaggagcagcataggctgtttgaactttggggaaacgagctttgctttttatatttaactaggatacttttacgtgatgggtgctttgagtgtgaatgcagcaggctcttgtttccgaggtgctgcttttgcaggtgacctggttacttagagaggattggtgatttgtatctgctttatggtcatttgaagggcccatcaaaacaaggt

SEQ ID NO: 13893 - DNA, 743 bp, Macaca Fascicularis
  misc_feature (1)...(743): n = A,T,C or G
gagatgatgtatgacannnnnaccctggtccctgtctgggaaaggaaggctatcnnnnnnnnnnnnnnnnnnnnnnnnnnnnttatttacnnnacgagaggcccaccttatccgaagagctgtatgccctgggggtctttgatgggcttcacacagtacatggcacttactacatccaagtgtgtgccttggtcaggtgtgggggtcttggcttcggcacctgtggacaggagatcacagaggccacagggatattcgnnnnnnnnnnnnnnnnnnnnnnnnnnnnnnnntacatctttcctttgtttctgacctcggggatgaccctagaagtcnnnnnnnnnnnnnnntgggagaaggaccactatttcctgaggaagagtgggctgtcctccgggctggtgacggcagctctctatgggcgcttgtatgagagggactaggaaaagtatgtggtctgtggggtggactnnnnnnnnnnnnnnnacagccttgcacttccacaggctacaagccctgggacgacctttctgccttaagggcaggagcccnnnnnnnnnnnnnnnnnnnnnnnnnnnnnnnctgtggaacaagtaggagaggcagattccctcagtgtcttcctcttaaacctcaatcatcgagacattagctggtattttctattcacatttatctttttcaagccacatcttcctctaacaaatctctcagtatgcaattggtctcaagnnaaaacaaaa

SEQ ID NO: 13894 - DNA, 752 bp, Macaca Fascicularis
  misc_feature (1)...(752): n = A,T,C or G
agccagagctccaacctcatcacccacagccgcaagcacacaggcttcaagcccttcagctgtgagctgtgcaccaaaggnnnnnnnnnnnnnnnnnnnnnncggcggcaccgcgagagccagcacagtctcaagtgaggctgcgcgggctcccagctcctggccagcctgccctgcggtcctgtcacctggaggccagcctctcatgcccaaatctccagtctcctggaggtgggactggacaggagtcttccagcttgtnnnnnnnnnnnnnnnagtgttgtgcgaccttgggcaagtcactttccctctctggatcaacatttctcctgctgccaagtgtgggagcctggctgggtctttctgagcagaagttgtttccaggtgtgctcaggcgccttcctctagcagagcacagaaagctagaatacccgcagggatacagggatgcggagagtagatgaccagagctaggactcacagacagaccctctgcctgcctgctgtccactgagctgggacctggtcaccttggattttagcgggcctctttctggctgcaacaggcagagtaggagctgcctcccaccccagtcagaggcctggcaccccctctgcttcggccagatgtgctggctgaccccgacttccaaccagcactcagctggccactgaggattccagctctacaaccaggccatgaggctggagaaactggcagttattgctgtcaaaagccntgttctctcaat

SEQ ID NO: 13895 - DNA, 655 bp, Macaca Fascicularis
  misc_feature (1)...(655): n = A,T,C or G
tgatgtgccccacaagacacatcaagccccggcctctgnnncatcactgcctgggaccggggcccagttacccccccagccccgataccttggtcgtcccccatcaccaacctcaccaccgcctccggagctgatggatgtgagcctggtgggcgggcctgctgactgctccccacctcacccagcgcctgccccccagcacccggctgcctcagccctccggactcggatgacgggaggtcgtccacccctcccgcctcctgatgaccctgccactctggggcctcacctgggcctccgtggtgtaccccagagcacggcagccagctcatgaccctgccccctccctggggcccctcctgaagccataccccccccatctgggggccctgggctcccatcctcatctctctccttgactggaattgctgctacccagctggggtgggtgaggcctgcactgattggggcctggggcaggggggtcaaggagaggggtttggccgctccctccccactaaagactggacccttgggcccctctccccctttttttctatttattgtaccaaagacagtggtggtccggtggagggaagacccccctcaccccaggaccctaggagggggtgggggcaggtagggggagatggcc

SEQ ID NO: 13896 - DNA, 580 bp, Macaca Fascicularis
gaggggatcgggacctggaagtccccaagcctgggtatgagagggcagccgagtgtgcggcggcagggcaaggttggcctgggccgcccagaggtcttcagacccaggggccaagctggccacgatccagccccgcggtgaagccgcgcctaaccttggtgctccctggaggaaactgcagaggcactgctggcctggtccccagtgtcttccccagcccttcgctcccccactcgagaggcaaatctgtgagggcatgggctggagcccctggctgctttcctcttgcccccatcccttctggctaggccaagtccgagggtgcaggggcaaggaggagagttgggggcctgagccctggccccagagacccagagctgagggtgggagacaggtgggttctccctccgcagttgggtgtgactccagcaccggcttgggccctggcctccaatgcttctaagggaacagggccaggcccacttccgggcccaggcagcaacaggtgggacctttccaccctccccaagcctgcggcccaagcagcccctgtcgcgcaccaatctgtctatggggaagt

SEQ ID NO: 13897 - DNA, 765 bp, Macaca Fascicularis
  misc_feature (1)...(765): n = A,T,C or G
acgaatgcagtgctgggggggccggctgncccagcgctgcgtcaacaccgccggcagagtaactgtgccagtgttgggaggggcacagcctgtcnnnnnnnnnnacacactgcntgtccaagggagggccccccagggtggcccccaacctaacaggagtggacagtgccatgaaggaggaagtgcagaggctgcagtccagggtggacctgctggaggnnnnnnnnnnnnnnnngctggccccactgcacagcctggcctcgcaggcactggagcacgggctcccggaccccggcagccnnnnnnnnnnnnnnnnnnnnnnnnnnnnnnnnnnnnnnnnnnnnnnnnagcagatctccttcnnnnnnnnnnnnnnnnnnnnnnnnnnctgcaagaaagacttgtgaccgccccggcgccccaggctggactgagcccttcaccctgccctgcagcccccatgcccnnnnnnnnnnnnnnnngggnnnnnnnnactttggtgtctcagtggaaggccaggcagggccctcttgctcttcctcctccccttcctcaggaggctcccagggctctggtgtggggtgggctgtggtcttctatgtcaatccacccctagccagcccaacggcatcccaaggccaggtgggccctcagccaagggaaggtacgagctcacggactctttgctggagactgggacccgtggcacaggccaggcagcccggaggctgggtggggcttcagtgggggctgctgcctgacccc

SEQ ID NO: 13898 - DNA, 710 bp, Macaca Fascicularis
  misc_feature (1)...(710): n = A,T,C or G
gatggcttctggnnnnnntcccagctggcgtnnnnnnnnnnnnnggaaacaccttggtcttacttccctaaaatctccatctanntgagagacgagaactccagcaggtcattccgtatcacaatcctgcctcagctttacattcagcccatgatgggggccggcctgaattatgaatgttaccgattcggcatttccccttccnnnnnnnnnnnnnnnnnnnnnnnnnnnnnnnnnnnnnnnnnnnnnnnnnnnnnnnnnnnngcccggaagagggtgggcttcgcagcgagcccctgtgcagaaatggcaggtgctgcagtnnnnnnnnnnnnnnngcctttctcaacagaggacatagccagtaactgtgtccccgctcagtctttgagcgaacccattttgtggatcgtgtcctatgcgctcatgagcgtctnnnnnnnnnnnnnncttgtcttaattgtcctgctgctgctgccgttccggtgtcagcgtcgcccccgtgaccctgaggtcgtcaatgatgagtcctctctnnnnnnnnnnnnnnnnnnnnnnnnnnncaggcctgacctcaagcaaccatgaactcagcgattaagaaaatcacatttnnnnnnnnnnnnnnnnnnnnnnnngcggcacttcctcccgtgcccgcccgtcttcaatctctgttctgctcccagatgcctttcagattcactgtc

SEQ ID NO: 13899 - DNA, 617 bp, Macaca Fascicularis
agtaacacagttagaaggaaattcatgtgaaattttatgggagacggtaccaccaatgaaaggggaccctgttaactacattctacaggtattggttggaagagaatctgagtacaaacaggtgtacaagggagaagaagccacattccaaatctcaggcctccagaccaacacagactacaggttccgtgtatgtgcatgtcgtcgctgtttagacacctctcaggagctaagtggagccttcagcccctctgcggcttttgtattacaacgaagtgaggtcatgcttacaggggacatggggagcttagatgatcccaaaatgaagagcatgatgcctactgatgaacagtttgcagccatcattgtgcttggctttgcaactttgtccattttatttgcctttatattacagtacttcttaatgaagtaaacccaacaaaactagaggtatgaattaatgctacacattttaatacacacatttattcagatactcccctttttaaagcccttttgttctttgatttatatactctgttttacagatttagctagaaaaaaattgtcagtgttttggtgcaccttttgaaatgcaaaactaggaagaggtaaac

SEQ ID NO: 13900 - DNA, 739 bp, Macaca Fascicularis
  misc_feature (1)...(739): n = A,T,C or G
aacagcctgtagaagaggagtcggagttggatnnngagctggagtcagaacaagaggctgggctgggtctggacctagannnnnnnnnnnnnnnggagcctgagtcannnnnnnnnnnnnnnnnnnnnnnnnnnnnnnnnnctgagaccgagaccgagaccgagatggagccccagcctgagactgagcccnnnnnnnnnnnnnnnnnnaaannnnnnnnnnnnnnnnnnnnnnnnnntnnnnnnnnnnnnnnnnnnnnnnnnnnnnnnnnnnnnnnnnnnnnnnnnnnnnnnnnnnnnnnnnnnnnnnnnnnnntggagagaagacgccatcctatggnnnnnnnnnnnnnnnnnnnnnnnnnnnnnnnnnnnntctaggagatgaactggaaataaggggtcggataatcctggcaaatccnnnnnnnnnnnnnnnnnnnnnnnnnnnnnnncctagattggatatgaactagcagtacttccttcctgactgtgactcctaccacctgccggccttcttccttnnnnnnnnnnnnnnnnnnnnnnccagatcacattactaaatgccaacaattatctcttaattccctatccaggctcccctcatttcaccttcagcatatattctagtcatgaatttccttcttcacacaccccacatctccgggctttgtgccagaccatctctaacttaatcctctcatccctgttcccctttctccaaagagaggagtcaa

SEQ ID NO: 13901 - DNA, 712 bp, Macaca Fascicularis
agcatagtggattggacgagcagtgatgtatctctataaacaccccaaggaatcaaggtccaacaaggacatggcagggaaattaatcaatgagtggtctaggcctatatttggtcttacctccaactacaaaggaatgacaagagaagaaagggagcagagagatctagaacagatgcctcaacgacgaagaatgaacagcactggtggtcagacacccagaagagacctggaaaaggtgctgacaggagaggagaaggctcttagacctggagatcctggattctgtgcccgggcaagggtcccaatgccctcaaacaaggactatgtggtcaggcccaaatggaatgtggaaatggagtcatccaggtttcaggcgacctccaagaagggtatcagtcgactggataaacagatgagaaagttcacagatatcaggaaaaaaagcagatctgcccacgcagtgaaaatcagcattgagggcaacaaaatgccattgtgaccttgcctggaatgtgtccccgtctctactctgagaaatgcgcaatggactctttggagaaagaagatattttaaaacatttttagtgtgtctgtcaatggttccgtgtgtatcaaatgttgtcataggactcgcatttctctcagttatatttaaaactgtttgttgtgtacttcgtacagaggaatactagtcatacttctataaact

SEQ ID NO: 13902 - DNA, 752 bp, Macaca Fascicularis
  misc_feature (1)...(752): n = A,T,C or G
cggggacaaatatacgtgtatgttcacttatgcctctcaaggagggacgaatgagcaatggcagatgagtctggggaccagcgaagaccaccagcacttcacctgcaccatctggaggccccaggggaagtcctatctgtacttcacacagttcaaggcagaggtgcgaggcgccgaaatcgagtacgccatggcctactctaaagctgcatttgaaagggaaagcgatgtccccctgaaaacggaggaatttgaagtgaccaaaacagcagtggctcacaggcccggggctttcaaggccgagctgtccaagctggtgattgtggccaaggcatcacgcactgagctgtgaccagcagccctgttgcgggcggcaccttctcnnnnnnnnnnnnnnnnnnnnnnnnnnnnnnnnnnnnnnnnnnnnnnnatcactggttttctaggagggactctttaagttttctgcctgggctgacgttgccttgtccggagggacttgcagggtggctgaagccctggggcagagaacagaggccccggggccctcctggctcccaacagcttcccagtccccgcttcctgctgagctcttctggactcaggatcgcagatccggggcacaaagagggtggggaacacgggggccacgctggggaaagcagccatgctccccccaaccctcagaactgctttcctctgtttacccaggggacggacctcctttcagatgaactgggaagagattaaat

SEQ ID NO: 13903 - DNA, 704 bp, Macaca Fascicularis
  misc_feature (1)...(704): n = A,T,C or G
cagcnnnnnnggccccagccagnnngnnnnnngccattgggggaggagaggaggaggaggaggccaccgagtacggagggacctcggtgcccactgccggggaggctgtgcgcgggctagagacagctctgcggtggctggagagccaggaccccagagaggtggggccactgaggctggtgcagctgcgctcacttatcagcatggcccggaggctggggggcatcgggcataccccagcaggcccatatgacggtgtgtgaccaggccagcccagtgacctttctcctgctgcactaggagggaggggacacacacagtctcccatctcccctcccccggggtggcccaccccatgggtacagggggttccaggaatccaagtccagcctggcttggaggagctctgttggtgagaggttgccctgcctcactggcaccccagtctcctgggggcccagctggaagaggcccggcccattctcctctcagggcaggcacgtatgcggggcatacaaggcacagcacctgtcggaacaggtgactgtgttcccgctctggcccctgtggggctgggcctctgcccctgtaccagtcgaatgcactggatgagggccgacactcctgtctgctgtcgagccctggtgctacgtggccccagagccacagcgcagtcatctcagtggcaaagcacaccacttggt

SEQ ID NO: 13904 - DNA, 764 bp, Macaca Fascicularis
  misc_feature (1)...(764): n = A,T,C or G
tcatggactcctttcactcattaacaaaaaccttgcttccttatnnnnnntgaccccagnnngaaggnnnnntagcaattggagatacaaagcaaggagctggtgagcccagcgtgacttcaggcaggctatgtccttccatggtcaatttcttccctggggcttccattaggagtccccatctgacccgccccttcacagagcccccagagattccaggcccagggcttctactctgcccctggggaatgtgtcccctgcatatcttctcagcaataaccccaagggctctgggaccctaccccttccaaccttccctgcttctgagacttcagtctacagctcagcnnnnnnnnnnnnnnnnnnnnncagactccagtccctgccgttgggtctttggcnnnnnnnnnnnnnnnnactcctgttccnnnnnnnnnnnnnnnntgggatgggtggagggagagtagaggcctttgcttctctgcccacgtccccttagatgggcagcagaggcacctcgcgcatcctttgctttgcctgtcggcagtcagagcggcgagcgaggtgggttggagactcggcaggctccgtgcagcccttgggaacagtgagaggttgaagatcataacaagagtgggaactcaacccagatctctcccctcctgtcctctgtgttcccgtggaaaccaaccaaaccgtgcgctgtgacccattgctgttctctgtatcgtgatctatccgcccaacnnngacagaaaaaagga

SEQ ID NO: 13905 - DNA, 780 bp, Macaca Fascicularis
  misc_feature (1)...(780): n = A,T,C or G
gagtgactctcccaacattcttattagttggaatggaagtgtaatgtcaagttggggtctttacctgcatgatgaaaccacttcttgtagtgacactttggccatgttgnnnnnnnnnnnnngtcctcggggagcctctagtctgttgtagctgaatgatttggaagtgttcttttactttttacttttgtccnnnnnnntacctacatnnnnnnnnnnnnaaaacccttgtccagcacaacnnnnnnnnnnnnnnnnnnnnnnnnnngcagtaccacgtcctcagcgactccaaacctttggcttgtctgctgttgtccctagagagtttctatccgcctgctcatcagctatctctggacatgcnnnnnnnnnnnnnnnnnnnnnnnnnnnnnnnnnnnnnnnntcttctttccaaacaccaagtgttagctgccttaaggtttatccggggcattggtggccatgacaacatttctgcacgaaaatttttnnnnnnnnnnnnnnnnnnnnnagnnnnnnnnnnnnnnnntacaatattcnnnnnnnnnnnnnnncgaaaccagcgtttgcgagggagccccaatttcacaccaggggaacactgtgnnnnnnnnnnnnnnnttttcaaacagatttttggagaccaagctctnnnnnnnnnnnnnnnnnnnnnnnatcacttgctgttttttttttatataaaaatgtgtacaaagttaatttattgcattaataaagctctttaaactaaaaaaaaaaaaaaaaaaaaaaaaaagg

SEQ ID NO: 13906 - DNA, 771 bp, Macaca Fascicularis
  misc_feature (1)...(771): n = A,T,C or G
tttattactggagtaaaagaaaacaaagttcactgatgttgaaggatatatacagtgttagaaattgggactgtttagaaaaacaggaatacaatggttgtttttgtcatagtgtacacaatttagcttatagtaaatgactcacaaaactgattttaaaatcaagttaattttgaaaattactatttaatcctaattcannnnnnnnnnnnnnnnnnnnnnnnnnttgagttggttcttagtattatttatggtaaataggctcttaccacttgcaaataactggccacaccattaatgactgacttcccagcaaggctctctaagggatgagtgggaggatccacaggatttgagatgctgaggcccaagagatcttttgatccaaccctcttattttcagaggggcagatggggcctagaagttacggagcatctagctggtgtgctggcaccctgggcctcacacagactcccaagtagctgggactacaggcacacagtcactgaagcaggccctgtttgcatttcatgctgccacctccaacttaaacatcttcatgtctgatgtccttttacctcgtcgannnnnnnnnnnnttcccacccagaaaaggcaacttagataaactcttaagagtactttcatactctaagtcctcttccagcctcactttgagtccttcttggggttgatagaaattttctcttgctttctcaataaagtctctattcatctcatgtttaatttgtctgcatacnnnngctgaga

SEQ ID NO: 13907 - DNA, 682 bp, Macaca Fascicularis
  misc_feature (1)...(682): n = A,T,C or G
gggccccccaggccccaccagcncngtcctccnntgatgaggggcnnnnctgaggtgtcagctgctctgctcagttagtctttattcccggggtaccaagcagctgcacactcggggcctgggaggcacatagaggcccagagagtnnnnnnnnnnnnnnnnnnnnnnnnnnnnnnnnnnnnnnnnnnnnnnnnnnnnnnnnnnnnnnnnnnnncaccccatccaggatagccnnnnnnnnnnnnnnnnnnnnncctgttgttnnnnnnnnnnnnnggagggctccggcccttccgttgagccacagccctctgcagcactgtgctggccagatttcagcnnnnnnnnnnnnnnnagccctgccattgttgctagccaggggcttggttctcccacttacactgttgacatctattttctgaagtgtatttaaattattcagtgctaatcattgttttttcctgtgtaaatgtnnnnnnnnnnnnnnnnnnnnnnnnnnnnnnnnnnnnnnnnnnnnnnnnnnnnnnnnnnnnnnnnnnncccgttccnnnnnnnnnnnnnnnnnnnnnnnnnnntttccatgtgtttcaggatccttnnnnnnnnnnnnnnnnnnntaatgaagaaacatttctcaatagtttcctttttgttttcctttataattcactaaaataaagca

SEQ ID NO: 13908 - DNA, 747 bp, Macaca Fascicularis
  misc_feature (1)...(747): n = A,T,C or G
agggaagaggagaaaggngtgtcaccaatggcctagacttgagcccggcagatgaaaagaaggggggagataaaagtgaggagaaagtggtagtgaccaaaacagtagaaaaaatcaccagtgaggggggagatggtgctaccaaatatatcactaaatctgtaaccgtcactcaaaaggttgaagagcatgaagagacctttgaggagaaactagtgtctactaaaaaggtagaaaaagtcacttcacacgccatagtaaaggaagtcacccagagtgactaagatttgagtccactgcaaaaggttaagccatatgacaatttcaaaatgcatgtgattggcagcttcaaaacagaacgggttctcccatggggctccagacattgtatttactttgtgcaatatgaggggactgcatgcaagctcagggtgctccctcctcagtctatgggggattcaaatgcatgatattgtatgtacctgggaaatttgccaatttcctaagctgttggaagggggtcacttaaggggggatgtcttgagatgtattatgcaaagtaccaactgagccaaaaacaataaatgaaacacagaactctcttagccttaagaaagctatatatgaataattatgtttacctcactggtgcgtttaaaatggacttttgctcatgggagaacctcgttgacatgcacagtttgcaatcttatgttgattgatgttaaacgtcacagcagtactgct

SEQ ID NO: 13909 - DNA, 750 bp, Macaca Fascicularis
  misc_feature (1)...(750): n = A,T,C or G
attgatgacctgcatgacttccgccgaggccnnnccaagctgggcaccgataactagggctggccaaggcccaggccccgcctgtgagtcccaagcgtgtgtgcgagaccagatagctctaggacgttcttctgtgtgcgtnnnnnnnnnnnnnnnnnnnnnnnnnnnnnnnnnnnnnnnnnnnnttgtgccgtccactcctttccagaatagaaatctcctctcacttctctggccttgtgaggttgnnnnnnnnnnnnnnnnnnnnnnnnnnnnnnnnnnnnnnnnnnnnnnnttcaacnnnnnnnnnnnnnnnncagggatgtttatatctttcataagggctgttgcaaccatatgaactgaaaaaatgcattttctaatccaaatattgatattctttacannnnnnnnnnnnnctccttttatcaaatagcattcagagtatttnnnnnnnnnnnnnnnnncagccccggggggcacagagagaacaacattcctctccatcatcatcgagaggctttatttaaaacaactgtttagtggaaacttattgagagatggaaaacaagcttctggtgggtgcattttctgtcccgggagtcgcctgcagccacaatactgcccctgccccccagtttgtatggttgcgacagtgttccttttcttggttttaatttctgagcagatgattgtgctgtgggaacagcacacagtgagggtgcctagcacaatgcctggcactaagta

SEQ ID NO: 13910 - DNA, 745 bp, Macaca Fascicularis
  misc_feature (1)...(745): n = A,T,C or G
tcacagacatgagttnnnnnnctaaagcacttcgagaggtttcagcagccagggaagaggttcctggtcgacgaggcttnnnaggttacatgtatacagatttagccacaatatatgaacgcgctgggcgagtggaagggaganncggctcgattactcaaatccctattcttnnnnnnnnnnnnnnnnnnnnnnctcacccaatcccggacttgactggctacattacagaggggcagatctatgtggacagacagctacacaacagacagatttatccacctannnnnnnnnnnnnnnnnctatcacggttaatgaagtctgctattggagaagggatgaccaggaaggatcatgccgatgtatctaaccagctgtatgcgtgctatgctattgggaaggatgtacaagccatgaaagctgtcgttggagaagaagcccttacctcagatgatcttctctacttggaatttctgcagaagtttgagaggaactttattgctcagggtccnnnnnnnnnnnnnnnnntctttgagactttggacattggctggcagctgctccgaatcttccccaaagaaatgctgaagagaannnnnnnnnnnnnnnnnnnnnnnnnnnnnnnnnnngactctgcgaagcattagctgccgcttctgcgctgctccacactcttgtgaaatactggttctattttctttattccttttgcgctccccaatccccacctttnnntagagttact

SEQ ID NO: 13911 - DNA, 1100 bp, Macaca Fascicularis
  misc_feature (1)...(1100): n = A,T,C or G
ctgaagctgaaggcacagttcctagtgccaatgcaagtgccgannnnnnnnnnnnnngcactgatgtgctccaggaccacaacgctgtcctggactttgagcaccgcacatgcaccctgaaagggaagaagttccgccttctgcctgtgggagggtccctggaagatgagtttgacctggagctcatagaggaggacccctcctcagaagaagggcggcaggagttctcccactgagaagcccccttttctctaaccttctaaatattggtgggaagacccaccactgtggtgggcggggnnnnnnnnnnnnnnnnnnnnnnnnnnnnnnnggccnnnnnnnnnnnnnnnnnnnnnnnnnnnnnnnnnnnnnnnnnnnnnnncaggggccnnnnnnnnnnnnnngctggggaggcttccactgaacaggtacaggtgagggagatcaggcnnnnnnnnnnnnnnngggtcctcatggtcatcaagctgctattgatgacaaagactcgaaggctggaagagctcccaaggaagctagaaatgcttgtcttnnnnnnnnnnnnnnnnnnnnnnnnnnnnnnnnnnnnnnnnnnntggtcactctcaggttctnnnnnnnnnnnnnnnntgggctgggtcctagctgcagggtctttgtgagggtcacagtttctctgagacactgcctgaagagcctttccacctgtacaatggtattttctgtctatcatttgctttgaagcccattgtgccttgtgccaataattcaattgctgcaaacaccaataaagattgattcatggaaaaaccatgtaatgtgttgattgagggtgagaggaatgtgagagggagtcaacatcaaagacaaggaagattcacgtgtctaatgagtgcctagctggaggtataagaacatatacacagtgacaacatgtcttggattttctaagacannnnnnnnntaaaatattttgacttattccctccagaattactcgcgttattttgaatcatcataattcctctacttatttcaatctgtagtattttaccatacacattgcccctatacccaaaagcgaccctaaagtcttatgtgag

SEQ ID NO: 13912 - DNA, 579 bp, Macaca Fascicularis
  misc_feature (1)...(579): n = A,T,C or G
ccaatgttgtcttcacacagctgctcatcnnntncngggtggacgtgaggagccgggacgcccggggcctnnnnnnnnnnnnnnnngctcgccgggccggcagccaggagtgtgcagacatctnnnnnnnnnnnnnnnnnnnnngggagggctgtggcttagtgcctacccccaacagnnnnnnnnnnnnnnnnnccaacccctcnnnnnnnnnnnnnnntagtcctagcctcctataaggcccaggaagagggcagaggggccagaaggactccatggcccgaagaccatcctccttgcaggcactgtgggaacagacacagagatggacaagcagggacatgccgagaggacgaagcagaggaaattagggaggagagtcaaaggcccacccaggagtggggtattcggctccccggacagcccaatggcagggggggcggtgcccggggctgtggcaggtgtgggtggcggcaggcgtttcccgggcactttcacnnnnnnnnnnnnnnnnnnnnnnnnnctcccgatggatgcttcgcaggtcctnnngccatgcgcagggcgnnnnnnnnnaag

SEQ ID NO: 13913 - DNA, 714 bp, Macaca Fascicularis
  misc_feature (1)...(714): n = A,T,C or G
tctatctgaattctgtcagtttttctgggtttttggagacaagtgtaccagagttaaattaaatcatttaatttccaggagtgataggcatggggacacattactcaaatggatctggaatcccattttttccaagaaatctttcttgattcattcgatgagtggttatagtggacatatcttcctatnnnnnnnnnnnnnnncccccagctcccaaattcattcttttgtctatgtgtaaacagcccttatcagatgttacatttgttgaattggtgactctatggctgtgatttaatctaagtttccagggaggtatgggttagatgccaagctcactaccttgagcagacagggactgctggagaagagagtggggtgagctccctgagacccaacgagagcctgggaactggctgtcattattgtgttggctgttgcagggctctgggagtctgccacaggctgtcctggcatccgtgtggtgtctgtgtaactctcccacatgctggaaaggtagggccccacatgccttggtgccatgccagagcgtgggctgcagcaggacagaggtcatttggcagagctggcattagctccccagggatgttggagagccttgggagcccaggcaggtgtccagaggcagancnngagtccaggcccagatgggcaggtaggacnnnnnnnnnnnnnnnnnaggtggggagaatc

SEQ ID NO: 13914 - DNA, 694 bp, Macaca Fascicularis
  misc_feature (1)...(694): n = A,T,C or G
gagaaagtactgcacagagannatgacacgacagtcnnnnngctctcccctccccgtccagggaggctcccggacctgcaggagattggggtacccctctaccagtcccctcctggcaggtacctgtccccgaagaagggagccaatgaaaatgtgtaatcccatgctgcatgtcttcacacctatacaggtcactccgagaagcccctaagttattgaccggtatcagtgttgtatatataaatatgcaagatgtgccttaaaatgaagttgttggaagctatttccaatcacattggtactgttaggtatttgcaaacaaaaatgtagttaatgtaatttttatgaaatgtgtgcagtatttaatttttttatcatgctattgactttaatttcacttgcggcttgccattttcttagtgtttttaacttgtacattgtgtaatgtaatgtttgtatataatgaaattttgttatatttttatataataaaagctaaagtggaagttattgccaaaggaactgtctgtaagacaaaaaacaaaacatgttggaattacttaattgaaatttatctttcacctgaaacaacctagtgtttgannnnnnnnnnnnnnncaagtataacttgtatatcttgactctgtggtagatttcaagttcaatgttatttaattacatttggttttctgta

SEQ ID NO: 13915 - DNA, 745 bp, Macaca Fascicularis
  misc_feature (1)...(745): n = A,T,C or G
ggagtgagaggctccannnactacagcnnnnnnnnnnnnnnnnnnnnnnnnnnnccatacccccgacctgtcccctcacaggcaggggagcaggggagggaannnnnnnnnnnnnnnggtcaaaccagcagatcaaaaagcacaaggagctggggcagaggcaagaagcaggggccctcctggcagctcctctgagtggggagaggttgggcagtgagtgagggacccnnaacnnagggaatagaagcctcagtttccccattttacccttccacnnnnnnnnnnnnnnaggttaggctgccccgtcccaccctactctgtgtggctgctttctttggtgccctcccctcaccccactgtagctgtgatgtgttgtagtttttagatgtttgtaaaatgtttaaaaaaagttaaaaaggaaaaaagtgaaaataacaaaaaagaaaatcaaaattcaccttcgtcatgctgcgtccggtaccccaaccctgtggtcactccccccattttgtnnnnnnnnnnnnnnnggtgactgtttaactctttggtgtctgtgctcaaaagactgccttctcctccagtgcccagtgtatgaatgtgtgccctgtgcccttgtccctcactcctcacatgctggacgtagccctcttccttgcacccctgggagggacccatccatctcccttgctctcctggggaaccccaaacccaactctgttgatgtgaaaaatgcaatgaaaaatat

SEQ ID NO: 13916 - DNA, 169 bp, Macaca Fascicularis
gtgatcccagattaagaatgtcttttttcatggcagcaaatttccttttgatgaaactgccaatcaagctgtagaccaccatgagtggcccctcgcagcctgagttgctcagccagagatgtttggttggaattcattagcgatcttatcatacactgtaaaggtatat

SEQ ID NO: 13917 - DNA, 659 bp, Macaca Fascicularis
caaagagatgtgaggggaaggggaaatccgaagctacactggaggagtttttacagcctttgaatgcatgcatatacatgaaaatctgaaagataaactcatatgcactaaacatactattcaagactacgaaatacccaggcagtgaaagaagaaagtaacagaaaatgataaagctaccatcttacagtaatcttggtttttgtttctttctgatccagaaataatctaaatttaggagaatatatcttaatttccacattggtatattgttttatgtgactggcacaaccattgattgccatcccagcagccatacccaattccccttgttattggcagcatctgtgtcttgccttagactctgaggatatcggatggtaattttccagtctcctgtgcagcacaggatggccagtatctcccagtgttgctcagtgggatctgccagggcttctgggaaaggttttcctcatttggaagagacaggtttattatgaagacttcctcctctctcgcttcctgcttttaaacatttttctatgagaacatgatgcctggagctgctacagctatcttgcaaccaagaagagaagaaagtggacctcagagaagccgacccagagcctaagagggctcagctactaggccaattctgg

SEQ ID NO: 13918 - DNA, 738 bp, Macaca Fascicularis
  misc_feature (1)...(738): n = A,T,C or G
atagatgatggaagcccagatggaacaagggatgtnnnnnnncagttggagaagatctatgggtcagacagaattcttctaaaaccacgggagaaaaagttgggactaggaactgcatatattcatggaatgaaacatgccacaggaaactacataattatnnnnnnnnnnnnnnnctcacaccatccaaaatttattcctgaatttattaggaagcaaaaggagggcaattttgatattgtctctggaactcgctacaaaggaaatggaggtgtatatggctgggatttgaaaagaaaaatnnnnnnnnnnnnggccaattttttaactcagatattgctgagaccaggagcatctgatttnnnnnnnnnnnnnnnattataccgaaaagaagttctagagaaattaatagaaaaatgtgtttctaaaggctacgtcttccagatggagatgattgttcgggcaagacagctgaattatactattggcgaggttccaatatcatttgtggatcgtgtttatggtgaatccaagttgggaggaaatgaaatagtatctttcttgaaaggattattgactctttttgctactacataaaagaaagatactcatttatacttatgttcatttcagtttatacatgaaagaagcctggttactgatttttataaaatgtactcttaaagtataaaacataaggtaaggtnnnnnnnnnnnnnnnttttatgaagaccacct

SEQ ID NO: 13919 - DNA, 998 bp, Macaca Fascicularis
  misc_feature (1)...(998): n = A,T,C or G
acactgtcactgaccaggaccctcgaacagccaaggagatnnnnnnnnnnnnnnnnnnnnnnnnnnnnnnnnnnnnnnnnnnnnnnnnnnngaagagnnnnnnnggagtagccctcaccttcaactgcgtagagagnnnnnnnnnnnnnnnnnnnnnnnnnnnnnncctccaaagcaccccagcnnnnnnnnnnnnnnnnnnnnnnnnnnnnnnnnnnntgcccttaaggaggcagcagcgagcgagcaggagtggccagcgccagcggggagcggtggcctctctgagatttcctagagtgctcaacagcccctgatcaactgagttttgtggtacttcaccctcttctcccctcatttcatgtgatagccattgtgagactgatgcacaaactgtcacttggttaatttaagcacatctgttttggtgcaatttgcttgtttcttcatgcctttacttactttgtcccatgatactgattggcatgtggcccccaaaatggcacaataaagcccctttgtgaaactgttctttaaaagaaacacaagaaattggccactggtaaaactctgcagcttcaactgttcttcattnnnnnnnnnnnnnnnaaatatacttcctcttctttttgcatggttttgcccacctctgcaatagtgataatctgatgctgaagatcaaataaccaataaaaaacatatttcttggccttgctccacaggatataagcaagccttgatcatagttcatacatataaatggtggtgaaataaagaaataaaatgcaatatttttacttgaaatgtaaataacttatttatttctttgctaaatttggaattctagtgcacattcaaagttaagctattaaatatagggtaatcatagttcctctactaagtctggaaagaacatctcctggtatccacaattacaccaggttgctaattgtatttgtacatttccctttgcatttgcttttgttcttgctagaaac

SEQ ID NO: 13920 - DNA, 712 bp, Macaca Fascicularis
  misc_feature (1)...(712): n = A,T,C or G
acgaagaaccaaattcaacagncgtagaggaaacactggaacggataaannnnnnnnnnnnnnnnnnnnnnnnnnnnnnnnnnnnnnnnnnnnnnnnnatccccatccccaccctcaaggcatatgcagaagccctgaaagaaannnnnnnnnnnnnnnnnnnnnnnnnnnnnnngacgcggagtaatgaccctgtggcgtatnnnnnnnnnnnnnnnnnnnnnnnnnnnnnnnnnnngaagacactgaacgtggaatccaacttcatttctggagctgggatcctgcgcctggtggaagccctcccatacaacacttcnnnnnnnnnnnnnnnnnnnnnnnnnnnnnnnnnnnnnnnnnnnnnnnnnnnnnnnnnnnnnnnnnnnnnnnnnnnnnnnnaaaacgcaacgcttctcaaattcggctaccactttacccagcagggaccccggcttcgggcatccaacgcaatgatgaacaacaatgaccttgtgaggaagaggaggcttgcggacctgactgggcccatcattcccaagtgccggagtggtgtctagtgtgtggcggtggagaccatgcctttgaactggacgtgttctattgatgacttgtactctgcaggggaaannnnnnnnnnnnnnnnnnnnnnnnnnnnnnnnnnnnnnnnnnnnnnnnnnnnnnnnnnnnnnnnnnnnnnnnnctagtggtgtag

SEQ ID NO: 13921 - DNA, 762 bp, Macaca Fascicularis
  misc_feature (1)...(762): n = A,T,C or G
atgctgccatgttaaaaacannnnnncattcatgaccgggannnnntcaacggtcacactcnnnnttgagctgagaggtggatgcgcgggcattcttggttattcttgaaactggacacatcccttatatacgctcccatacatatgttctgtttcataattttaaaaataatactttcatctatttcttagataaggtgaaataaaacaggatggaataatacgtcgttttagaacacagaggagacactcttcttcctgctaggccgtgtaactgacaaggcaacgcaagtgaatagagaggtccgttgctacagatgctgttnnnnnnnnnnnnnnncagtcagggatctgggagcagaaagatgcagagagagnnnnnnnnnnnnnnnnnnaacaaaggtctccctctgtcacatttacagacacctatccttaggcatgcgtaggtaagagaactcgggctgtgtgcgcagggaagagaaaaagtataaatgctgtaaagagaactctgactttaggccataatgggaacttgaaaaggattggggaaagggggagcggaaatgtttaccaagtacttttcagtgcatatttggttaatcagagtctattctgctatggtgatttccataaagagctcctctgttgaatatttatactccataatttacagtttggctgttaagaagacaaaggcaaacacaaatttggtccagaagttcaaagttcgccatctgttttcctattgtatttagatac

SEQ ID NO: 13922 - DNA, 596 bp, Macaca Fascicularis
cgggcgcagaccgcggcagtgcggcttgctgttggaagttcaggctcggttgtcttttgggagccatggagagtgacttttatctgcgttactacgtggggcacaagggcaaattcggccacgagttcctggagtttgagttccgaccggacgggaagttaagatatgccaacaacagcaattacaagaatgatgtcatgatcagaaaagaggcttatgtacataaaagcgtgatggaggaactgaagagaataatcgatgacagtgaaattaccaaagaggatgatgcattgtggcctcctcctgaccgagtgggccggcaggagcttgaaatcgtcattggagatgaacacatttcttttacaacatcaaaaattggttcccttattgatgtcaatcaatccaaggatccagaaggcttacgagtattttattatcttgtccaggacctgaagtgtttggtcttcagtcttattggattacacttcaagattaaaccaatctagactgaatattggtgtggacatgggggagtgggtgggagtagaaaattttgtgtatatcagggctagtatttttttataaactataaatga

SEQ ID NO: 13923 - DNA, 791 bp, Macaca Fascicularis
  misc_feature (1)...(791): n = A,T,C or G
agccatttgcaannnnnntgcagcagaagattnnnnnnnntaaagcaatgatggtccagaaaaacattgaaatgcagctgcaagccattcgaataattcaagagagaaatggtgtattacctgactgcttaaccgatggctctgatgtggtcagtgaccttgaacaggaagagatgaaaatcctgagggaagttcttagaaaatcaaaagaggaatatgaccaggaagaagaaaggaagaggaagaaacagttatcagaggctaaaacagaagagcccacagtgcattccagtgaagctgcaataatgaataattcccaaggggatgttgaacattttacacacccaccctcagaagttaaagtgcattttgctaatcagtcaatagaacctttgggaagaaaagtggaaaggtctgaaacttcctccctgccacaaaaaggcctgaagattcctggcttagagcatgcgagcattgaaggaccaatagcaagtttatcagtacttggaacagaagaacttcggcaacgagaacactatctcaagcagaagagagataagttgatgtccatgagaaaggatatgaggactaagcagatacaaaatacggagcagaaaggaaaacccactggggaggtagaggaaatgacagagaaagcagaaatgacagcagaggagaagcaaacattactaaagaggagactgcttgcagagaaactcaaagaagaagttattaataagtaataattaagaacaatttaacaaaatggaagtncnnnattgtcttaaaaa

SEQ ID NO: 13924 - DNA, 240 bp, Macaca Fascicularis
gacacacacttccaaggtatgtatgctcttgtttctgtcctgtcttcaccgagcgcagggctagaggcctcttagacattctccttggtcctcgttcacctgcccactgtagcacccacagtgcccacgttcttactggttttggcaattaaacctccttcctactgctttagactgcacttacgagaaggaaaatgcccctcgtgcgaccatagattgagatttataccacataccaca

SEQ ID NO: 13925 - DNA, 829 bp, Macaca Fascicularis
  misc_feature (1)...(829): n = A,T,C or G
tgagcccaactttgatggcctggagagtaatccttacagaagccggaagcaacgccaggagtgggaggtgaaggccctgctagagaaggtacctgcagagcttatttgtcttgaccnnnnnnnnnnnnnnnngaggtggatgtcatctctctggagcagggaaagaaggagcggatagagaggctggtatggagcaggcccctgaatgcccaggcctgtcttctcccccacatcctctccccaccatggcttgtccccagaagtgtggccagcaggtgggtgctgccagttccctgactccgaccgaggctgtaacagatttgactcnnnnnnnnnnnnnnnnnnnnnnnnnnnnnnnnnnnnnnnnnnnnnnnnnnnnnnnccaaagcagaagggccgcagctccacagcaagnnnnnnnnnnnngaagaggaaggtcatggatgaggaacacagggtagatgagtattgggatgggccgggccttccannnnnnnnnnnnnnnnnnnnnnnnnnnnnnnnnnnggccaagtccacgggggcccggccatctgccctggacagnnnnnnnnnnnnnnnnnnnntccagggttgcctgggaacagtctctccccgagatcacctgtagggaaaagagtgttccctggaacaaggaggtggggcactgtggtcctttccccaactgggggtggacagctggctcctggggtgggtgggaacagtctctccccgagatcacctgtagggaaaagagtgttccctggaacaaggaggtggggcactgtggtcctttccccaactgggggggacagctggctcctggggtggg

SEQ ID NO: 13926 - DNA, 449 bp, Macaca Fascicularis
cagcttgctgcggcagagacgccagaggtgcagctccagcagcaatggcagtaacggcattggtggcgcggacgtggcttggcgtgtggggcgtgaggaccatgcaagcccgaggcttcggctcggatcagtccgagaatgtcgaccggggcgcgggctccatccgggaagccggtggggccttcggaaagagagagcaggctgaagaggaacgatatttccgagcacagagtagagaacaactggcagctttgaaaaaacaccatgaagaagaaatcgttcatcataagaaggagattgagcgtctgcagaaagaaattgagcggcataaacagaagatcaaaaccctaaaacatgatgattaagtgcacacagttccccatagaatggcacatgtcactgcccacttctgtgtagacaggttctggtttaattaatattgtctgtgg

SEQ ID NO: 13927 - DNA, 978 bp, Macaca Fascicularis
  misc_feature (1)...(978): n = A,T,C or G
tttattgatcaacatcnttcatagtgaagacctaggaaaggatgttgaatttgaggttgttgnnnnnnnnnnnnnnnnnnnnnnnnnnnnnnnnnnnnnnnnnnnnnnnnnnnnnnnnnnnnnnnnnagtgatgatggagctcagccctctacctccacagctcaagnnnnnnnnnnnnnnnnnntagttgattcggatgaagaagattcttcaaataatgctgacgtcagtgaagaagagagaagccgcaagaggaaattagatgagaaagagaatctcagtgcaaagaggtcacgnnnagannngaaggaagagcttgatgatgtcatagcattagattgaacagaaacgcctctaaacagaaccctcttactgtttagtttatctgggcagaaccagattgttatgtcctttgttccaaagggaaaaaattgacaccagtgacttgaaaattattctgcnnnnnnnnnnnnnnnnnnntttgctagaactgttagacacattgcagtatgctgtattgaaagtaggaatatagttttaaaaaccctttgaacaaagtgtatgcataaccagtcatgagataaaacaacacaatgcatgttgcctttttaatgtaaatacccttaggtatcattaatagtttcaaaatattgtggtttagtaaagttgatacctggttataaatattatgcctttatttttggctagaagaagaattatttttagcctagatctaaccattttcatactcttaactgattgaaacagattcaaagaagtatcaagtgctatgcattgaaacttgtttttaaatgttaaatggcactatgnnnnnnnnnnnnnnnnnnnnnnnnnnnnnnnnnnnnnnnnnnnnnnnnnnnnnnnnnnnnnnnnnnnnnnnnnnnnnnnnnnnnnnnnnnnnnnnnttcaggttatttatattcgatgttttgtaaaactcaaataacgactatact

SEQ ID NO: 13928 - DNA, 694 bp, Macaca Fascicularis
  misc_feature (1)...(694): n = A,T,C or G
gaataaaatccaaggcctcacancnntgtcaannnaggagatctttccttgtggtggtttctgtgagaattggctatcccgaggacagagccaggatggcagaggcctcctgtcctcagggcatgccctgcctaccttctgaaatgtttaccccattgnnnnnnnnnnnnnnnnnnnnnnnnnnnggtttctagatagccgggcccaccaagagacattgccccttgatgagagtcaaacaccctgcctacaaggagatgttttgaagtggagaggaaaattggcgccttctcttttaaaggcaataatggaattgactttcagtaactgaatttgtgcacaaaacattctaaacactagtgaagcctgtttcgttgaactaattctggctctggaaatgtttttgttttatagttatttacggtttcgtttgtttggattcaagcttagtttgttaatatgtataatttagcatctattacactcatgtaaatatggagtaagtattgtaaactatttcattgctggggattgtgggtgttatacatacatttaggactgcaattttttggtattttttgtattgtaaaataacagctaatttaagcaggaacannnnnnnnnnnnnnnnnnnnnnnnnnnnnnnnncaaatgtgaagaacttgtatataaacaaaagtaaatactataatac

SEQ ID NO: 13929 - DNA, 846 bp, Macaca Fascicularis
  misc_feature (1)...(846): n = A,T,C or G
ggctttgactcttcagaaccccaagggaagcccctcttttcagcccctccccacccatctctggctgctttctcctctgcagctatgcctgtgtcttttatgctcataggaaaannnnnnnnnnnnnnnnnnnnntccttcttttctggagannnnnnnnnnnnnnnnnnnnnnnnnnnnnnnnnnnnnncctccctccaccaaagtccctccgtggcaggcctgggccccatagccaagggaagctgataacatgcactttatttaaaagccacaaaactatcctctcgaagtgatccttctgtgagctgtccaccacatcagnnnnnnnngatgccccacttggcctcagtcagcgtggcttggctctgagtccagaagatagcaagggtgcagcttttatgtccttgtactccactcaagcccagcctggcacagaggacaggttaagccccannnnnnnnnnnnnnnnnnnnctgcttggtttggcccaatccagtgcccccgacctgctcttttttcccaggaaagagcatctatggtgagcgcttccccgatgnnnnnnnnnnnnnnnnnnactacgggcccggctgggtgagcatggccaacgcaggcaaagacaccaacggctcccagttcttcatcacaacagtcaagacggcctggctagatggcaagcatgtggtgtttggcaaagtgctagagggcatggaggtggtgcggaaggtggannngcaccaagacagacagccgggataaacccttgaaggaagagatcatagcagaatgtggcaagnnnnnnnnnggagaagcnnnnnnnnnnnnnnnnnnagtaggacccaggga

SEQ ID NO: 13930 - DNA, 754 bp, Macaca Fascicularis
  misc_feature (1)...(754): n = A,T,C or G
ttagcgggcaaatgttaaataatatgtggccntttatatttttatttaaatctggattacaaaaatatagtacccatgagcatttcatgttagaaaccccatttaaagcactgtaaggctgaataggcacaagcgattaaaagtatatgccaggccacataaaaagaaatgttttaatttgcttagagctgtattcaagttgttcggcaccagagagaaagctgacagtctgttctttgtaaactgccttttcctatttttctgttttgttttgtttctcgagtttcattttttactaagccccttctgatacctaggcagataaagataagagcagtgctcggtacaaatgtcagctctgaagaggaggaagtcaatcttcaatgctagggcagatcttcactatccatggtccagtcttaatttgagcatgagagcaaaatttagtcatctacacaagaagcaaaagcaaggaatagttgttgagcttttgttttttggttgtttctttcttttttttttttttaaggcaagaagtgttgccggtagggtatgtgtgctttctttaagaagtcttcctatttcctttcaaagaaatctcttgtaaattacaaaactgtgaaatgggttgccaaaaactgttgcccttcgttagatgcttcaaacagtgtaaatcctgtactgcaccctgtccacctctgctccctcctccctcccctgagattgaggacctcatccgacccatgtaattacc

SEQ ID NO: 13931 - DNA, 667 bp, Macaca Fascicularis
  misc_feature (1)...(667): n = A,T,C or G
gccagggtgtgttcccccaccctccctcagtaggagtgagctactcaggccagatgggggcctggcgcctgggctgggaggcccctgtgaaggagagggtgggaagggaggcatctggggagaggggtcccccatggtggctcccctccgtggccgttcttatcccaggaggagacactgtgggcacagcgctaagtccaggtgtttgtattcgggctagaaaaggcaatgtcccgagtccctgctgcctgtcacagtccttcggccagcgctggacctcaaccctgaggagtcacnnnnnnnnnnnnnnnnnnnnnnnnnnnnnnnnnnnnnnnnnnnnnatgctatggccggaaggcctggggtagcctcctccaagccgctcgcaccccgtaggtgcccatccgccgctggcgccagtgnnnnnnnnnnnnnnnnnagagcaggacagatgtcacgaacaggaacagcaacactgacaccactgtgacgatgatgaccatctggctgtccggcacgggctctgggcagggagggggcaagggtcttagacatcctgtgatcccagttaccagggaccaaaaggaagtggaagtctacccccgacccagcccccccagcccccgccgccccctcatccatcctgcagtcaccccaggctgtagac

SEQ ID NO: 13932 - DNA, 701 bp, Macaca Fascicularis
  misc_feature (1)...(701): n = A,T,C or G
ttgctgtttcagcaggtttaaaacnntcaagaacatcagttaggaaaatagctccagaaaatacagatatattttatttttattaaaatggcagtctgcatcataattggcgnnnnnnnnnnnnnnntttaccagaatctgnnnnnnnnnnnnnnnnnntctcctcggaaagaaaatctcttagatgtttaggagggcagacgtggccgtgatgcggtgtcctggcttttgtggtgtggtgctgtgtgtggagctagtgtaaaaacatgggcgacaccaagtggaagaaatgccttcttgccaagctcattcgtagaacttacacagtaaaacagcttccactttggcaatgatgttgtagccttttaggtggaagacagtgaggggtgcagtgtgtcagatacaacattaatgtgttactcttgcattggaatctgaaggtagttcagacttcttgggttttgtttttaagcaaaacaatgtgaaaacatttaaggttgaaatgttgcatttgaagttatgatcgtttaatatattcatattaccaagactattatactggaagtggtttctttttgtgttataaaggtttaattttacataaggcagttacttaatgtgatttttaacccttaaaaaagtggagatgtatacatttgttaacaatgccatgaaagcattttctttctcctaaggaaaaa

SEQ ID NO: 13933 - DNA, 757 bp, Macaca Fascicularis
aaatgctcactatcactcagaacccttagcacacaggaaatggattactctctggatataacaccgccttcaaaaatttctgtttgccatgcagaacttgaattggggacttgttttcaagcagtaaatagcagaattcagttacaaattcttgaggcacaataccttccaagctcctcaacacctttgactttgagtttttttgtgaaggtgggaatgtttagctcgggagagttgatttacaagaaaaagacacgcttactgaaggcctccaatggaagagtcaagtggggagagactatgatttttccacttatacagagtgaaagagacattgtttttctcattaagctttatagtcgaagctctgtaagaagaaaacactttgtgggccagatttggataagtgaagacagtaataacattgaagcagtgaaccagtggaaagagacagtaataaatccagaaaaggttgttatcaagtggcacaaattaaatccatcttgaagacttcacacattaatttggtgaagaatttgacattcttttagaagacttatgatttcaatttgctaccaatgagaagagacaaatcaataaatttgtcaatttatgggggctataattacagtatatattgtatctgatagaaaatttgataagaaagtataatgaattttatcagatatccaaagtaaaggaaatgttttaaaactgtgcaacacgacacagatagtaaaatcaaaggatagtataa

SEQ ID NO: 13934 - DNA, 787 bp, Macaca Fascicularis
  misc_feature (1)...(787): n = A,T,C or G
tagagcagggcccctcttttcagcactttggacacctggagacccagccctgttatttaatggtagtgggcaagtgtgtgtgcatactgtctgccactgctttctccgtgccccatgccagagccctctccctgccaggccctgccttagccccaacttgggaccaaagtgcaacatgggatcatgggttggggtgctccggtgacccctctctatagtgcttccctgggccaagctgacaccagcccctgagggtggggtgggacgggtggtgcttaaaagaggaaggggaccagtgtagcaaattgctagggacccccaccnnnnnnnnnnnnnnnnnnnnnnnnnngcgtggggattcccatcatggggcctggcgcctgtgctagttccgtagctgctgttcacgcgctcactcctgaccacatgcacgttccctagatgcagattgctttgaactttaaagctgtacaatttggttatgtttgtgctgacttaaaaaatattttaatgagaaaaaaatggacaaccctgggaaggacctggttcttttgcttctcggggaactgtaagcccccgcgttctgggaatcgctctctgctcctcttcttggaagctaagcctgtccccaccgcccgaggtctgcgcccggacactaacccgtggctcccgccgcagtagtgtttgctttggaccttgcgtgaggggtgctcggtccgagcccgctcctttctgtacacctagcgctgcccgccccgcttgtgtctgaggtcgtgtagtcaaaaaa

SEQ ID NO: 13935 - DNA, 697 bp, Macaca Fascicularis
  misc_feature (1)...(697): n = A,T,C or G
caagnnnnnnnnnnnnnnnacacannnnnnnnnnnnnnnnnnnnnnnnnnnnnnnnnnnntccagtgctgcagggaggtggcagcccgctacccccagatcannnncnnnnnnnnnnnnnnnnnnnnnnnnnnnntgcagctggtgtcccgannnnnnnnnnnnnnngtcannnnnnnnnnnnnnnnnnnnnnnnnnnnnnnnnnnnnnnnnnnnncaggactggttgggggcccaggccttgtggctggggccaactatggccatgtgtatgnnnnnnnnnnnnnnnnnnnnnnnnnnnnnnnnnnnnnnnnnnnnnnnnnnnnnnnnnnnnnnnnnnnnnnnnnnnnnnnnnnnnnnnnnnnnnnnnnnnnncacctcaannnnnnnnnnnnnnnnnnnnnnnnnnnnnnnnnnnnnctggcgtccatggacaatgagaattcccagccctgcacgccacgggagacagnnnnnnnnnnnnnnnnnnnnnnnnnnnngggagtggcggggcctggcgtgtgccgagcctgcctgtgtcctacagatgcacactccagacatcgggggccagggcacaacatctgaagccatccaggacattatccgccacnnnnnnnnnntcaacggccgggccgtggaggcctaggctggccctgggacctccttggattccccttcccaccccagcaccccag

SEQ ID NO: 13936 - DNA, 687 bp, Macaca Fascicularis
  misc_feature (1)...(687): n = A,T,C or G
annnnnnnnntggccaacgtggcctacatcgtcatcgagtcccgcgaggagggcgccagcgactacgtgctgtggaaggagattttgttcctggtggatctcatctgctgcgcccctgcagtcctggccccacgcctgcccgtgcccctgcagtccagccccacgcctgcttgcaccnnnnnnnnnnnnntgnnnnnnnnnnnnnnnnnnnnnnnnnnnnnnnnnnnnnnnnnnnnnnnnnccctttcagtggcagtggctataccagctcttggtggaaggctccaccctggccttcttcgtgctcnnnnnnnnnnnnnnnnnnnnnncaggggacaacccgtacctgcagctgccccaggaggacgaggaggatgttcagatggagcaagtaatgaccgactctgggttccgggaaggcctctccaaagtcaacaaaacagccagcgggcgggaactgttatgatcnnnnnnnnnnnnnnnnnnnnnnnntccttctcccccagcatttctactcctgcccttcttccacagcgtatgtggggaggtggagggggtccatgtggaccaggcgcccagctccccgggaccccggttcccggacaagcccatttggaagaagagtcccttcctccccccaagtattgggcagccctgtcctcactccgggaccacccctcccttcca

SEQ ID NO: 13937 - DNA, 815 bp, Macaca Fascicularis
  misc_feature (1)...(815): n = A,T,C or G
atcacaaacggtttgtttgtnnnnnnnnnnnnnnnnnnnnnnnnnnnntcnnnnnnnnnnnnnnnngaggagacaaagaaaaagcgctctgattctcagattattgaaaatgacannnnnnnnnnnnnnnacttggctgccaaaatcaatcaagataatagtcgaaaaagtccaaaatcctaccttgaaatcctagcagaagtaagagattataaaagaagacgccagtcctatagagctaagaatgttcacataaccaagaaatcatatactgaggtgattcgagatgtgataaatgtgcacatggaagaactcannnnnnnnnngcaagaagaacaagagaagnnnnnnnnnnnnnnngaaaagaatgaagaaaggcgatcagcttcagtagattcacggcagtctggtggaagctatttggacgctgagtgttcacgacatagaagggaccggagtagaagcccacataaaagaaaaagaaataaagataaggataaaaactgtgagtcgagaagaaggaaagagagggatggagaaagacaccatagtcataaaagaagaaagcaaaaaatataaatgaagtacttgtacatgtattaattatgcttatgccatggtaaccaatatgctgatatattaattggaattgctttgcataggagaatgtttttatgatctgtttagtgcttattattttccaataaatatgcttcaaaccatgagtacactattaggcnnnnnnnnnnnnnnnnnnnnnnnnnnnnnnnnnnnnnnnnnnnnnnnnnactgnnnnnttgttttgttctttttgc

SEQ ID NO: 13938 - DNA, 708 bp, Macaca Fascicularis
  misc_feature (1)...(708): n = A,T,C or G
tttttccctgtacagtagannntccaaatgtaataaactttaatataaagtagtcctgtgaatgccactgnnntcgcttcttgcctctgtgctgtgtgtgacgtgaccggacttctctgcaaataccaacatgttgggaaacttggctcaaatctctgtgcctttgtctttcccatggggagggattctggttccagggtccctctgtgtatttacttttttgttttggctgaaattcttctggaggtcggtaggttcagccaaggttttataaggctgatgtcaatttctgtgttgccaagctccaagccccatcttctaaatggcaaaggaaggtggatggccccagcacagcttgacctgaggctgtggtcccggcggacgtgtggagccgaggcctgccccgcagacacctaggacgtcctcctcccacctggttgcagaggccagaggcctccagcccagggctcctgcacttgcttatttgacaacannnnnnnnnnnnnnttgaccactctgaaaggtgggccagtctgtnnnnnnnnnnnnnnnnnncaagccaagggaacctgtgcnnnnnnnnnnnnnnnnngactttctgcctnnnnnnnnnnnnnnnncatgactcgggggtggggaaacggggccagctgatcatgttcgtctgctggtccatgggacggtgcccaagccagaggctgggtccat

SEQ ID NO: 13939 - DNA, 731 bp, Macaca Fascicularis
  misc_feature (1)...(731): n = A,T,C or G
catgtagactgannnnncagacacaaagcnnnnntcnnnaatggaatggaaggaacacaaaacttaagagtgaaatggaatactaagatgtttttaaataggcaggactatgctactcacttgaggctggagnnnnnnnnnnnnnnnnnnnnnttaagttttgtaaaaaggaatatcatcttgaatccacttggataaagagagactgtgtgtannnnnnnnnnnnnnnaaggatttggaaattnnnnnnnnnnnnnnnnnnntatggatatgcttatcatgtacattttcaaacaaaaaggaagaccgaaagtagtgatctttgtacacccatctcagattcaacgattctgctatataggttgtgtatctcttatctgaaatacttgtgactagaagcagcattttggatttgggatttttttcaaattttggagtatctccatatacacaataagacatcttggagatgggatccaagtctaaacacaaaattcacttgtttcatatataccttatgcacatannnnnnnnnnnnntttatataatattttaaaaataattttgtgcattgagacaaagtttgcatacattgaaccatcagaaagcaaaggtgtcatctcagccactcatgtggtcaatttnnnnnnnnnnnnnnnnnnnnnnnnnnnnnnaatttatatgctaccaataagcagttactatacttattcatgcataactacttaaca

SEQ ID NO: 13940 - DNA, 729 bp, Macaca Fascicularis
  misc_feature (1)...(729): n = A,T,C or G
ccacatggccttgtgaatataagcagtgtcccctataccaccccagcagtgccctgccagcccctcccttcattgctttcattacagaccagggttctggacatcagagcaatgttgctaaatgactgtttcaatatgatcagaacttagatataaggatgggtccttcagattttagcatttaggagtttcaataataaccattgcttttaaaggaaattaatagaaagcctcatnnnnnnnnnnnnnnnnagcacatggctgtttctatattctgnnnnnnnnnnnnnnnnnggtaacttgaaatgcttgctttttttgtcccctagttagtcgaagggtctgtattggactaattctgaactacagacaaattggacctcaatgtcattcacttccctcatattaatgggagtgaaatatctaatacttttgctccttgttatccagagttgtgggatctcaggattggaagattgtaaaggnnnnnnnnnnnnnnnnnnnnnnnnnngttctttttttttttgnnnnnnnnnnnnnnnnnnnnnnnnnnnnnnnnnnnnnnnnnnnnnnnnnnnnnnnnnnnnnnnnnnnnnnnnnnnnnnnnnnnnnnnnnnnnnnnnnnnnnnnnnnnnnnnnnnnnnnnnnnnnnnnnnnnnnnnnntnnntcgtgtgttctttacaaaatttnnacaggtggttactgaatctctgtatgaacttccataa

SEQ ID NO: 13941 - DNA, 732 bp, Macaca Fascicularis
  misc_feature (1)...(732): n = A,T,C or G
gagnnncagatactttngaatcttcatcgccctgtggaacatcttcatgatgttctgcatgatcgtgctgtnnnnnnnnnnnnnnnnnnnnnnnnnnnnnnnnnnnnnnnnnnnnnnnnnnnnnnntctccattcctccattcctgatgacttcaagaatgtttttgaccagagaaccnnnnnnnnnnnnnnnnnnnnnnnnnnnnnnntgcgtggaaaagtgttcgctgagataggcatggcttcccagccacgtccctgttttcaaagatagtttcactttagtctctgaatttgaatgctgtctactgaaggggtttcaggagggtttatataagggactgtgatgaaattgcattccccatagataaaagaaaagtcatttctatccagagatctgagcagaaggattggcttgtaagtttaacacagctgtgtttttggacatttcagtgttacttgctgagtctgacagcctttgggcccagccagggtcctgttaacaaattcttttcacatcccaacagggtctgcttggccactcagtacagctgcgattaaccctaaagctttaaggaacgggccatctgtaatagggacaccagccttccggtatagaaactaaattgttagcaagagcgttgagctagttcctggtgcagtgtttccacagaagacatgtggagcagttgtgggaatgttaagggaagttttctctgccttgaccccttg

SEQ ID NO: 13942 - DNA, 751 bp, Macaca Fascicularis
  misc_feature (1)...(751): n = A,T,C or G
tactgtaaacctagatattaaaatnngaagagacttcaaagactgtcaagtggaaaaccctcatttcataaattaaggaacttgggtcaaagttaaatgaaaaaaacctaaaaacagaaccaaagacagcctctagatttcttaccctcaagtctcctgttagcatactgcacacacaaacacacacacacacacacaccccctctgccacactgctctctcccttccagaagcttggttctactgtaagcaacagctccttcatgggctgagaaggggaaaccaggatctcccctaatcaagggcctatacttttatttttnnnnnnnnnnnnnnnnnnnnnnnnnnnnnnnnnnnnnnnnnnnnnnnncttcaatgccatcttaggcctgcaagttgaagacagagtaggggaaatnnnnnnnnnnnnnnnnnnnnnnnnnnnnnnnnnnnnnnnnnnnnnnnnnnnnnnnnnnnnnnnnnnnnnnnnnnnnnnnnnctacatnnnnnnnnnnnnnnnnnnnnnnnnactataaaccttnnnnnnnnnnnnnnnnnnnnnnnnnnnnnnnnnnnnnnnnnnnnnnnnnnnacaatattgtgactgtannnnnnnnnnnnnnnctgtacactttaaaatgtaaaatgtgtatgtatttttaccacaataaaaaaaaaaaccctaaaaaaaccttaatgaaaggtggaaaataatttaacttacaatggaaaacacaannnaaatgtacaa

SEQ ID NO: 13943 - DNA, 734 bp, Macaca Fascicularis
  misc_feature (1)...(734): n = A,T,C or G
ggaagcccaacagcgnnnantacttcatcggctacgttggtgaggagctcatctacctggacccccacaccacgcagccgnnnnnnnnnnnnnnnnnnnnnnnnnnnnnnnnggacgagagcttccactgccagcacccgccatgccgcatgagcatcgcggagctcgacccgtccatcgctgtggggtttttctgtaagactgaannnnnnnnnnnnnnnnnnnnnnnnnnnnnnnnnnagctgtctctgctcggaggcgccctgcccatgtttgagctggtggagcagcagccttcacacctggcctgccccgatgtcctgaacctgtccnnngatttttttgatatagagagactggaaagatttttttactcagaagatgaagactttgaaatcctgtccctttgaaaatcctggggtcgggggtggcacctgtgagagcctggggctcctggtgccgccgcnnnnnnnnnnnnnnnnnnnnnnnnnnnnnnnnnnnnnnnncccgtgctgcctccccccagagggccacccgctccgcttgtggactgaggctgcgctgccccggaggccctactgcttggtgtccgactgccgagctcagagtgcccgtcagggnnnnnnnnnnnnnnnnnnnnnnnnnnnnnnnngagattccagagcgttctctggacactgccagccccgcgttagcgcctgggcctcagtcccacttgctcccaggcgccggtt

SEQ ID NO: 13944 - DNA, 756 bp, Macaca Fascicularis
  misc_feature (1)...(756): n = A,T,C or G
atagagcgtgannnnntgccatcagacgtggagagccgagaccgccaggcccgatgcatatggtttctggataccctcatnnnnnnnnnnnnnnnnnnnnnngttaagcggaaaagtgccctgggacctggagttccccacatcatcaacaccaaactgctgaagcactttacctgcttgacgtacaacaatggcagattacggaactnnnnnnnngattctatgaaggcgaagattactgcatatgtgatcatacttgccttgcacatacatgacttccaaattgacctgacaatgttacagggggacttgaagctcagtgagaaaaggatgatggagatagccaaagccatgagnnnnnnnnnnnnnnnnnnnnnnnnnnnnnnnnnnnnnnnnnnnnnnnnnnnnnnnnnnnnnnnnnnnnnnnnnnncccactgcctccagcccagacctcagaccgcctggcaaagcggaggaagnnnnnnnnnnnnnnnnnnnnnnnnnnnnnnnnnnnnnnnnnnnnnnnnnnnnnnnnnnnnnnctattcatttccatttttatgttttaaaaaggaaaggtgcagggatgnnnnnnnnnnnnnnnnnnnnnnnnnnnnnnnnnnnnnnnnnnnnnnnnnnnnnnnnnnnnnnnnnnnnnnnnnnnannnnnnnnnnnnnnnggagaccccatccgtgggggnnnnnnnnnnnnnnnnnnnnnnnnnnnnggtatgtgcctgtaatcccagctactcg

SEQ ID NO: 13945 - DNA, 719 bp, Macaca Fascicularis
  misc_feature (1)...(719): n = A,T,C or G
caatgnnnnnnnnntgctcttggaacggaccttnctgaaccctcgagccttcccagaggaacnnnnnnnnnnnnnnnnnnnnnnnnnaactcgcacgggctccgtagccacattcccgggcctatccaatgcctgctccagggccagggacacagcctctggatctgaagcttgggctgaggtgcagagacagctcagcattgtggtgacagccctggagggtgcggcagccaccctgaggcctgtggcggacctctgaccccagccctcttccttctgcctgtggctgacctctgaccccagccctctttcttaggccctccctttaccccaaccctctcctgcctgctttcctgagatgtcctggtcttccctggtgccaggagggggcactaccacaggaccctctcaagcttctcaggcaatagcttgaggtccgtgaggggagtggcaatccctaatgcaactcaccctcatcctggtgcttaggtggcagagggtgggcagcaggggacagggatgggatggcaaaaccaccagctactcttggtggtaggtaggtgaagatgggatgcataatgccaacctcagatgccaactcagatcatcaaggccaaagaccagtggcgaaagtgaggcatggggtgccttaggccttgcctagtctgcgttcctctccctacatgctgtgtatcctaactccctacaacagcccctca

SEQ ID NO: 13946 - DNA, 757 bp, Macaca Fascicularis
  misc_feature (1)...(757): n = A,T,C or G
caagactgtgacatctcnanttcccaccctnnnnntnnnagggcaataaaatgaccatggagggggcttgctctctcttggctgtcatccgatcgccagcaaaatttagatgtgagaaacccccttcccattccatggcaaaaacatcttagaaaagccattaccctcattagacatagttttgggctcacaaaacacctgacagcccctccctcctctgagaggnnnnnnnnnnnnnnnnnnnnnnnnnnnnngcggggtgcagcatctggaagagccaggcagggtgtctgccccctcctgagttgaagtcatactcccctgtgccagctcagaggccgagagctgtggacagnnnnnnnnnnnnnnngccaccctgttcagaagggagctggctccagcctggaaacccgtctgaggttgggagaggtgcacttggggcacggggagaggacatgacacacttagctggagatgtctctaaaagccctgcatcgtattcaccttcagtttttgtgttttgggacaattactttagaaaataactaggtcgttttaaaaactacaaaattatcgattgcttttttgtagtnnnnnnnnnnnnnnnnnnnnnnnnntagccaaatgactgaaagcactgatatatttaaaaacaaaaggcaatttattaaggaaatttgtaccatttcagtaaacctgtctgaatgtacctgtatacgtttcaacccccccccccccactgaatccctgtaaccta

SEQ ID NO: 13947 - DNA, 738 bp, Macaca Fascicularis
  misc_feature (1)...(738): n = A,T,C or G
aggaagaggaggagcttggtgnnnnncatacannntnnagnnnnnnnnnnnnnnnnnccctcaattacctaatcttatgctttaacacataactgcattggatgtgagagtaacgtgccgtatggtcattgttctatatattaacattgaacactgctgcaattgctcaaggacattttatgttacggctttaaagcaaaggcatgattattagaaactaagcttttttctttgaaaaacaagctccttttacagaatataagcaacagtagtgcctgtggtttagcccaccaatcttgatgactaaaagtagctgatgcattgtgcatatgatgcttgagatggtttttgcaaaagnnnnnnnnnnnnnnnngtaatcacaatagataaaagtggtattttaaacctttgaaataaatggatgtaactgtaccttggtacagcttttcacttgtttagtttttaaacgttagtataatctgaataaataaaatgttgccaaattcaatgtagaaagaatgtgacgacacaccttgggtagttctgcttgtgtttttgcatattgtaaaagcagtgtcacagctaaaaataaagaaatcgtttctaacggtaaattattgtggtttagttgctagtttgtactgagagttgacctctccctgtgcagttttttgttctaaacttgtataaataacaattgtgtactgtgtctcccttctacattgtaacaatgctcgc

SEQ ID NO: 13948 - DNA, 733 bp, Macaca Fascicularis
  misc_feature (1)...(733): n = A,T,C or G
tgaatggtcaagagacattcccannnnnnnnnnnnnnnnnnnnnnnnnnnnnnnnnnnnnnnnnnnnnnnnnnnnnnnnnnnnnnnnnnnnnnnnnnnnnnngctgcannnnnnnnnnnnnnnnnnnnnnnnnnnnnnnnnnnnnnctggatgaatgggtgaggagacactcccaccagtccagcctcagagggaaagggagatttggctttttggaggatggcccttaggaatnnnnnnnnnnnnnnnnnnnnnnnnnnnnnnnnnnnnnnnnnnnnnnnnnnnnnaataactgacaccacgacaagagtagagctcgacgggtggtaactagataaagagcaggtaccatcctccatttagatgtggaagagaaagannnnnnnnnnnnnnnnnnnnnnnnnnnnnnnnnnnnnnnnnatgggactggcacaggaaggaaaagaggacaagcagtactcagaggccacggatgcaggttgcatccgtctnnnnnnnnnnnnnnnnnnnnnnnnnncctaccatctgggaaatacagcaaagtagatgaaatgagaggagccacannnnnnnnnnnnnnnnnnnnnnnnnnnnnnnnnnnnnnnaccagaaatcatgttgcccaagacatagcacccctcacggaaccaagtctagtagtacatgggtaacagattcattctgacatcaatactaggtgttaatttttcccaaggctgtgatgcnnnncata

SEQ ID NO: 13949 - DNA, 717 bp, Macaca Fascicularis
  misc_feature (1)...(717): n = A,T,C or G
aggcggggagggctcctttctacctccagtgcnnngagcctccagtcngtntccccctgcatgccccacgtgggaggtgctgagctccaaaccagcatcacaccaactttgacacatggatgtacatatcttggtgacgggtgggggccaagaattgagcatgacatcttccccagcagccacctcatctgagacccctcaccttccccaaaccagatccaatcaaacctcaccccgaggaaacatgctccccaacgtgctctcctgtgcttctgttttgtccccctgctgaggggacaggagagggagtggtgaggccctggacctccagagcctggctttgcttcgtgctgtggcttggtcagaggggacgtggccaagggtgaggtggccaaaaccagaaccagcagtctcctgccttgttccctccctggccctcaggccctccttccagggatgtgtctccagctttactttatgtcctgaagctgacccaaggtcttcctatctgggaatgcctagtgggagccaagaggatggggtgggggccagggccccccagggtccagcgtgggagagcctgggcaggatcccatcagaaaggtgctgactcagctggttgcccggacactcaacagcctccacctcctttctgccctcacagctcctggggccttcctggctctggcccagaaagtgattcatttgtaaattatc

SEQ ID NO: 13950 - DNA, 740 bp, Macaca Fascicularis
  misc_feature (1)...(740): n = A,T,C or G
atcaaannnnntcagttcnnnctggatattaaaaacattggcagaagcttctgtgagtttagttccactaagatgtttcacctgcctatcaaagaccattctcagtctacttttttaagctaccgtatcttaaattattgaaaatttattaattgctgaatatataannnnnnnnnnnnnnnnnnaaccgaaaatggtttaagagccaacatttagagtatgacaatggagctgaacagtttttaatgcgcaagcagttctgttcttgtgtatgacttgtaaccttaatttactgtgtaaagatggttacattatttccttagctttgtttgttggagacaaatagagaatgcttgttaagtatgtcaaaacaatcttatcttgtgaatttttgttaatgtattatacgagctatatttttcatttgcccagaaagacagcttgtataacgcttttggaagtttctgctctgtaatgtctttagagctgacagtctgttaggtttgttttttttcttcatgctaaagtgtcagttggtggttttgtgaactggtcaaaaattcacaggtcttaaatgttttgggggaaatttatattggacactgctctttgtctagcaaataaaagatgttaatatattcctgttactggcatgtgcacgactatgttattagaagccactttatcattttcctgctttaaatagaaatgtctatttatgacattctgcttgtagttct

SEQ ID NO: 13951 - DNA, 733 bp, Macaca Fascicularis
ctgttatgatggcagtattcaggccgtgaggcttaatctgatgcagaattaccgctgttggtggcatggctgctctctgatattcggcgttgtagatcatttaaaacaacacttgctgaccgaccacactaatcccaacttccagactctgaaatgtcgctggaagaactgcgatgcttttttcactgctaggaaaggatccaaacaggatgctgcaggacatattgaacgacacgctgaagatgacagcaaaattgattcatgaagttgtttgcctcccacgttgggaagtcattagttgaactattttcacatcagccccccacataggccactctcttcccttccttggtgaagcaaggaaggagaaagcggttactagccaggcctctagcatacgtctgggcagctctatgggatgatagattactctttaagttcgtgctggaggttttaaatagatttagacagatgttagggaaccacactcctctgggacagcatggcatatagtgatttatgctacttgcgttctccaggtgtttattaaagatacagatcctaattggttacccagtttgaccctaatcatatgtatattttattgacttcagtttgcaatgtttagtttatgttcttatgatggtttaaacctatagtcaggctttcaagtacaaatttgtttaagtgctagactttcgggatcagttttaatttctcccatttgtaatag

SEQ ID NO: 13952 - DNA, 709 bp, Macaca Fascicularis
  misc_feature (1)...(709): n = A,T,C or G
gggagctgtgaactccgagannnnngctcctggcccctatgtggccctgatgccagcctnnnngaggcatggaggannnnnnnctgctgctnnnnnnnnnnnnnnnnnnnnnnnnnnnnnnctccaccaaagctgatgggcgctggggatgcaggcttccgccccgcccttccctttttcttggctctggagcctnnnnnnnnnnnnnnnnnnnncctgggactggtgtgctctgctgctctggggatttggcccacaaggaacccctacccagcccagtccacccaccccagcgttcctgggcctccnnnnnnnnnntttctctgggtcccaggagctgtggttgtgtctgccccctgcactgggctatctgtgccctgcgggtgttcaggagactgggctgcctctgttcctcatgcaagccttgtgggggaagcaatgactaggagcagcacctggcccctccctgaggcctgtgagtgttggatccaccctggggaagtgggcggctgagacccgggtggggtcctcctacacttggctctgggggcttcctttctgggtcttgtccggggtgtggctttcctgagggtcttacctcccccagccaccctgccttnnnnnnnnnnnnnnnnctctaagcttataaaagagaaatatgtatatatggggtgttttggagtaaaaggaaattctaagacattaagac

SEQ ID NO: 13953 - DNA, 714 bp, Macaca Fascicularis
  misc_feature (1)...(714): n = A,T,C or G
cacaaaaggtaacannnnnnnnnnnnnnnnntgggntggaagacaggannnnnngccaggcnnnaaggaattcnnncgtctccactgggccacccacttgctggacagtctgagccaagtccctcctgttggagaaaagcctggaactgccaaaaacaaaacaaaacaaaaacctcatcaccatggtcaggaggaggtccagacatcccacccagataggctggggaaagggatggaagccaggaaagatttaggggcaggagacagacacgtaacaggaactcagaaggtagaacttagaattcagaacttgggtttcaattgtagaatttggaatctggaatacagaattgggaagaagaacagagatgacaaaagaccatttgaagagaggttcctaatactagacagatggagagtggcttggctgtttccccctacatataggggttgaaaacttaaaagtgtagttccattccntatnnncagaaagtatatgatgccctcccncanncaagcaggaaaatgtgccacctagggcctgttccctcaccctgtattctgtctcccctgattgacattctgtcagcccaaccctcattctgcagggccacctggtgtgtggagggggggtcagtgactcggcggggtctcctcagtgacccccatacctcatcatgaacccttgggtagcttgattctgcctcccatcca

SEQ ID NO: 13954 - DNA, 708 bp, Macaca Fascicularis
  misc_feature (1)...(708): n = A,T,C or G
caggatgcacagctaatctagtattgtctagtattgtctctcggttgcacctgactctcattctctccnnnnnnnnnnnnnnncaagctcagcatccgggttccactctcacactgtctggcatttctgtgtctgagaagtcctacattgaccaggctcccttgttgcctggagtctgatgtaatcagaaaatagacgcataaatgtgcacatgcgtatnnnnnnnnnnnnnnnnntaaagtcacctctcgcctctgcttttctgatcatttgttagagacatggatcaggaattttttaaaattattattctttctctaaactatttgcattgtgttcataaacccattttagaagtttgaaccgcaagcttttcctgattttaaaaaaacaaagatgctttcaatgaactattctgtgattttttttaaagtccccaaatatgtacttagccttctgttattctttattctttaagaagtgttggcttccattgaccataataaggccaccaattaaatggttgtgttaatccaacatgtaaaaaaaaatttggtggggcacagtggctcacgcctgtaatcccaacactttgnnnnnnnnnnnnnnnnnnnnnnnnnnnnnnnnnnnnattgacgtgcagtgaactatgattgcgtccctgcactccagcctggatgacagagtgagacccccatctctaaaaaa

SEQ ID NO: 13955 - DNA, 600 bp, Macaca Fascicularis
  misc_feature (1)...(600): n = A,T,C or G
ttttcagattgtgagtttttgtataaaaaacaatttaaaaaaaaggttgttacnnnnnnnnnnnnnnnnnnnnnnnnnnnctacacccaggagacacacgcacacgggcaaacatcnnnnnnnnnnnnnnccagggtcagtggggatgagccctcagcccactcccacccaccctggaaaacggcctccctccaaagctgccccctcagagccccgtcctccttgcaacgccgtggttggaaggcaggaccccagggnnnnnnnnnnnnnnnntggccccctcttccaggcaccctggactccctgcctgacccctgcccagcctgtagacccagccgtcccccggggcacaaagggggcaaagacagctctggagctgnnnnnnnnnnnnnnnactttggccgacccctcccctggctggccttcagttcccgtatcagtccacacgaccagaaacaatgggggccggttaaaaaaaagtggggagggggctcccatgagagctcggccactgggcctacccagattggcagacagaaggctgcctttcccccagtggcaactcagagccaggccagctctgcccagcttcctgcccac

SEQ ID NO: 13956 - DNA, 769 bp, Macaca Fascicularis
  misc_feature (1)...(769): n = A,T,C or G
gacagataggcatgnncnnncnagtggacagcttgtgtcaggaggggtagcagaagaagctaaacaagctcttnnnnnnnnnnnnnnnnnnnngaaagctgcaggctgtgacttcactaatgtggtgaaannnnnnnnnnnnnnnnnnnnnnnnnnnnnnnnnnnnnnnnnnnnngaaatctacaaacagtatttcaagagtaattttcctgctagagctgcttnnnnnnnnnnnnnnttgcccaaaggtagtcgaattgannnnnnnnnnnnnnnnnnncaaggaccgctgacaacagcatcactataagtgggccagtgctttgtagtctggacttgttaacattttgatttttacaattgatgtaacatcttaattaaccttttaattttcacaattgatgacagtgtgagcttgatgaaaatatctgaagttattatggaaatactatataatagggagagttgaacatgaattgaagattagagaaggaatccagttactgttttaaattacatctgtattactgaatataggaaagagatacccattacatagttactcaataaataaaagagaaataacaggtaggaaagannnnnnnnnnnnnntgagaaataatcaagaacatatctaattcaaactaatgatgtgaacgatttagttttcatgtcaggtatgtgattctgctctttcttgagtaaaatttaagtgtttaaatttgaggtcaaggagaagaaagtggaccaaaatttaatatagataata

SEQ ID NO: 13957 - DNA, 751 bp, Macaca Fascicularis
  misc_feature (1)...(751): n = A,T,C or G
tattctgccaaaaaatcaccaatggaaattttcactgatataaatacttgtacatatgnnnnnnnnnnnnnnnnnnnnnnnnnntatcaaaattaaatcaatcaaactgatcatgtgtctaaatattagtttgccctttnnnnnnnnnnnnngtacacataggcgacagcctctgccagtagactaccagcatttctttgtgatccttttaaaagattgatataaatgtcagttatttgccttgctttattagattagcacttgccattttttcatctgattgccttacttcttctggaagtgaggtcctcactcctggtgctgattttcctaacttcctaaggatgggagactgcaannnnnnnnnnnnnnnaatccctttcctgctgtgtctctatgtgggtgtagtgttgatggctgnnnnnnnnnnnnnnnnnnnnnnnnnnnnnnnnnnnnnnnnnnnnngttggccgggggtgctgtctgcactacttttgaggatgagcgcactgcctggtcccttccccgttgcacaagccagggcagtcgcannnnnnnnnnnnnnnntcacccaccccgtcaagcacagggctgccacgaactcatcagctgagagccctcctagcctttttgtgttttttgnnnnnnnnnnnnnnnnnnnnnnnnnnnnnnnnnnnnnnnnnnnnnnnnnnnnnnnnnnnnnnncagttagcaatcacagtctaccattaagttgaagagtaagtgagct

SEQ ID NO: 13958 - DNA, 735 bp, Macaca Fascicularis
  misc_feature (1)...(735): n = A,T,C or G
cagaatgacccagagtcaaggccanntnngcagggannnnnnnnntgaaagcctgagannnnnnnnctgnnagactcttgttgcnttcntccaannnnnnnnnncaccctttttctcaaatgggaggggctggagggtgtgtgggannnnnnnnnnnnnnnnnnnnnnnnnnnnctcgcggggctgttttcagctgaggaggggtgaatataggaaannnnnnnnnnnnnnnngtttgcaacatgttcaaggtgttagttctccaccacagaggttgtattcttcttttgccacctcagaccatcagaatcatttaatnnnnnnnnnnnnnnnnnnnnnnnnnnaagctatgttcttacaaaaaccccagannnnnnnnnnnnnnnnnnnnnnnnnnnnnnnnnnnnnnnnnnnnnnnnnnnnnnnnnnnnnnnnaagtgagacaacataattataacttcgttttatgatgctgcatcatttgtactgtttaggtcgacacgaggacatcatcttatttagaattttccnnnnnnnnnnnnnttttgggtgggagttgtgctgggggttgtaaataatgacaaggctgagatttttatgatgtttaaattgnnnnnnnnnnnnnnnnnnnnnntccccaaacttcttttctactgtttaacatacacaggctatttatacacatccccagctcccatctgaaacctgtgactcaggtttatgaatggtgtttgt

SEQ ID NO: 13959 - DNA, 602 bp, Macaca Fascicularis
atagccatatttgtgatctgaacctggaagctcatatgtatgcatcccagtggtttctcactctttttactgccaagttctcactctgcatggtgttccacatcattgacttactgctttgtgagggtttgaacataatctttcatgtagctttggctctcttaaagacttcaaaggaagaccctctgcaggctgattttgaaggtgctttaaagttctttagagttcagcttccaaagagatacacggcagaggaaaatgcacgaagactgatggagcacgcttgcaatattaaagtaccacccacgaagctgaagaaatatgagaaagaatatctgacaatgcgagagagtcagctgcaacacgaagacccaatggatagatacacgtttgtatatttgtaggtaactccagctgttgcatttatactgggaatcttcataagaagctgagagaaagagaggggaaaaagaaagtggctttctactttcaaaaatgaaacaaaaaggaaaaatggcaaagtactgttttatctgtgcatggtcatatccacaaagacttttagcaggtgaactgttccacgactgacacacggatgtttc

SEQ ID NO: 13960 - DNA, 850 bp, Macaca Fascicularis
  misc_feature (1)...(850): n = A,T,C or G
cagattgtgacatgtatgnnncagttatatgggtgtggcattgaaccacataatgagaatgttactctctttttagtccttgtgagacaaggatgaagtctcagtgatactcactgagcttactggccctctaacccagtgttttttttgttgtgtacatgatatatttattttgaaaccagtttaatgggatacaaccagcatttttaaaaatgaaatagaattgcagcatagaaaatatcaatgtattgttttatgaaactttcacatgtatatgtagacaaggatatgtactgagttttgatgtcaaatatannnnnnnnnnnnnnnnnnnnnnnnnnnnnnnnnnnnctgcttaactccaatttctcttttaaaaaagcagacttacagctttcaggcaactgaaattcatgttaacattgtttttatttttattgttttgtatttttgtggttaccttctaagacaagtgattgatataaagttccttttaagtttatacaggtaagcaaactgagttgatttctgtcacaggcaatgagtaggtagagcaaaaatgatgaagtgacttgtgaagactgaagtttgatgaagtnnnnnnnnnnnnnnnnnnaagctgagtgtggatgcaaaggtaccaggagctagcttttaaccttgcccagcctcaatttcttttcttagaagaagctgtgtgtgggtgggaagggaacggatgtataataaaatacctttcttccttgtaaactccaatcaacaaacatattttgagtaccttttatgttccttggcaccctgttgggtgtnnggtacnnnnnnnnnnnnnnnngacatagcgcctgttctt

SEQ ID NO: 13961 - DNA, 725 bp, Macaca Fascicularis
  misc_feature (1)...(725): n = A,T,C or G
gtcccttttagccctaannncntccatgttctgccctgannnnatcctgcctacctgtnntagctcttccactggctttgtaggtgagggaaaattttcgcaaggctttaaaagccttagccctgggtcacgatggctcagtgaaggactagattattttctttctgtcccaggagaccagtatgatgtctgtgccatctgcctggatgaatatgaagatggagacaagctgcgggtactcccctgtgctcatgcctaccacagccgctgcgtggacccctggctgaatcagacccggaagacctgccccatttgnnnnnnnnnnnnnnntcgtggtcctggggacgaagagcaagaggaagaagctcaggggcaagaggagggtgaagaaggggagccaagggaccaccctgcttccgaaaggaccccacttttgggttctagccccactcttcccacctcatttggttccctagccccagctccccttgtttttcctgggccttcaacagaccccccaccctctcctccctcttcccccgtcatcctggtctaataaccctctacacgtacacttctggtgacctatttgcacagaccgtcttcttccctccagtcttctaagttgagggataggggacattccatcctaagctgctcccttacccacacctatccttttgaggggcattggggtggggctggggcaagcaaagggactgggt

SEQ ID NO: 13962 - DNA, 665 bp, Macaca Fascicularis
ctctagctaaaaatgagcaagttaaaggcaagatcgacaccatgaagaaatttaaaagcctgtgattcaagaactttctaaagtatttccggaagacatggctaagtatcgaagcatccggggggaggatcacctgccttcttaaccagctcaccctccctgtgtgaagatcccccatgactgcaatgcggcgtgaggctgggactgcgagcactgacgccaccttcctgctgatgtgggactgggccctggacacacccctcagcccctctgtcctccttgtttggcctcatgggacggaggggctggaggagaggcggagctgtgccccagctgttccagcagcttgtccggtgtcagctggctctcagagtgctgacccctcgtcactgtggggattattctctctgcgggcagatgaggtgcaggaaaataggcttgggaatgttaaatatgatgggtaaattaaaagttttacaacattctacctaatatttttcttttaatgtgctctttctgttctattttattatggtgtcagaaagctaaaacgactagcaaaaatttttttagaaaaagaaaaattggtttaatgtgggaaagtacttaaattggtattatattttacattttcaagtatagtgcataaataatattttgaatgt

SEQ ID NO: 13963 - DNA, 889 bp, Macaca Fascicularis
  misc_feature (1)...(889): n = A,T,C or G
cgaccgcttnnngcacatcannnnnnnnnnnnnnnnnnnnnnnnnnnnnnnnnnnnccacggtgctgaacatcatcatctttgaagactgtaggaaccagtggtctatgtcccgaccactacttggcttgatattgcttaatgaaaagtatttttctgacctaaggaacagtatcgtgaacagccagccaccagagaagcagcaggccatgcacctgtgttttgagaacctgatggaaggcattgagcgaaatcttcttacgaaaaacagagacaggttcacccagaacctgtcagcattccgtcgagaagtcaacgactcgatgaagaattccnnnnnnnnnnnnnnnnnnannnnnnnnnnnnnnngacacctccttggactctacctgtacagagcagcgtccctttggtttggcccagaggggcgannnnnnnnnnnggagagggcnnnnnnnnncctggctcttttctccaggggnnnnnnnnnnnnnnnnnnnnnnnnnnngctacatccccagggaataggggtgtgagtgcactcactagggggcagggcgctgctggttcctgggggactgggtgggaagggtggtgggaggagataagagacacaaactgagactccagcctnnnnnnnnnnnnnnnnncaaggggggagaacccctagtgtcctgccacaacctgccttgtataaacatgtacattttttcataacatnnnnnnnnnnnnnnnnnntgactcaagtttaaaaacaaaaagtgtgactgaaaaatttttacagagtctagtgcaccaatgctgatgtgaggggttgtgtatgcgagtgaagaaaatgtgtattctggtggcctgaagctttactggacaaggatgtgtagagtgcagag

SEQ ID NO: 13964 - DNA, 748 bp, Macaca Fascicularis
  misc_feature (1)...(748): n = A,T,C or G
ggccactacattgaggaggggtggggggagggaggaggagggttacttgctgctcacactatatacatatgcaagcaaggggcgtggagagtgagggctccctgctccctccctccacggggaagggcatgggctagaagaggaggagatgggggttgggaaaggggggaacgttttggctggcggggtcccccctccattccctggagtttggggaaaggggaatcattaaagtgctttcagaaaatgaagaaatggtccctgcccctggagtggctggtgaccccccaaaaatctagggcccagtgaccccccccagggtctggtacattcaaggggggagccggctcccctgacgtgcaaataaaggggtccagggccctgcccagtcagcagcagtggggtaaggggttcaagccccaagcactctcctcttaaatggagaaaagggggaaggggctatgcccactcaattcctgggaaggggaagctgtgtccctccccggaagctggggacaggcacagttttgggaagaggacatgttggggaagaagatggtcacgtgatcacgaaagcatcaggggtcagaggtcacgttcccagcaggctccagtgaatcaaaccagtaaaagcaaaagcccagggaggggaaagaggggcggcccaggaagcctggctgcagggggagagctgggtccagtgtgggacagccccagnnnaggnnnnngtcaccagttcatgatgcag

SEQ ID NO: 13965 - DNA, 730 bp, Macaca Fascicularis
  misc_feature (1)...(730): n = A,T,C or G
cggcattgtcccannnctggagcatcgccctgcaggtggagtacgtggacgagatggataccgccctgaaccaccacgtgttccctgaggccgccaccccttccgtttacctgctctataaaacatcccactacaacatcctttatgcagccgataaacattgattaattttaggccatgcagtggaacctgtcacctaatnnnnnnnnnnnnnnnnnggaacattccggctcttcaattttttaagcaatttagactgtagcaagaaaatgtgcagccttttgggcaaagcccctggaacgaggcctacccattatggactgtggtaacttggtggtatttttagtatttattttaatnnnnnnnnnnnnnnnnnnnaactgggcccctgacagttccctgtgaggcctgggtgggttacctgccctctctggaattgtttcttcaactggaggagggtcctgcctatgttgacattgcattgtagaaaaatggggcctctggtttctctttaccaggggcagtgcctctctgcgggggaggaaaagctcaaggttagctgtcttaatnnnnnnnnnnnnnnnnnnnnnnnnnnnnnnnnnnnnnnnnnnnnnnnnnnnnnnnnnnnnnnnnnnnnnnnnnnnnnnnnnnngaatgtgagggctgcggtgtggtttcaaacattcatgatggatgtattttcctacccctacntaacgnnnaaaaaaga

SEQ ID NO: 13966 - DNA, 747 bp, Macaca Fascicularis
  misc_feature (1)...(747): n = A,T,C or G
cctggagaggatgaaggagnnnnnnnnnnnnnnnngatggagcttctagggatgccaccaccaaaacttctggagcaatccaaacgtgccaagtactttattaattccaaggnnnnnnnnnnnnnnnnnnntgtgactactcaggcagatgggagggttgtgcttgtggggggtcgctcacgtaggggtaaaaagcggggtcccccgggcagcaaagactggggaacagcactgaaagggtgtgatgactacttgtttatagagtttttgaaaaggtgtcttcactgggacccctctgcccgcctgaccccagctcaagcattaagacacccttggattagcaagtctgtccccagacctctcaccaccatagacaaggtgtcagggaaacggatagttaatcctgcaagtgctttccagggattgggttctaagctgcctccagttgttggaatagctaataagcttaaagctaacttaatgtcagaaaccaatggtagtatacccctatnnnnnnnnnnnnnnnaactgattagctagtggacagagatatgcccagagatgcatatgtatgtatttttatgatcttgcaaacctgcagatggaaaaattgcaagcccattggtggatgtttttgttagactagactttttttaaacaagacaaaacatttttatataactataaaggaattctttaagggctaattacctaaccagctgtattggccatctggaatatgcataa

SEQ ID NO: 13967 - DNA, 710 bp, Macaca Fascicularis
  misc_feature (1)...(710): n = A,T,C or G
gagaatgaccagctaatnnngagctctctaggcccctgtcagaggacacagggccgtgagctgcccccaccagacccggctctgcaggacctatctctgaccctcatagcctctnnnnnnnnnnnnnnnnnnnnnnnnnncccagccttacccggccacatgtcatccgaggaaagtggtaccagcatcagccttctgcctgccctgtccttggctgctccagacccagggcagaggagcagctcccagcccccaccagccatctgctcagcccctgcccccctgatccccaggtccccacaccccagccaaacccctagctccccactccagagctgcactcccaatctctcaccccgtggccatgtccccagtccacaccaggctcttgtgaccaggccccagaaacctagcctggagtttaaggagtttgtagggttgccctgcaagaatcagcggccttctcccaggaccggagctaccaaaggagcccaggagccctgccgtgtctgggaacccccaaagaggcatcgtgatggttctgccttccaatatgagtatgagccaccctgcacgtccctctgtgctcgggtccaagctgccaggcttcctccccagctcatggcctgggccttgnnnnnnnnnnnnnnnnnnnngtcnnnnnnnnnnnnnnnntgagaggtcacgcaggacagataccgctccacact

SEQ ID NO: 13968 - DNA, 651 bp, Macaca Fascicularis
ccccaagagagtctctctgtcagccaggctggggtgcagcctcaacctcctgggcccaagtgatcctcccacctccgcacacaacaccatgcccagctaattttaaatttgttatggagacggggtctcactttgttacccaggctggtctcaaactcctcactcaagcaatcctcccacctgggcctccccaaatgctgggtgtacaggcatgggccactgtgcccagcttcattttcagagtgaggcatttgtattatggctatgtaggagaatattcttgttctcagcaaacatactgaagttttttagatataaattaccacagtgtctgccactgaatttccagtgaataagtggaaaaatataaaacaatattaatataaagaaagagacaagtcaaagtaagcaaaaagacaacacttggtgaatataggtgaatagtcgacagatattcatgtatatcaatgcagctttgctgtgggtttgaaattttgcaaaatgaaagagaatgggtggcggggagaaggatacaccaaaaagattagtgattacctttggatgggaaaatggttggtaaattgtattttataaatgtattctttgtattttttaacgttcaaataatgtatatgtatcagttctgtacta

SEQ ID NO: 13969 - DNA, 721 bp, Macaca Fascicularis
  misc_feature (1)...(721): n = A,T,C or G
aagccatgcagcggccagagactgctgctgctttgaaacgtacgatagaggccctgatggacagaggagcaatagtgagggacttggaaaacctgnnnnnnnnnnnnnnnccttataggatgtctgcccacaatcagcagcacaacagaggcgggtatttcttggtggatttttatgcacccaccacaactgttgaaagcgtggtggagcacttgtctcgagacatagatgtgattagagggaatatcgtcaaacaccctctgacccaggaactaaaagaatgtgaagggattgtcccagtcccacctgaagaaaaattatattccacaaagaagaggaggaagtgaaaagatttgccagattttagccgtatcccttcacatttgagcagcatggatgagaaggaagagtttgcaagtttggcctttatataaacatgtgttgcaggtgctgtttgatttttctaaggtatttttagcccttgatcccctttgcttgtgagaggtggggaactgcttattgacagcttctctgtaacctgcagtaccagtggatcattcttgattttgttttcattagtgtcatttctttgtcagtgaggacttttccccttacaacagtaacaccattttttgaagagcaaaacttacaatacctcctgggatcatgagctagtcattcagcctgtataaccatgtggaaataaaaattgatgaccagt

SEQ ID NO: 13970 - DNA, 711 bp, Macaca Fascicularis
  misc_feature (1)...(711): n = A,T,C or G
gagggagaagagttctgcatctacaaccgcaaccccaacgcctgcagctatggcgtggccgtgggcgtgctagctttcctcacctgcctgctgtacctggccctggacgtgtacttcccacagatcagcagcgtcaaggaccgcaagaaagccgtcttgtccgacatcggtgtctcggcatgggagatgcgctcttgaatgtccccgtgttcctcggcttccccattttctcgccactcaccctctaccccatgtatggcactgcccgttctgcccggcgtggggcccccagccttctgggctttcctctggttcgtgggcttctgctacctggccaacnnnnnnnnnnnnnnnnnnnccaaggacaatccgctgaacgaagggacggacgcagcccgggccgccatcgccttctcctttttctccatcttcacctggagcctgaccgcagccctggccgtgcggagattcaaggacctaagcttccaggaggagtacagcacactgttccctgcctcagcacagccgtaggcctccctggcttgcagaggccggcatccttgtatcacccctcgcggtgaggtggcaggagcagcctagtgccagaaatgtccaagatgccagggcatgcagggcagtggaaggctggcttgannnnnnnnnnnnnnntctccactgactcattcattccttcactgcctccttcgttta

SEQ ID NO: 13971 - DNA, 1084 bp, Macaca Fascicularis
  misc_feature (1)...(1084): n = A,T,C or G
aggagtgccaaggatagattgtgtttcgaagaatgaagatataccaaatgtagcagttannnnncataatggaatgatagacttaaaatatttcccatattatgggaaaaaactgcatgtgggatatctacagccattggttgctgttcaggtcagctttgctcctaacaacactgggaaagaagtaacagttgnnngcaagattgatgaatcagccaacctaaaaagtcaggatgatcgtgacaagtttttgggacgagttatgttcaaaatcacagcacgtgcatagtatgagtaggatatctccacagagtaaatgttgtgttgtctgtcttcattttnnnnnnnnnnnnncttccattctagaattatgagaccaccttggagaagggaatgtggtacangacgatgggttacatcataacgtgcttccnnnnnnnnnnnnnnnnnnnnnnnnnaagtaactgcctgttgcctctgctgccctttgaaccagtgtacagtcgcccagattagggaccggtgaacacctgatccaaacatgtaggatgggggtcttgtcctctttttatgtggtttaattgccaagtgtctaaagcttaatatgctgtgctatgtaaatattttatggatataacactgtcatattttgatgtcaacagagttttagggataaaatggtacccggccaacatcaagtgactttatagctgcaagaaatgtggtatgtggagaagttctgtatgtgaggaaggaaaaaaaagaaaataaaagtgtatttgaaaaatattatcttgggttctttgtaaaatttattttttacatgctgaattagtctggatctttttgattaagagcacaaacgttttgttgtaaaacctgtaaaaaaaaaaaaaaactgggattaatttttagtgctggaactgtctcttataaagtattttaggctgtagataaaatagcatttttaggttagccagtatgactatgcacctaattttttatgagattaaattcataagacttaatttgtacaatagtttgtgaaatatcttgttactgcttttannngcagaccgtggac

SEQ ID NO: 13972 - DNA, 776 bp, Macaca Fascicularis
  misc_feature (1)...(776): n = A,T,C or G
tggctggttattatatcactacattttattgcaatatagtactcannnnnnnnnnnnnnnnnnnnnngtgtacaaagattaaattaagacacggtaaattgactaaatatttggtttttatataaataaaggtcataaccacaccgttgacatgtaatactgttataatacaacagttaaacttgtgagtctacaacagaagtcatctgtagttaaacaggaaacaaagttgaaaaagaccatgttaaaacaaaactactgggactaacaggttgggattgtaagtagcaacaaacatattcactcagctcctgagtatttcaagttttacagtacacattaaaaatgatttcttccatcaacactataaattcaaactgtcggatgtttatgcattttgcaagttacnnnnnnnnnnnnnnnatatgggagtgggggtcggaacatctcccaatttgaagtttacatcacccacatgctaacacaaacacaacttgttccatttccttcccctctctcccccctcccccacaaagaaggcaggatttttggtttcttttaggtaattgttttaaaggatttgtgatgatcaatnnnnnnnnnnnnnnnncagtaatatttaactcttagacaactaagaggttaaagatggaaaataatttctcctaacactaagttagaaaatcatttgcatcatgctgtaaactaggaagcaaatgtaaagcgacaaaaacctgtccccagtacataatttaaaaaatctaatttcaatcagc

SEQ ID NO: 13973 - DNA, 769 bp, Macaca Fascicularis
  misc_feature (1)...(769): n = A,T,C or G
cattagaaatcagagcaaacgagggtctcagtatgaggaaacagnntgccagggaatcacagagatattggggtgcccgtgatggcccccgtgaagccatgcctcgacggcattcaggaagccgtgcaaacatactttttgannnnnnnnnnnnnnngtgattttnnnnnnnnnnnnnnntggtcaagggcatcagggaatttgctccaagcagatagctccttctgaggaaccaaaggcagcaagtttccacgatttctggagagctggtgtaggaagtttatttcttccttttgtgttacatgtgcattaaacagaacaagctgtgtnnnnnnnnnnnnnnnnnnnnnnnnnnnnnnaccgtgagagagcccccaccgtggacaccggctctagggccacaggaaaaggaacacttcaggcattttgcctccagggctcccgctggacaggcgcatactgccctggggagcaaatgtggagagttcacgaactcatgtgcccaacgcatgttatagccagggtcctactaactactcagtaaaagaacgtattgttgtattcctccagtgttaagctatagccatgttaaaagtcaccgtgcannnnnnnnnnnnnnnnnnnnnnnnnnnnnnnnnnnnnnnnnnnnnnnnnnnnnnnnnnatatttttacttttctgatactgtaaagaatatatccagtatgtaaatgaatgttctataaatcctttgtatagtcattttctctgctctttaaatatcatctcta

SEQ ID NO: 13974 - DNA, 717 bp, Macaca Fascicularis
  misc_feature (1)...(717): n = A,T,C or G
ctgtgtcagcatttgannntattgtgaattagccaggtgaatgatccttgaaacatctctttcaggtctggggaaagagacagaatgcccttaaagtgtgaaataaccttatacctgaattacagttttgtgatataaaataaagctgagtataaaataaaaccaatcaaacacagaatttgattggatttgttattcattggtatacaacaatttttattcttatgtgtgctttaagggctgtgttatgctcttatggtactcagttttgtgtttccttttggcattctttgtgcaaaaaagaagcatgtggtggctctcatttaaatttcaaaattattagttttatctttaacagattactgattatacagaagatataatttattggaagaactgccaaatacattttgtccttctaaaaatatggaaatttaaatagtagtctggaaagttaccatatgataatttttaattatgtgatctagacatgccttaggtaactgcagaaatagcaaattaaatgattaatgagcttattagtcatagtaaacatacaaattcctaattctatgacagtgtacatatatgaaaataaatgaaaaaagaactataatattttttaaaatatgcttttatttatatttcacataatgtaaaattctacaaaataaanntagtaggcaaaacccctcagtgtatacctttaaacccata

SEQ ID NO: 13975 - DNA, 753 bp, Macaca Fascicularis
  misc_feature (1)...(753): n = A,T,C or G
gatgggtgctgccnnnnnccannnaccntggccacaccccacgtggtcatgggcagacccctcccttcctgggctgacctgctcccttgaggccagcctgctccctggccgaggctcaggctatccgcccaagctctttgctcattctagggccagtgaaggaaaatgtgataagnnnnnnnnnnnnnnnnnnnnnnnnnnnnnnnnnnnatgtgtcctgtgctccgcaggttgggccgcagcctctgcccggaggtttctatgccnnnnnnnnnnacagaatccagcctagccttagctgcagtctaggtcctgcttagactagaactcctggcttgaccccatctccggttcctgccttggcttctgccccagccccggcccctgcctacatccagacagaaagacaggggatcttggaagacgttccatgctgtggaagatgttccgtgctgtgaactccgggccctcctggtgggaagannnnnnnnnnnnnnnggaggagaagggaggggctggggggttcccaggagccacgcgtggcctgcagagtcnnnnnnnnnnnnnnnnnnnnnccaatatgggctgtgtccgtgaccagaggctggagtggaggtgtgtcacagcccctcaccagggcttgttgtgtggatggggcctgggcctccttcctactggggctcctctgtgggtgaggggccctctggaatggcataccatgagcttgtggcctctatctgctacnatctgcat

SEQ ID NO: 13976 - DNA, 713 bp, Macaca Fascicularis
  misc_feature (1)...(713): n = A,T,C or G
ctcagtgtgtacacagcccccgnnnnnctgcccagtacctgaagctgcgggagcgaatgcagatacagaaggagatggnnnnnnnnnnnnnnnnnnnnnnnnnnnnnnnnnnnnnnnnnnttcctgagtnnnnnnnnnnnnnnnnnnnnntccgaaccctgggttacgtggacgaggcaggcactgtgaagctggcagggcgggtggcttgtgccatgagcagccatgagttgctcctcactgagctcatgtttgacaatgcactaagcaccctgcggcctgaggagattgctgccctgctctctggcctggtctgccagagccctggggacgctggagatcagctcccaaacaccctcaagcagggaatagaacgtgttcgggctgtggccaagcggattggtgaggtccaggtggcttgtggcnnnnnnnnnnnnnnnnnnnaatttgtgggcgagctgaattttgggctggtcgaggttgtgtatgagtgggcccggggcatgcccttctctgagttggcagggctctcagggacccctgagggcctggtggtccgctgcattcagcgcctggctgagatgtgtcgctcactgcggggggcagcccgcctagtaggagagcctgtgctgggcgcgaagatggagacagcggctaccttgctacggcgggacatcgtatttgcggccagcctctacacccaggaatgcccc

SEQ ID NO: 13977 - DNA, 763 bp, Macaca Fascicularis
  misc_feature (1)...(763): n = A,T,C or G
attcagacactgtgcaaataaattnntnnngctannnnnncttaagcaatcagtgtgtaaagggttgagggaagaataagcaagagatacaaggtctcaccttcatctactgtgaggtgatgagaacacgacttgatagtagtatattaacttacttatgcgctgctggatacagtttgctaatgttttgttgagaatttttgcaaatatgttcatagggaatattggnnnnnnnnnntcttttccactgtgtctnnnnnnnnnnnnnnnnatcaggctgatgctggcttcatagaatgagttaggaaggagccctttctccttgattttttggcatggtttcagcaggattggtaccagttattctttgtacatctggtagaattcagctgtgaatccatctggtctagggcttttatgttggttggtaagttttttaatacnnnnnnnnnnnnnnnnnnnnnnnnnnnnnnnnnnnnnnnnnnnnnnnnnnnnnggttcaatcctgggagattgnnnnnnnnnnnnnnnnnnnnnnnnnnnnnnnnnnnnnnnnnnnnnngtgcatagagttgagtgtaaacataacttatatgcactgggaaacaaaaaaaatctgtgtgactcgctttattgcaatatttgctttattttggtggtctggaacnnnnnnnnnnnnnnnnnnnnggtatgcctacagttgcaaaaatgtcatttttcacatagtaaatatgagtgtttgcaataaactatgatattactt

SEQ ID NO: 13978 - DNA, 752 bp, Macaca Fascicularis
  misc_feature (1)...(752): n = A,T,C or G
gcnnnnnnnncagaagccaggtgatctggtcatgtgcaaccagtgtgagttttgtttccacctggactgtcacctgccggccctgcaggatgtaccaggggaggagtggnnnnnnnnnnnntgccatgtgcnnnntgannngaaggaggaggatggcagcctcagcctggatggtgcagacagcactggcgtggtggccaagctctcgccagccaaccagcggaaatgtgagcgtgttctgctggctctcttctgtcatgaaccctgccgccccctgcatcaattggctaccgactccaccttctccctggaccagcccggtggcaccctggatctgaccctgatccgcgcccgcctgcaggagaagttgtcacctccctacagctccccacagnnnnnnnnnnnnnnnnnnnnnnnnntgttcaagcaattcaacaagttaactgaggacaaggcagacgtgcagtccatcatcggcctgcnnnnnnnnnnnnnnnnnnnnnnnnnnnnnnncttcggtgacaccaagttctctgctgtgctggtggagcccccgccgatgagcctgcctggtgctggcctgagttcccaggagctgtctggtggccctggtgatggcccctgaggctggagcccccatggccagcccagcctggctctgttctctgtcttgtcaccccatccccactcccctggtggcctgactcccactccctggtggccccatcccccagttcctcacgatatggttt

SEQ ID NO: 13979 - DNA, 712 bp, Macaca Fascicularis
  misc_feature (1)...(712): n = A,T,C or G
cacagcagagcgcaggagcgctacatngaacgggcgcagcaggagnnnnncggcagaaccggcagagggctgacgaggatgtagaggctgcccagagaaaactgcgccaggccagcaccaatgtgaaacactggaatgtccnnnnnnnnnnnnncatgcatccaattgagcctggagatannnnnnnnnnnnnnngcagctccttcacaggcttccagccccctctgcttgcccgccgtgactcttccctaaagcgcctgacccgctggggatcccagggcaacaggaccccttcgcccaacagcaatgagcagcnnnnnnnnnnnnnnnnnnnnnnngaggctcctgtcccggcttccaccccnnnnnnnnnnnnnnnnnnnnnnnnaccagaaaattagcctctcctagccccttgttcttcccaatgtcatatccaccaggacctggccacagctggcctgtgggnnnnnnnnnnnnnnactaggagagggagctgaggtcctggtgccaggggcccagcctccaaccataaacagtccagaatnnnnnnnnnnnnnnnnnnnnnnnnnnnnnnnannnnnnnnnnnnnnnnnnnntctggggtgttgatccttgagaacttgccctgtgctttagacccaaggacccaacccctgggctgggaaagagtgaacaagcaagctggggccacctgcccccaggtggccac

SEQ ID NO: 13980 - DNA, 625 bp, Macaca Fascicularis
  misc_feature (1)...(625): n = A,T,C or G
actgcaagtcnnnnnnnnnnnnnnnnnctgtatgtgaagtgtccaactacctctttcnnnnnnnnnnnnnnnnnnnnnnnnnnnnnnnnnnnnnnnnntttctccagaagaattcctctaagtttcatttcagacnnnnnnnnnnnnnnnnnnnnnnnnntgcattccacacccgcctcatggagccagctgtggagcccctgacgcaagttttaaaggcaattgacnnnnnnnnnnnnnnnnnnnnnntctactccaatgtccacgggcatagatacatgcatcccagccannnnnnnnnnnnnnnnnnncagcaggtggtctccccggtgaagtgggagcagacgatgcatgccatatatgaaaggaaaaagggcagagagttcccccaaacttttgaagtaggccccggcaggcagctgggagccatcctgaaaagctgtaacatgcaggcctggaagtcctacagcgccgtgaatgtgctgcagaccctcgaacctgtggacctggaccctgaggagcccccaagatgactgcaggtggctcaaatgggataacgccctctgccctcctgaggagaggctgtaggctgcacctgccacaccctcccttcctaatggctcct

SEQ ID NO: 13981 - DNA, 451 bp, Macaca Fascicularis
gaagaatttaaagccagcatcaacagagttaacagttgtcttaagaagaaccttcccgttaatgtacgttggctactttgtggctgcctttgttgctgctgcacgttaggttgcagtatgtggccagttatttgcctcagtaaaaggacacgaagatcgattgagaagttattagaatgggaaaacaataggttataccacaagctgtgcttgcattggagagtgagcaaaaggaaatgtgaaacgaataacatgatggaatatgtcatcttcatagaatttttaccaaagacaccgattttttgaccagattagcatttactttatttatagagactttccaagtatgttgtctttccaatggtgccttgcttggtgctctcttggtggtgacataacattggttttacagaatcgtgtggtgttttgtttgtttgtttgtttgtttgtt

SEQ ID NO: 13982 - DNA, 739 bp, Macaca Fascicularis
  misc_feature (1)...(739): n = A,T,C or G
tacatagccnncnnnntgcctagaaagctggctttactcggcgcnnnnnnctttgaactttgtgaagcgtcaaggcgtgcattgaatnntctaggaaggcttttcatggggcaggggcaggctctgttagcagaagaatggcagtgtggccaagggcctagtcactggttcccaccgttgtattctgagcctttgtgctccagacatcaggtcgtctctggttcttgggggcaagccgttgaggcggattttttactctgtccaccaaaatctaacaatcgggactgaatggagcccagacaggctgagctctgggtttgcctgacaagtgtggtctgttccctccctgtcccaggccnnnnnnnntacgccgacatcaagatggagaatgggaagtccaaggggtgtggtgtggttaagttcgagtcnnnnnnnnnnnnnnnnnnnnnnnnnnnnnnnnnnnnnnnnnnnnnnnnnnnnnnnnnnnnnattgacgttcgaattgatagaaacgctnnnnnnnnnnnnttttttaaacatcgatacgagacctctgaatttgtattttttcttgttaaccattttaatttgttggctggatgtataaagatgtttaaaaaattcagttgctttttggggtaatttgaattacttttttaatgactggggttccatttgactgtttgcattgagattgcaatgtgcgcaattttttttgtagttgtggcatcttgtgaca

SEQ ID NO: 13983 - DNA, 704 bp, Macaca Fascicularis
  misc_feature (1)...(704): n = A,T,C or G
agacnnnnnnnnnnnnnnnnnnnnnnnnngtgggcgacaccatggacgttctgtttgagaagtggnnnnnnnnnnnnnacctcggcacgcagttnnnnnnnnnnnnnnnnnnnnncttcagnnnngagcagtacagaacaggaaagcccatccctgaccagcttctcaaggagccaccattccctctgagcacacnnnnnnnnnnnnnncccatgtccctggaggcctggctggacagccaccgcagggacctgcaggcaggcgcgcnnnnnnnnnnnnnnngggacacctatgagacccaggnnnnnnnnnnnnnnnnnnnnnnnnnnnaaggcctgagacagaatgtggacgtgtggctgtggcagctggagggctcctcggtggtgacaatggggggacggcacctgagcctggcccctgannnnnnnnnnnnnntgctnnnnnnnnnnnnnnntgcctgggagcgaacacaaggctccgtggccctgtctgtgacccannnnnnnnnnnnnnnnnnnnnnnnnnnnnnnccctgttgccatggcctgaagcagccacagcccagatgccacgcccctgagcgggcagcaactccccgtcttctccggcagcctcagcctactgccttgccagtcttgccaggtggtctactcctggcccagctcctgaccattcttctgtccctgcagactcagtgcagc

SEQ ID NO: 13984 - DNA, 714 bp, Macaca Fascicularis
  misc_feature (1)...(714): n = A,T,C or G
tgagatgatgtngactgcgggtgtaggtccggtgggggttganntgctcctgcaggaactcgtaggtgatgaagtgnnnnnnnnnnnnnnnnnnnnnnnnnnnnnnnnnnnnnnnnnnnnnnnnnnnnnnnncccccaacccctcggtcctccacacnnnnnnnnnnnngtngagagctgaccggtgctgcgagttgnnnnnnnnnnnnnnnnnnnnnnnnnnnnnnnnnnnnnnnnnnnnnnnnnnnnnnnnnnnnnnnnnnnnnnnnnnnnnnnnnnnnnnnnnnnnnactccagaaaattaccctctgcgatcgggtgttctcaggaagttcccggaacctaaaatcagacggaacccaggacttagctttctaagaagcaaaatgtactaccagctccacccaggtgagcattgactcttaaaaccctaaagtgatggtggaaatatgataaaaatgggggtggttaatttaggcacattcacccacattttaatcttgcaaaaacctcgttttctttcttgtagtcaaccctgggaaaaagcgaaacctgcaagtnnnnnnnnnnnnnnnnnnnnnnnnnnnacggctttttccactgtctagatgttaactctctcttgtcccttgcctttgtctacacattaactcacatttgcccttaagctggggcccgtgaaaggagataatatcatatatacagctgagaagg

SEQ ID NO: 13985 - DNA, 772 bp, Macaca Fascicularis
  misc_feature (1)...(772): n = A,T,C or G
ttgaaagggatnnnnnaggatcgtggtctttccaaataccctaatctgttaaatcaattactcgatttacaaccaagtcatagttccccctacctaattgcctttcttgtgnnnnnnnnnnnnnnnatgctagaaaaccagtgtgacaataaggaagacattcttaataaagcattagagttatgtgaaatcctagctaaagaaaaggacactataagaaaggaatattggagatatattggaagatcccttcaaagcaaacacagcacagaaaatgactcacaaacaaatgtacagcaataacaccatccagaagaacttgatggaatgcttttattttttattaagggacactgcaggaatttaaaacgagagtggtccctccctttgcctgtggtgtgaaagtgcatcacacaggtaattgctttttaacaagaactgatgctccttgggtnnnnnnnnnnnnnnnnctagctctaagtaatgtgattcttctaaagcaaagtcattggatggaggaggaaaaaaaagtcccataaaggaacttttgtagtcctatcaacgtgtaatctaatcccttagcatcaactcctccctcagtggtacacgcatcaagatttgtagcagtaataactgcgggtcacttgtatgtaatggatatgaggtagctgaagtttggttcagtaagcagggaatacagtggttccatcagagctggtctgcacactcacattatcttgctatcactgtaaccaactaatgccaaaagaat

SEQ ID NO: 13986 - DNA, 661 bp, Macaca Fascicularis
  misc_feature (1)...(661): n = A,T,C or G
acctggtatatgagcaggcgatgaaaggcacgtnnnncgtcgggcggcaggagctggcggccannnaggacacgtttctgtgctgtgggaagaggtctcctttcagccgtctggggagcacagaggctgacctatgtcagggacaggaggcggcaagagaggtgtccgccttgctcctcagctcattcctgtggtttgccatccgctctggctgcagcttggaccgcaagggccaatacaccctggccccacgagcatgtggccgccagccccaggagcccagcgtcttcagacgctcccagggtggacccgcacattgtctccgctnnnnnnnnnnnnnnnnnnnnnnnnnnnnatactcgggtagtcttcgnnnnnnnnnnnnnnnnnntgctgcgcctgggcccctctcccaccacctgcctgcccacagagctctccagggcagaagtccgggtgtgctcagcgggtgccctgcgaggggtctctcgggctgacgtcaggccttggtgggctgcactctcatctggaggctccagggaagcgtgtgcctccaggaccattcannnnnnnnnnnnnnnnnnncctcatggctgtaggactgaggttcccacgtccttgtccctgctcccgcagcccctccaccttcaaaccagcaatg

SEQ ID NO: 13987 - DNA, 1129 bp, Macaca Fascicularis
  misc_feature (1)...(1129): n = A,T,C or G
tagttgctgcaaatatnnntgaaaagacnnngaaacgagaaggtgtnnnnnnnnnnnnnnnnnnnnnnnnnnnnnnnnnnnnnnnnnngatcttagtacaaaacgtgttaaagtttctgttaaattttggtactgttagtttttaccttggatacaatgcaatgcaggatttttttcctactatgtccatgaagccaaatccccagtgtgatgacagaaattgcaggaagcagcaggaagaatataagaaaaaggtagcagcactgcctaaacaagaggttatgcaagaagaggaagagataatccatgaagataatgaatggggtattgagctggtatctgaggtttcagaagaggaattgaaaaattcttcaggtccagttccagacttacctgaaggaattacagtggcatacacaattccaaaaaagcaagaagattctgtcactgaggtaacagtggaagattctggggaaagcttggaagacctcatggccaagatgaagaatatgtagataatggactgggatatattttatttctcatgttaaagcctcttcccttgaaattaaaaaaaaaaattttaactgataaaacttagggcaacatttattaatgtatattcttacctgaattgttatactttttgaaaatcctgtgacttgcctatttctccccgctccagtgaaatcattgactctcctaaaatgtatgtttcattctagtaagaaaacctcaaaggatattgtaggatataaatcttacatgaaaacacagctgttgaaatgttttggccttttggagtggggaaaggacaaatctgatcctgtaatctttttctttccagtaatcccttgtgtctgttgcatgaggacatggacaataaagcagtacatgattctcagatacagggagaaggacaaggcatacagcttattgattagagctggcaagcatctgctcattatgtttggaattgctttctataagaaaatttcccactacttctaacttgatcaacaatgaattcaaaatagttaatctatgaaataacatcctctnnannntttgctgatgaaatacaagttgaaatgtagttatnnnnnnnntctgtaacctgtggattata

SEQ ID NO: 13988 - DNA, 1150 bp, Macaca Fascicularis
  misc_feature (1)...(1150): n = A,T,C or G
gcgcgagcgcaagcgtaagatctcctgnnngtnnntcgcgctcgacgacctcgatgaccaggcggacgcggccgaggccaggcgcgccggaaacctgggcaagaaccccgacgtggacaccagcttcctgcccgaccgcgaccgcgaggaggaggagaaccggctccgggaggagctgcgccaagagtgggaggcgcagcgcgagaaagtgaaggatgaggagatggaggtcaccttcagctactgggacggctcgggccaccggcgcacggtgcgtgtgcgcaagggcaacacggtgnnnnnnnnnnnnnnnnnnnnnnnnnnnnnnnnncgcaaggacttcctggagctgcgctccgcgggcgtggagcagctcatgttcatcaaggaggacctcatcctgccgcactaccacaccttctatgacttcatcatcgccaaggcaaggggcaagagcgggccgctcttcaacttcgatgtgcacgacgacgtgcgcctgctcagcgacgccaccatggagaaggacgagtcgcacgcgggcaaggtggtgctgcggagctggtacgagaagaacaagcacatcttccccgccagccgctgggaggcctacgaccccgagaagaagtgggacaagtacaccatccgctgacacccgcccgccagagcagaaaccgggggagacacactcctttctatgccccgccaccagtcacttgatttcctgaccttgatttcttcccccgaatttaataaagacagagggttctcatgattcatattggttgtcctattgctgatgttatgctttggttgtttggttggtcttttctgagtattttagtgtccctacctggatttgctgcattgctctgctgagctgtattgaaaccatgtctgggcccactgtgagacagaaattagaagaggaggcacattttttacctcatggttatgagcatggtcttgggggccacagtgactgagtttgattcccgacacagcttcctccttgctgtgtagttttgggtaagcttattaaacccccatgcctcactttggtcacctgtaaaaggaaataacaagagcacttactttaaaagatggatgtgaggtttgagttaatatttgtaaaacacgtagcactaataaa

SEQ ID NO: 13989 - DNA, 764 bp, Macaca Fascicularis
  misc_feature (1)...(764): n = A,T,C or G
acaggggagggaacggatnnnnaagncagggaccgcaggcagcnttccagatacacgggaagtgtgatgatgtcatgcggctcctcatggccacgactcattcaccttctccgcctggcacttcttgtggcaggatcccattttctcactggcgacnnnnnnnnnnnnnnnnnnagaaggcagccnnnnnnnnnnnnnnnnnnnnagaagcagagaggaagccccgcctggggaccggggtgcaccgcttagctcggcccccatcctagggggctggtttggcaggggctgcacaaaacgcacaaaaaagaagaaagtgacgtaacnnnnnnnnnnnngaagaacagttggcactttgcagatggccagcgtcacggtgaaggctggcttgtccccacgggtctagtgagaactctttggggatgacgttttcaccgtgacatttttagccatttgtccttgtggaagccccttgcactgctgcggttgtccnnnnnnnnnnnnnnnnnnnnnaggacacctgcccatccggcctctatgtcaagaggtggcagnnnnnnnnnnnnnnnnnnnnnnnnnnnnnnnnnnnnnnnnnnnnnnnnnnnnnnnnnnngcgcccagcggcctttcctcactcgccaggccagtctcagggcctcaccctatttctactacttaacgaaaaagtgtgaaaactttatagaaccctctctgtactggacgtgcggcagaggggtggctccgagcctcggctctatgcagac

SEQ ID NO: 13990 - DNA, 646 bp, Macaca Fascicularis
  misc_feature (1)...(646): n = A,T,C or G
gnctcannngagttccagcttctacggcattgtcattttcctaatacnnnnnnnnnnnnnnggcagcttttgcttgggtggagtacttataaatggcttggatatcgctcccagatattttggatttattaaagcgtgttcaaccttaagcggaatgctaggaggactaattgcttccactttgactggattgatccttaggcnnnnnnnnnnnnnnnnnnnnnnnnnnnnnnnnnnnnnnnnnnnnnnnnnnnnngtgactnnnnnnnnnnnctaccttatagttgctaaagcagaaannnnnnnnnnnnnnnnnnaaagacaacacacacgtctctgaagatggagttttgctctnnnnnnnnnnnnnnnnnnnnnnnnnnnnnnnnnnnnnnnnnnnnnnnnnnnnnnnnnnnnnnnnnnnnnnnnnnnnnnnnnnnnnnnnnnnnnnnnnnnnnnnnnnnnnnnnnnnnnnnnnnnnnnnnnnnnnnnnnnnnnnnnnnnnnnnnnnnnnnnnnnnnnnnnnnnnnnnnnnnnnnnnnnnnnnnnnnnnnnnnnnnnnnnnnnnnnnnnnnnnnnnnnnnnnnnnnnnnnnnnnnnnnnnnnnnnnncacgcgtgacccactctatgtttcaatatagtttt

SEQ ID NO: 13991 - DNA, 712 bp, Macaca Fascicularis
acggacgtaccgcttgctcggaagctttcggacctgtattgggaacaatgtttttgggaacgcgtgcatctctgtgctgagccctggaactgtgataacggagcactatggacccaccaacatccgcatccgatgccatttaggtctgaaaactccaaatggctgtgagctggtggtggggggagagccccagtgctgggcagaagggcgctgccttctgtttgatgactctttcctgcatgctgcgttccacgaaggttcagcagaggatggccctcgggtggttttcatggtggatttgtggcatccaaacgtcgcagcggccgaacggcaggcccttgatttcatctttgctccaggacgatgagagcattacccgtgctggagtcggcaagaggggccgaggtggggtctgggcagactgtggtccggtccagtccctaccggtgtgatgattccatgctcagaaacctgcctcagcggagagctcttctttgggattttatatcatgtcgggtccctctttcctttggttattgtaaatggaaacttttcagcttgtatttccttagatttttttttttccttccaatcatttgcttcagagattccttttctggcctaacagcgcattcctttgattctgtgaccagagacttagagcccttgtaagtctgtcttctgttcctacttgttttttttcaggctccga

SEQ ID NO: 13992 - DNA, 758 bp, Macaca Fascicularis
  misc_feature (1)...(758): n = A,T,C or G
gatggagggcagctacaacaaagtgttcctggccaagggtaacatccccgctgagagctacaccttcttcattgacatcctgctggacaccatcagggatgagatcgctgggtgcatcgagaaggcctacgagaaaatccttttcactgaggctacccggatcctcttcttcaacacacccaaaaagatgaccgactacgccaagaagcgagggtgggtcctgggccccagcaactacnnnnnnnnnnnnnnnnnnnnnnnnaagccggaagacaccaccattccctccacagaactggccannnnnnnnnnnnnnnnnnnnnnnnnnnnnnnnnnnnnnnnctgagcccactgggcactgggtggggcagggcatgagttatttaaaacagttacactgcagggtttcgtccaataaaggtggattgacattccctcttccaggcccttgtctccccagttgggatggcagagagacaagttcttatctctgaagaacttggaggttttggggcgctcaggggtnnnnnnnnnnnnnnnncaactgggtaagcctctgtttggtgggcattgctcagggcctcaaacacagacgcccnnngtagggccccagcagcnnnnnnnnnnnnnnnnnnnnnnnnnnccaggtagggggactgttctagcnnnnnnnnnnnnnnnnnnnnnngtgggccagggtaccagattttttcaacaaagcgggtgaagtgtcctattaaaaagaataaatgttggtg

SEQ ID NO: 13993 - DNA, 753 bp, Macaca Fascicularis
  misc_feature (1)...(753): n = A,T,C or G
annnnnnnnnnnnnnnnnnnnagcagcagcnnnnttctccttatttaaaatnnnnnnnnnnnnnnnnnnngagaagctggatgtatacatctaccaagaaataattcttgctaatcacttcaatgaaggaggagcagnnnnnnnnnnnnnnnnnnnnnnnnnnnnnnnnnnnnctttgttttctcactattgcaagagaccagaaaattattttaaacacataaaagaagcctgtattnnnnnnnnnnnnnnnnnnggttctgcactactcctgaaagatgtacnnnnnnnnnnnnnngggcaacttcctgccacagcagcattaaatgaagttggaatttacaaactggctcaacaagatgttgagattctacttaatttgaggacaaattggcctaatactggaaannnnnnnnnnnnnnnnaaacgttttcttggtttttgtttttaagaggaagccaattggatttcaagttatacgatgaaattctgaattaatgaaactggaaaactttataggattaattatcttggatttatggcgttattaaaatgctgaccatatttccttcatcctcttgttcctaaggaaacaaaaacagaaaacgaaacaatgaaaactcattctatttacaagtataaatgctgagtatgtctgttgaagacaagagcagagatattaaattataaccaactttcaatttcctgtgctaattaaggaaaattctgttgtgcataatcaaacatagccaa

SEQ ID NO: 13994 - DNA, 735 bp, Macaca Fascicularis
  misc_feature (1)...(735): n = A,T,C or G
tccatnnnnnnnnnnnnnnnnnnnnnnnnnnngctgcccacggccacagagagaaagctgacagcatagaatccagcccgaaggaggaggactgtaccagcccctagctgaggatattctgcatggggcaatgtagaagggggttggggaagaagtgcacacaggctcagggagggtaggggcctcagaggagcatccctgactcccaaggacattgcctcttggggtnnnnnnnnnnnnnnnnnnnnnnnnnnnnnnnnnnnnnnnnnnnnnnnnnnnnnnnnnnnnnncattccctgtcccgacacccaggcccagcacctccaccctgcacacgtagatgccggcgtcatggcctcgcacgtcccagatatgcagctcagcctggtggtcacggaggaaacgggaagaagaaagtggggccaggcggccnnnnnnnnnnnnnnntccattcctcacctccttccctggagccacctcatctcggaaccatgtgacggagccaatggccagtctcccttggctggcattgaaggagcagggcaggaaggcannnnnnnnnnnnnnggtannnnnnncagggggctgggacacccagagagcacaggatcctgggggcagaaggaagacccagagaaacacctccccagttactccaaagagaaaagacaacagagcttggagtagaacatcccagctgtctctgggcatagggtgcatggaatagatactttg

SEQ ID NO: 13995 - DNA, 764 bp, Macaca Fascicularis
  misc_feature (1)...(764): n = A,T,C or G
gagcagcgttctgcagggtgtcaaggctgacctttannncacaggtgannnnnnnnnnnatgatattttggatgctgcttcccaaggaataaatgtcatcctctgtgaacatagcaacactgaacgaggctttctttctgaccttcgagatatgctgggttctcacttggagaataagataaatattatcctatcagagactgacagggaccctcttcaggtggtataattgcagaaacatcaggataacacattgtacaaattagttggatgccaacttgaatttgtaacatgagtcagtgggactagtgtgcttctagaagagtgtcttagagnnnnnnnnnnnnnnnnnnnnnnnnnnnnnnnnnnnnnnnnnnnnnnnnnnnncctttttttttttttgnnnnnnnnnnnnnnnnnnnnnnnnnnnnnnnnnnnnnnnnnnnnnnnnnnnnnnnnnnnnnnnnnnnnnnnnnnnnnnnnnnnnnnnnnnnnnnnnnnnnnnnnnnnnnnnnnnnnnnnnnnnnnnnnnnnnnnnnnnnnnnnnnnnnnnnnnnnnnnnnnnnnnnnnnnnnnnnnnnnnnnnnnnnnnnnnnnnnnnnnnnnnnnnttgacctgcgtgatccacccgcctcggccnnnnnnnnnnnngggattacaggcgtgagccaccacgcccnnnnnnnnnnnnnnnnnnnnnnnnnnnnnnnnnnnnnnnnnnnnnnnnnnnnnnnnnattaaataacaagtattcatataaaatc

SEQ ID NO: 13996 - DNA, 762 bp, Macaca Fascicularis
  misc_feature (1)...(762): n = A,T,C or G
tcnnnnngantnnngagcaggggctaggcttgcaggtgagataatgggccagggcacccagtccagaaggagcagtggcacctgggcagtgccagggcttagagcctgctgctccttttcagtagnnnagaggctcatcagtggtgtggtggggtgggctctcccctaggcttgggcaaggcagccacttgcccttcctctcccttagtgttccctggcctcccnnnnnnnnnnnnnnnnnnnnnggagatggagggattattgtgcagaaaatgagttggatggagataaagagctcccatcnnnnnnnnnnnnnnnttaagatgatggagattcctaagattggtggagttgggcaatgcacagccatctgactccttcagggtgctcttgatgggctggctgtatgggagactcagtcccagcctctctcctctacaactcctgccactgttggccatgtnnnnnnnnnnnnnnnnnnnnnnnnnnnnnnnnnnnnnncagagcaccctgagaagtattgcagggaggtgttaagaagagaaatctggagaaatctgnnnnnnnnnnnnnnnnnnnnntgttgtcttggtgtatcccttgcctcatagtcaatatatttttttctttggtgagtcaccagtgacccgagccctccacaccagcctcctgtatctcannnnnnnnnnnnnnnnnnnnnnnnnnnnnnnntgcatcaggaatgggtgtatgggtgtgtgtgggtgtgagtgtgggtgtgta

SEQ ID NO: 13997 - DNA, 737 bp, Macaca Fascicularis
  misc_feature (1)...(737): n = A,T,C or G
gctgggaatgtaaagctgggggacnttngggccagcaaacgcctgcagacgatctgtatgtcggggacgggcatgcgctccgtcactggcacaccctactggatgagccctgaggtgatcagcggcgagggctatggaaggaaagcagacgtgtggagcctgggctgcactgtggtggagatgctgacagagaaaccaccatgggcggagtatgaagctatggccgccatcttcaagattgccacccagcccaccaatcctcagctgccctcccacatctctgaacatggccgggacttcctgaggcgcatttttgtggaggctcgccagagaccttcagctgaggagctgctcacacaccactttgcacagctcatgtactgagctctcatggccacgcagctgccggttgccctttgctgcatggcagggggctgctgcagggctcagtgaagttgctgcttctcccaggcaaggctgtggaccatggagtggcagcccagccattgtcggtctgtgccccttccgccactggggctcagagccggggtggggtggctgcagcctcaggactgcgagcccccagcctgtcagatccaggagctccagtgtcctgagctcagcgtggaggggtaggggctggaaacagtgtgcaaggccgccatgggccccaccctcggggatgtgtcctgacactgcaatcggcaccgaagcccagagggtctgggggcacggga

SEQ ID NO: 13998 - DNA, 1168 bp, Macaca Fascicularis
  misc_feature (1)...(1168): n = A,T,C or G
agctcatgaaggcaatcgattttgagtactatggttacctagatgaagatgatggtgttattgtgcctttggaacaggaatatgaaaagaaactcagagccgagttagtggaaaagtggaaagcagagagagaggctcggctggcaagaggagaaaaggaagaggaggaggaagaggaggaagagatcaacatctatgcagtcaccgaggaggagtcggatgaggaaggcagccaggagaaaggaggggatgacggacagcagaagttcattgctcacgtccccgttccctcgcagcaagagattgaggaggcactggtacgaagaaagaaaatggaactcctccagaagtatgcaagcgagactctgcaggcccaaagtgaagaagccagaaggctcctggggtattaggacccagctggggctctccttgaagttcttccgtcccacagtggtacctcaggacccagggctgcagacaggcaggctagtgctgagccccattctcagccttccttccctctccttatctcgtgctgactcgacggtaagggtctgtccctggtcttcctggtaggttttgtacacatattttgctactgtgtggatccatttatttttattgtggagnnnnnnnnnnnnnnnnnnnnnnnnntgcctgtatctgattttgccttgcattgtgattttgaggagagaagaatcaattagtggcaaacatttaaaaatgcaattttttgcagaccaaagtataattttaaaaagtgcaaattttctaaaagacaaatcttctcttgaaaaatgagatgatgtggccatgcgtgnnnnnnnnnnnnnnnnnnnnnnnnnnnnnnnnnnnnnnnnnnnnnnnnnncacgaggtcaaaagatcgagaccatcctagccaacatggtgaaaccccatctctactaaaaatacaaaaaaggccgggcgcggtggctcacgcctgtaatcccagcactttgggaggccgaggcgggcggatcacaaggtcaggagatcgagaccacnnnnnnnnnnnnnnnnnnnnnnnnnnnnnnnnnnnnnnnnnnnnnnnnnnnnnnnnnnnnnnnnnnnnnnnnnnnnnnnnnnnnnnnnnnnnnnnnnnnnnnnnnnnnnnnnnnnnnnnnnnnnnnnnnnnnnnnnnc

SEQ ID NO: 13999 - DNA, 681 bp, Macaca Fascicularis
ggtgcccctggagatggtgcacggcctgctccgcatcagcctgctctacctggcaggcgtgctggcaggctccctaactgtctccatcaccgacatgcgggccccggtggtgggaggctccggcggggtctacgccctgtgctcagcacacctggccaacgtcgtcatgaactgggctgggatgagatgtccctacaagttgctgaggatggtgctggccttggtgtgcatgagctccgaggtgggccgggccgtgtggctgcgcttctccccgccgctgcccgcctcgggcccgcagcccagcttcatggcgcacctggcgggcgcggtggtgggggtgagcatgggcctgaccatcctgcgtagctacgaggagcgcctgcgggaccagtgtggctggtgggtggtgctgctggcctacggcaccttcctgctcttcgccgtcttctggaacgtctttgcctacgacctgctgggcgcccacatccccccaccgccctgaccggctacctgaggctgcagaggccagggctcggcatatggtggccgcccaccaggggccttcacgtctgccctttgtgaacggacatctcagggctgctgcgcccctcgggtgtgggtggcctcagaggagaccctgtcccagccacccccctgccccccaggacttgcggtctgagc

SEQ ID NO: 14000 - DNA, 745 bp, Macaca Fascicularis
  misc_feature (1)...(745): n = A,T,C or G
gcccgtggtggcagtggctgccccggcctnnnnagagagcagcagcaccaaccacagcatcggnagcacccagagcaccccctgctccaccagcagcatnnnntagccccggccccccacgcttgcccagcaggagagactgagcagccgccagccgggagcaccgctgtgaactcaccctgggagccagtcctccactcgacccaggatggagcctgctctccgtgcccgcccttcccacctccctctcagacgcctgctgccagtggggccaatgccttggaacaccttggggtccctccaccccaccccacagaaccttcaacccagtgggtctgggatatggnnnnnnnnnnnnnnnnnnnnnnnnnnnnngccacactgttgtaaaaccccaagcccctgtcatttgaacctggatccagcactggtgaactgagctgggcaggaggggagaacttgaagcagatccaggccagcccagccaggctgacagcacctccccccgagaaacggaagagggcccagcctagagccacctggatctatcccttcggcctccacacctggacttgcctaactggcgggggagacaggagcctagcagagcccagcctgggagcccagagggtggcaagaacagtgggcgttgggagcctagctcctgccacatggagccccctctgccggtcgggcagccagcagagggggagtagccaagctgcttgtcctgggcccgcccctg

SEQ ID NO: 14001 - DNA, 632 bp, Macaca Fascicularis
  misc_feature (1)...(632): n = A,T,C or G
aagctgtnnnnnnnnnnnnnnnnnnnnnnnnnnnnnnnnnnnncacaaacttcaagagcagcgagattgagcaggctgtgcagtcactggacagaaacggtgttgacttgttaatgaagtacatttataaaggctttgagaagcccacagaaaatagcagtgcagtgttactccagtggcnnnnnnnnnnnnnnnnnnnnnnnnnnnnnnnnnnnnnnnnnnnnnnnnnnnnnnnnnnnnnnnnnnnntaaaaaaaaataaaaannnnnnnnnnnnnnnnnnnnnnattctggatgcccaggctggtgaagaagggattgacaatggaccatcttctaggaactcccaagtaaactatttcaggacatgtatctgctgaaatgtattttattttcaaggnnnnnnnnnnnnnnnnntatttcctaaatcctgtttaggatctgatagtctatgcctttgtctccgagtactnnnnnnnnnnnnnnttgacgatctaccagagtggcagctggcgttggtcaggtgcacctgtgtgcactgggggagggatggtttgggcaggtgcagatccaagggctgtggtaaacgggagagcttgtgtttttgaagtggaaaaaaacccaagagtttgt

SEQ ID NO: 14002 - DNA, 719 bp, Macaca Fascicularis
tgatagacttgatatctttgatttctaaatcatgttgaagatggtttgaaggaccattatgatattaagatgctgacatttttaatgttggtgagactttctaccctttgtccaagtgcagtgctgcagaggttggaccgacttgttgagccattacgtgcaacatgtacaaccaaggtaaaggcaaactcagtaaagcaggagtttgaaaaacaagatgaattaaagcgatctgccatgagagcagtagcagcactgctaaccattccagaagcagagaagagtccactgatgagtgaattccagtcacagatcagttctaaccctgagctggcggctatctttgaaagtatccagaaagattcatcatctactaacttagaatcaatggacactagttagatgtttgatcaccatggggaccattacagatgaccatacaatgcactgaattgacaggttaatcataagacatggaaagagaagtgtctaaaagcttcaaaatgttccacttttttttccttcgtggagactgtttgtttggctttcttccattgttgtttttgtagcatttatttcagaaatgtgtatttccataatccagaggttgtaaaaccactagtgttttagtggttacagcaacatttgaaatggaaactaaaagttaggattttatggagtatggagataaggtccagtatctatttaccctgtaatgt

SEQ ID NO: 14003 - DNA, 735 bp, Macaca Fascicularis
  misc_feature (1)...(735): n = A,T,C or G
ggtagatgtgacaggaaaggaggctngggacctgggtgnctgcagagactctgtgcgcaggaaggggcactttttgcttagttccaagagtggcttctggacaatttggttgtggaacaaacaaaaatatgaggctggcacctacccccagactcccctccaccttcaggtgcctccatgccaaattgggattttcctggactatgaggccggcatggtctccttctacaacatcactgaccatggctccctcatctactccttctctgaatgtgcctttacaggacctctgcggcccttcttcagtcctggtttcaatgacggaggaagaaacacagcccctctaaccctctgtccactgaatattggatcacaaggatccactgactattgatggctttctctggacactgccattctccccattggcaccacttctcagccacaaaccctgcctattttccccatgaactctgaaccacctttctctctgcagaggcatctggatcccagcaagcgagctttagcagggaagtcacttcatcatcaacattcctgccccagatggctttgtgattccctccttatatttggcccaaactcatcttgatcaaccaaaaacgtgtttctgccttctttatgggacttaagttttgttttctcctctccatctctagggtgtcatctttgatgagatctctattatatctggtatggttgcaaaaagactcctaa

SEQ ID NO: 14004 - DNA, 712 bp, Macaca Fascicularis
tccagtgtgattgattcagatgaaaaatggctctgtcggcagtgtgtttttgcaacaacaacaaagaggggtggtgcgcttaagaaaggaccaaatgccaaagcattgcaagtcatgaagcagacattaccctatagtgtggcagaccttgaatgggatgcaggtcataaaaccaatgtccagcagtgttactgctattgtggaggccctggagactggtatttaaagatgctacagtgctgcaaatgtaagcagtggtttcatgaggcttgtgtgcaatgccttcaaaagccaatgctatttggagacagattttatacgtttatatgctctgtctgcagttctggaccagaatacctcaaacgtctaccattacagtgggtagatatagcacacctatgcctttacaacctaagtgttattcataagaagaaatactttgattctgaacttgagcttatgacatacattaatgaaaactgggatagattgcaccctggagagctggcagacacaccaaaatctgaaagatatgagcatgttctggaggcattaaatgattacaagaccatgtttatgtctgggaaagaaataaagaagaagaagcatttgtttgggttgcgaattcgtgttcctcctgtgccatcaaatgtggctttcaaagcagagaaagaacctgaaggaacatctcatgaatttaaaattaaaggca

SEQ ID NO: 14005 - DNA, 965 bp, Macaca Fascicularis
  misc_feature (1)...(965): n = A,T,C or G
cggtaactaggtgtctcagggctgggttnnggtccaaagtgtaagganccnntgcccttagtggagagctggagcttggagacattaccccttnnnnnnnnnnnnnnnnnnnnnnnnntcttgggaagctgctttggtccttggaagtagagctgggaagcttcctttgcctctaggtgagttgtcatgagggtaagttgaggttatcttgggataaagggccttctagggcacaaaactcactctaggtttatattatacgtagcttatattttttactaaggtgtcaccttataaacatctatataaatcgacttctttttcttagttgtatggccaggcagtcccctttttaggagttggcttctgcaaactcaatccattgaactaactgttggggagcaatttggtagttgtagacatttgcagggaagggagatgtctgattctaaatgggagttgatgctcaggtccccagccatgtttgcgtccagccctgagacatgtaggaaacaccttccagacccaggctctgaagattcccagaagccacaaggattgaagggaaaaggtgatcctggtaactgttctaggattgctcnnnnnnnnngatggtgttgctaaatttaaaattaaacaaaaaacccaacaagagcttttaaagtgtcttcttcttctatttcattgtatttttttttaacttgccccaatgatagaaaagtcttttgttgaaatgattttgatgatttttgttctatgttgtttataaaaggaaaagaaatatacaaactttgacttttgtgattttgtgaaggtttctttaagatgtgcattcctttctgctgctctctagtaaatgttttactactgggacctgtggatcgtttgtcatttctgtctcactatgagttggtacatcttagaatagtgccgcnnnncggtgtgcgtactcannntgtagggaa

SEQ ID NO: 14006 - DNA, 701 bp, Macaca Fascicularis
  misc_feature (1)...(701): n = A,T,C or G
agcagggcagctgcagggnnnnngaggccggaaggacactgcacagaacagactgcgttactattatttttacataaaagtatacatttgnnnnnnnnnnnnnnnncaaaaataaacaaaaaatcctttagaattctttctgcaacaaaatatctttttgagaaattgttagaacagaaaaacnnnnnnnnnnnnnnnctgtataacatttgcttttatgaggacgatatcataagcattatatgtataatatgatattataaatcaaaatgcctgcacccactttagggcatagctattgatttattaatattatattattattattttggnnnnnnnnnnnnnnnnnnngatacaattttttatgttttcagttaacggtatattttcttatttgcttatttggtttctgcctctgtacccaatatcttcttgcttaaggtagaaaagtgtttgtttagctctatctccagtttgttttctcatttgaatgttgaaggtaaaattgatataccagtttnnnnnnnnnnnnnnnnnnnnnnnngcactaaaccacttcataagaagtagatacacatttttgtaacactatttagggcttttgtggttaattttaaaggaaaccaccctttctacaggaaacaagggctcgggattcttccagaanaccttataaaaatgcagtctgcagtgccatcaat

SEQ ID NO: 14007 - DNA, 687 bp, Macaca Fascicularis
  misc_feature (1)...(687): n = A,T,C or G
gccggggggccagnnnaaagaagacaggccgtccagcccgtgccnnnnngcggcgggggcatccagcaagcctgcccaccgcctgctgcctcacctgcttcgccacagactcttgttcccagccctttggggcctccgtgtttggggtgaggggagctgcttagagactgtgcccgtccttggccccccaccctgaagtgccagcaccaccagcaccagatcctccgccgccacaccgcactgaggacacgccggccgggccgcctcgtctcaagttgtataaagttgtctccgtgtcccctccttcctctgccccaatgtctcttctgatttttttttcccctttccttccctcctcgctgcattcctcccttggttcagcacaggtaaaatggttcccctccctccctgccttcatggatcaccagctcacgtcatgttgccttctcttttctttgtgtgtgtgtttaagttatttttcttcctcctctcccttttctttttggccctccctccctccctcttctgccatgtaactggaggatgtgctatgagtttgcaaacagctggactgtcaggctgctttttttccagatgttcctcctctgccttcccttcccctcctctcccctccctttccttccttccttcctttccttggagcactgagcaccattggaagctgag

SEQ ID NO: 14008 - DNA, 670 bp, Macaca Fascicularis
  misc_feature (1)...(670): n = A,T,C or G
taaatcagcaggacatatataaagaatgacggaaagttacaagtcaccanctaatgaaatggtgtgatctcctggatggtttgttagtatccggtgagacaaattannnnnnnnnnnnnnnnnnttgtataccacctttgtgtgagaaggaggtaggaatatcatatattagaatatatttgcaaaaagaaaactaacacaagaacagaaaaccaaacaccgcattttctcactaacaagtgagagttgaacaatgagaacacatggacacagagaggggannnnnnnnnnnnnnnnnnnctcaggggtggggggctaggggagggatagcattaggagaaatatttaatgtagatgacgggttgatggctgcagcaaaccaccatgtcacatgtatacctatgtaacaaaagtacacattctgcacatgcaccccagaacttgaagtataatttaaaacatcatagtattttttagaaaaggaaacactagaaagatgaaccaaaaacagataaaccggcacagtggctcatgcctgtaatcccagcatttagggaggctgaggcgggcagaccacttgagctgtatggttctagacaaggttgggcaacatagtgaaacaccatctctaccaaaaatacaaaaaattatccaggtatggtgacatgcg

SEQ ID NO: 14009 - DNA, 701 bp, Macaca Fascicularis
  misc_feature (1)...(701): n = A,T,C or G
agggctaccagggaacgtactctactgcatacattctagtggaagagaagctggggttctannnnnnnnnnnnnnnnnnnnnnnntcctttggtgccccctctcagctccccatgacaagacaatggggctacagacactgtgtgttcagcctgcccggggnnnnnnnnnnnnnnnnnnnnnnnaggtgaggtttctgtggacctagaaggtgccagcagcctgcaggggaaaggcaaactccctccttgcaaggaaaggannnnnnnnnnnnnnnnnnnnnnnggagcaggtgggatgggagcagcccctggggctggtatcccaaagatgaaatgaagggggctgcctacctcagttggcgggaggtgctaaaagtggatgtgcaagaccagccactgcaggtagctctctggaaccaaagagagccctgcttttctaccagacatgggagcagcatgtgggaaacaagggcctacccagagagcagagagagtccgcctagtccgnnnnnnnnnnnnnnnnnnnnnnnnnnnnnnnnnnnnnnnnnnaggatccccctggagagcnnnnnnnnnnnnnnnnnnnnnnnnnnccctggccacagcctatgcccaccctgggcccctgtggggctgggcattgtgtccgacctgtgcatctcnnnntgggagggctgggcacaggcagtgccatgtcctt

SEQ ID NO: 14010 - DNA, 738 bp, Macaca Fascicularis
  misc_feature (1)...(738): n = A,T,C or G
gaaatccagaaaaggannnnnnnnnnnnnnnnnnnnnnnnnnnnnnnnnnnnatttctttgggaatcctggtccaaaaaacaaagggtgttaccaggtgaaattctctcacacgtatctcatcattcattcactaactcaccacagggaccatcccaggcagaggccccctggagagggctcctgagccannnnnnnnnnnnnnngccactctggggtggggactgccttcctagtcataggcatgagaaggatgtcaacaagttggttgaatgattaggaaaaaagattctgagaactgagaaaagagaaagaaaacaaagtggatggcagaacggaatgacacatttgtgagtgagtctcagcagaccaaaagctgagtcaaagcaccacaaaactctgggactgcatttcccatctcctggaaagatgggagatggnnnnnnnnnnnnnnnnnnnnnnnnnnnnnnnnnccatcaaaagcacccaagtcactctacccctccagaacagggagcacagaggtgagcaggagccacaggaggcccctggctcacnnnnnnnnnnnnnnnnnnnngcgggcagcaggaccggaactcttggttcacctccttttctctaaagacgtctatgttgtctgatatannnnnnnnnnnnnncatctaatattcctctgatttaggcccttcatgtcctcaggcactttgctacaattttataaatttgtgacagccttagc

SEQ ID NO: 14011 - DNA, 761 bp, Macaca Fascicularis
  misc_feature (1)...(761): n = A,T,C or G
cagctgtgctgaagcggtgcnnaanatnnnnnnncnaccnnnatggcatgacggctgtgctgtcgcgggccagccgctccatccgcatcgggctacgcaaccacgaccatgaggttctcttggccaacaccttctgcgtggaagcttacttccagaatctnnnnnnnnnnnnnnnnnnnnnnnnagtatgctccagaaaacctagatgagcagattaagaaagtgtcccagcagatccttgagaagcgagcctatatctgtgcccaccctctgnnnnnnnnnnnnnnaggcaggggagagtgtcccctgctgctgcccacccccacccatggcccgttgctggatgactgtcactcttttttcagannnnnnnnnnnnnnnnnnnnnnnnnnnnnnnnnnnnnntgttccctgtctgcacctgaagggttgtctcctggcctgggagagcctattccaggtttcgacctnnnnnnnnnnnctctaacaggaccatcacaacttctgaactgagccggagagagnnnnnnnnnnnnnnnncctnnnnnnnnnnnnnnnnttctggtcattgaggagacaccatagtggaaactggggcttgcgctgctgcctccagggcgtgaggtgggtggggacctgtgtcaggtgtggatagccatttctgctcaaccacacattctctaagaaacagcttgaaagctgtgtctgggtcattcatttaaactagaaacagaggcacttaaaacatgtaccaggaaccat

SEQ ID NO: 14012 - DNA, 682 bp, Macaca Fascicularis
  misc_feature (1)...(682): n = A,T,C or G
gtatgtggcccacaggtgtcgctcaagtcttccgaccgccatganncggacaaggagagcgtgcacagcgacattcggnnnnnnnnnnnnnnnnnnnnnnnnnnnnnnnnnnnnnnnnacatgccgctgtccgaggtctgcgagggcttcgacgcggagggccgcagcattagcaagacccgcgggtggtacagcccggggagccgctcgttggacgaaggggacaaggccagccacaagccggagnnnnnnnnnnnnnnnnnnnnnnnnnnnnnnnnnnnnnnnnnnnnnnnnnnnnnnnnnnnnaatccgggggagaaggacaccgcatcccagatcgaggccgaaaagtcttcctcaatgtcatcactcaatattgcgaagcacacgcccnnnnnnnnnnnnnnggcagagcagcagagcaggnnnnnnnnnnnnnnnnnngaactcatggagaatgaagctctggaaatcctcaccaaagccctccggagctaccagttagggatcggcagggaccacttcctgactaaggagctgcagcgatacatcgaggggctcnnnnnnnnnnnnnnnnnnnnnntgtacnnnnnnnnnnnnnnnnnnnnnttgggctccagcagcgacccaaaccagccctgtgcctgcctggtccccagacccaagcccgaacccatccgag

SEQ ID NO: 14013 - DNA, 697 bp, Macaca Fascicularis
  misc_feature (1)...(697): n = A,T,C or G
gatgtaatagagatgaaaggacgagtggcctgtgagataagcagtgctgatgagctccttctaactgagatgatgtttaatggccttttcaatgacctnnnnnnnnnnnnnnnnnnnnnnntattaagctgctttgtgtttcaagagaattctagtgagatgcccaaattaacagaacaattagcaggaccacttcgtcaaatgcaggaatgtgctaaaagaatcgcaaaagtttcagcagaagccaaattggaaattgatgaggaaacttatctaagctcatttaaacctcacttaatggatgtagtatatacctgggcaactggagctacatttgcccatatctgcaaaatgacagatgtctttgaaggcagcataattcgttgtatgaggcgcctagaagaattgcttcgacaaatgtgnnnnnnnnnnnnnnnnnnnnnnnacactgagctggaaaataaatttgcagaaggaatcaccaaaatcaagagagatattgtgtttgctgccagcnnnnnnnnnnnnnnnnnnnnnnnnnnnnnnnnnattttaaannnnnnnnnnnnnnnnnnnnnnnnnnnnnnnnnnnnnnnnnnnnnnnnnnnnnttggttgtcccatacattttaatatgtgtatttaaatcagacatcattcatagaaagcatattacatacatgtttatacataagcat

SEQ ID NO: 14014 - DNA, 712 bp, Macaca Fascicularis
  misc_feature (1)...(712): n = A,T,C or G
cccaccacccaccactgctannnccactgtctccactactgaggacacggagcacctggtctataaccacaccacccagcccctatgagcctgggtcttgccggctctcacctggccctgcttcctgcttgccaaggcagagggctgggctgggaaaaactttggaaccagactcttgcctgtttcccaggcccactgtgcctcagagaccagggctccagcccctcttggagaagtctcagctnnnnnnnnnnnnnnngaaagggtttggaaggagcagaaaacccttggaccagaagtaccagactagatggacctgcctgcataggagtttggaggaagttggagttttgtttcctctgttcaaagctgcctgtccctaccccatggcgctaggaagaggcgtggggtggtatcagaccctggaggccccaaccccgtcctccagagctcctcttccacacggtgcgcccagggctgggaggaaggacttccctgtgtcgtttgtgctgtaaagagttgctttttgtttatttaatgctgtggcatgggtgaagaggtggggaaggccttcccctaagattgggctccctgcccttgaccagccccaacctggcctggaccggcagacagaaccaggagaggctcagctgcatcccgcagcccccacccccagggttctccaacatcacagtccagcccgcccacaggt

SEQ ID NO: 14015 - DNA, 719 bp, Macaca Fascicularis
  misc_feature (1)...(719): n = A,T,C or G
gacacagcagnnnccagnnnntggctggggnnnnnnnnnnnnatggtnnnnntcaacagtaaggtggagaagagatactaccagccagatgacagnnnnnnnnnnnnnnnnnnnnngnncacccctcccccaggagatgcctggcagcagagccagggcaggggcagtatagctccaaggggaatctgtgcttggcagaggccccccagaggcagggggagnnnnnnnnnnnnnnnnnnnnnnnnnnnnnnnnnnnnnnnnnnnnnnnnnnnnnnnnnnnnnnnnnnnnnnnnnnnncagcatccctattcagtagcaccagctggtcatggctttggccgtggccagcacctccacagggactcctgtccccaccaagccctgctccgatacctcgaatccctggtgactatgagtcaccagctccaagccttactgtgcccccaggacaagagctccatttcctgccctctgcagtgtctgtccagcccccttgcagctccagagccccctggcccagcccctgactcctctttggggattacagatgaagctggctctgagtgtcccttccctagaaaggcctgaccctccttacccaccagaatgggttttgatgccctcactagtgttgaagcctgttccagagagagacggggctgcaaggagaggatggttagctctacccacctgccctgtttgagcttcttgttngacag

SEQ ID NO: 14016 - DNA, 782 bp, Macaca Fascicularis
  misc_feature (1)...(782): n = A,T,C or G
gcttgatgtgctgtgaatgtgtgcttttttcctttgttaaaatatttaaatagaagtgaaaaggtnnnctgaggatcagatcatgcatgcgccattttttacttaatgcagctgttaaattggcaaagctctaaaatgcactgctgccatctagtgatacatttttgtaaagtacagcaaaacctacagatatatacagtatataaatatatatatatatatttatatttttgggggtgggagaaatccaaaataaagtaaatgcttgtttcatttttaannnnnnnnnnnnnnntccttattgtatgttgtcatgaggaaattnnnnnnnnnnnnnnnnnnnnnnnnnnnnnnntaaactgaaatctataattttaagggcttaacctgtgactttaataagctggaacagtccactgaatgggtataatnnnnnnnnnnatatacgtatgattgctttttaagtgattatcttttcttttgttaagtcatgtaaattcataaatccttttgcactgatgtgttgaaccttattcttgtacattcaatcaaggcaaacttttataatttttcttttgtttccaatgaccttgaaatgttatagcatggtgatattctatgcaactatagttatactttttggtttgacactgtattttttcacattgatttactggttgatgatagattttataacctaacggttctcatgcggtgcgtaactgtagatgcatgtacttgtgttttgtgtaattattgaagtgcaatgatgtataaaagtg

SEQ ID NO: 14017 - DNA, 1304 bp, Macaca Fascicularis
  misc_feature (1)...(1304): n = A,T,C or G
gctcaggtgtggatnnnncgcccaggcgtactcagcttgcttgccccacatccgcttctacggtcctaccaatttctcccccatcgtcaaccacgtggctcggtttgcggcccaggccacgcagcagcagacggccacgcagtatttcatcctcctcatcatcacggacgnnnnnnnnnnnnnnntggaggagacgcggnnnnnnnnnnnnnnnncttccaagctgcccatgtccatcatcatcgtgggcgtgggcaatgccnnnnnnnnnnnnnnnnnnnnnnnnnnnngggacagccgcatgctgcgctcccacacgggggaggaggcagcccgcgatattgtacagttanttccctttcgagagttcnnnnnnnnnnnnnnnnnnnnnnnnnnnnnnnnnnnnnnnnnngagctgccccnnnnnnnnnnnnnnnnnnnnnnnnnnnnnnnnctgccccccaccaactcggagcccgcctgagctccagtgcccagcagcagcatgtcggctgagcctcccgccctcccccaggaacatgcacgctcaccctgcttccttgtgggtggcctttttttactgatccacatttttattttttacaaccggacctccacccccaacttccttnnnnnnnnnnnnnnnnnnnnnnttggagtcaactgttgatgcttccaggccaaactggcttcctctcctcctctccccacctttgccattcttaagtattgaatgtactttgtataattttagtggaattattattgttattgagaataaaatttttacaatcataactggctttnnnnnnnnnnnnnnnnnnnnnctctgatgaaaggaacgtgtccttggtgcatacttcgtgtcgtagcctgcacctaattaattcctgctgtcttttttaatactgtgactgtgttctatttgttatatactcagggtaataaacaagtttcagacgtccctgtgtcagctcnnnnnnnnnnnnggacctgacgggctcactgatctgagaaaggaaatggaagatgaaaatccaccctgcaagtctgctaagttggtgtagtcccctctgcatggggacatgcattccagatnnnnnnnnnnnnnnnnnnnnnnnnnnnnnnnnnnnnnnnnnnnnnactggcacagaacctggcacattgtacaaactcaataaatatttgtggatgaatagannnnnnnnnnnnnnnnncnnnnnnnnnnnnnnnnntgcactcaggtgcannnnnnnnnacatatccctgccccacagtggacagcagtccagtcaccatctgct

SEQ ID NO: 14018 - DNA, 705 bp, Macaca Fascicularis
  misc_feature (1)...(705): n = A,T,C or G
ggtataataaaaacattgtaatcctagaaattatcctccagctttctcacctgaaaatctattgaagcgatccctggtcatcctgataatgggacgagggaagtttccagcagatttcaggctgttcttaaagtttttgttggccattttctcactagtacataaaatcaagatgcttatgagcatgaaaatgcatttaaagattttgcttgtgtactcctcagtcagaatagaaaaataactgaaatacttttatctttctgtccttgataaaacagtaaagaaaaccaaacaaacccaggcctgatgggaaaaatgattcctttattctagcaatgttactccttgctgttggtatgggaaattttattaatttctgttcctaaaattcatatcacaaaatgatatgtaataatctttacttggggtaagtcatgaattttttttctacatgtgagtataaaagacgaaagtgaacagcatggaatctcactgccaaattattagtgaatgtatagnnnnnnnnttctttgagacacacagtatcattaatttccgaattgtatttcagtgttattttttgtgtgtgaccactaagcttctctcttaatataaagctgttaccttctacagaatttaagtctgaagatgtannnnnnnnnnnnnnnnngcgtaacagaagatactcttttttctgctcttact

SEQ ID NO: 14019 - DNA, 715 bp, Macaca Fascicularis
  misc_feature (1)...(715): n = A,T,C or G
accagcnnnnnnnnnnnnnnnnnnncgggaggtgctaaatgggactttgggatctttcacctgctgtgcccagtagttctgaagcctgcttgtggaacagtgttttatgtttatccctgtttactgaaaaccaaatactggtttggaggcaacttccatgtcttgctcttctacctccctagttagtggaaatttggataagggaattgtagggcttagattctgggggttttatgtcattggccacagaataactgtctctaagctatccatggtccagtggtcgctgccaagtcagtagacttcagagagcacttctctcctatggggcttatggggacagggggcaggtgtgacttgcttggtagcctcattccatgtgtgcctgtgcctggggnnnnnnnnnnnnnnnnnnnncagcagtgaggtcctcattctccagccagcctctctgtcctggagaatgatgagctgtgttctaagaatttgagaactagagtcctcacccccaggcttgagggcacatgactttctcatgtagggctctttgtggtatctgttgttttgcaacacgaccattttagtaaaacagtcctattcaagttgtattcttttaagttcttttattctcctttccctgagatttttgtatatattgttctgagtaatggtgtctttgagctgattgttctaatcagagctggtacctacttca

SEQ ID NO: 14020 - DNA, 701 bp, Macaca Fascicularis
  misc_feature (1)...(701): n = A,T,C or G
gaccatgagcatcannnnnnnnnnnnnnncacccgtcacnnnnnnnnnnnngaggtgatccttgagctgggctgggcacagccctgtgacgtctggagcattggctgcattctctttgagtactaccggggcttcacactcttccagacccacgaaaaccgagagcatctggtgatgatggagaagatcctagggcccatcccatcacacatgatccaccgtaccaggaagcagaaatatttctacaaagggggcctagtttgggatgagaacagctctgatggccggtatgtgaaggagaactgcaaacctctgaagagttatatgctccaannnnnnnnnnnnnnnnnnnnnnnnnnnnnnnnnnnnaggaggatgttagaatttgaccctgcccagcgcatcacactgnnnnnnnnnnnnnngcaccccttctttgctggcctgacccctgaggagcggtccttccacaccagccgcaacccaagcagatgacaggcgcaggccacggcatgaggagatggagggtgggactgggccacccagccccttgactccagcctcgaccaccaggccccaggccagagccacccaatgaacagtgcaatgtgaaggaaggcaggagcctgcaggggagcagacttggtgcccanntgccagaannnnnnnatttgacccaagctatttatatgttgtaaagt

SEQ ID NO: 14021 - DNA, 744 bp, Macaca Fascicularis
  misc_feature (1)...(744): n = A,T,C or G
tcccagcgttttgttgtatgcnntgctcgttgtacgccgtgacgactgatggnnnnnnnnnnnnnggtcttcaaggttgtgaggaaannnnnnnnnnnnnnnnnnnnnnctgctgtcccagaggnnnnnnnnnnnnnnnnnnngcgggggtggctgtcatttccagcatgcaggtgactcccaaagaatgagtcannnnnnnnnnnnnnnnnnnnnnnnnnaagaggcgaatttgctgaaaagtcccaagggtctgaatgaaagcatcttnnnnnnnnnnnnnnnnnnnnnnnnnnnnnnnnnnnnnnnnnnnnttgaggccaaaggtcaacattactccactgttcaccaaggaaggagggggcannnnnnnnnagccgcggcctcacgtgcgttgtaacaagccctnnnnnnnnnnnnnnnnnnnnngnnnnnnnnnnnnnnnnnnnnnngtnnnnnnnnnnnnnnncttgtgtactcaagataccttcacagcttctactggacattttctttttaggaatgaaggaaaannnnnnnnnnnnnnnnnnnnnnnnnnnnnnnnnnnnnnnnnnnnnnnnnnnnnttataaatatttttaaaagatatagttttgtaaatatttaatattccgctaatttgattttgaattgtaaatgtcaagtattctgtttttggggtttttatgttttattatactttgttaaaaaggacaaattgtacatttttagaatgtttttatga

SEQ ID NO: 14022 - DNA, 691 bp, Macaca Fascicularis
  misc_feature (1)...(691): n = A,T,C or G
ggctgcagtgagctgagctgagcccgcgctgnntttgagnnnnnnnnnnnnnnnnnnnnnnnnnnnnnnnnnnnnnntgcnnngcgcctcaacctctcaggcgacaccgtaggcccagtgcgcttcgcagcgcaccactacgccgcaaccctgcgcgcactcgaggtgcgcgcagccgcctcagccaagctgaacgccgcgctggaggagctggcggcgcgctgcgcggccctgcgcgaggtgcattgcttctgcgtggtgagccnnnnnnnnnnnnnnnnnnnnnncgcgcactgtccgcgcctgcgcacctataccctcaagctcacgcgcgnnnnnnnnnnnnnnnnnnnnnnnnnnntggcgcgattgggcgacttctctcccccgtccccgcagacgtaagcgctccgagatgggacggatgtgcccaggcgcgccccgactgctagtgccttctttcgggattgttgcccgcccgggtnnnnnnnnnnnnnggaactgtgatggcatcgggaccagtactgggcgccctcagaccactcgctgctctcaccctctgcagacgccccacccgctcggtcctggacacactgccccccctcttgcctccacccctctgcggactctgcatctctgcggccctggcgcggggagagggagggcacgggcgcgggccgggcctcagggg

SEQ ID NO: 14023 - DNA, 805 bp, Macaca Fascicularis
  misc_feature (1)...(805): n = A,T,C or G
ctggaccaaatatggggggcaagtctacactcatgagacaggctggcttattagcnnnaatggcccagatgggttgttacgtccccgctgaagtgtgcaggctcacaccaattgatagagtgtttactagacttggtgcctcagatagaattatgtcaggtgaaagtacattttttgttgaattaagtgaaactgccagcatacttatgcatgcaacagcnnnnnnnnnnnnnnttgtggatgaattaggaagaggtactgcaacatttgatgggacagcaatagcaaatgcagttgttaaagaacttgctgagactataaaatgtcgtacattattttcaactcactaccattcattagtagaagattattctcaaaatgttgctgtgcgcttaggacannnnnnnnnnnnnnnnnnnnntgaatgtgaagaccccagccaggagactattaccttcctctataaattcattaagggagcttgtcctaaaagctatggctttnnnnnnnnnnnnnttgctaatctcccagaggaagttattcaaaagggacatagaaaagcaagagaatttgagaagatgaatcagtctctacgattatttnnnnnnnnnnnnnnnnctagtgaaaggtcaactgtagatgctgaagctgtccataaattgctgactttgattaaggaattatagactacattggaagctttgagttgacttctgacaaacttggtaaatcagacaacattatgatctaataaactttattttttaaaaatgaaaaaaaaaaaaaaaaaaaaaaaaaaaaaagg

SEQ ID NO: 14024 - DNA, 789 bp, Macaca Fascicularis
  misc_feature (1)...(789): n = A,T,C or G
gcacagatacagatgacaatagttgtngaaagaaagatgatggactacannncgaccagatgtgaaagatgctaatgatcaaagagaagatgtttatattggaaaccacatgccttgccctgaaaacctcaatggttactgcatccatggaaaatgtgaattcatctattctactcagaaggcttcttgtannnnnnnnnnnnnnnnnnnnnnnnnnnnctgtgaaaagacagactttagtattctctatgtagtgccaagtaggcaaaagctcactcatgttcttatnnnnnnnnnnnnnnnnnnnnnnnngatcgccatcatagtagcaattgtaatgtgcataacnnnnnnnnnnnnnnnnnnnnnnnnnnnnnnnnnnnnnnnnnnnnnnnnnnnnnnnnnnnnnnnnnnnnnnnnnnnnnnnnnnnnnnaaactgatgacttttatatgtacactgaccatgtgatgtacatttattatgtctttttttaaagaatggaaatatttatttcagaggccttatttttggacatttttagtgtagtactgttggctcgtatttannnnnnnnnnnnnnnnnnnnnnnggactgtttagtagtctttgttttatgtttttaaatacagaaattgctttcacaaatttgtaccacatggtaattatgagacttgttctttacccatggaatgtaatatttttgcaannnnnnnnnnnnnnnnnnnnnnnnnnaaagtcatatccacnnnnnnnnnnnnnnnnnnnnnaaatgaccaagcatgaactaa

SEQ ID NO: 14025 - DNA, 667 bp, Macaca Fascicularis
  misc_feature (1)...(667): n = A,T,C or G
ctcgaacccannatgccnnncatgcactnnnngnnnacgtcttcacacggcccacctatagccgcaggctcacggggcttagtgnnnnnnnnntcatctnnnnnnnnnnnnnnnnnnnnnnnnnnnnnnnnnctggtgtcatcctctggggcgacgcagggtacaccacaagcacggagacctgccagtatcttaaggattannnnnnnnnnnnnnnnnnnnnnnnnnnnnnnnnnntgtcctgggccacccaatattgcagccgggcccagtgcnnnnnnnnnnnnnnnnnnnnnnnncgcaaccccagtgccagtgaggcctgggctgcgttccacctcnnnnnnnnnnnnnnnnnngcagccctggcctttacctggaccttgtaggnnnnnnnnnnnnnnnnnnnnnnnnnnntggcctctaccacaagggttctcttaggcatgtaggatcctgcagggggtggnnnnnnnnnnnnnnngagtgggcagagcccccacgaagcccaggagggcatccataccagctcgcagccccctgttctaagggggaggggaagtcccctgggaggccccttctctccctgccagaggggaaggagggtacagctgggctagggaggacctgaccctactctcttgccctggatagtttattattatta

SEQ ID NO: 14026 - DNA, 562 bp, Macaca Fascicularis
cagtcacaccatcgtccatctatcatatgtcgctgtgacattactttcacgtgtgtttcatattccgtaaaacgaacaaagccaaacccctttgaatgaccagtcttaagatctttcttgacctgcaccataagaacttctccaaaggtactaaaatactctttcaggtcctgttcagttgttttccatgggagacccaacactactaaatcggatgttttatggactgctcttttcactttcagtgctgatgaagcatgtgtatcatccatttttcttttgttatctttcggatagttgacaacataaaccagatttccccagccagcatcgggggcatgcagaattcctttttccagtcggacacctctcatacattgagacactggattcctgtagcgaagcccacacgcccctggaaactgggctgtgaccgtggacagcagcaccgtcccatcgtcttccgatggtatttcaatgggctcatcgttctcatcttcggttacccgaatatattcagacatcttttacttttccagtaggccgctgttgggaagcccga

SEQ ID NO: 14027 - DNA, 1089 bp, Macaca Fascicularis
  misc_feature (1)...(1089): n = A,T,C or G
gctaccctccttttatgatgaaaatgactccaagctcnnnnngcagatcctcaaggcagaatatgagtttgactctccctactgggatgacatctctgactctgcaaaannnnnnnnnnnnnnnnnnnnngagaaggacccaaataaaagatacacgtgtgagcaggcagctcggcacccatggnnnnnnnnnnnnnnnnnnnnnnnnaaaaacatccnnnnnnnnnnnnnnnnnnnnnnncnnnnnnnnnnnnncaagagcaaatggagacaannnnnnagcgcccagatccggaaganntcgccaagagcaaatggagacaannnnnnnnnnnnnnnnnnnnnnnnngacatatgagacagcctcagtttggccagccaaaaagactgtctggcaccttccacgctctgtagtttcatttcttcttcatcggggnnnnnnnnnnnnnnnnnnnnncnnnnnnnnnnnnnnnnnnnnnnnncggcagtgcactctggaagcaagtgactggccctggaggtggggcccaggggcggggccggggatggggagccccagggtcnnnnnnnnnnnnnnnnnnnnnnnnnnnnnnnnnnnntgcatggtgcaccttcctgcataggactggaagaccgaagtttttttatggccatattttctactgcaattctgaagtgttcatttctcacaaactgtactgactcgaggggcgctgatttcataggatctggtgctgtatatacgaatcttgcaaagctctaaccgaacggaccttcttattcctctcccccaacgccatcgtttccactcttctcagtgtaggtaaccgtctatggtgtgttttttcattaatgacaaaaaaaaaaaaggtttcaactggattatttaaatattggtaaatattgtgcattacggtttgtttttccttttaagaagtatgtcctttgactgtatctctcagttacatgacctgtatcttttcctctttaatagtagttttatgttaacctttaagagatttgtttttcctccaaggagaatttaaaggtattttttaaaattctaataagaggatcggccgggcgcaa

SEQ ID NO: 14028 - DNA, 671 bp, Macaca Fascicularis
  misc_feature (1)...(671): n = A,T,C or G
tggtatnnnnnggctcactgcagcctccnnnnnnnnnnnnnnnnnnnnnnnnnnnnnnnnnnnnnnnnnnnnnnnnnnnnnnnnnnnnnnnnnnnnnnnnnnnnnnnnnnnnnnnnnnnnnnnnnnnnnnnnnnnnnnnnnnnnnnnnnnnnnnnnnnnnnnnnnnnnnnnnnnnnnnnnnnnnnnnnnnnnnnnnnnnnnnnnnnnnnnnnnnnnnnnnnnnnnnnnnnnnnnnnnnnnnnnnnnnnnnnnnnnnnnnnnnnnnnnnnnnnnnnnnnnnnnnnnnnnnnnnnnnnnnnnnnnnnnccagttctctgtggaagcgaggctggagtcttgggttcctgtatggtggaagctcggtgagccaaggnnnnnnnnnnnnnnnntgccctggcagacgcttcccttgcccttggctttggatgtcttcgcgggagtcttctctctggctcaggtgtgggtgggaggggcccacaggaagctcagccttctcctcnnnnnnnnnnnnnnnnnnnnnnnggctgtggggggggggagcgggannnnnnnnnnnnnngtcactcaaaggaacgttctggtcccttcggttatcttcaaaatttggaaactgcaaatngtcctcaatgtggaatccttatgtatgcgtgtgtgtggtttctcctagaccc

SEQ ID NO: 14029 - DNA, 794 bp, Macaca Fascicularis
  misc_feature (1)...(794): n = A,T,C or G
gcactcaaggactgtgaggaatgtatccagctggagccgacnnncatcaagggttatannnnnnnnnnnnntgcnntggaagcgatgaaggactacaccaaagccatggatgtgtaccagaaggcgctagacctggactccagctgtaaggaggcggcagacggctaccaacgnnnnnnnnnnnnnnnnnnnnaccggcatgacagccccgaagatgtgaagcgacgagccatggccgaccccgaggtgcagcnnnnnnnnnnnnnnnnnnnnnnnnnnnnnnnnnnnnnnnnnnnnnnnnnnnnnccccaggcactcagcgaacacttaaagaatcctgtaatagcacagaagatccagaagctgatggatgnnnnnnnnnnnnnnnnnnnnnnnnnnnnnnnnnnnnnnnnnnnccttcgccctcatgtggaaagaggagctgggaccgcggcgagcagcacggagcggaagggagagcaggggagagaaggcctcatctctctatatttatacataaccccggggaagacacagagactcgtacctgcgctgtttgtgccaccgctgcctctgggccctcccagcnnnnnnnnnnnctctccaccgctgccctcgagttccgtatctccttcccctgcccccagttgctgtctcggctgctctcccatagttggttattttttatttggggcagtgggcatgtatggggaggggagggggttcnnnnnnnnnnnngtcccagctgtctcacgttgtnttccgcgtccccttctccaataaaacaagccagt

SEQ ID NO: 14030 - DNA, 718 bp, Macaca Fascicularis
  misc_feature (1)...(718): n = A,T,C or G
ctgannnnnnnnnnnnnnnnnnnnnnnnnnnnnnngacaagctagcttttaaggataatgaggaannngannnnnnnnnnnnnnnnnnnnnnnnnnnnnnnaggcagttggaaatggatgggctctctcctgccggggatatgcctcatgnnnnnnnnnnctgcagctgctgtgcccctctcatatcagcacccaagtgtagatcagaaacaaattgaagaacaaaaggaagaagaaaaaatacgggaacagcaagtgaaagaacgaaggcagagagaagaaagaaggcagagtaatctacaagaagttttagaaagggaacgaagagaannnnnnnnnnnnnnnnnnnaaaggaggatgattgaagaatcactgaagattgaaatggaaaatgaattagaaatggaaaatgaattagaaatgagtaatcaagaaatgaaagacaaatctgctcacagtgaaaatcctttagagaaatacatgaaaatcatccagcaggagcaagaccagcagtcagcagataagagctcaaaaaagatggtccaagaaggctccctagtggacacgctgcaatctagtgacaaagttgaaagtttaacaggcttttctcatgaagaaccagatgactcttggtaaccatgtttgctgcccagcttctaacttacataccatgagaagttacataacatttactcctttgtaaatgtttctctatcat

SEQ ID NO: 14031 - DNA, 763 bp, Macaca Fascicularis
  misc_feature (1)...(763): n = A,T,C or G
gcagatgcacaaacagtattggcttnnnctgagtgtgcagtgacactgaaaacaattcatctcaaacggggcccagaatgtgttcagtatcttcaacaagaatacctgccctccttgcaagtagctccagaaataattcaggagtnnnnnnnnnnnnnnnnnnnnnnngatgctaaagtttttaaaaattacttaaaggtgttcttccagagagcaaagccctaaggactggatttccctgtgcctannnnnnnnnnnngaattccagttagtgtataaagaagcgatttttgtgtgccannnnnnnnnnnnnnnnnnnnnnnnntttgagcttactgcagtatatgttttgggatttttctgtaaaatgggtgtaannnnnnnnnnnnnnnnnnnnnnnnnnaaaagaagttgcctgcatgccggtccaaattgttctgtataaagatgctcttaaaagatacagnnnnnnnnnnnnnnnaattcttttttatttgaaattttaagtcaagtcctttataaagaccatagcagtggaaaacagtgtactttttaaaaaattgctgaatataaaatgtttgaaaattttctttatgtgtgaagacacataaagtatggggggaatacaacaatcaaaactaactttttgtagatagccatttcatttctttaaactgtttcaatgccaatatgtattctacaaaagagaatggttttaggctcnnagtgttatacttttttttatatatatatatatataaat

SEQ ID NO: 14032 - DNA, 632 bp, Macaca Fascicularis
gactgaaattgtaggaggcccaggtagcggcaaaactcaggcagaagctctccagaggatccaggtggtgcatgcgtttgacatcttccagatgctggatgtgctgcaggagctccgaggcactgtggcccagcaggtgactggttcttcagggactatgaaggtggtggtggtggactcggtcactgcggtggtctccccacttctgggaggtcagcagagggaaggcttggccttgatgatgcagctggcccgagagctgaagaccctggcccgggaccttggcatggcagtggtggtgaccaaccacataactcgagacagggacagcgggaggctaaaacctgccctcggacgctcctggagctttgtgcccagcactcggattctcctggacaccatcgagggagcaggagcatcagctggccggcgcatggcgtgtctgaccaaatctccccgacagtggaaaccaagttcaccctggctgggagcatctcggaagaggcatgctggcgactggatggataaccctgtgcatccccattgtgtcctgtgctccctcctagcacagtggcgaagccgggaaagtcctttaacttgcctttgcttgctgctgcttttttttttttttt

SEQ ID NO: 14033 - DNA, 1018 bp, Macaca Fascicularis
  misc_feature (1)...(1018): n = A,T,C or G
cagacgcacttagccgcaacaaggaggcacgnnnnncacaaagtgtcctccagggccaagtggactctacagagtgcttgacctcaacacactggactccaggtgggctggaccaagagcaggcaaagacacgggaactgaaaaactccacagggtttggaaaatagaaatgaaaagccacatcatataactcaaaaataaatagtgttttggaaattttaaaattatcgtctaaggtggtgaaactatttcaggcccaaatgaaaggaaatccccatttggggatgaaatcacagagcctgtgttttgtaatatggttggatgtccactgatgaaattttaaagaaggttcatttttaaaagtgtacctgatttcattttttaaagtgcacatgattctacatgtgagaattctttcggccaagaaactgtccttggctcagaggtgttgggaattaaagcagagagaagccattcgtgatgctgagaaccaaggatggtcatgtacacaaagaccatggagacggccattcttgtttacaaaacacttaccaagaaagcactttgtaggggaaccttagtaagttctcatttcattacgtttcttccaaggaaacaggagagactgaattaataattctctctttcctcttaagcacttttaaaataataaagtacatcttgaaattttaggaggcatctctgatttaaaaaaaaaaaagaaaggctgcttgacatatgttatccagagacactctgcctctggtggctgcagagcaactcccaagcctcatttggaaggcttaacatttggaattgcactttaattgattaatcctcaattcatgtggccttacgggatagtgggtctgggaccccaattcattcttatctgccaaagaattatctagaagcacatcaaacaccagcaccccacctgcacaatgggggtggaaaacttttgtatccctaagcatattattttatagtgtctgctatgccacgtggaaatacttta

SEQ ID NO: 14034 - DNA, 696 bp, Macaca Fascicularis
agttcccaaatctgtaagatataaataagaacactttccttaaaatgttgtcaacagacgcagtgaggtagcatctaaagcacagtgccttggacataggaggtgcttctctgaaagccagtagaggtcatttaatatagtggatcagagctctggctctgaacacagacagccttggttcaaatcccacaacaccacgtgctatgggacctttggcaaaatactcttgcccagattctgagtctcagtttctttatctgtagatgataatatgtctcatagagttgttatgagaattacattagattttgtatgtaaaactcagcatcaagcacacagtaagatttcataagagactgactgctactaatttaatattaggcatatttttgaattatctcactgtctcttgaggcagtccactgcatagtcatttaggtctgcaagttacacacttagttgagtgctgtctcccgctagcttcctgcaccggtcccagacccaccccctagagcccacacagagcccatgtgcttgaggaagcagactcggagctccaagtttacttcactgcaagccgaagagtccccccatcccctcatcttctccactaccatccacatgacctagtggcaaatcctctcccagtcttggtctcagtggcttaattactttgccagcaggtatgaggcagga

SEQ ID NO: 14035 - DNA, 747 bp, Macaca Fascicularis
  misc_feature (1)...(747): n = A,T,C or G
tgaattaacatttggtgattatgnnnnagctnnnttgactaatataaagatcataactccccttcacttctgtcttaacttgaacatggcgtgtttaaatnnnnatacatactttacttgaattattgctgttgtcacttatttttgcctctgtgagttcatnnnnnnnnnnnnnnnnngcatttgccttttggtttctttgttattatagaagagatgacttctgctgattttgctttagaatggtnnnnnnnnnnnnnnnnnnnnnnnnnnnnnnnnnnnnnnnnnnnnnnnnnnctttagttttctcataggctttataagacatgggttaagtggtatgagcagaggaagtacccagatagtagccagttaccaagactcattcatacagcatgcctgaggcagcacttttagatcctttgtgagcaagttctatttgttcattgcttgccagagatgaacacagaatgttctgtttcattttataagaactctcctgagtttctgtggatggaaacattacatgtaatgcagttatagtgaacactggaaagatttattcaagaattatatttgtgtatactttataaattagtccctcattagattttttttcttaagcataagactgaaatgtgttaattttagtagaatcaggcactgctcacagaaggaacacagattgtagaaattaacataaattgttcttgttctaatatatatattttttcatttctgtcatgc

SEQ ID NO: 14036 - DNA, 715 bp, Macaca Fascicularis
tgccatctgtgaacgaatgtcgcgtgcaagcaggcagctggtgtgggaagaatggcactgagccattcagtgaaggagcggaccatctctgagaacagcctgatcatcctactgcagggcctccagggccgggtaaccactgtggacctgcgggatgagagcgtggcccatggacgcatagacaatgtcgatgctttcatgaacatccgcctggccaaagtcacctacacggaccgttgggggcatcaggtcaagctggatgacctctttgtgacaggccgcaatgtccgctacgtccacatcccagatgacgtgaacatcacctcgaccattgagcaacagctgcagattatccatcgggtgcggaactttggtggcaagggccaaggccggtgggaatttccctccaaaaactataagtgaggccctcagcaagccctggccccaactcggcttcctccagtgttctctggagccagctccctgccctcacaccctgtctagaacccgagaagagagcagggccaggccagaagctggtgtccaacagacaccacctgtcaaagctgcgtttcacagggttccacctcccagactccctctgggacccagaatcctatctgtctgtggccttggggtaggtgacaatccccctttttgatgatctgaatctctgacttattgatcatggaacctgtcaagtagtttcaactct

SEQ ID NO: 14037 - DNA, 737 bp, Macaca Fascicularis
  misc_feature (1)...(737): n = A,T,C or G
gtgtgccaccaaatgctttagtatactgtctaatttaactctcccagcaaccctgtgaggccctttcattatccccattttacagatgaaggcacagaacttagagaggaannnnnnnnnnnnnnnnnnnnacagagaaatggtgaagagatataaccctaggtattctaaacccataacttnnnnnnnnnnnnncaccccttgctgcagaaagaaatgtggacttgaaatcgtaccttagaacttaaggctctacccttaagcgtctctctgagtgtctttnnnnnnnnnnnnnnnnnnnnnntggcttgtggcacggccttgaacaagccatttaaaactgataagaaaggggtatactcatctcatggaggagaaaatgtcaaataacccatctatgaaagtgctttggagacatcaaatgtcatgcaaataagacctgccacttcttcagtacacattagccctacacacaagatatgnnnnnnnnnnnnnnntggggaaggataaagcagaggttgacaggnnnnnnnnnnngctgcgcggctgaatagtgtctatagtgccgcctgttccagatgcaagtgtaaagcttgctggctgtaaagtccagatagattccctctctnnnnnnnnnnnnnnnnnnnnnnnnnttcttttcactgcaannnncagaaactccagccccaccacaatgagctaccacttcacacccactagnnnngctataacaataa

SEQ ID NO: 14038 - DNA, 760 bp, Macaca Fascicularis
  misc_feature (1)...(760): n = A,T,C or G
gccagcacagggctgtaaatnnnnnnnnnnnnnnnnnnnnnnnnnnnnnnnnnnnnnnnngaggnnnntgaatgtgactggcgtgctgagannnnnnnnnnnnnnnnnnaatgtatgnnnnnnagggttacgctgaagatgcacaatccctaaaataaagatcaccacatccccaaagannnnnnnnnnnnnnnnnnnnnnnnnnnnnnnnnnngaagagaagcaagacagagggtctcagatagatgaggggtccccaagggaatgcctggggctttacccagtggtccccagaggtgctccatggannnnnnnnnnnnnnnnnnnnngccccagaagtagaagggacctcaagcaccacgccctccagggcagccgtgcagaagacnnnnnnnnnnnnnnnnnnngtcgtcccaactccatatctccagccactccaactgtggaggctgtaaacccagattctcactgttccagtctcctttgcagcataggatggctatgtgattcggtgtggccaatgaaattgaagaggaagtctacagagnnnnnnnnnnnnnnnnnnnnnnnnnnnnnnnnnnnnnnnnnnnnnnnnaacatctccctggccttcttctttctgctttgattgagggtgtgatgcctggagccacagcagccaccttgctaccatgagaaaaaggccaagagaatcacagagtcattgaccctatcattatttcaccaagccaatgccagccgccatccttctccataatta

SEQ ID NO: 14039 - DNA, 704 bp, Macaca Fascicularis
  misc_feature (1)...(704): n = A,T,C or G
agatcccaaggagacntnnnnatggcannnnnnnnnnnnnnngttgagcacannctgaaaattggatatctaaatgatagagtggatgagcttttagaaaagtacatgaactcttatgatattgttttagtacaagatgaatcattagaagtagccaactctattttacagaagattctataaacaagcattctccaagaagacctgtctcctgtgggtnnnnnnnnnnnnnnnatctgttcatcttgctgagagacttatttataatatatccttactcttgaagtgttccctttgtataacatatattttcagacatggtgaatgcatcannnnnnnnnnnnnnnnnnnnnncctctctcaacacactcctcacgttatcttttaacacattaaaaaaaaaaaatcttaaagccaaaattagaaaagtaactccctacttttccaaagtgaattttgtagtttaatgttatcatgcagtttttgaggagtcttttacactgggaaagtttgtagaacttttaaaataagttttatgaaatggtgaaataatatgcatgattttaagtattgccatttttgtactttgggttattatnnngatggtatcaccatctcttgaaattgtgttaggtttggttattttggggaaaacatacttaccggaaaagagtagcacttactgttggaaaaaactggtggtg

SEQ ID NO: 14040 - DNA, 888 bp, Macaca Fascicularis
  misc_feature (1)...(888): n = A,T,C or G
gcagtactgaaaaaccagactgtgctnnnccgcnnnnnnnnnnnnnnnctttccactcgcttgtgatgcaaagaggaatttttacatcaccgacaaattctcagcagctgtacagacacttggctgcggctacacctgtaggaagttcatatggggaccttttgcataacagcatttacnnnnnnnnnnnnnnnnntcctcaagctgcctttccatcttcccagctgtcatccgtgcaccccagtacaaaactgtaggctcagctctgcccagcagtccaaagcggcatggccaacagagcttcactccttacccaggagtgctggcttatagagttagaaggcagtatttcttctaatctgagnnnnnnnnnagtcccagttttaggggcccaaaggggaggtgaacatgcctgatttttgtgggacagctctagccttggctggtcagtcttgactcccttccaacacagatgcccaggcacctccagatcattcacttcgcacgtgggccttgtgaagggatttgtgaatatccaggaagaacttagaggaccccatctgagttcggatggtcaggaaacaatcnnnnnnnnnnnnnnnnnnnnnnnnnnaaggaacgggcaaggaagactggcaaatagatgccaagggatgcccctctttttcataaaactctccnnnnnnnnnnnnnnnnaatgtatagtgaaacttcaatagatctttcattttgacactattaaacaatccagagaagtaaacactgttaaattgactgtatatatttgcttcttaaaactacccgtatcactgtttgctcacctaatttatatacaggtagttccattttctcccagttccttctcgtctctttttttttattatataa

SEQ ID NO: 14041 - DNA, 674 bp, Macaca Fascicularis
cggccttgtccacctcatcattccagagcgcggaggcgctggctgagagaatgtaattacgaggtctagtctcctgaaagtcaggcaccgtcgtggctttggcttctgcagccttggccttcttcagcctcgctttgcaggcatccaagtccagacgccggttttggaggagccgcctctccttcgagatggtcttccagtccccctccaggaagttgcgcaagggtgtgaggaagctgatggaggccgtgtggataaaatccctctccgcggctcccagttgcttttcggcttctgccaccttgatcagtgtcttcccatagggggtggtcggccccagctcactggccgcgtctgccatgtactgagccagcagctccccgttggtgacccttgaggggaccttcctgtccagcttctcatacaggaactcctccactcgggcactggggttgggctgcagcagcacctctgtctgcctcaagatcttctctgtccagttcttggtgctgtctgcccgggccagaaggttttcaaagtgggcatcaagctcagtcttctcagcctggccaaacttctcctccgtgaactgcacggcccgggtgaagaagatgcccgcgtccgacgccagcttcttcatgttgaagtccatggtgcgcccgcagggccgccgc

SEQ ID NO: 14042 - DNA, 770 bp, Macaca Fascicularis
  misc_feature (1)...(770): n = A,T,C or G
tcatgaatcgctccaccaagttccagcagatcgttcgtggcatgaaccaggtgttggacgtgccactgactgtgannnnnnnnnnnnnnnnnnnnnnnnnnnnnnnnnnnnnnnnnnnnnnnnnnnccgagctgcgggactggggcgtggcactcgtcacgctccacggccgctctcgggagcagcgctacaccaagctagccgactggcagtacatcgaggagtgcgtgaaggccgccagcnnnnnnnnnnnnnnnnnnnnnnnnnnnatcttgtcannnnnnnnnnnnnnnnnnnnnnnnnnnnnnnnnnttgccgggatcatgattgcccgtggcgccctgctcaagccgtggctgttcacggagatcaaggagcagaggcactgggacatctcgtcgtnnnnnnncnnnnacatcctgcgggattttaccaactacggcctggagcactggggctcggacacgcagggtgtggagaagacccgacgcttcctgctcgagtggctgtccttcctgtgccggtacgtgcccgtggggctgctggaacggctcccacagaggatcaacgagcggccaccctactacctgggccgcgactacctggagacgctgatggccagccagaaggccgccnnnnnnnnnnnnnnnnnnnnnnnnnnnnnnnnnnnnnnnccccccaacttcgtcttcttgccgaagcacaaggccaacgcgtataagtagcctcaggctttcccaggggcaccgtggggcgaggagagtacaata

SEQ ID NO: 14043 - DNA, 758 bp, Macaca Fascicularis
  misc_feature (1)...(758): n = A,T,C or G
tagctgagcaatgcttgtgaatcnnnnnntaagaaatcccaaaaagccaatattagttaaaattctgttatttaatttggttatcttgctttataaattatgcctctaaacaatcaatctattttttaaatagactgaatgatgtcaagaaatatacctactgctctcagtatgtggtggattagaaatgtgttaaatctgcaaaaggtataaagatgtcagtttaagcatttctttgataatttaacctatgttgtatgtgaattatttattataaacttaacaggattctgtgactgtttttctctgtttcatgtttgttgagtgtaagcaatgaaaatgtcccagataaattgttttcagttttactttaatattaatttcagtaaacattctagttgttcagtgtaacctttttatcttgatgcattgtaagtaaaatgaatcattttctcttgaaatgccagtcattgactgatgtagatagtttaggattttcatataaaaatatctgtttaggaaggtgaaatacattcactgtctgtgttggtggtacatcttgttgaattcaatattagaaagtatttctttttggggtaatataacttagaattaaatccccatttctctacgtagtctggcagtataaatataaatatttaccatataatcttggaataagtatgagttaatgttaccaaaatctgtattaaataatgttttcaaatgctaaaaaaaaaaaaaaaaaaaaaaaaagg

SEQ ID NO: 14044 - DNA, 732 bp, Macaca Fascicularis
  misc_feature (1)...(732): n = A,T,C or G
tcagggcccggnagacagcccaggcggcccaagcgccggacccagctgtccagcaccttttcgctcagtggccatgtggacccctcagaggacaccagcccccctcacagccctgagtggccacctgctgatactctgccccagccccccatgaccccaccctcccaggagctgactccggatgcgtgtgcccagggcgtccccgcagagcggcggcagacnnnnnnnnnnnnnnnnnnnnnnnnnccaccccaaaggggcaccccagcatgtgccgccacacccccctcctcccaggcctccagcgtctggaccacccgctcccagcagcacacacccatcctctctggctctcagcgcccccggaagaagcctcgaatgggcttctgaggacacaaggtggcctgccctcaagccccagagagcccctcatccttcctccgnnnnnnnnnnnnnnnnnnnnnnnngaaacttaagaagcagagctcgccgggcgccannnnnnnnnnnnnnnnnnnnnnnnnnnnnnnnnnnnnnnnnnnnnnnnnnnnnnnnnnnnnnnnnnnnnnnnnnnnnnnnnnnnnnnnnnnnnnnnnnnnnnnnnnnnnnnnnnnnnnnnnnnnnnnnnnnnnnnnnnnnnnnnnnnnnnnnnnnnnnnnnnnnnnnnnnnnnnnnnnnnnnnnnnnnnnnnnnnnnaagcagagcttgcactgagccgagttctggccactg

SEQ ID NO: 14045 - DNA, 726 bp, Macaca Fascicularis
  misc_feature (1)...(726): n = A,T,C or G
tagcggacggcagcgccagcgcncnnctgtcgagacccaggctggggcgatcttggttttgtgtccaagggtgaaggggtaggaggaaggcccccagctggccctccccacacacaggacggcaggggcacgtggggcttttcttattaaaattttaaaaagttgaaaaaaaacaaaggacagaaagagtcggtggcgctcctccgctgggcgttctgtgcagagcgaggcccagggtgtggcctggagggggctgcaggcccccctgcccagtgcccaccgccgtgcttcacaccagctccagcttctgcgttcccttctgcccacgtgcccggccctcccaggcgggcacagcccggatgcagcggccatggggggcggcgggtctgatgcatgcctctgccgtggagtctgtctgcttcagtgcctgccctgcctcccacccacctcgtgtgtacattttaacgcttctgttgacatgagacctctgccacaggctgggatttctagacgtaagaacaaaagcaaacgcctaggacagcaaacgccaggcggcccaggcgggaaggggctctccacggagatcgaggacacgaagcacaacgcctcttgctcgccttcccctcttgtgcttcagacacgcgcggactccagcaggcgccacagaaatgggcgagcccccgcagtgtacccctgtcgtaactgtgagcgactgcagctcggaac

SEQ ID NO: 14046 - DNA, 711 bp, Macaca Fascicularis
  misc_feature (1)...(711): n = A,T,C or G
tnncggtccctcagctactcgcctgtggagcgtcgccgtccctcgccccagccctcgccacgggaccagcagagcagcagcagtgagcggggttcccggagaggccagcgtggggacagccgatcccccagccacaagcgcaggagggagacacctagccctcggcccatgagacaccgctcctccaggtctccataaattgtctttgggggattccaccacaccccatgctctggagccacagggagtgtcccttcttccccagcagagccgtgggagggtccttgtctgctctcctttgaacactagcagcccttggatgaagggctccctttccctcccttttttttttctttgttcctgtgaaatgttaatctccgtgagttcttcctggttcacgtgttctggggggtttggggtgggagggaatgcagatgggagttgggggaggggaggatnnnnnnnnnnnnnnnccagcctggagtcagggccagggaggcatggccccagttgtatccaaaagttcccaggggtgactgtgatggtggttgggactggaggttgtgtaaggtgttcttggaaggaaggggcaggagttggaattagttggtccctactgccccccatgaggttgtgtacccctccccccaacttttcacgtttcttaaaggcattttggttttttaaaatctgtacagcaanngcaacttt

SEQ ID NO: 14047 - DNA, 596 bp, Macaca Fascicularis
  misc_feature (1)...(596): n = A,T,C or G
tatttagcacgacattgagaaatacacaaaacatgtaactgagtaagcaggaattttctattcctagtccatttctgaggactaaatcatgaactgcttccaatgtaattaaatatttcttgcaatagttgggcaccaagtttaagatttattaattttctcctctcagtataggcagcaattcaccattttctttcagttcctaaaaatgaaaaacaacaataataatatgtatatgcatatataaaaagatggaaacatctaaacaatcacagcttgtatgtatatctgagaaccaaaagaaacacttattggattaaannnnnnnnnnnnnnnnactctcaaactaaatgtgccataaaacctgaatacactatcaggttaaaaaaataacaaggtattcttggccaagtgtggtggctcacaaatgtaatcccagcattttgggaggccgagacaagcagatcgcttgaggccaggagttcaagaccagcctgaccaacatggtaaaatctgtctcttaaaaaataaataaataaggctgggcacannnnnnnnnnnnnnnnnnnnnnnnnnnnnnnnnnntcgaggtgggc

SEQ ID NO: 14048 - DNA, 775 bp, Macaca Fascicularis
  misc_feature (1)...(775): n = A,T,C or G
accggctgagagccgaggtgggaccgggagcaggggaccgtagagccgggccgcgctcctcccnnnnntagagttcgtggacgcgcagcagggtgccgtccctcttccggatgtcggactaagcgaacagcgctcccctgccggttggtagcagccggaagtgccaaaccggaggtgcgtcattcacccgnnnnnnnnnnnnnnnnnnnnnnnnnnnnnnnnnnnnnaggttcctactatggcttccagcggggtcccggtgagcgctgctggctcggctaatgaaactcccgaannnnnnnnnnncgtgggagattggcttcggggcgnnnnnnnnnnnnnnnnnnntaggaatgacttccggaggaacttgatactaaatttgggactctttgctgcgggagtttggctggccaggaacttgagtgacattgacctcatggcaccnnnnnnnnnnnnnnnnnnnnnnnnncaaatggaatcctgtgctgaacccgaatcttccaaaaaacagcctacaatctgtgaccaccacaagatgtgccctgatnnnnnnnnnnnnnnnnnncagatgggcacttttcttccctctccctgcctagtttccttttgttccttgagtccacgcagaattccattctctggtcagnnnnnnnnnnnnnnnnnnnnnnnngcctctgttctataaagttctgtacatagttcccaagcttctgcagggggtgatctttgctcttgtcctgagaaataacagtgctgtttaacaaacattgaa

SEQ ID NO: 14049 - DNA, 759 bp, Macaca Fascicularis
  misc_feature (1)...(759): n = A,T,C or G
acagatagtgaagaggagcttaagatgaagacatcctcagtacacagacnnnnngccatgactgtgaaaaaagaacccaaagaggaacgaaagggcctcaagaaagggactgctgctctgggcaaagccaacagacaggtgtccattactggcttcttccagaggaaataaactgccatctctggtagatcagagacttgaagtggtcaagggagaagaccaagaaatgtgctcctcacttactatgtaagttcatctagatctccacctcacttgtatcaaaagactgttctttcatcctgtgaggtttatactatttctggtttttaaccaaaaggaaatcatctggaagcaggagacaaaaagctgttaccttctaatgacatttaaaaagcacaatctttgacctgtccaggagaaggatttactccaaaattatactggaacagttttcannnnnnnnnnnnnnnnnnnnnngtggctaatccactgttccccactcgccttatgccctggtccgcatatggcacaggaattattccttcttgttcctctgtattctgagaattcatgtgggtgtttcttatccttacattctgctggatgtgtttacccctcttgtcttcctccagtaccacacttctgtcccctaacctcctgaggctgttctctgtaagtcttttaagtcttggttggactaaaggctgaagtgaaaatctccctgtaatcctctcctccattatgcagtatatggacacc

SEQ ID NO: 14050 - DNA, 643 bp, Macaca Fascicularis
  misc_feature (1)...(643): n = A,T,C or G
gtgcgcccagagccnnntgnnnaggccannccagcagcagtgaatgccaatccctcccagtttcttgccacccgtggccaagcggaacctccaccaccctcttccccagacactgttgccctgcctccccggatccgaccccagaaaaagaggaagaggcgcgtgtataaagtgcggacgtttgagacctcggatcgggcgtcggggcccagggcccccggccgccgctccagctcgtcgacggattccgcggacgccagccctgtgcacactgctggccctgctggcgcctaccactcggcgtcagcagagtccgtggacgagataccagtggcgcagacgcgcctgggcagcgccgctctggctgccccacggggccagggccgagagcccacgctggcgctgcaggcgcgtgcccccgccgttttcgtgagtccgagtagcggcgagcccggggcgccgggcggccgggaggctggtctggcttagctgggccgagagaccggagggccgagttggagcggccggcccgactctatatgcaacaccccatccttgccgcaccgagtgcactttagaggcctatacggccggcgggatcggcctccctcccccacgactcagcaatacccgccccaccggc

SEQ ID NO: 14051 - DNA, 719 bp, Macaca Fascicularis
  misc_feature (1)...(719): n = A,T,C or G
agcctcgccgcgaacctgtccttgctcctgtccagagcagagaggaaccggcgcctgcgtggggactatgcataccacccgctgcaggagatgaacggggagcttctggccgtagagaaggagcagccagggggcgcccacaaccccttcaaggactgaagcctccagctgccccgggtggcacgtcccgaaagcttgtttccccatcatctggcttcnnnnnnnnnnnnnnnnnnnnnnnnnnnnnnnnnnnnnnnnnnntcctcagcccctgtggggcagccaagttcctgatagcacttgtgcctcagcccctcacctggccacccgccagggcacctgtgatccnnnnnnnnnnnngctccctggaaagactcagccgcctgcttcctgcctgcctgtctgctgccgagaagcctgtgtccccgggagggctgctgcactgccaaagagtctcccacctcctggggaaggggctgccaatgaaccaagcccggtgaccatatcgtgacaaaacagcacatcccggccagcacccctggctggggcgggttaaacggacgagtctgccttccccgctgtggcacagcaccccttttgtacagaccgcatcacaggatttgccaactagaattcgatttcctgtcataggaaactgcttggaagaagggcgggggatgtaaatcacgtttacagaccatattttnnnnnnnnnccaa

SEQ ID NO: 14052 - DNA, 714 bp, Macaca Fascicularis
  misc_feature (1)...(714): n = A,T,C or G
ctgacccgcagagnnnnnnncnnngaagtcannngcgaggtggcccannnnnnnnnnnnnngggaccctcttcgtgggactgccaacttgtctgaggccatccgagttccacccttcnnnnnnnnnnnnnnnnnnnnnnnnnnnnnnnnnaaccaggcgaacatcacctgccaggtgagcaactactacccccagagactcctgctgacctggttggagaatggaaatgtgtctcagacagaaacagcttcgaccctcacagagaacaaggatggtaccnnnnnnnnnnnnnnnnnnnnnnnngtgaacacctgtgcccacagggacgatgtggtgnnnnnnnnnnaggtggagcatgatggacagccagcggtcagcaaaagccataccctggagatctcagcgcaccagaaggagcaggactcagatgtcacccatggtgtggttacttcccatttttaaattttgtctttttctttaatgttaaaagtagtattcnnnnnnnnnnnnnnnnnnnnnnnnnnnnnnnaaatataaagtaaaattttaatgtcagctccatgaccccaaattctacactccacgggtcactactacttagaaagttcaaggtgacaattggcaacttgcagacacccttaaaacccatctacaagagaannnnnnnnnnnnnnnnnnnnnnnnnnnntaatcgatctttcggcgtaaatatac

SEQ ID NO: 14053 - DNA, 723 bp, Macaca Fascicularis
  misc_feature (1)...(723): n = A,T,C or G
tgaaagcgcacccannnnnnnnnnnnnnncatagagnnnnngggnnnccacacaactccagtgcnanctcaacagagactcaacatgtgccttccaaccatacaaatgaaacttccaacagtactacgaaaccaccaacttcagttgcctcagtctccagcagtatgacagtcaccaccatgaaacccacagcagcatctaatacaacnnnnnnnnnnnnnnnctcaacaaatatgacttctaccaccttaaagtctacacccaaaacaacaagtgcttcacagaacacatctcagatatcaacatccacaatgaccgtaacccacaatagttcagtgnnnnnnnnnnnnnnnnnnnnnnnnnncacaacaactatgcattctgaagcaaagaaaggatcaaaatttgatactgggagctttgttggtggtattgtattaacgctgggagttttatctattctttacattggatgcaaaatgtattactcaagaagaggcattcggtatagaaccatagatgaacatgnnnnnnnnnnnnnnnnnnnnnnnnnnnnnnnnnnnnnnnnnnnnnnnnnnnnnnnnnnnnnnnnnnnttttggtttattaatagtttaaaacaatgttctttttttgaaaatagtataaacaggccatgcatttaatgtacagtgtattacgtnnnnnnnnnnnnnnnnnnnnaggtaacgggtttgggtttgta

SEQ ID NO: 14054 - DNA, 713 bp, Macaca Fascicularis
  misc_feature (1)...(713): n = A,T,C or G
catcagtgcnnnnnnnnnnnnnntggacgtcttctnnnagnnnctgacctatgtccaaagcaaccatcgtactaatgccccgttcaccccaagggtnnnnnnnnnnnnnnnnnnnnnnnnnnnnnnnnnnnnnnnnnnnnnnnnnnnngcccagaaatacaggcttgtcaatgttcatgacagcctcctcatgaaggtgcnnnnnnnnnnnnnnnnncagcaggactgcatccagaaaggctgggtgctgcacggcgtcccacgggacctggaccaggcacacctgctgaatagcctgggctacaatcccaacagggtatttnnnnnnnnnnnnnnnnnnnnnnnnnnnnnnnnnnnnnnnnnnnnnnnnnnnnnnnnnnnnnnnnnnggggagaggtaccacctcatgtacaagccacctcccaccatggagatccaggctcgcctcctgcagaacccgaaggannnnnnnnnnnnnnnnnnnnnnnnnnnnnacctgttctacaggaactcggcnnnnnnnnnnnnnnnctatgggtcggccatcaccgtcaacggagaccaggacccatacaccgtctttgaatannnnnnnnnnnnnnnnnnnnnnnnnnnnnnnnngaaaatcccctgatgggttcagagccaggagcgccgccccagggaaagagttaatcccctgcccccagccccccaacctctgcaaagctccc

SEQ ID NO: 14055 - DNA, 635 bp, Macaca Fascicularis
  misc_feature (1)...(635): n = A,T,C or G
cggctgcacggagctatcgagcgcgaccctgcgcagcacgagaagctcatcgtccgcatcaaggaaatcctggcccaggtcgccagcgagcacctgtgaggagtgggcgggcccacgatgcagaggagaagctgtgggcgcggccctgccccaccccaccccgtggacgagaggctgggggtccaccctttggggcctggtcccatcttgcaccttgggggctccagcccccctaaaattaaatttctgcagcatccctttagctttcagtctccccagacccctgaacccagaaaaagcactcgctgcgcgctacacccagaagaaccgcacagccacaggtgcccctcctcggaggacagccacacgctatactggctctccactggctctccaggccacccccgggacgcagggcagacgaaacccacccctagcacacagcaggaccccccagattactcactatagggggtctgtgccataggccacacagagctaccttgtggggacttaccgggggtgtcccccgtatgcctgtaccccagatgagtaggggcgggccttgcccatcctgccctcctccggccaagggaccctggtgggggtggtcccttcccnnntnnnnnncggac

SEQ ID NO: 14056 - DNA, 702 bp, Macaca Fascicularis
  misc_feature (1)...(702): n = A,T,C or G
gagatatagagccagactttgtnnnanttgaaattccagacaagtttgttgtaggatgatgcccttgaatataaccgctgnnngcatgtgatggcctcattgttatactnnnnnnnnnnnngaaaagccaaaatgaccaaatcctaacatgagacatcaancgcacatcctgcagggacaggggcatgcatggattaacagcaccctatcgacgccccagcccctcccccatctcccaccctgtacctcatcccatgagaccctggtgcctggttcttcgtcacccttggaaacgaaaaaccaagtcggaacagcagataacaacacagcaaggccccgctgcccaactccatatgtcaacaggggcgtgaggtcccaggaggtggccaaaagctagacggaaccccattcccgacatcacggcagcctccaacacaaggctttgagatctgggcttatggacaaggtgggaaggcgcaggagnnnnnnnnnnnnnnntccccaggctggacaggctgactgtcctttcccctctggcctttggccttggcttttctagcctatttacctgcacgctgagccactctcttccctttccccagcatcactccccaaggaagagccaagattttccacccataatcctttctgctgacccctagttccatctgctcagccaagcttgtatcagctctcagggcc

SEQ ID NO: 14057 - DNA, 683 bp, Macaca Fascicularis
  misc_feature (1)...(683): n = A,T,C or G
acttannnnnnncattnnnnnnaagagtgaactcactagttgtgaaatggtgaaggtcagnnnnntgccctgtgagtgacaggnnnctgctggccaggggataggttgaggcagatggtgcccagaagaaagaggccagcacccattgcacatggcaggcctggaatcctgcagccctccccaaaaccgagtgacccaggaatgaatctgctacaattccacctcgttctttcatacccagagccagagccagagccagagccttaagcatcatggtacctcttgcgcttctcacagtaagtgccaatctgctagataaatggccttcaggcagtgctccaggaatcctgggggagtcccaggccacctgtgcttccaccttcactacaagtggcccaattctggttttctagattgtacttatgcataaggtagtttctaaagaaaacattccactgtttaatttttttttctttttttgagaccgtcttnnnnnnnnnnnnnnnnnnnagtgcagtagtgtgatgatggctcactgtggccacaacctctcaggctcaagtgatcctctttaccttagcctgctgagtggctgggactacagatgtgtgccaccatgcccgcctcattttttttctttttttatagagatgaggttttgctgtgttgcccagactggtctc

SEQ ID NO: 14058 - DNA, 756 bp, Macaca Fascicularis
aggaagagttctccgattctgaagaggagggagaggggggccgcaagaactcttccaacttcaaaaaagccaagagagtcaaaacagaggatgaaaaagagaaagacccagaggagaagaaagaagtcacagaagaggagaaaaccaaggaggaaaagccagaagccaaaggggtcaaggaggaggtcaagttggcctgaacagacctctccagctctggcttcctgctgagtccctcacctttctcccccaacccctcagattttatattttctatttctctgtgtatttatataaaaatttattaaatataaatatccccagggacagaaaccaaggccctgagcccagggcagctgtgctgggtgaactcttccaggggccacgttgccacccattcttccccagttcttaactttgaaccataaagggtgccaggtctgggtgaaagggatgcttttatgcaaccgtaagacaaaatcctgaaatgcgaagtgcctgcttagtagctttggaaaggtgcccttattgaatattctagaaggggtggctgggtcttcaaggatctcctgttcttttcaggctcctaaggtaacatcagccatttttagactggttctgttttcataccttcccactggcctcaagtgagccaagaaacactgcctgccccgtcttctcctaattctgcaggtggaggttgctagtctagtttcctttttgagatactattttcatttttgtgagcctctttgt

SEQ ID NO: 14059 - DNA, 716 bp, Macaca Fascicularis
  misc_feature (1)...(716): n = A,T,C or G
aggggagnnnnnnnnnnnnnnnnnnnnnnnnnnnnnnnnnnnnnnnnnnnnnnnnnnnnnnnnnnnnnngagatgtcacagtaaagatgatctgaggtcctggggagatcctttctcttcctccccattacaaaagccacacaggcgaagctagtgtaactgggcagagctgtgagtcttcagaggtatttttaaannnnnnnnnttccctagcacaaaggagaacagcggaggagtgcaggactgttctttattctgaagaccaacaaaagccatggtttaatgannnnnnntgcgcccagaggacagtttaagaaacaccctggcttctcccactgctcagctgaattccatccgggagcagcagagcgaggcaacccgcccgtggctctgtgatctgttgaattaaagagacgaagaagagtcctcctttccctgactcaaaagctcatgaattcaaaagaatatagatggggtttcttctgaggttacatttaaaaagctgaaggatgggggaagggaagnnnnnnnnnnnnnnnnnnnaactctttgggaacaggagaggcatgaggggtgcagaacaggggagcagtcacctacagactgggccttccagccttggtccctgctggggcttctgacatcttcagtctgtgagtaagtggacatattttaaatcnnnnnnnnnnatgaacccaaaggaaaaaaaaacataa

SEQ ID NO: 14060 - DNA, 1154 bp, Macaca Fascicularis
  misc_feature (1)...(1154): n = A,T,C or G
cagaggataacactagcagattctgttccatctttgcactgttgcttannnnnnnnnnnnnnnnnnnnnnnnnnnnnnnnnnnnnnnnnnnnnnnntgcttttctctttttnnnnnnnnnnnnnnnnnnnnnnnnnnnntcnnnnnnnnnnnnnnnnnnnnnnaaaaaaggctgggtttattatnnnnnnntttaagcttttatacctttatcttcttggaatggtcagattctgannnnnnnnnnnnnnnnnnnnnnnnnnnnnnnnnnnnnttttaaattgtgcatttttaacactacagtgaaataagatatccctgtgttcatagtatgaggggctgttttatgtcatgttggcannnnnnnnnnnnnnnnnnnnnaagtgtttctaaaggtgtttcagtgcttgtgctgatacaaagtaagttattactttgcactaggtggtttggccactgaattaatactgtatagcaagagaaacaatcttatttctttgtacaacaaacatgtttaagttcttcatttctgttgatttttcttactgtgtttgattcagtggctgggaattgagagtttatttgaagtagaataggtaacacctcagcgcactatagaaaatgcactcagctcaactgctgtgtttaaaatacacattttaaatccctctttacagacactaacataaaagtacatctttttgggttgtaaacatgtggtagtaccagagtattgtatagtcaatgttaaataaaagccaaaactggaatgtgcagaaaataggctttggttaatttgtggattcatttttatttttgtctttaactttttaaaaaataggatttctggagtagattggtatgttctgttaaagactacagtgatccattttgcttacactgttgcatcacaagggattcacccagggaccatgacctgctggtgtgtgtgtatatttacaaaaacaaaacaaacaaaccacnnnnnnnnntataaggtggcaatcacaaacgaaagactgcggcttgttgaggtgcaataccctgactcccaaagttagttacagtgggttttattgttttnnnnnnnnnnnnnnnnattcagactgctgtactcttcatttgatgtaacaaaatgctattaatctaaatatt

SEQ ID NO: 14061 - DNA, 763 bp, Macaca Fascicularis
  misc_feature (1)...(763): n = A,T,C or G
agtgacaaggccaaaaagaagatgtactcccgcaagacgaagcccttctccttctacctggacatcaagtggctggccaacttctggggttgtgacggccagcccaggatgtaccatcacacgatccccgtcatcagcctgtacagcctgagagagagcctggccctcattgcagaacagggcctggagaacagctggcgccagcaccgcgagaccacagcgtatctgcatgggcgcctgcaggcactggggttgcagctcttcgtgaaggacccagcgctccggctgcccatggtcactaccgtagttgtgcccgctggctatgactggagagacatcgtcagctacgtcttggaccatttcgacattgagatcatgggcggcctcgggccctccgcagggaaggtgctgcggatcggcctgctgggnnnnnnnnnnnnnnnnnagaatgtggaccgcgtgacggaggccctaggggcggccttgcagcactgccccaagaacaagctgtgacctgcctgctggcacacacccggcccatgcccaccccgagggatcaggaggatcaggagcaagcagaccctgcaatgtcccccaggcctggggacaggaaagccacggacccagcccgggaggcagaaccaggcagcccttttccctccagtggcacctcctggaaacagtccacttgggcgcaggacccagtgccttccaaatgagcggcagttccccggccgtgagcctcccggaaatgtttaataaa

SEQ ID NO: 14062 - DNA, 729 bp, Macaca Fascicularis
  misc_feature (1)...(729): n = A,T,C or G
gacnannacgangtcatccgcttccccattgacctgaagaccatgactgagcggctgcgaagccgctactatgtgacccggaagctctttgtggccgannnnnnnnnnnnnnncgccaactgccgcgagtacaaccccccagacagcgagnnnnnnnnnnnnnnnnnnnnnnnnnnnnnnnncttctacttcaagctcaaggaaggagggcnnnnnnnnnnnnnnnnnnngnnnnnggccacagccctgaccttgaatgtctccacctcggattctgatctgatccttaggggatgccctggccccacggacccaactcagcttgagacactctagccaagggccctccggcccctgatcnnnnnnccctttctggaccttcaggcacccccaagcctgcagctctgtcccagcattcaaagtgtgtgagaggtttnnngggtaggggcccagtccctctagagtggctggtgggacgggatgaaccttgcccagccgtggtggcccccagacctggtccctaacagctttggaggcttggattcccaggtggctatttccctgaggaccaggactgctcattttagcttgagtgatggcttcagggattggaagttcagtccaaactggagggggccatgccttnnnnnnnnnnnnnnnntcagtctcccccggggtgggggtatggggaccattcattccctggcattaatcccttagaggaacaaa

SEQ ID NO: 14063 - DNA, 697 bp, Macaca Fascicularis
  misc_feature (1)...(697): n = A,T,C or G
gatgttggataaatgtcnnnnnncaaagatgacaggacttttgtctctcatttttgtctttttattaccagttataaaagatctggtctggatttatggaatttatgtttatcagctctatgtattcccttatagaggctggnnnnnnnnnnnnnnataatatgttttctaatacttaaccatttattcaaagatatatttacattgggttgtgccccttttccttannnnnnnnnnnnnntttcttattgaggtaattatgtactatttatatttgaannnnnnnnnnnnnnnnnnnnagtagctaaaatgttgagattagaggtacttttactattcttctcaaaggtaactgatcagataattacccaaattattcaagaaaatagannnnnnnnnnnnnnnnnnnnnnnnnnnnnaagaattcatnnnnnnnnnnnnnnnnnnnnnnnnnnnnnnnnnnntttgcagttttgaaaannnnnnnnnnnnnnnnnnaatgttctacagtctttaaatgtagtagaattagacagtgagatcatctgagtaaattaattggtgattccagagataagactaatattttaaattatttatgttactgattaggataaaaacnnnnnnnnnnnnnnntttgaagcaaagtacatgtacacttcaaagagtaaactgacagatgtataaatgctgtagc

SEQ ID NO: 14064 - DNA, 680 bp, Macaca Fascicularis
  misc_feature (1)...(680): n = A,T,C or G
aaagcttttcctgcttannnnacgggngnctggcctaccacctggctgtggtgctgggcagtgctgccaatcccctggcctgcttcctggccatnnnnnnnnnnnnnnnnnnnnnnnnnnnnnnnnnnnnnnnnnnnnnnnnnnnnnnnnnnnnnnnnnnnnnnnnnnnnnnnnnnnnnnnnnngagcccctgcccgcccctggtgggcacctcggcaggggtggtcctcgtggtcctgtcgtgggtgctgtgtcttggtgttttctcctacgtgaaggtggcagctagctccctgctgcatggcgggggccggnnnnnnnnnnnnnnnnnnnnnnnngccatccaggtgggctctctgctcggcgctgttgctatgttcccccccaccagcatctatcacgtgttccacagcagaaaggactgtgcagacccctgtgactcctgagcctgggcaggtggggaccccgctccccgacgcctgtctttccctcagcgctgccaccatgcctgagtgcctgcagcccaggaggcccgcacaccggtacactcgtggacaccacacactccnnnnnnnnnnnnnnnnnnctggggcggggggaaagggcagggagcaggcttggagccagggaccggtgggggctgtagggtaagcccctgagcctaggacctacgtgtggtt

SEQ ID NO: 14065 - DNA, 626 bp, Macaca Fascicularis
  misc_feature (1)...(626): n = A,T,C or G
ctgaacttgatacattaagtgaagagtcatacaaagacagcacgctaataatgcaattactgagagacaacttgacattgtggacatcggatacccaaggagacgaagctgaagcaggagaaggaggggaaaattaaccggccttccaacttttgtctgcctcattctaaaatttacacagtagaccatttgtcatccatgctgtcccacaaatagttttttgtttacgatttatgacaggtttatgttacttctatttgaatttctatatttcccatgtggtttttatgtttaatattaggggagtagagccagttaacatttagggagttatctgttttcatcttgaggtggccaatatggggatgtggaatttttatacaagttataaatgtttggcatagtacttttggtacattgtggcttcacaagggccagtgtaaaaccgcttccatgtctaagtgaagaaaactgcctacatattggtttgtcctggtggggaataaaagggatcattggttccagtcacaggtgtagtaattgtgggtactttaagnnnntggagcacttagaaggctgtagtagaaacataccccatggacaccacaggttaaaccatgtgtatc

SEQ ID NO: 14066 - DNA, 492 bp, Macaca Fascicularis
  misc_feature (1)...(492): n = A,T,C or G
ggggtgggcccggccctacctggatctcctccctcctcccaggggttcagatgtggtggggtagggcgccttggaagtctcccaggtcttccctccctcctccgatggacggcttgcagggcagcccctggtgaccagcccagtcaggcctcagccccgtttcttaagaaacttttaggggccctgcagctctggggtgggtagcgggaaggagctacaggcaggaggaagaatcttgnnnnnnnnnnnnnnnnnnnnnnnnnnnncccgcccggccttcaccagccctgtgccagctctgggggcagaggtgnnnnnnnnnnnnnnnnnnnnnnnnnnnnnnnnnnnnnnnnnnnnnnnnnnnnnnnnnnnnnnnnnnnnnnnnnnnnnnnnnnagaggcaggtgcactctgcagcactgccnnnnnnnnngaggctctgtacatcttgtttgtagcacacttgagtttgtgtattccattgacatcaaat

SEQ ID NO: 14067 - DNA, 734 bp, Macaca Fascicularis
  misc_feature (1)...(734): n = A,T,C or G
cgctgcagcctcgctgggtcaggctccgcagggccnnnnnnnnnnnnnnnnnnnnnnnnccggtgacgacttnnnnnnnnnnnnnnnnnnnnnnnnnnnnnnnnnnnnnnnnnnnnnnnnnnnnnnnnnnnnnnnnncgttgcgctgtccgcccgttgagcttctctgggccccgcggcgcgggcatcgactctcgccggcggatgacgagctgtatcagcggactcacatctctctgctacaacgcgaggccgctcaggccacgtacatcgacagctacaacagccgcggcttcatgataaacggaaaccgcgtgctcgggccctgcgctctgctcccgcactcggtggtgcaatggaacgtgggatcccaccaggacatcaccgaagagagcttttccctcnnnnnnnnnnnnnnnnnccggatagagattgttgtggtggggannnnnnnnnnnnnnnagaggctgcagtcccaggtgcttcaagccatgaggcagcgggnnnnnnnnnnnnnnnnnnnnnncacgcccaatgcctgtgccaccttnnnnnnnnnnnnnnnnnnnnnnnnngtaactggagctgctctcatccctccaccaggagggacttcactcaaacctttgggccaagctgctcaatgaaccaccgtgaactgtcctgctgactgcactctgccaggcttcccgatggttgcactcttatctacccttggcactaacctgctatcaa

SEQ ID NO: 14068 - DNA, 836 bp, Macaca Fascicularis
  misc_feature (1)...(836): n = A,T,C or G
tgcagatgagatgcaagaagcannngagaaggncttcagcagcatgaagaagtactgccangtcatccgtgtcattgcccacacccagatgcgcctgcttccnntgcgccagaagaaggcccacctgatggagatccaggtgaacggaggcaccgtggccgagaagctggactgggcccgcgagaggctcgagcagcaggtacctgtgaaccaagtgtttgggcaggatgagatgatcgacgtcatcggggtcaccaagggcaaaggctacaaaggggtcaccagtcgttggcacaccaagaagctgccccgcaagacccaccgaggcctgcgcaaggtggcctgtattggggcatggcatcctgctcgtgtggccttctctgtggcacgtgctgggcagaaaggctaccatcaccgcactgagatcaataagaagatctataagattggccagggctaccttatcaaggatggcaagctgatcaagaacaatgcctccactgactatgacctgtctgacaagagcatcaaccctctgggtggctttgtccactatggtgaagtgaccaatgattttgtcatgctgaaaggctgtgtggtgggaaccaagaagcgggtgctcaccctccgcaagtccttgctggtgcagacgaagcggcgggctctggagaagattgaccttaagttcattgacaccacctccaagtttggccatggccgcttccagaccatggaagagaagaaagcattcatgggaccacttaagaaagaccgaattgcaaaggaagaaggagcttaatgcgaggagcagatttgcagctggtggggtctcaaaa

SEQ ID NO: 14069 - DNA, 723 bp, Macaca Fascicularis
cctgtgccacccttcccctactcctcaaatcatcctttaagtcttcttccaagtgctgtggggcatagtgatgaggcgctggccttgggggccacaccaggtcgcagcagacgccttcagcctggggtgccagtgttttatgcaattagttcagtaaaacacgccccggaaattcaagattgagtgtcagatttgatatatgttcagcattcctcattacagaaatctttcttttactgaatgggaaaggtttaaatgctaaccaaagcaatttatttttaattaatattagtagacgatgtgctgtcatattgaactcactgctagctaagagatctatcagaggcttagatatattttctccaggtttttgtgggggttttttgttgttctatccatgtgacagaggctctttctaaaagtatgtagttcgctgtgtgtcggctccagcagtaaccatcctcactgcgccacgtactcctctgtagatgtgcacccagtgggggctccttgcagccccaggactgcagcagcagccagatgctgagtggattgagttccaggtgcatccaagacttttcctcccttccagaaggcactgactgaagacggatgggtcatgtgggaccggctgaaatgctctaaccttttcataaagcgtgggtggtccagtttgaactgatgggaaacttcttgtcattcttcttaaatggatgatactga

SEQ ID NO: 14070 - DNA, 732 bp, Macaca Fascicularis
  misc_feature (1)...(732): n = A,T,C or G
ggatgaccgcactgtcaacgacctggaggacagttacgggcagcagtggacatacgagcagaggaaggtggtggagttcacctnnnnnnnnnnnnnntttgtgagcatcgtagtcgtccagtgggcagatctgatcatctgcaagacccggaggaactcggtcttccagcagggcatgaagaacaagatcctgatctnnnnnnnnnnnnnnnnnnnnnnnnnnnnnnnnnnnnnnnnntactgccctggcatggatnnnnnnnnnnnnnnnnnnnnnnnnnnncccagctggtggttctgtgccttcccctacagtttcctcatcttcgtctacgacgaaatccgcaaactcatcctgcgcaggaacccagggggttggnnnnnnnnnnnnnnnnnnnnnngacctcagccccaccacatcgcccgtctcttccctgtcccccaagcccaggaccacccctgccagtcccccccattttgtattctgcggggaggagccctctctccccatggccccaccttggcccccaccccctccattatctcctgacacccctactnnnnnnnnnnnnnnnnnnnnnnnnnnnnnnnnnnnnnnntctcttttctgtgtcagtttctctccctttcctcacccctctatccatttctccggccccagccacctccctgggctcttttttactccctttcagcccctcggctgatgntgtctctggttctggacaatat

SEQ ID NO: 14071 - DNA, 721 bp, Macaca Fascicularis
  misc_feature (1)...(721): n = A,T,C or G
cnnnnnnnnnnnnnnnnnnnnnnnnnnannntntnnntgaaagtgattttgatgatgaagcatactatgcagccctgggaactaggccacctattaatatggaagaactcaatgaatcataccagaaagtaattgaactcttttctgtatgcactaatgaagaccctaaagatcgtccttctgctgcacacattgttggagctctggaaacagatgtctagtgatcacctcagctgaagtgtggcttgcnnnnnnnnnnnnnnnnnnnnnnnnnatatagttactatcagtagttgttagattctctaaaattggcatatttgaggaccatagtttcttgttaacatgtggataactatttccaatatgaaatatgcttatgttgnnnnnnnnnnnnnnnaattgtactgggttttctataaagtattagaaactagctacataagtactttgatactgctcatggtaacttaaaacactagcagtaaaggccgggcgcggtggctcaagcctgtaatcccagcactttgggaggccgagacgggcggatcacgaggtcagnnnnnnnnnnnnnnnnnnnnnnnnnnnnnnnnnnnnnnnnnnnnnnnnnnnnnnnnnnnnnnnnnnnnnnnnnnnnnnnnnnnnnnnnnnnnnnnnnnnnnnnnnnnnnnnnnnnnnnnnnnnnnnnnnnnnnnnnnnnnnnnnnnnnnnnnnnnnnntg

SEQ ID NO: 14072 - DNA, 712 bp, Macaca Fascicularis
  misc_feature (1)...(712): n = A,T,C or G
gatcacnnnnnnnnnnnnnnnnnnnnnnnnnnnngcccagggagacccagtgtgcggctccgacggggtnnnnnnnnnnnnnnnntgccgccttcgggaggcagcctgccgccgggccgcgcctcnnnnnnnnnnnnnnnccagctgctgtgccctcgaacagccgctgccggcctcagtgtcctccacctacggggatgacctggcttctgtggccccggggcatttgcagcaggacctgaagctgagtggagctggccttgaggtggtggactcagaccctgagcccgaaggggaggtggaggacagtcagagcggcttctcttcctgacggctgccctgctcagagcaggacgacaccatctggctgcatcctgtccctatccgcctgtgactctgcctggtgggtgggcagacctcggcccaggtgacacctgcctctaaatgaacccaaggagcagaatggcagagatctgcccgtccctaggatgggactcagggcccaggtgtgggctcagcagtcaccagagtggtgcagggggcacaactggaggtcccttgggagaccccccgacttcctagctatagctggaactccaagcaccccaatcccccagccttggagctgggcatcattttcctggggccacggcggctcccacagcctgacattctgttcgcgggagaagaaacgttcccagaaagcacttgt

SEQ ID NO: 14073 - DNA, 696 bp, Macaca Fascicularis
agtagttatgcgagtggatagattggtatgtagagggaaagaggtctgctgtaaagaacaacacttgtttgtctgtggggaaagaaaagtagaatacttgagatgaaagttggcatacaaataggatactgtcgccagtagttatattacaaacactgtcggcctttctaatgtgaatgaacattactgtcattcctagtttaaagttaggttgcgtggttggatttttccactatcgttttctaatttttctaccatttggagacccatagggatttgggcctgtcaccccttggatgggttcctagtttgtttacattttcctgaaccctcctgagcgcccattcttggtctagtccccggtcgtgatgattccacacttcctcagcagcatgttctcttgtctcattcatgagctgatcagtgtttcgtctctttaactgacgtgttccccagtgctgtttgaactgttgattttccgttgctggctgagtgcgttttgtccttcacataaccttcactggtaaaaataagcccatgtgatgtccaccagtggatgaaggcaggaccaagagccctagcttctggatccaggtctagccccttcatctgctgctctgtggcccagggcaggtttgcttgacctctgcctcagttttctactctaaaggacatattgacctacctcacaggggt

SEQ ID NO: 14074 - DNA, 722 bp, Macaca Fascicularis
  misc_feature (1)...(722): n = A,T,C or G
gggagaaaccctatgtatgtgataaatgtcagaaagcnnnnagccagaacattagcttggttcaacatttgaggactcattctggagagaaaccctttacttgcaatgaatgtgggaaaacctttagacagattagacaccttagtgaacatataagaattcatactggggagaagccctacgcatgcactgcatgttgtaaaacctttagtcatagagcatatctaacgcatcaccagaggatccatactggggagagaccctacaaatgtaaagaatgtggaaaagcctttaggcagaggatacaccttagcaaccataaaactgttcatacgggagtgaaagcatatgaatgcaatcgctgtggaaaagcctataggcatgattcatcctttaaaaaacatcagagannnnnnnnnnnnnnnnnnnnttatgaatgtaacgagtgtggaaaagccttcagctataactcatcacttagtcgacaccatgaaatacacaggaggaatgccttccgaaataatgtgtaaaaacaggtatttgacatgagaacaaaagccaagtgtaaattggtgatttagaatgctttaaaatttcaggactcaaatgtgaggaattggtgtaatgatgccaacttttaatttttcccattgtaaataaacattacattgacaggtactgactactaacacttctataaaaagtacttaagattaaaatct

SEQ ID NO: 14075 - DNA, 718 bp, Macaca Fascicularis
  misc_feature (1)...(718): n = A,T,C or G
ctggacagatgactccaaagaatccatgattggcaaaattagagtcagtggaaatgtcacaaccaaaaacatcacgggnnnnnnanctaataccatctactttgcttctgtgagagcttacaacactgctggaacagggccgtcaagccccccagtcaatgttaccaccaaaaaatcccctccaagccannnnnnnnnnnnnnnnnnnnnnnnnnnnnnnnnctctaaattatgcttgaactgggagcatgtaaaaaccatggaaaatgagtctgaagttttggggtacaagattctgtaccggcaaaacagacagagtaaaactcatattttggaaacaaacaatacatnnnnnnnnnnnnnngttccatttgaagaagactacttaattgagataagaacagtcagtgatggtggagatggaagnnnnnnnnaggaaattaggattccaaaaatgtcnnnnnnnnnnnnnnnaggaattcaagtcttagaacctagcatccnnnnnnnnnnnnnnntcattgtgattttttactgttttgctattcagccacttatccgatgaataaaaccataannnnnnnngagttttttgaaagcaaatcattctgtaaatatgctctccagcctctgacacaagacgcgttcttaatacagagttgttgcaaagaaaaaaaaatgtatattattaaaatcttgtaaatatctatggtacata

SEQ ID NO: 14076 - DNA, 743 bp, Macaca Fascicularis
  misc_feature (1)...(743): n = A,T,C or G
atcnnggcannnnnnnnnnnnnnnnnnnnnnnnnnnnnnnnnnaccaggaagaccagatccatttcatgtgcccactggcacggcagggagacttctatgtgcctgaggtgaaggagacagagcggaaatggcgggggcttgtggaggccagtgannnnnnnnnngatggcacaggagctgacacaatgagtgacacgannnnnnnnnnnnnggaggtgagccctggcagccgggagacttcagttgctacactgtcacctggggcgagcagccgtggctgggatgatggtgacacccgcagcgagcacagctacagcgagtcaggcgccagcggctcctcttttgaggagctggacctggagggtgaggggcccttaggggnnnnnnnnnnnnnnnctgagactgagcccctggggactaccaagtggccctgggagcccagtgctcctgagaagggcaaggagtaacccgtgacctgcaccctcctgcagtgcagttgctgaggaactgagcagactctccagcagactctccagccttcttcctccttcctttgggggaggaggggttcctgagggacctgacttcccctgctccaggcctcttgctacgccttctcctcactgccctttaggctcccagggccaaaggagccagggactatnnnnnnnnnnnnnnnnnnnnnnnnccgcccctgttgtgtcttttttcagactcacatcggaagcttccaggacccaca

SEQ ID NO: 14077 - DNA, 674 bp, Macaca Fascicularis
tcaaacataatatgaaacccggttattgaacaatatcattcaacgaatatacaagatttcaaattcagccccatggtcatgaagcgagagaggggattacagagacgaccagcatcatggaggaggccactgtggagtaggcaagatgcaggggctccagggaggtgcctattttcaacccaacaaatctcaatccattcctttgggaataagaagaaggaatccaactacctcttgaaacacagccctaaaattcatggtgaagaaagctgatattccagagaacagatgctaaattaactggggcagatgaccttacccagtgagatcaggtggctgtagttctccaacatcacgtccctgtacaaggtcctctgatcaggctgcaggcactcccactcctcctgagagaagtcaatggccacatccctgaatgtcactgatccctgaaaccacaaacacatgtattatggtgaaattgaagaaaattgtttcgagacgaaaggagaggaagtgaaggattaaactgcaataaaggagcaatatggaaaattgcggagtgcctacacattcttcaagaatcctgctgctggcctggcatggtggctcaggcctgctataccagcactttgggagaccaagatggaaggaccgctgagcccaggagtttgcaa

SEQ ID NO: 14078 - DNA, 753 bp, Macaca Fascicularis
  misc_feature (1)...(753): n = A,T,C or G
tttattgtaaaacgacacgagaactaatgctgcatgcccgttgctgcctgaatcagaagggcaccatcttggggctggatctccagaactgttctctggaggaccctggtccaaactttcatcaggcatataccactgtcatcatagacctgcaagcaaaccccctcaaaggtgacttggccaacactttccatggctttactcagctccagactctgatactgccacaagatgtcaannnnnnnnnnnnnnnnnnnnnnnngaatactatcacctcttatatagacaaccaaatctgtcaagggcaaaagaacctttgcnnnnnnnnnnnngacccagaaatgtgtcctgagaatggnnnnnnnnnnnnnnnnnnnnnnnnnnnnnnnnnnnnnntttgtgctgatggtttccacggatacannnnnnnnnnnnnnnnnncgttctcactgctcatgttctttgggattctgggatccaccactctatccatctccattctgctttgggggacccaacgccgaaaagccaagacttcatgaaccacataggtcttaccattgacctaagatcgatctgatctatcttagcccagccagggagctctgcttcctagaaaggcatctttggccagtggattcacctcaaggttgaggccgccattggaagaggaaaaattgcactcaccnnngtgtagacaaataccagttcccatttgtgttgttgccnnntaataaacactttttttccctc

SEQ ID NO: 14079 - DNA, 750 bp, Macaca Fascicularis
  misc_feature (1)...(750): n = A,T,C or G
cagggcaggggagctacagaaagtnntgagaggaannnntcgtagtccannnnnnngagggtcnnnnnnnnnnnnnnnnnnnnnnnnnnnnnnnnnnnnnnnnnnnnnnnnnnnnnnnnnnnnnnnnnnnnnnnnnnnnnnnnnnnnnnnnnngctggtttctttctgagtgtgatcctgttccctgggcttccctgatgccaccctagagtctcttagggctggtccctcaggtgggtaagggctgggcccgtgctgctatgaaggctccttcctcactgatccctcccatcccccaggtgacgtgaacgttgttcagcctgactatcctgcggcagcccgtgacttcctccataccttccgccgcgggctgctgggccccgtgatgctggacctcgacatcctgcgtggccaccccccggccgagactgtgccctgaacttgtccgggtggggagggccacgagtggcctcccagacctcctcacctgggtggttgaggctcaagacagctcacctggtccaggagctccatgctggccactagggtgctgtgctctctggtgcccccacggcccggctagctccaggggccccagttccaggggccaagcaggtgggagtggacaacaggcttcccaggtgacgtccctgagcagctccgcatgctaggttctcccggagcttcctgctcaggcctcttgagaaatggatgctgtctcagaaggagttaaagctataacctgtaacc

SEQ ID NO: 14080 - DNA, 825 bp, Macaca Fascicularis
  misc_feature (1)...(825): n = A,T,C or G
acgagagcaaactggtgcaggaggcnctggaggcggtgcccaggggcgagattgaagtggtcacctcctcccttcctgaactgtatgtggagaaagtgctggagtttttagcttcctcctttnnnnnnnnncgcnnnnnnnnnnnnnnnnnnnnnnnnactcacaaactgctcatgttgcatggacagaagctgaagtccagagccgggacgctgctgcctgtcattcagttcctccagaagagcatccagcggcacctggacgacctgtcgaaacnnnnnnnnnnnnnccgctataacatgcagtacgcactagcagtttccaagcagcggggcacgaaacgctccctagagccgctgggaagtgaggaggaggaagaagcatctgaagacgacagcctgcatctgctcggaggaggaggcagagactcagaagaagggatgctggcctagagccagccggnnnnnnnnnnnnnnnnngctggctaagacctgccagggagatgggacccttgtgccacctgggccagcaaagaggagggtccagagagcagctgaaattctgnnnnnnnnnnnnnnnnnnnnnnnnnnnnnnnnnnnnnnnnnnnncagcgggacagcgagccgacgggtcacgccaggggccagcacacactggtacccggcgccaggagcggggccatgtgaacagtgatgaacattgaaaatgcctctcagagagggattcacatggactttgtgtgagacttatttatatctttaatataaaggtttgataaacaacttagggataaaaaagagggggttttctaacgtgaggatgaag

SEQ ID NO: 14081 - DNA, 787 bp, Macaca Fascicularis
  misc_feature (1)...(787): n = A,T,C or G
gagtcaagagaaagtacagtaacactattancttatctgactttaaggggaaataatttctcagaggattataattgtcaccgaagccttaaatccttccgtcttcctgactgaatgaaacttgaattggcagagcattttccttatggaagggatgagattcccagagacctgcannnctnnnnnnnngttttatttaacagccgacaaatgaaattcttacagcctgaaggcacacgnnnnnnnnnnnnnnnnnnnnnnnnnnnnnnnnngccctgactcnnnnnnnnnnnnnnnnnnnnnnnnnnnnnnnnngtgaccagctgtccagcccagccctgtgtgtgaatcatttctgatgtgtgtaaatgggannnnnnnnnnnnnnnnnnnncctgagggcttgatgctaacacaaaagtaggattgactttaactcttaagcgcagcatattgctgccacatttacagaatgnnnnnnnnnngtctgtgtctgatttnnnnnnnnnnnnnnnnnnnnnnnggaaatttattagacgtataatgtatgtctggtgtttnnnnnnnnnnnnnnnnnnnnnnnnnnnngcaacttcttcacatactgtacatacctgtgaccactcttgggagtgctgcagtctttaatcatgctgtttaaactnnnnnnnnnnnnnnnnnnttgtccaaataaaatttattaataagatctatagagagagatatatacacttttgattgttttctagatgtnnnnnnnnnnnnnnaatttgtgacctgtattaat

SEQ ID NO: 14082 - DNA, 652 bp, Macaca Fascicularis
  misc_feature (1)...(652): n = A,T,C or G
cactcagatttttttcttttggtagtgatttggctttttgttaacaacagtgacacaagttttatgtttaatttaaatactacaacggttaaactggttttgggtgagattttccagaaatttattaaatacgaagttccttaactactgacttaggagcgaataacgtattgtttaaccagggaaaaagttgtcaacaaccaccagcttctcttcctacttttttagaatataaaagatagtatctaaattattttttcctctctcatcacttacaaaaatctcaattatttaggcatatccttggcatgttcataaaattgttccattaggcattctataattataatcatattatttttaatccctactcatttcacctataattttcaaatgtttgatttttattcaattcttatatcctgttcatatattttttagctatagtaaaacatgatttttcatgtgtattaattttttttttgnnnnnnnnnnnnnnnnnnnnnnnnnnnnnnnnnnnnnnnnnnnnnnnnnnnnnnnnnnnnnnnnnnnnnnnnnnnnnnnnnnnnnnnnnnnnnnnnnnnnnnnnnnnnnnnnnnnnnnnnnnnnnnnnnnnnnnnnnnnnnnnnnnnnnnnnnnnnnnnnnnttttg

SEQ ID NO: 14083 - DNA, 802 bp, Macaca Fascicularis
  misc_feature (1)...(802): n = A,T,C or G
agctgggaagtggggaagattcgggcaagtgcccccagaactgtcctggctccttccatattaaacgtatttgcattttgagaagtgtccttcccacctcagtcctccagagagactgccctagtctttctggggtctttatgtcctcagctaaagcctggcctagttgctgagaggggctggggagatggggcgggagggccnnnnnnnnnnnnnnnnnnnagctaggtgcttccccttcccccgagactggtggactgaactctaatcaagttgagttcaagtgaaagattcttccagggttttattttttcccctcctaacaaagtctcatnnnnnnnnnnnnnnnnnnnnnnngtctctgaggtgcaaagaatgcacttttccctatggggcnnnnnnnnnnnnnnntctgccaggcagtcaccacgcttccctaccccagcctgtttcttttggcttggtttggaccacagtcctctgctatccagggttttagagcccctgctctaggaaacagttgttagtttaagaaatcattggccccttcccagcacannnnnnnnnnnnnnnnnnnnnnnnnnnnnnnnnnnnnnnnnnnnaactccacctctgttctccttgaacagcttcccttccagcccactgctttaggatgacacaatgaataacacctagtcatagaaatcagtctctttggtttttgtattatgtnnnnnnnnnnnnnnnnnctaaatacaaaggatatacagtcttgatgaatctaaaataatttgctaactattttnnncttcagagagaa

SEQ ID NO: 14084 - DNA, 777 bp, Macaca Fascicularis
  misc_feature (1)...(777): n = A,T,C or G
cattacattcagacacactcgctnntnnntnctggcttaaagctatggatgattcacgttgttttttaatgttaaatgtatactcaatatactgaaaaggttcccacattttgagtagtagttgtcactgtaggtcagccagccatcagaattctcccacactaagtgcatgtcagttgtggagaaaacatagcaaaaagagccatacgctctttacagatactaatgtcaagagttcaacctcctcaggttcaacctgtgataaaagaccagtgcttcccactacctgcatggggttcacttttataattttcttgggagtatcacaggaaaatcacaattacaccactttagaccctatgtgtagcaggtcacaacttacccttgtgtgtttagatgtatggaatacctgtatacattagtgaaagctgtttactgtaacggggaaaaccagattccttgcatctgggccctctaccgattgttaaaggagttcctgtcacctgctctccccccagtgcatgcgtctgtccacctggctaacttttaatatgtgtatttttacattatgtaaattcttaactggcctgtctcgtttagactgtatacannnnnnnnnnnnnnnnnnnnnnnnnnnnnnnnnncagtaagattcctataagaaatactgctttttaaaaaaaaaaagtaacatgctgaggggtgacnnnnnnnnnnnnnnngtggtcactttatttataggatctttaaaacaaagtacatttttaatgaactaag

SEQ ID NO: 14085 - DNA, 1304 bp, Macaca Fascicularis
  misc_feature (1)...(1304): n = A,T,C or G
agcagtacacatgcccatcnnnnnngcnnnnnnnnnnnnnnnnnnnnnnnnnnatgacttactacgcacagtgttaccagtatatgttagacctccagaaacaactgggaagttttccatccaattatcttagtaacaacaatcagacnnnnnnnnnnnnnnnnnnnnnnnnnnnnnnnnnnnnnnnnnnnnnnnnnnnnnnnnnnnnnnnnnntggcctagtaatcacctctccttccaacctcagtgaccttaaggagtgtagtggcagcagaaaggccagggttctctnnnnnnnnnnnnnnnnnnnnnnnnnnnnnnnnnnnnnnnnnnnnnnngaggtgatcactgtgttcagtgttgttggaatggattcagactggctgatgggggaaaggggaaaccagaagggcaaggtgccaattacctacttagaactgctcaattaaataggtggactatggaaaggttacnnnnnnnnnnnnngtatttatatacaattaactctaaataaagcaggttaagtatcttccatgttaatgtgttaagagactgaaaatagcagccatcagaaaccggcctttctgccgataaagttgcatggtaaatatttcattacagaattcatgttagagctttcatgccaagaatgttttcttacaaaattctctttttattgaggtttcactaataagcagcttctacttttgagcctcaacttaaagcagaactgttttctactggatttttcattaacagcaagctttttcttttatgtaaaataaatctattgtgaattgatatcagtgactcatttattaggtataattaatagccaaagaataaaactagaatttattttaaactttcggtcttaaaaagagctgtaggatataaacctcttttgtgaaaagtagaattttctgaatactttcatagacaaaaacgcagttatactatgtttacctggttttccagcagaaatcaaataatcaatactatgttttgatgggttattttgagagttgtttggttttttaaacactacagaatggtttcttttaaatttaagaacaactagttcttgaaaagcaataccatatttctcagataaatttgttgttaaggttctagaaagtctaggacaaatttacttcattaaacaaagtttttaagattattcaattggcacaatttaatgcataatcgggattggatccattaataacatactgtggtacagtaaagagaatttgttcttattgaacaacaaatttgtataaaaatatggaatgatgcaacta

SEQ ID NO: 14086 - DNA, 754 bp, Macaca Fascicularis
  misc_feature (1)...(754): n = A,T,C or G
gattcagtaggtcggcagttgggccccnnnnnnnnnnnnnnnnnnnnnnnnnnnnnnnnnnnnnnnnnnnnnnnagaccatactttgagaatcactcctccagcagatttgtaggaaagcagctgtagattgacattgtgaagggacagtagataatagaaaaactggacagaaaaaggatgtaaagcaaactggtatctttccagtaaacagctcnnnnnnnnnnnnnnnnnnnnnnnnnnnnnnnnnnntcatttatgacctgtaatcatgaataggctaacaccagttcaaaggcatatacatatgtatccagtatatgtgatagaaatcctatttctatcagtttaagctttcnnnnnnnnnnnnatttttgtagaaatctctcccacgtaaattcatttctcattggtcacatatattaccnnnnnnnnnnnnnnnnnnnnnnnnnntcagggttaatttttaaaaattaaaaacactgtttctgctaaatctccctcagataagcattggagtccttgaaacaagagtagctttttaccaagcagaaattgagaatccatattgtaactgttcttttttctttcttcctataggnnnnnnnnnnnnnnnagcagccaaaatcaatgaagctaaagatttactagaaggtcaagctaaaaaatgaagtaaatgtatgatgaattttaagttcatattagtttatgtatatgagtactaagtttttataaaatgcnnnnnnnnnnnnnca

SEQ ID NO: 14087 - DNA, 729 bp, Macaca Fascicularis
  misc_feature (1)...(729): n = A,T,C or G
tcccccaacctcagnnncccaagcagcgggattacaggtgtgagccactgtgctggcaagaatttatacnnnnnnnnnnnnnnnnnnnnnngattagctaagaaattctgctctcagtagtagaggtttagagctttacctcttggcagtatcccttggaagggagctctgagattaaatgtaatcaaacacttattgagagctttctgtggaccaggcactccactagactcgggattacagaggccagttacctgtcctgatctgttaatgatccagtgtcatttttctttaaaaaagaaagcacctgcatttgtcatcttgagcaaatatagtaaccaaagtgatttactcaaggttcgaatcatagttgttttggagaaagtaagtgtcagatgcactgtggctgtcgnnnnnnnnnnnnnnnnnnaataaacatggttggtgttcattaaatgtggactgaaggtaaaatgactgatcttaagtttcatgaggaatnnnnnnnnnnnnnnnnnnnnnnnnnnnnnnnnnnnnnnnnnttttcaatcattcctttaaagtactaggttgattaatattgcgaagttataatgtaaaatgtgatattacctctgtctaacctgtattcacataaatgggagtttgactttgggaataaatgttgaaaatttgcaggaaagacccacccaaatgtataatgaaatgtgattccaggtatgaaaaacc

SEQ ID NO: 14088 - DNA, 755 bp, Macaca Fascicularis
  misc_feature (1)...(755): n = A,T,C or G
cctnnnngctctggccaggactganncnnnctccatacctgaacagttggctccagggccaccagaagcatttctttattattattattttttaacctggacatgcattaaagggtctattagctttttttccatctgtctcaacagctgagatggggccgccaaggagtgccttccttttgctccctcctagctgggagtgactggggtgggggtgtgtgtgcccaggtgggggtatctcctggctgggaaggagggagcgggagggagacttttgcttgcaggggttggcagtggagagcgggctggagaggagatcgctaatagctgtttaatggaaacctgctgggctggagggagataggctgaatttcccgacttcctatgccagttattgacacagctctctttgtaagagaggaaagaaactgaacccacccaagggatgatttcagggggagaggtggagggcagatgccctgggcaaacccggcccctctgcccacacacctcacttgatgatccttttgccaaacttgtcgaactcaggggacctggcttcccggttgcccctctgccatattccaaggccccctcagacttcacgtctctgctcatcagcactgtcccaggatcctggagagggagaacccccgaccccaggggaaagaagggggggtctcccctttcctgtgtctgcgccagccctgcccccattgcgtctgcacacccctgcgtgtaactgcatccaacca

SEQ ID NO: 14089 - DNA, 1250 bp, Macaca Fascicularis
  misc_feature (1)...(1250): n = A,T,C or G
aaaggcaggcagtgctggttnnnccacctctgtccccaccactgtcatgcaggcttgtcctccccaaccccagctggacatgcctcccaggcctgctatggttctgacacacacgatcccaggcaaagcaccacttcctcacatgaatgaggagcagcaagtcatgaccgctcccctgggtatacaatttgctgtgtagtgaagtggaaccaggctccaggctgctcatccccaacctcagagccccaccgcagcccagtagggatgcagcaggccccggagggctcatgtgggccccagatggcaatgccaccattattgatttgaccccagagccagttattaggaagagcaagctcaccacagaggagtggaactgaggccccccaggtgttgccttcagtgtccaagccacagcagtctggctgttgggaagacagccaggaatgggctcatgtcattggcacattaggctaatccttgttttatgtgaagtcagcaattaagtgttcccactagaactggtctaagccactgattaatattaaaggaaggaaggtgggggagaatctagccattttgtaatgccagaaatctgtatttgttatctgatgccattttttctgaagtagcctcagatgtggtccccgtgcagttcagcagttaacagatgacttttttagtgtaataaaatgtttatcatctgtgacttcaggacatatgtgtgatcttggaatatctaccatattccaatttcagagttaatgacaaacagattgaggtattccatcatcatcagaagcattggctgtgtgtctgactccacatggaatgctgtaaagtgggatacatgtggttcttcttgttccagaacttacagtccatggtagacaacactgatacaggcacactagcaacagcaattaagtcactggttctcaggcctaatactctgcctaatcctcatgcccagatattcccatttaattggtccacagtgtggcttaagcatcaggaatctttaaaactacaagtgattctaatgggcannnnnnnnnnnnnnncactggatacactgatgcacttgaaccatcatttctatctagttcttcctcttcctaatcttcagcttagcggggtaagtgtggtccaggaccaagagtaggaccaaaagggaagacggggnnnnnnnnnnnnnnnnnnnnnnnntgacttgaatgtactcagtctnnnnnnnnnnnncnnnnang

SEQ ID NO: 14090 - DNA, 714 bp, Macaca Fascicularis
  misc_feature (1)...(714): n = A,T,C or G
ggacctcccaaagtgggtggctaccagaccacccttaaatgactttcatctgatttcccctttcaccaaaatatactcatatttttaatattccttccatgtggctgactatattnnnnnnnnnnnnnnnnaaattatttcattgtatttttttctttttttccctcatttgaatcaaacttttatataaaacctaaacactgatgtttacacagaatttcatattctgcaaaagggattttttgatccaatcatgactgtagtcttccatgcttgacaaattggatgtagacaacatcacttaaaacttctataaatccctacaaatagaatnnnnnnnnnnnnnnnnnnnnnnnnnnnnnnnnnnnnnnnnnnnnnnnnnnnnnnnnnnnnnnnnnnnnnnnnnnnnnnagcacaaaatgaacgcaaagctaaatgcatatttttaagtattattttgttcacattttttnnnnnnnnnnnnnnnnnnnnnnnnnntggaaaactagaatttatagcagtttattaatgataccttaaattactcaggacttaatgtagcattgcacttctgtgtacagtaaaagtgctttgttttactaaagagaaaaatctgactggaaaaaatatgtatgtggtatatactcaaacgtatataattctatctatagatctatatatgtacacattctgtacaatagttccatcaaaata

SEQ ID NO: 14091 - DNA, 1187 bp, Macaca Fascicularis
  misc_feature (1)...(1187): n = A,T,C or G
tggaaacagattgggagagccgatccccatttccaaggcccannnnnnnatttttgggatggtccttatgaacgactggagtgcacgagacattcagaagtgggaatatgtccctctcgggccattccttgggaagagttttgggaccaccatctctccgtgggtggtgcccatggatgctctcatgccctttgctgtgcccaacccaaagcaggaccccaggcctctgccgtatctctgccatgatcggccctacacatttgacannnnnnnnnnnnnnnnnnnnnnnnnnnnnnnnnnnnnnnnnnnnnnnnnnntatgcaagtccaattctaagtatatgtactnnnnnnnnnnnnnnnnnnnnnnnnnncactctnnnnnnnnnnnnnnnnnnnnnnncggggacctctnnnnnnnnnnnnnnnnnnntgggcnnnnnnnnncagaannnnnnnnnccatgctgaaactgtcgtgggaagggaacgaagcccatcagcctggggaatggtcagaccaggaagtttctgctggacggggatgaagtcatcataacagggtactgccagggggatggttaccgcatcggctttggccagtnnnnnnnnnnnnnnnnnnnnnntctcttgccatcatgagattttctctcgngggtcttccatnnnnnnnncaagcacccctctcaaccctgtgacgggggtcctcccttgggctgtaggcctggtccttcattcagtgacaaataaagcccttgtgctctgaggcctgcactgccgcaggtgcagctgtgtccacttatgatcgtgatttgatccagtgggtcaaggtgtgtaaagcctccctgccagacattcattaatatgttttctcactgttattcatgaggtcacgggtctttgtggggttttcnnnnnnnnnnnnnnnnncctcctggtattccatggaatatgaaaagagactggcacctgtagtagtcagggttctccagagaaatagaaccaaggagaaagaggtcgattgattgattgattgattgattgatttttagcaaattggcttatgggatttggaggatggcaagtcnnnnnnnnnnnnngtgggttactgactgaagacccaaggaagagctgcaatttgaatctnnnnnnnnnnnnnnnnnnnnnnnnnnnnnnnnnnnnnnnntga

SEQ ID NO: 14092 - DNA, 785 bp, Macaca Fascicularis
  misc_feature (1)...(785): n = A,T,C or G
cnnnaggcgtggacaannaanannnnngtggtacaatcnnnnntctccagtggctatggcggtgccagtggtgtcggcagtggcttaggcctgggtggaggaagcagctactcctatggcagtggtcttggcgttggaggnnnnnnnnnnnnnnnnnnnnnnnnngccattgggggtggcctcagctctgttggaggcggtagttccaccatcaagtacaccaccacctcctcctccagcaggaagagctacaagcnnnnnnnnnctgccaccagctctcggtcccnnnnnnntcaggcccctctctggctgcagagccctctcctcaggctgcctgtcctctcgtggcctccagtctcccctgctctcccaggtagagctggggatggatgcttagtgccctcacttctctctgtctataccagccccatttgagcacccattgctcaccatcagatcaacctctgattttacatcatgatgtaatcaccactggagcttcattttgttactaaattattaatttcttgcctccggtgttctatctctgaggctgagcatgataagaaaatgatctctgctccttttcattactgaaaactgcctggggcttatttcagaacaacttccacttacttttcactggctcccaaactccctaccttaaaagtattgtgaacccacacccctgcagtatccatgaaagcacaagtgactagtcctatgatgtacaaagcctgtatctctgtgataatttctgtgctgttcgctcttgcaatcgctaa

SEQ ID NO: 14093 - DNA, 725 bp, Macaca Fascicularis
  misc_feature (1)...(725): n = A,T,C or G
agagcatgttaaacactgcttctggcttactcaggaattccgctatctgtcacagactcacaccaatcatgaagataaattacaggtgaagaatgttatctaccatgcagtgaaagatgcagttgctatgctaaaggccagtgannnnnnnnnnnnnnnnnnnnaatcnnnnnnnnnnnnnnnnnnnnnnnnnnnnnannnnnnnnnnnnnnnnnnnnnnnnnnnnnnnnnnnnnnnnnnnnnnnnnnnnnntcatcttcttttttaaaccgtacccaacttgtgagggtactctgtctaatgtatatttctagtgtttacagacagtaaatgtgtatatgtagtaactatttacagaacatgcatccttaaactgtgacttctcacctagtgcagaacttttaccaggctgtaaaagcaaannnnnnnnnnnnnnnnnnnnnnntacctgcagttattctccagctgtttggacaacttagattgggtttgtaactattaggaatcactgcacagtttacttgggttgtattttgttttgtgtcagagtcccctctccctcatcccttagggtccagaagagcaatggaggaagtgacagctaatgttgcagttcttattgtatggcataggattggcattatatagcagaaatcaactactgtacaatttcttggggttaaccatctttagttaaatggaattttaatttaaatgaagctttg

SEQ ID NO: 14094 - DNA, 743 bp, Macaca Fascicularis
  misc_feature (1)...(743): n = A,T,C or G
cagcggatannnnnnnnnnnctactatctgtggatgtnnnattcagtgactctgtttctgaacctgcttgcctgcctggcctcgttctcgggtnnnnnnnnnnagggagtggactttggcctctccatcctgtggtttctgatcttcactccctgtgccttcctttgttggtnnnnnnnnnnnnnnnnnnnnnnnnngtnnnnnnnnnnnnnnnnnnnnnntgtgttcttctttgtatttttttgtcaaatnnnnnnnnnnnnnnnnnnattggttggnnnnnnnnnnnnnngggacagcggttggattgcagccctgtctacactgaagaacgggtccctggccgtatcannnnnnnnnnnnnnnnnngctggcttcttcaccctctgtgccgtgctctcagtcttcctcctgcagcgggtgcactccctctaccgccggacagggnnnnnnnnnnnnnnngcccaggaggagttttcccagggcannnnnnnnnnnnnnnnnnnnnnnnnnnnnnnnnnntctgctgcccaaggagccttccaggggaattagtcctcctctctcttctctccccctcagcctttctctcgcctgccttctgagctgcactttccatgggtgccttatgtggtggtggttgtgcccagcacagacctggcaggggtcttgctgtggctcttcctcctccctcagcgaccagctctccctggaaggggagggacagggacctcttttccccc

SEQ ID NO: 14095 - DNA, 750 bp, Macaca Fascicularis
  misc_feature (1)...(750): n = A,T,C or G
gagaaagtgaacgggannnnnggagnnnnnnnnnnnnntacttcactctggcccggcggacctcccaccaccccgcggtgcactggggatggacaggcctggtgtgctgcccgctcgcaaccacagatggctcctctgctttagacagaaagggggaaggggttctaagtcannnnnnnnnnngtgctccctcatattgagggcagtggcagaaaagtgaccactctgcaggctccctgggcccaggatgtggtgtcccaagatacgtttgtatcttaaagnnnnnnnnnnnnnnnnnnnnnnnnnnnnnnnnntttgagatgcagttgtccaannnnnnnnnnnnnnntccggcccctttttgtatgacacttctcttctacacnnnnnnnnnnnnnnnnnnnnnnnnnttttaattttaaaagatgaaatggcagatgctagtaattnnnnnnnnnnnnctattacgggggtgggtctgagggaagtcatctataaaacatttactggatttttgttcaagggggctgtgcatttttatattatgtatttgtaaatgacatgtcagccattatttcatgtttcctaaaagcagaatatttgcaacatttgttttgtataggaattatttgtgccacctgctgtggactgttttctttgcctagtgactagtgacctgtgttgtctaaacatgagttcagccctttggttttgtttaatacctatgtnnnnnnnnacttcaattctccc

SEQ ID NO: 14096 - DNA, 756 bp, Macaca Fascicularis
tggcaaagacttggagggagaaaatattgaaattgtttttgccaagccaccagatcagaaaaggaaagaaagaaaagctcagaggcaagcagcaaaaaatcaaatgtatgacgattactactattatggtccacctcatatgccccctccaacaagaggtcgagggcgtggaggtagaggtggttatggatatcctccagattattatggatatgaagattattatgattattatggctatgattaccataactatcgtggtggatatgaagatccatactatggttatgaagattttcaagttggagctagaggaaggggtggtagaggagcaaggggtgctgctccatccagaggtcgtggggctgctcctccccgcggtagagccggttattcacagagaggaggtcctggatcagcaagaggcgttcgaggtgcgagaggaggtgcccaacaacaaagaggccgcgggcagggaaaaggggtcgaggccggtcctgacctgttacaatgaagactgacttgctatgtgggattacaccagaagcttgcagtggagtaatggtaaggaaatcaagcaaccttaaatatctcggctgtataggagcatattctattgcagaagaccttcctatgaagatcatggaatcaaatacgggacattgaactaatacttggactttgatatgaatttctttaacaattttctctgcagtgcaagttattaaactaaagctactctattttcaaaatgtg

SEQ ID NO: 14097 - DNA, 516 bp, Macaca Fascicularis
  misc_feature (1)...(516): n = A,T,C or G
gcagaaaaggatgtnnnnagctgttggcnaatacatcatttcaactgctaataanntgagagggggcttgggcatgacttaaaatgttcatactttgactaagtacggttctttcctcacatgcaatttcttagttggatggtactgacctgcttcttttcttgctagcgttatacgcagagcaatgggcgcaggccgtttggcatctctgccctcattgtgggtttcgactttgatggcactcctaggctctatcagactgacccatcgggcacataccatgcnnnnnnnnnnnnnnngtgacaagacaaaggggcnnnnnnnnnnnnnnnnnnnnnnnnnnnnnnaggggtgggaggtcctgggcttcctgctgtaggccctgtatcagtgaatgagtcggttaagttaacctagtcctatgagagcaagaaaagtattaaacattgctgtttggaagaaaatcaannnnnnnnnnnnnnnnnnnnnnnnccacataaattaaaatcctcaggc

SEQ ID NO: 14098 - DNA, 729 bp, Macaca Fascicularis
  misc_feature (1)...(729): n = A,T,C or G
gactttatgagtgtaataaantgtcagccaggtgtggtgactcatgcctgtaatcccagcactttgggaggccaagaattgcttgagctcaggagtttgagaccagccagggcaacaaagtaggaccccgtctctacaaaaatatacagattagctgggcatggtgacatgtgcctgtggtctcagcttcgagggaggctgaggtgtgaggatggcttgagtctgggagggagatagacattgcaatgagccgagatcatgctgctgcactctaacctgggcaacagagccagaccctgtctcaaaaaataattaaaattaagaataacccagtaaatgttcagtgctgttctggcatttggaaattagttaataattagtccctcttgctttttttggaggataaatactgtattacttccagttgatctttttaggtttacaaaagatactgcaaggttcaaggatgagttagatatcatgaagttcatttgtaaagatttttggactacggtattcaagaaacaaatcgacaatctaaggacaaatcatcagggcatctatgtacttcaggacaacaaatttcgcctgcttactcagatgtctgcaggaaaacagtatttagaacatgcatctaagtatttagcatttacatgtggcttaatcagaggtggcttatcaaacttggggataaaaagtattgtaacagctgaanntgtcttcacatgc

SEQ ID NO: 14099 - DNA, 690 bp, Macaca Fascicularis
  misc_feature (1)...(690): n = A,T,C or G
tcagttttctctttannnnnnnnnnnnnnnnnnnnnnnnnnacctgccttnnnntnnnnnnnnnnnnnnnngctgccaggccctttctccttctgcctgaccactgggtgtggacggtgtggggtggccttggaaggacaggctcctggccnnnnnnnnnnnnnnnacccaccatgagccatggagcaggggccgagcaggggccccaggacacggagttttcacagacccagctcctcggcagagctgcctcccgtcagggcccacatcatccaggcctcccagcccccactgtgaaggggctggccaggggcttgagctgcccccacccccagcctcagccaccagcacccccacagggccccgagacacacccacacacatgcgtgagcgcacacagacacacacacacacacacacacacacacacacacacactggacagtagatgggccgacacacacttggcctgagttcctccatttccctggcctgccccccacctcccccctgtcccatccccgtgccccctccttaccccgcaggacgggcctacagggggtctcccctcacccctgcacccctggctgggggagccggctctgccctgacctccaccaggggttggggcccttcccctggagcccgtgggtgcacctgttactgttgggcttnnnnnctgagatctac

SEQ ID NO: 14100 - DNA, 845 bp, Macaca Fascicularis
  misc_feature (1)...(845): n = A,T,C or G
ggcagtgaaaagcttacnnnactccccgctgcccaagaaggcggaaggagannncggctccagctgggtgtgcggcttctccaacctggagtcccaagtcttggagaagagagccagcgagttgcaccagcgcgacgtccttttgaccgaactgagcaactgcacagtcaaactgtannnnnnnnnnnnnaccctgcggctaaccagaacccacaactgcaagctgctctgcggtccggtgtccacctctgttttcctggaggactgcagtgactgcgtgctggcagtggcctgccaacagctccgcatacacagtacgaaagacactcgcatctttctgcagnnnnnnnnnnnnnnnnnnnnggaggactgcagtgggatccagttcgccccttacacctggagctacccggagatcgacaaggacttcgagagctctggtttagataggagcaaaaataactggaacgatgttgacgattttaactggttggcccgggatatggcctccccaaactggagtattcnnnnnnnnnnnnnnnnnnnnnnnnnnnnnnnnnnnnnnnnnntcactctgttcttcactcctaccaaatactttccacgttggactttcccccttattgggtcnnnnnnnntacttattgtcacactgtnnnnnnnnnnnnnnntttaaggcttgagattgtaatgggctcctacttgtgatttccattaaattcgtaacaggcgtgagccaccacgccaaggctttatttatttatttttatcacaatagttgaggcaataagggggaaggagggtgattatgttgctttgtaatggtttgtgatatttgaaacatc

SEQ ID NO: 14101 - DNA, 599 bp, Macaca Fascicularis
  misc_feature (1)...(599): n = A,T,C or G
caggtggaaaggacagtgctatnnnngcnnnnnttacatggggacgaacatgcattcacttcagctcaccatctctagaaggagcggcagtgaaatacacgctggaaacacaggctctgaggcagcattctcccccagtttttcagccgtcattagtacaagtgaaaaggagactatcaaagctgcattgtcacgtgtatgtggagatcgcatattcggggcagctggggctggttataagagcctttgtgttgtcnnnnnnnnnnnnnncatttacatcttttcagaagataccacgttcaagtgggacnnnnnnnnnnnnnnnnnnnnnnngcgggccatgggtgggggaatagtagacttgaaagaatgcttagaaagaaatccagaaacagggcttgatttgccacagttggtgtaccacgtggaaaatgagggtgctgctggggtggatcggtgggccaacaagggannnnnnntnnnnnnnnnnnnnnngaagcagctggagacattcctgagcctcctggtnnnnnnnnnnnnnnnnnnnnnnncgcagacatnnnnnnnnnnnnnnnnnngtgtacatacataaactgaac

SEQ ID NO: 14102 - DNA, 710 bp, Macaca Fascicularis
  misc_feature (1)...(710): n = A,T,C or G
cagcagcagagagcagacagcactgcacccagacctgggcntgagaaagcagtcctatcttcaggcagacaagcatctctctggtttatgcccaatgtccatgtcatgaagtgatggccccagctctgccccacggcnnnnnnnnnnnnnnnnnnnnnnnngggagttcccctggcattaccttgacaacgtattcaaggtctgattgccacgtggacctcttcaggactccagaggaggcccacaccctttcnnnnnnnnnnnnnnnnnnnnnnnngaaannnnnnnnnatccgccgcggggctgctctgggggcggcgtcagccacactgctggtggggctcgcggtcaggatcctagccaccaggcactagcaaagcagcttggaaannnnnnnnnnnnnnnnnnnnnncccggtacccaaacacaccacggtctcccctgcaaaagcgccaatggggtccagtgcaggaggacactttgaacgactcctcaaaaaaagaactttggctgattccttgtggtgacactcagaggggtctgaacagagcggacttcacagttctgttctggnnnnnnnnnnnnnnnnnnntctggcctggattgctctgtagaagacatcagccaactgcacgagtcagagtccggggactgccaccataattaataatgtaaatggcttcaaatnnngagactgcagatacaatcac

SEQ ID NO: 14103 - DNA, 761 bp, Macaca Fascicularis
  misc_feature (1)...(761): n = A,T,C or G
tgagtgtggcaagggcttccgccgannnnngacctggtgaaacaccatcgcgtgcacacaggggagaaaccctannnctgtcctgaatgcggcaagggttttgctgacagctcagcccgagtcannnnnnnnnnnnnnnnnnnnnnnnnacgggcccggcctccaccaccatccactctcctgcggccacataacccacctggcccagtacccacagcccctcgacccnnnnnnnnnnnnnnnnntnnnnnnnnnnnnnnnnnnnnnnnnnnnnnnnnnnnnnnnnnagagttcccccgaagctcagatctggtcaaacacaggcgtacacacacaggggagaagccatannnnnnnnnagagtgtggcaagggttttggtgacagttctgcccgcatcaagcaccaacgtgggcacctggtcctgaggccctttgggataggggatggtagggcaaggcccctcaagcaggaggcaccaacaggactggaatgacaggtccagggagggtggaggcccaggagaccaaagggaggggctctgctgcttagcaaagaaagggcctgggaggtggtgggagggagaaggaagggaagaaaggggaggaaggagaatagatagaaatagggattggagagagtaaccttgaagctcaggaaactgtcctggctgggcccagtcaggatcttgccaggacgggctgtacccctggcttctagaagactgcctagcacatagtaggcattcgatacttgtgaata

SEQ ID NO: 14104 - DNA, 709 bp, Macaca Fascicularis
  misc_feature (1)...(709): n = A,T,C or G
gtagtttcatgaagtntagtctctggtgtgagactgtaatcaccaatgaaggagagaggtacctataggtaaatttagtcatattttatataaaacaagggttagtattcatataacattgaaaagtttgggaataacagcagatatgattaatatcaaacaaaagtcataaccgtagtcaagagcttcttagatttttgtttatagcaagttataattacatgtaaaagtagtcttgaacaggtaaatattgagcctttttaatgggatgtaacttttttagagcccaaattctaaagaacaaaattggcaatccaattaaactacatgcaaaataattgtgatacatgcatctacaaaaacaatgttttcattttttctggttatgcagatgattggattgtttcttcttggatctctgtatgtacaggtaaagaatagtttacagatccctgatgaaatgaaaaagaaaaaaatgctcatttggaaagtgcccagtgatgaactggtttgcaaaataatctttgaagacgattaaccaggtttttatctttttagaagagatggttccctggccagaagaaaagatggtgagaaaacatttaaactgtcaggtggagcaagtcaaggaataatgcttatgtgatggagacctcaattataaattagttgttagatacaagaatcagtaaataatatttctgaagtc

SEQ ID NO: 14105 - DNA, 762 bp, Macaca Fascicularis
  misc_feature (1)...(762): n = A,T,C or G
acatgaagaagagagaagaggagatgcgtgataccaacgagtcaacaaacactcgnntnctannnnnnnnnnnnnnnnnaatgttctgcctcattggactagccacctggcaggtcttctacctacgacgcttcttcaaggccaagaagttgattgagtaatgaatgaggcatattctcctcccaccttgtacctcagccagcagaacatcgctgggacgtgcctggcctaaggcatcctaccaacagcaccatcaaggcatgttggagctttcttgccagaactgatctcttttggtatgggaggacgtggggtaccacctacacccaacaaatcaatgagggactttttaatttggtaggattttgactggttttgcaacaataggtctattattagagtcacctatgacaaaaaaataggggttacctagataatgccaaagtcagcatttgtcctgggttcccttgtgtgatctgtttggagtatgttttcttttctcccacttgctcagcagcttgggcttccattctggttcttttaccaagatttttgtgtgaccatgttgacttcattcggattgccctctttcaatttccttgtgaaaacacccttaactttctctttacccttagctgaaatgtttacgtagcttctggtgataccttttcatgattttatgtcttaaaatggtgatggatgtgacacctcataaaagtgagctttgaactgtagataacgcttaaagaaaatgtcatttta

SEQ ID NO: 14106 - DNA, 706 bp, Macaca Fascicularis
  misc_feature (1)...(706): n = A,T,C or G
tgcttcaatcacctctccatagtctctaaatcttcctcttttttcctaaagacagaaggtttttggtctgttttttcagtcggagcttctcttctctaagaggctttggaatgatgaaagcatgtaccctctacccttttcctggccccctaatggggcccgggccctttcccaacccctcctaggatgtgtgggcagtgtcctggcgcctcacagccagccgggctgcccattcacgcagagctctctgaaccggaggtggaagaaaggatggctctggttgccacagagctgggacttcatgttcttctagagagggccacaagagggccacaggggtggccgggagttgtcagctgatgcctgctgaggggcaggaatggtgccagtgagtgacagtcatgagggagtgtctctccttggggaggaaataaggtagagcctttctgtctgaatgaaaggccaaggctacagtacaggggccccgccccagccagggtgttaatgaccacgcagtggaggcctctggcagatcctgcattccaaggtcactggactctaggtttttgtggttgtgggaagggtgggtggctttnnnnnnnnnnnnnnnnnaggctttggcaggtaagagggcccaaggtaagaacgagagccaacgggcacaagcattctatatnnnnnnnnntcattaggtgtttattttgtt

SEQ ID NO: 14107 - DNA, 745 bp, Macaca Fascicularis
  misc_feature (1)...(745): n = A,T,C or G
actgccagattgataaaaccagtcagagcatagggctatgatctgcagttgtcctgtggtgaagagacttgtttcatctctggaaatgcaaaaccatttatagcatgaagtcctaaatgatnnnnnnnnnnnnnntcctcctcccagcctttccctttttaggtccctgtcttatacaaccagagaaatgggtgttggccatgcacatcccacctcaggcagcaagacaatctttcacccactgatggcagcaaccatgtctctcaaagtggtgaaactaatatctgagcatttttgagacatgagaggcaaagagaaactggatctaatggcccaacatcaaagggtgaacccaggatatgaatttttgcatcttcccattgtcgaattagtctccagcctctaaatcatgcccagtcttctccccaacgtcaagcaagagacaagttgaagggaattctggggccaggctcactggaccattgtcgcaaccttctgtttctctttgactaagagccctggctacaggaattacacagttctctttctccaaagggcaagatctcatttcaatttctttattagagggccttattgatgtgttctaaatctttccagacaaaaactatccagtgatttatatcctaacttcaaccagtaacttagctgataatcacagtaagaagacttctggtattatctctctatcagataagattttgttaatgtactattttactctcaa

SEQ ID NO: 14108 - DNA, 677 bp, Macaca Fascicularis
  misc_feature (1)...(677): n = A,T,C or G
tgtgtgcgagaaaactaggcaatgtgctntnnnnnnnnnnnngtcacacaacactgatgtgacttttatatgctttttctcagatctggtttctaagagttttgggggggtgcggggctgtcaccacgtgcagtatctcaagatattcaggtggccagaagagcttgtcagcccctggagaacagaattctcccagtgttaacacaaaatccatggacagcatgatggcaggnnnnnnnnnnnnnnntcagttccaaagtcacaggaagaaagcagaaagttcaacttccaaagggttaggactctccactcaatgacttaggtcaggagttgtgtctaggctggaaaagccaaagaatattccattttcctttccnnnnnnnnnnnnnnnacagtcagtggagacatatttggaaaccccagtcagtggagcctaggttgtgcccaggcttcagcattattggatgtcgatagtattgtttttgtcatgtagctgttttaagaaatctggcccaggnnnnnnnnnnntgtgagaagtcactcacactggccacaaggatgctggctactgtctgttaaaattctgatgtttctgtgaaattctcagagtgtttaattgtactcaatagtatcattacaattttatgtaagagaaaatattacttatttatccgtag

SEQ ID NO: 14109 - DNA, 703 bp, Macaca Fascicularis
  misc_feature (1)...(703): n = A,T,C or G
cagagaccagaggagccaatcgagatgatggggtgggggtgctccccnncagactcntnnncagtcctgtagtggcccttgggggtgacccctgggatctaccccactgaggaaaccttgacttctgacttcctatcaggtccagagggtggaaggccctggcaggaagtgggaggaagaggagaggggggtccgggtcttttcaggatcccagctgtgtgtgcttctgttgggcccagtggcccttgctgcccctannnnnnnnnnnnnnnnnntttgtgacgtagctgtgcctctacctcaggcagagaggatgccagggacaccaggcctctggcctctccacgagtcactgctcttcccattggcagagcgggacccatgctgtgcccctggccaggccctaaggaaatgctcagtgtcagtggagatggggaggttggtgacatggaggcgtgagtgagaacaggaagcaaaggaatacacatgggaactaaagagaaaatgaccagnnnnnnnnnnnnnnnnnnnnnnnnnnnnnnnnnnnnnnnnnnnnnnnnnnnnnnnnnnnnnnnnnnnnnnnnnnnnnnnnnnnnnnnnnnnnnnnnnnnnnnnnnnnnnnnnnnnnnnnnnnnnnnnnnnnnnnnnnnnnnnnnnnnnnnnnnnnnnnntgcaccccagcccaggannnnaagggagcccc

SEQ ID NO: 14110 - DNA, 682 bp, Macaca Fascicularis
  misc_feature (1)...(682): n = A,T,C or G
ggtcggcctcacccccagtgtgtgtgtttcaaagaatgaaagaccattctcagcaatcagactgtcgacattccagaaaatgtcgacattaccctgaagggacgcacagttatcgtgaagggccccagaggaaccctgcggagggacttcaatcannnnnnnnnnnaactcagtcttcttggaaagaaaaaaaaaaggcttcgggttgacaaatggtggggtaacagaaaggaactggnnnnnnnnnnnnnnnnttgtagtcatgtacagaacatgatcaagggtgttacactgggcttccgttacaagatgaggtctgtgtatgctcacttccccannnnnnnnnnnnnncaggagaatgggtctcttgttgaaatccgaaatttcttgggtgaaaaatacatccgcagggttcggatgagnnnnnnnnnnnnnnnnnnnnnnnnnnnnnnnnnnnnnnnnnnnnnnnnnnnnnnnnnnnnnnnnnnnnnnnnnnnntcaaattcagcggctttgattcagcaagccacaacagttaaaaacaaggatatcaggaaatttttggatggtatctatgtctctgaaaaaggaactgttcagcaggctgatgaataagatctaagagttatccagctacagaaggaagatgccagatgactcctaagacctacttgtgatatta

SEQ ID NO: 14111 - DNA, 955 bp, Macaca Fascicularis
tgtgaaaacatacctctagatgaaagtcgaaatgaaaagctggatcagctgcagttggaagggttgaaatacatagagagaaatgaacaaaaaatgaaaaaagttgcaaaaatattaagtcaagaaaaaacaactctgcagaaaattaatgattggataaaattaaaaactgatatgtatgaaggccttccattcttttcaaaattgtgatgagtatatgcatatggcctcataaatgaagccctgttcagaaggtccaccacattcaataaggaattgtgggatttgacatgagttaactttgaaatacttacgaattctggagaatcctgaaaaagatggtgctttgaccagcttgcacagtacagagaatattcttggttacagaattcatatgggaactagacttttaagatgttaataattaactaagctttagtaaccttactgtgctagttggttttagtagatgttggtgttatattgtttgatgtttgaaaatttattaatatatgtgccgaacaagaaaccgaaagctatattgtactttgtgtttttactttagtcctcataatcatgttaaatttatgtgatcattgattttatttcatatggaaaagctaatttcttcttaaatttacgttacctaatctcactagctatgttctccaatccacactgcctttattgtaatatcgtctaaatagatgcagaaaatggaattttctctattaaagtattttacatttgaaatatgaaagaaccagatacagttttctattcaaatatgtttattttaacattggttaaaaaaggtgaagttccagtcaaccactttttaatccctaaaatttcaagataatgctgtattaacttttccagatctaacactagcttattcttccctgttataaaatggtttgaacttactgagaaaatattcctatcataacaa

SEQ ID NO: 14112 - DNA, 723 bp, Macaca Fascicularis
tgctggacccggccatcggggagttcattttggtggacaaagatgtgaagatcaaaaagaaaggtaaaatctacagccttaacgagggttacgccaaggactttgaccctgctgtcactgagtacatccagaggaagaagttccccccagataattcagccccctatggagcccggtacgtgggctccatggtggccgatgttcaccgcactctggtctacggagggatatttctgtaccccgctaacaagaagagccccagcggaaagctgcgactgctgtacgaatgcaaccccatggcctacgtcatggagaaggccgggggaatggccaccaccgggaaggaggccgtgctggacgtcgttcccacagacattcaccagagggcgccggtgatcctggggtcccccgacgacgtgctcgagttcctggaggtgtctaagcagcactctgcccagtgagcacctgccctgcctgcgtcccggagaactgcctccgcctggacctgttgtcacacacggcagcgccccgacccgctgtgtcccacacggcagcgccccgacccgctgtgtcccacacggcagcgccccgacctgctgtgtcccttacattcctagacagcggaaataaaacgcacggctgtttccaccgtcagacgctgtggaatgcccggccctccctgaccaaatgctgtctccgaaacgccactggggcaagatgcag

SEQ ID NO: 14113 - DNA, 638 bp, Macaca Fascicularis
ctagttaaaagatcattttagaatatatggtttttggggatgaactaagaattagttattagttccaaaggactgagaaccaattttaatattttcacatttataggaaagaaattcatatgtccctgaaacttctaagacaaaaccaaacaaggagggaactgttgcaaagccatttcatcgagaaagggacagaaggagaaatacacacatgtatacacaaacagaatggttgagaaaacgttttaatagaatgtgagggttgtatgtatgtgtgtatatatttacacttaacctctaaaattctcttctacagtacctcagttatgaatataatggaaaagcagcattttggcagtgagactattgttaaaataaatttgagaaagatgaaaattttgtgagtcttgataattacaagtcaacagctttcgaaagttagcacaacttgtctgtggtgctgtttttttttccccaccacagtggacttattctgttttcatgtttagaaacaaaaaggtttcatgtgattcatgtgtaagatgcacagtatttgacatcctaattatgtaatccctattccatctatccagtcttacacttatagttggcctcaaatctattgcatttatgataat

SEQ ID NO: 14114 - DNA, 759 bp, Macaca Fascicularis
  misc_feature (1)...(759): n = A,T,C or G
accacagatgccacagcagtactcaggagtgtcannntctggaccaggtgtggtggtcatgcagctgaatgtccctaatggaccccagccccctcagaacccatccatggtccagtggagtcattgtaaatactacagcatggaccagcgggggcagaagcctggagacctgtacagtcctgacagcagcccccaggccaacacacaaatgagcagcagccctgtcacatctcctacccagtctccagcaccctctcctgtcaccagcctcagcagtnnnnnnncaggactcagtcccctgcctgtcctcacacagttcccccggcctgggggtccagcacagggtgatgggcgctactcccttttgggccagccattacagtacaatctgtccatctnnnnnnnnnnnnnnnnnnnnnnnnnaacttacacggtgcaccagggacagagtggattgaagcatggaaaccggggcaagagacaagcactcaaatctgcctccactgacctggggacagcagatgtcgtcctggggcgggtgctggannnnnnnnnnnnnnnnnngggcatcacccgtaccgaggcggacaaactcttcacgcagctcgccatgtccggcgccaagatccagtggcnnnnnnnnnnnnnnnnnnnnnnnnnagggggtgggggggacaacagtgggactgctgagaatggccgccactcagacctcgctgccttgtacaccattgtggctgtgttccccagccccctggc

SEQ ID NO: 14115 - DNA, 1081 bp, Macaca Fascicularis
  misc_feature (1)...(1081): n = A,T,C or G
gcactgaggtccaagagtttggagtgnnnnnnnnnnnnnnnnnnnnnnnnnnnggggccaacatcttggtaacagaggagaataagaaggagtatgtacacctggtatgccagatgagaatgacaggagccatccgnnnnnnnnnnnnnnnnntcttagaaggcttctatgagatcattccaaagcgcctcatttccatcttcactgagcaggagttagagctgcttatatcaggactgcccaccatnnnnnnnnnnnnnnnnnnnnccaacactgaataccacaagtaccagtccaactctattcagatccagtggttctggagagcattgcgttctttcgaccaagctgaccgtgccaagttcctccagtttgtcacgggtacttccaaggtacccctgcaaggctttgctgccctcgaaggcatgaatggcattcagaagtttcagatccatnnnnnnnnnnnnnnnnnnnnnnnnnnnncttcagctcacacatgttttaatcagctggnnnnnnnnnnnnnnnnnnnntttgagaagctccgccacnnnnnnnnnnnnnnnatccaggagtgctctgaaggctttgggctggcctaataaggccctgcccacctctgtgggttttttttaccattgttggacctggggaggggggagttaaaaaaagaaccagaaagaaattgtcaaaaaccaataaatgaaatccaccaactcaccgtgtgtgtcccagctgccccatcttccccagcgcatacctattcctcttctcattctctccccgccacctgtttcctcaccttctctcccctttccatgccgtccatgatccccgccccatgtgtttaaaaggcagtagcctttgcagggacctgtctgtcccgactgtttgaannnnnnnnnnnnnnnnttctgtgttcagaaggatttgctgcattgagacttgaaacctttggataggggaaaaaattatatatatatatatttttttgttctgtttgcatttcttaatttgtgcttnnnnnnnnnnnnnnnnnnnnnntaatgattcaatgcgagacaagattggcgtctgtgtt

SEQ ID NO: 14116 - DNA, 721 bp, Macaca Fascicularis
  misc_feature (1)...(721): n = A,T,C or G
tgaacttgannncaaccagccggnnnctgccatagtcaacttcgtctccaaggtcatgctgaacgccggccaaaagagatgaaccctgcctcttgcccagggccagtgccttggggaaggggcgcgtggggaggggacccgtgaatcctgaccactcttgaacccagaaggaggactttgggccaatttcggaggagagaagaaagtgcaacgtggggagagggaagtgaattgcagaggggagggggaagagagagagagaaagagggaaagcaaaagatggaggagaagaacttggattcccctgggtagatggaaactgcaaaaacccaaagcctccaaaactaaccaggtccgcctaataccccctccctaccccgagaagatggatgtcctcaaaagagaaggaacaaacctccttgggaatccacaattttggcggggggggcgggtggatggaaaagctctgtctccttaactcaactgctttgcaaggggaaatcaagctgggagaatctttttctggccacctgtagggtagattgtcaaaccaaacagagccaccgtgggacatcaagtggcagaacttgttcgcttgaaagtatctcagacccaaggcacctcaggtctctttgctgtgccttcactatattgttgtgtgagtgtgtgtctgcacccacatcctcacacattgatctagttcagcctttacccactcgaa

SEQ ID NO: 14117 - DNA, 721 bp, Macaca Fascicularis
gatgtgcagattgaaatcagaaggctgtgagcagagcacgggagtgcatggcagctctgggccccaggcctggcccggcccctctgcttactccacctccagctctgctgttcctctactcttaggtccagatccctttggagccacagcgaggaaccctgtggtcctcaggcaggtgtaccttgggtcagccaggagccctcttttactgttttaaagcctgctctcgggctctgctcacctctggtgaccctccaagatgcccctgccctcagtttcccctcatgatccggcctctgcccgcctctccagccgcagcctctagtgcactttagcaataccaccagactagttagagttccccactcaccaagcaagacatgcagtttcatgcctctgtgccttcgctcacgctgtttcttccgactggaatgccttcccctgctcctcctgccttgtctgcctggcaagtacctgttcatctctcatgatcccctcaaaggccccctcctccaggaaggcaacccctgtgcccctcccctccaggctacctctgcactttgtcaatgcttctcctgtggcacttatcacactgtattttacttgtttacatgtttgtctccccttctagactgtgaatccttaagggcatggactgtatcttatgcatctctgtatttctgcgcctagcacggtgcctagcacacagtaggcgctcaat

SEQ ID NO: 14118 - DNA, 670 bp, Macaca Fascicularis
  misc_feature (1)...(670): n = A,T,C or G
catagtagccatgatggttactaactttcagaatatcaggaaagagatgaatgaggagatggcacgtcaggaggttcagctgaaagctgacatgtnnnnnnngcagatcatccagaggagaaaaaacgtnnnnnnnnngggactgaagtcaagccatagcaaaacagatgacagtacaagaggagctggtcaacaaagggaaagttcggacttatcagaagtgtctgaagtagagtctaattatggtgccactgaagaggatttaaaaacatctgcatcaaaaacaaaagagaccttgtcaaaaaagagagagtaccagtcttcctcctctgtttcctccacatcctcttcctattcttcctcttctgaatccagattttctgaatctattggtcatttggactgggagactcttgtgcatgaaaatctgcccgggctattggaaatggatcaggatgaccgtgtttggcccagagactcactcttccgatattttgagttgctagaaaagcttcagtataacctagaggagcgtaagaagttacaagagtttgcagtgcaggcactgatgaacttggaagacaagtaaagcaatggatggcttcaaatctgagtttaatcctacaggagtnnnnnnnnnnnnnnnnnnnnnnttgagtttgtatgttcc

SEQ ID NO: 14119 - DNA, 755 bp, Macaca Fascicularis
  misc_feature (1)...(755): n = A,T,C or G
caggatagcacacagnnnnnnnnnnnnnnnnnnnnnngctgacggaaattcaaggagnggcataacgtacaactacgtgattagctctcggcttggaagaaacacatataaagaacaatatgcctttctctacaaggaaaagctggtnnnnnnnnnnnnnnnnnnnnnnnnnnnnnnnnnnnnnnnnnnnnnnntagnnntnnnnnnnnnngagccctttgtggtctggnnnnnnnnnnnnnnnnnnnnnnnnnnagacttcgtgattatccccctgcacaccaccccagagacatccgttaaagagatagacgagttggttgacgtctacatggacgtgaaacaccgctggnnnnnnnnnnnnnnnnnnttcnnnnnnnnnnnnnnnnnnnnnnnnnnnnntgtccccaagaaggcctggaagaacatccgcttgaggaccgaccccaggttcgtttggctgatcggggaccaagaggataccacggtgaagaggagcaccaagtgtgcatatgacaggattgtgcttagaggacaagaaatnnnnnnntctgttgttcccaagtcaaacagtgtttttgacttccagaaagcttacaagctgactgaagaggaggccctggatgtcagcgaccactttccagttgaatttaaactacagtcttcaagggccttcaccaacagcaaaaaatctgtcactgtaaggaagaaaacaaagagcaaacgctcctagatccaagggtgtcatcttataa

SEQ ID NO: 14120 - DNA, 728 bp, Macaca Fascicularis
  misc_feature (1)...(728): n = A,T,C or G
aagagatgtgcgacgtggagcaggtgccgtcaaagaagactcccccagctccctccctttttgacctcccagagttgaaacatgtagcaacagaataccaagaaaataaggctccagggaagaaaaagaaacgagctctggccagcaacaccagcttcttctctggctgctcccctatcgaagaagaggcccactgaagttggagtcatcatctctaccctcagtctggcttgggagatctttcaggttgcagccagaaggggtttttaaatgacttctctggatttnnnnnnnnnnnnnnnnnaaaaaaggaaaaaagtgttactgaaaagaaggtaacctttgttggatgttggccctcagcctccagctccagactactactcgctgttctccagaagggtgccaaaccacctactgaagagagaaccaactgactttcctaatgactcatcaggaaccagtcctcaaaatcatcaagttatttcttatttgtgagcagttcaggcnnnnnnnnnnnnnnnnnnnngccaaggctttcttatcttttggttgtctctgcttaacggaggagcctggcctaggacggaggcctggtttagatctttcattccacctcaggaatggggttgtgatctgtactgtcctgaccctctctgaattgtgtttcaatagtactctcgattgtcttccgtgttgttgaagtaaatgaattattttaaatgtaa

SEQ ID NO: 14121 - DNA, 911 bp, Macaca Fascicularis
  misc_feature (1)...(911): n = A,T,C or G
tacaaagcctgcaggagcngnnnnngntccgagaccaggtgttcggctgccaattggaatcannctgccagcgggaaggagacacggtgcccagctttgtgcggctctgcattgctgctgtggataaaagaggtctggatgtggatggcatttatcgggtgagcgggaacttggcagtggtccagaaacttcgatttctggtggacagagagcgtgcagtcacctccgatgggaggtatgtgttcccagaacagccaggacaagaaggtcggttagatttggacagtactgagtgggatgacattcatgtggtcaccggagccctgaagctttttctccgggagctgccccagcctctggtgccaccactgctgctgccccatttccgcgctgcccttgcactctccgaatcagagcagtgcctctctcagatacaagaattaataggctcaatgccaaagcccaaccgtgacactctacggtacctcctggagcatttatgcagggtgatagcacactcagataagaatcgcatgactccccacaacctgggaattgtgtttggaccaaccctgtttcggccagagcaggagacatctgacccagcagcccatgctctctacccggggcagctggtccagctgatgctcaccaacttcaccagcctcttcccctgacccagggaaggaagagaaaacctatttccagtcatctctggtggtgagaggctggtgttctgttttgaggacatccctttaaatctccnnnnnnnnnnnnnnnntcttcatgagtgtgacttgaggggttgggatgggtgagggagcttctctaaagaggaaagtgagtggattaacccctgcttctcttcttgttccctgttatcattcctccccaaacataataacacataa

SEQ ID NO: 14122 - DNA, 1081 bp, Macaca Fascicularis
  misc_feature (1)...(1081): n = A,T,C or G
gaccagacagggtgtagaagatgctttttacacagtggtaagagaaatacgccagtgccgaatgaaaaaactcaacagcagtgatgatgggaatcagggtagtatgggattaccatgtgtggtgatgcaacaagatacttttaaagttttatcagaaaagagccactttcaagctgcaccgacacggtggtcatgacttccgaggaggagaagtattcctgttgttatcatcagtatcacagagaagctcctgctacttccccagctatcagtagtttagtacagtactctctatatgagaagttatcagaataactacctcctcagttggttgtatgaccagagaaatgcacctcttgttactccctgttatttttctgccgtgggttcttccacagcacaaacacacctccgccaccccaggtttttcatctgaaaagcagttcatgtctgaaacagagaaccaaactgcaaacgtgaaattctgttggaaacagtgtcttgagctctaaagtagcaactgctggtgattttttttttctttttactgttgaacttagaactatgctaatttttggagaaatgtcataaattannnnnnnnnnnnnnnnnnnnnnnnnnnnntttggtttgtttataatgttttcggctgtattctctaaactggcatctgctctagattcataaatacaaaaatgaatactgaattttgagtctatcctagtcttcactactttgacgtaattaaatccaactttcacagtgaagtgcctttttcctagaagtggtttgtagacttcctttataatatttcaatggaatagatgtctcaaaaatccttatgcatgaaatgaatgtctgagatacttctgtgacttatcaaccattgagggaaagctatatctatttgagagcagatgccattttgtacatgtatgaaattggttttccagaggcctgttttggggctttcccaggagaaagatgaaactgaaagcatatgagtaatttcacttaatttttacctaatctccacttttttcataggttactacctatacaatgtatgtaattcgttcct

SEQ ID NO: 14123 - DNA, 743 bp, Macaca Fascicularis
  misc_feature (1)...(743): n = A,T,C or G
ctgacctgttcccatggtcagggaagacagagaaagaggcccaggcccacagcaggggaggagcagagcttgccactgggccagggcagtgacgagaaacccacaccggatacgtgtctaccctcgtttctccccacaccgggtcatgggctgggaggacccactgactttgctgggtcactgcccacctgttgctggggaggcagggctgggtaactgggggaaagtcaagacttggagaaacagctgaactgctgctaggaggnnnnnnnnnnnnnnnngtggccagctggccactgacgcccactgcagggctcaggagcgggatgtggagagccctcaagggtaaagaacccaggggtgcaggggcagtgagcactcggctttggatgatcttaaggagatcactcagcagctggacttctgggttgaggtggggccgcagcatgccgggcgggagcacacagggcggcaaaggagggacacacaggaggctgggcggcagcnnnnnnnnnnnnnnnnnnnnnnnnnnnnncagcaggaggagacaggcatgcagcaggcaggcctgcacacggggcggcagaggagggacacggaggaggagggtctgcagcannaggtggtgcnnnnnnnnnnnnnnnnnnnnnnnnnnnnnnnnnnnnnnnnnnaagccccagagcaaacaggcacgcagctcacaggcttgcannnnnnaggcacgcagcagccctgctggcttt

SEQ ID NO: 14124 - DNA, 725 bp, Macaca Fascicularis
  misc_feature (1)...(725): n = A,T,C or G
cttctggccatagtccgggctgccttcgaccagcgcatgnnnnnnnnnnnnnnnnnnnnngatgcccaagccacactgcagaagaagcgggaggccgaggctnnnnnnnnnnnnnnnnnnnnnnnnnnnnnnnnnnnnnnnnnnnnnnnnnnnnnnnnnnnnnnggagtctcgggtgactcaatatgaaagggacttcgnnnnnnnnnnnnnnntggtccgaaaagaagtgatgcggtttgagaaagagaaatccaaggacttcaagaaccacgtgatcaagtaccttgagacactcctttactcacagcagcagctggcaaagtactgggaagccttccttcctgaggcaaaggccatctnctaatggaccaaggaccccagagcccacctgtgnnnnnnnnnnnttttatacactgtcctcctccaccttgatggacccccggtgatgcatcctgcctaggctggacttaaccccttcctccctgtccccacgaccaactgtccccagttactctaaccgttatttcatttagcttccatatatattttcttacctaagagaatagtttcctgctnnnnnnnnnnnnnnnnnnnnnnnnnnnnnnnnnnnnnnnnnnnnnnnnnnnnnnnnnnnnnnnnnnaaatacaaatgtatatttttcaggatgtggtgtaggaactgggannnnnnnnnnnnnnnactcctgagnnnnnnnnnnanng

SEQ ID NO: 14125 - DNA, 730 bp, Macaca Fascicularis
  misc_feature (1)...(730): n = A,T,C or G
aaaagcacttggttgagcttgtgtatnnagtgagtagagaatcaagaaccagattcccagccccatgaactgctaagcagcaccacctcccaaacacatgagtgccaattaacttcacagaaaaacannnnnnnnnnnnnnnnnnnnnnnnnnnntctccaagctgtaaagatcagggaagacttcctggaggaattaacccttgagcaaaatcctaaaggatcaatagtagctggcaaaaagaagcaagaggaagggcattctaggtagaggagacagcctggacaaacgtctgagggaggaaggaacacagggtgtacaggacactttcataagtgcatgaacttcatagagnnnnnnnncttcagcatgttnnnnnnnnnnnnnnnnnnnnnnnnnctttcacatgctttttgccacttgatctttccagcaactcagtgagggaagcaaaaaagtaagttgcatcctgctattgtctgaatgtttgtgctcctcaaaattcatcttttgaatcctaatcaccaaaatgatgttactgggaggtggtgannnnnnnnnnnnnnnnnnnnnnnnnnnnnnnnnnnnnnnnnnataaaagaggccccagagacctgcctggccccttccaccacatgagaacacagccagcaggtacctataagcaagaaagtgggttctcaccagccatcgaatctgctggtgcattgattgtagacttcccagactc

SEQ ID NO: 14126 - DNA, 696 bp, Macaca Fascicularis
  misc_feature (1)...(696): n = A,T,C or G
aaaaacttgtctctgtgacttgtgacttctttgaatcacaggctccagccactggaagtgaaaactctgctgttaaccagaaagctataaannnnnnnnnnnnnnaagaatcccagcagaaaaacacaccccccacagactccccctccaaagctgggccaagaggatctgtccaatatcttcctgacttggatgataacaattcccaggaaaaggaccctcaggaggcctttcctgtgcatctggatctaaccacgaatccccagggagaaagcctggatctttccttcctcttcctggagcctatggagaagaaggtggttgtcctnnnnnnnnnnnnnnnnnnnnnnnnnnnnnnngagtgccctgggccagcccaggatgccagccctcttgtccttccgccgtgagaatcacacagagtcttctgtaggggcatggtgcacccatgaaatgggaggcgatggggacaatggacagagacagagcatgcacacgtagagagtggctaatgaaggacacctttttgactcttcttcgcctcagcatgttgactgggattggaaataatgagactgaaccccctgcttgggctgcactctaccctgtacactgccttgtaccctgggctgcatcccctcctaaactgaggagtctcatgccatggagagatgcctctcttannntccagccact

SEQ ID NO: 14127 - DNA, 716 bp, Macaca Fascicularis
  misc_feature (1)...(716): n = A,T,C or G
acatgnnncagcgctgttacttgaatgcctnnnnnnnnnnnnnnnnnnnnnnnnnnncagacccatagacctcagggccagggagagacctgggggattccctggcctgaacccccnnnngcatgcttgaatctgctccctgaacttcctgccagtgcctccccgtagcccaaaacaatgtcaccgtggttaccacctacccagaagactgttccctcctcccaagacccttttctgcagtggcgctnnnnnnnnnnnnnnnnnnnnnnnnnnnnnnnncacgctccctcccgcagcatcacgccagctggtgcgacccccactctccgtcttccttcaacttcagacaaagnnnnnnnnnnnnnnnnnnnnnnnnnnnnnnnnnnnnttgattttcagtgcaaatgacttttaaaagacactatagtggagtctctttctcagacttcctcaacgcaagatgtaaatagcaccgattnnnnnnnnnnnnnnnnnnnnnnnnnnnnnnnnnnnnnnnnnacttactgttgtatacatttcttatttacgattttcatttatgttatctatatatatataaatatattgtacatatatgcaacattttatatttttcatggatatgtttttatcatttcaaaaaatgtgtatttcatatttcttgggctgttttttagctgtcattcagtgatgcattttgtatactcatgtggtat

SEQ ID NO: 14128 - DNA, 625 bp, Macaca Fascicularis
  misc_feature (1)...(625): n = A,T,C or G
tggacgggaacgagnnnttctgccctctccctggctgcnnnnnggtcccatgggatgagcactgggtgccgggataggcagtccctgagtggggagagtgactataaccctcactcactccccaccagcccgagacaaggggcgatgccaaatgagatggctcccgcannnnnnnnnnnnnnnnnnnnnnnnnnnnnnnnnccgtccaggccagcagggcctagggcagggatgggcggccccagctggccaagccctgagcacacaaagcccggcacagggctgtggagggaatggggccgcacctacagccggaggtggnnnnnnnnnnnnnnnnnnnnnnnnnnnnnnnnnnggcactcgcggtcccggccggcctgcttgccttcctgggctcaggtgccccagcgccgctctcggttcctcctcagctgagaggggcactaaaataaagaggagcgtcttgaggggcgcagggtcccgccggccccagggctggcagggtctggtggccgcagaggatcttaaaacgtgcaggtggtggagatgggacaggggcaggggcaccggcacctcccaggcctgcccgctgcctgannnnnnnnncaaannnngaggaaataaa

SEQ ID NO: 14129 - DNA, 668 bp, Macaca Fascicularis
  misc_feature (1)...(668): n = A,T,C or G
tgtataagttcttggagggtagagactgtatctgctatatcaccttcaagcannnaaaatattccatacataacagttttaagaatgtgaaatgactaactgttagactaacaatgaaaactctgaaggaaaaataagcaacaaactgttgctaaggggaatagtatttctgctctgaatttggaaattaacttttgttaagtttgaaaacaaatgacacatgagggcacatgaatgtgagaagacactgcagcagaaaagaaagcaagactccaaaggatcaaaggaggtaaatggaaattttcccttgaggaaattgagagaagcagaaatgaatgaggacaagttcctaggaagtgttttgttgttgtttttgttgttattgtttaatgcaacttttttttctctaaaatttggtgtaattcttacttctctgaaaaggaaacctaaaattacagctgaaattgggaatcagagtctggagaattacttccgctcttgtaaatgatgcagctccttctcccactgcctcnnnnnnnnnnnnnnnnnntccacctccactgctgcaatatagtatgtcctctctcccaggtagaaggtggaatcctcagactgccgcctgcattggttcacagtatatttttgcttcatgccgcctgtgtaatgat

SEQ ID NO: 14130 - DNA, 485 bp, Macaca Fascicularis
ggaagttcattactgtcgtgtttccgactttgtatcaaaactcaagccgtggaaataggtcattgggagaaggaatgatgggtagattcaggatttaggcagcaaactgtgcctaaactagtatagtgcctaatgtaaatgactggctcagtcattcggttgtttagtccctgccaactgaacgttccatatttatagggaaacatactcagcatgggaagaacataaaggcagtataaaatcatgtggatcccagcccgggaggggcaaggacaaacaacagaagcaaataaaattctaaacactataaagtatggtccacaaatttattttgtttggcaggttgagttagtgtttgttatttagcgttaaccttgaccccaccccacctcaccctcatcacttctcccattagtgattcaagttccagaatgtccagtgggtcagcctctggggaattactggtcacttggctttcaaaaact

SEQ ID NO: 14131 - DNA, 739 bp, Macaca Fascicularis
  misc_feature (1)...(739): n = A,T,C or G
gttagacaaagatccttnnntttgtgttcttttcaccaccncttttcggctcaccttgtatcagaaaacaaagtacatcttcagggaaacctgaaatttctaatgctttgaaaagcatattacaaaagtaatgctaccttttgggaaacaaactgccccattaactccagatcattgcactggaatgtaatcaaaaaaagttagtcatgttttnnnnnnnnnnnnnnnnnncgtgtctctcctcttcgacttcgtgaaagcgaaagctttacctcctgcaaatgtcagcacatgtagtaggacaccagtatcctaggacagagagccataagtagccctttggaggactgatggtgtcaaccaaaggcatgtgattgatacatgatttccccttagaaagcaagtgttaccaaagttgtgtnnnnnnnnnnnnnnnnnnnnnnnnggcatgttatggttatttatcattgtttaatgaatagtagaggtgtcaagggactatgtatacatgattagggtaagatagaatgtattatatatatatatatatacacacacacatatatatagctgaatctttggtgtattgaaatannnnnnnnnnnnnnnnncagaagcctcgtccagccattcttcagcacattcctttactaagcagtttaaagccgtcctagtggagcaagccctaaagcagatttaatttttgccatttttccaggnnnnnnggtggtggctgact

SEQ ID NO: 14132 - DNA, 722 bp, Macaca Fascicularis
  misc_feature (1)...(722): n = A,T,C or G
tggagaagaggtaggtttgtgctttgtaattttggcatccatgtttttgtgcctgccctccctcttggggaggccatgcttggctnnnnnnnnnnnnnnnnactggtgacagggtggatcatggtgaggactaggggtaaggtcagggaatgcttaagctctggccttgccctgtattgctcttctcctttggtagcagttccctgaccaagggcaagctgtgtctcaggaaggtggcttctgtgcgtgcctgggtgtgttacggcgtagcccagaaggcttccctggtgttctcagttcaggcaaagcccagagcatatgagcacgtctctgacttccagtggcaacaggttgctcagagtgtgtgtgtggtgaaacagggtgtagttctttaccacattctgtgtcatctggttgtgcaggtaggggaaaagttggtctaattgaagattgtgcagttcccagttacaggtgccaagaggttatgatacgggtttcttgggtctgatgtacagtgtgaataaatgcttgcagctcttagctcttttttgatcaatgaagcacttttttattaatattttcctttgttaaaggaggaaccgtaactctccatagctgtacatataacccttttctcctaaagaggagtcagtgctcctatatttttcattttttgtcaaagcaagaagtaaatactttagaattgttaaatatataaataa

SEQ ID NO: 14133 - DNA, 706 bp, Macaca Fascicularis
  misc_feature (1)...(706): n = A,T,C or G
caatgnnnnnnnnnnnnnnnnnnnnnnnnnnnnnnnnnnnnnnnnnnnnnnnnnnnnnnnnnnnnnnnnnnnnnnnnnnnnnnnnnnnnnnntgataacagaattgaggggtaaggatattttgagttatcnnnnnnnnnnnnnnnnnnnncaaatgacnnnnnnnnnnnnnnnnnnnnnnnnnnnnaagaacttcagccgtggctctctagtcttcgtgtcaatatcctttattgttttgatgattatttcttcagcatggctcatattctannnnnnnnnnnnnnnnnnnnnnnnnnnnnnnnnnnnnnnnnnnnagcgtcgtcttngagatgcagctaagaaagccatcagtaaattgacaaccaggacagtaaagaagggtgacaaggaaactgannnnnnnnnnnnnnnnnnnnnagtctgcatagagagctataagcagaatgatgtcgtccgaattctcccctgcaagacccaggcttccctccgtgaggagaagattcgcctgtgcctgggtgccctggaaacagcatgttggtttctcccatggctcctctccagctggggagtnnnnnnnnnnnnnnnnnnnnnnnnnnnnnnnnnnggataaataggaaatcacctgccaagaagcctaaaaccaaagagtttgcctcttctcccgtctatttaaaagacatccacacaactccagccttataat

SEQ ID NO: 14134 - DNA, 727 bp, Macaca Fascicularis
  misc_feature (1)...(727): n = A,T,C or G
atnnnacgatatggagaacagcctgctagttatgtttcatgaatcacgtatnntgcatttgtgggctgccttgttccttgttgagttgttgcaagaggnnnnnnnnnnnnnnnnnnnnnnnnnnnnnnnnnnnnctgtgaatacaggttatttcaagctttcgtcagtggcaaccactcttagnnnnnnnnnnnnnnnnnnggaaannnnnnnnnnnnnnnnnnnacctggatgtggacctttgctacctgtattaataccagtggcctcattttgctgtatcattacaatttggcttcttatattaatgtttgaaaaggattaaagctggtattctagaacatgcccttcagtggttgtgtaaataaatctgtagaatgacacttcagatgaagttagtgtgattttaattgtgcactacaaccaagctgtaaccagttactaattttagaatgtaatcccaggacaatattaagcaaatagcctgcactgcttcctgtgaaatagtgaaggaggagggcatttctgtattccaggacttcttggggtttcagaatgggtttatatgatttttttttttttttttggtagttttatttattctatcagtatttttaacaaatgtttattgctgcatttttttttccagtgtatcattgttttattgcccttgtagtactggaatttagttggaagaataaaacatttacttctattctgcttgttt

SEQ ID NO: 14135 - DNA, 746 bp, Macaca Fascicularis
  misc_feature (1)...(746): n = A,T,C or G
catgcccaaaggcannacaccnnnnnnnnnnnnnnnnnnnnagcagcagcaggctgcaaaaannnnnnnnnnnnnnnnnnnnnnnnnnnnnnnncggcgccgagaccaaggcagacaccacaacggggagtaaacccacaggagtcttcagccgcctgggggccaccccagaaatggacgaggatctggcttgggacagnnnnnnnnnnnnnnnnnnnnnnnnnnnnnnnnnnnccggggtcctgaagaagctaggacggggcccagccaaggccagtcccnnnnnnnnnnnnnnnnnnnnnnncaaggccacgagctcagcgacaacggccgctgccccgacactgcggcgcctggcgctttcctcacggtccgggctcgagaggaagccggagtccttgtnnnnnnnnnnnnnnnnnnnnnnnnnnnnnnnnnnnncccttgtgcccgaggcccaggacagccaggtcaccagcaccaagagcccgactgtccgctgcgtcctgcccgaccctcctgtacctccggcctcccagcggccccctcgtcggcggtggcgnnnnnnnnnnnnnnactgttagccgccctccactcccaggccggagggacctctccagaccctgggctgcggccgaggcgcatccgttttcctgccctgggcgtctttgtctnnnnnnnnnnnnnnnnnnnnnnnggcaacgggcactgagaagggaggccagtgcctagagtgaagacagctgctg

SEQ ID NO: 14136 - DNA, 1154 bp, Macaca Fascicularis
  misc_feature (1)...(1154): n = A,T,C or G
gtcactgctttcaaaaaaggaaaactgaagccagtcatcaaatcccagccagtgcccaagaacaacaagggacccgtcaaggttgttgtgggaaagactttcgactccattgtgatggaccccaagaaggacgtcctcatcgagttctacgcgccannnnnnnnnnnnnnnnnnnnnnnnnnnnnnnnnnncagcagcctggccaagaagtacaaaggccagaagggcctggtcattgccaagatggacgccacagccaacgacgtccccagcgaccgctataaggtggagggcttccccaccatctactttgcccccagtggggacaaaaagaacccagttnnnnnnnnnnnnnnnnnnnnnnnnnnnnnnnnnnnnnncaagtttatagaagaacatgccacaaaactgagcaggaccaaggaagagctttgaaggcctgaagggtctgcagagggtgggaggaagcagaggccctgcgtggcccgtggtcagggcgcccacgccgaggggcnnncaaacagcnnnnntatgttggattccttttttttttttttaattttttatactttggtatttcacctcatgctctgaatactgaataaccatgaatgactgaatagtttagtccagatttttatagaggatacatctatttttatcattatttggggtttgaaatttttttttataccttctaattctttatttctcaaagcagataattctgtgtgaaaatgttttcttttttaatttaaggtttaaaattcctttgtcaaatcatgttgattttgctctttgctttttcgttgtctgagaaatggtccgtgtaggagattggacttctggtatgtgtttctgattgcttcctgtttcggcacaaagtgagagctgccactgagcaaccctgccaggggtgccatttcaggctgggcatcgccaggcggcctccctgcaaaccaagggccgggggcaaaggggcagggtcttgcccctttgtccagggtcccccagggtgggctcagctccagggagaggccccccatgtggcagcctcacctcctgagannnnnnnnnnnnnnnnnnnaaggaccccagacccaaacgcagatactgtggggtggtggaaagcatagagtagtctgtcgcatgga

SEQ ID NO: 14137 - DNA, 625 bp, Macaca Fascicularis
ggctgtgatgggaggactgaggctgggtgtggtgtcctgggagggaagaaaggctggcttcagggagcagtgagtacaggggtgaggacggtctctggtggcagagggtctctgtctttagagcacttcatgttgttgctgtgtggcctcactgacgacctccccatcccgtgtctcgatggtcttgatcatcacagtcttcttggtatgaacctcagaacccctttgctcagggctggtttctcggaagttgagggcagagaaggtttggatggggagattgatccggctctcctctccctccagcagtttccggtaggtggcgatctccacatccagggccatcttcacattgagcaggtcttggtactcgcgcaggtggcgggccatctcatccttgaggtgccggatttcctcctccaggcgcgcgatgttgtcctggtagccactggcctcactggcaaatcggtcctccagttcccgcatatgcctcatcagggaatcgttagtgccctggagggcatcaatctcgcaggtgtaggactggatctggtgtcggtattccatcatctcctgcttggcctggcgcagggcatcgttcctcccctacaccctcccctccccc

SEQ ID NO: 14138 - DNA, 705 bp, Macaca Fascicularis
  misc_feature (1)...(705): n = A,T,C or G
aaggagactgatccagtacctggtctcnctgggcagagtgtgaatattgaccttctccctgtagagctccgaatgcagataattcagagagaacgaaggaggaaagagctgtttcgcaaaaagaacaaggcagcggcagtcatccagcgtgcctggcgaagctaccagctcaggaagcacctgtcccaccttcgacacacgaagcagcttggagctggagatgtggacagatggaggcaagagtgtacagcattactcctccagatttggaggaaggaactagaactaaaactcccccaaactactgcagtaagcaagacccccaagagtccatccaagggcacctcaggcacaaagtccactaagcactcagtgcttaagcaaatctatggttgttctcaagaagggaaaatacatcatcctacaagatctgtaaaagcctcttccgtgttgcgtctcaactcagtgagcaacctacagtgcatacatctccttgataacagtggaagatcaaagaacttttcttataacctgcaatcagctactcagccaaaaaacaaaacaaaaccttgactgcctaaggaggaagactgtgttcgggtgagctggcatagctagtgcagagttcaaattttctgctgataatcttttacactttgggaaaacttttaatatctgtacctgaaggcttatnnnnctaaaaat

SEQ ID NO: 14139 - DNA, 732 bp, Macaca Fascicularis
  misc_feature (1)...(732): n = A,T,C or G
gcaaggtaaggactgttcctggaggattttagcacgcccgtggcgcctatttttgacctcnnnnnctgctgagaagacaggcccatccaggagtccattcctttgcatatctttttcctcaccnnnnnnnnnnnnnnnngcgggcaatacccgtcagctaccccggcaactcataaaacgaggctgtaaaagctggcatgtggttttaaagggtgttattctgtgtttgctaccatgggaaccacagctgcaggccaaaagcaccccctttggggccagcacaagcctgcattcgccccacgtgggtgttggtgctggtgccagggaaacagcatggctgcaggttccacaggcgcggggannnnnnnnnnntggggccctcctgttcctcttgcagcgcatcctagcagctttgccttcagagacacagaaacgtcctctcgcagggaatctaaagtcacacctgtgctgctagaatctttggccccctgagctcaggtgtgtgtttctgtaaatctcaaagtcaatttgcagtttgacccagaataaacagtaccctttatttcaagaaannnnnnnnnnnnnnnaaaattaaacagtcggtgggaaacaaaagcatgtcctttccgacgggaaagtcagacagaggcttcaggtacaactggccacagagatagtcctggaagacacgcagcacccgtggaccagaagcaccaaatgccagtgctgctt

SEQ ID NO: 14140 - DNA, 684 bp, Macaca Fascicularis
  misc_feature (1)...(684): n = A,T,C or G
cagccagacatttggtttctttgccactacaatgtgtctttctgaattgtatcttaaaaatgcataacaaatgatatttaaaccattactagaaaagtaaatgaagagtctacttaaggcacttcatatgaaagctaattcaaaattttcacaaaagtaacactattttataagtgtagtaaattagctttccacacattttagccagaatgctgcctttctccttacagaagaatgtgctcttaaagggagaaaaagcaaatacaaaaaactgtcattctgtcaatgttcatgtcaaattatctggaactatacagattacatggcagtagtattcctgtggtgaatcnnnnnnnnnnnnnnnnnnttcatacaagtctcataagaaccatagcatagatttggcctgagacaagtacaagaatagcaggtaaggaattcagaatctcacaatttacaggtgagtaattaacaaaaagtggctgctccattaaagagtaaaaggtcaaccatatcccctcatccatgaaatctagtaatgaaaaacaaaaaaacccacataaaatatttcttctaaggctactatatccatctctttctgcaaaccacatggcagggttattagaaggtaaatagcnnntggcagtcatagtatctttttaatgtaatacttgtaagnnntcc

SEQ ID NO: 14141 - DNA, 779 bp, Macaca Fascicularis
  misc_feature (1)...(779): n = A,T,C or G
gatgtatgatngattnctgactttnnaaatgattttacnnnctgccttgaattttcaaggcatagatgtcaacttacagaataacgtgtttaagacaattacgtttaaacnnnnnnnnnnnnnnnnnnnnnnnnnnnnnnnnnnnnnnnnnnnnnnnnnnnngtaactagtcttttgccgtaaatggttttttccttannnnnnnnntattgaactaagtggcaaattccatgaaaaatttctcagttctgtatgcacttttaacattattcatgtaattctcccccccacacactttatttatagatactgcaaaagtgagaaggagataatagatattttgctctgaatttggcatccagagttaacagttctcccctaactcccttactcgtgtcatagttattaggatcagcagcctcttaactaattnnnnnnnnnnnnnnnnnnnnnnnnnnnnnngccattattgctgaatggttctttagttattaacctagacccaaatcaaagaccagtttttatttgttcttgccnnncaaagtgccagttcctttaatatgtgaccaggaacacaaggaatatccatatgtccaaataaacacactgaattttagaaaaacttactactttgaattcaaattgtcatgaaaaccagaacagtgtttgtccatgttgcatgtaatgaacataaatccctgctctttgagaaaagctctttgaagcaaaaaccaaactttttgtttttttacctcctgtctcgctccctaaaagaaata

SEQ ID NO: 14142 - DNA, 745 bp, Macaca Fascicularis
  misc_feature (1)...(745): n = A,T,C or G
tagctgctgatgcaagttgtcccccannnnnnnnnnaaagcagtggggcgtgagctctgtttcaggggccactaaataacagctggtactgaccccagagaccaccttcatctccactcgggagcaggtgacataccccttnnnnnnnnnnnnnnnnnnnccgagtgtcacaatatactcaggactccaaaggtgtcacacgtggaactgacaggagacccgccaccgtggagacagggggcaagaaactcaagaacgcatcaagagcaccagccctgggccagggannnnnnnnnnnnnnnnnagtctcccgtggacactgctggcttgggggcagtcgctctccagggtacctgttgtctcttttccgatgtaataactactttgaccttacactatatgttgctagtagtttattgagctttgtannnnnnnnnnnnnnnnnnnnnnnnttagagattttaaggacacgaaaaaggaacttttacgtcccatgtgaagtggtagtgctgtgccnnnnnnnnnnatcatgctttaattctttcttttctgtagaannnnnnnnnnnccatttatgtcannnnnnnnnnnnnnnnnnnnnnnnnnnnnnnnttccaccatgtgggaannnnnnnnnnnnnnnnncttaaagttttgacttgtaatgaaatgttcaagtattacagcaatattcaaagaatcacagatgtgttaaccatnnnnnnnnatcatctgccaaacacat

SEQ ID NO: 14143 - DNA, 762 bp, Macaca Fascicularis
  misc_feature (1)...(762): n = A,T,C or G
cggtagtgannnnnnnnnnnnnnnnnnnnncctggacagctccttgcgtcnnnnnnnnnnnnnnggccccagagccaccgaggcccagccctgggtggannnnnnnnnctgggagtcnnnnnnnngccggagcagctccatcctggaggaggcctgccggcagttccaggacacactgcaggagtgctgggacctggaacgccaggccagcgacagcctggcccaggcggagcaggcactcagctctgcgggccccacctcttccttnnnnnnnnnnnnnnnnnnnnnngcccaggacagcctggcgggtggcctctctgcccccacactcgtcttggttgcttcaccctggttactggccctgcgtgctgggccattgctttatccctatcctgagagcagcccctccccatgatccctccacatgctgcaaggaggcactgaagggccttgagcaggtgtaaaggctctcaccacccgtgagcctgtgtccgnnnnnnnnnncactccggattgctccagcctgcgacttggtggaaggaattacttcctccggaggctacaggcgagaaaggtagggctgggccagcctctcctcccagctgttgggagagagttggcaggctgagtggcccagagcactcctggaagcagaagcnnnnnnnnnnnnnnnngcaaatgtgcctctccagactgccactgtactccttcccgccccgccctggcaccttctctgccctttctcgtccacacatctattaa

SEQ ID NO: 14144 - DNA, 702 bp, Macaca Fascicularis
  misc_feature (1)...(702): n = A,T,C or G
cttttagtcaggctttctgaacattgagatatcctgaacttagcactcttcaatcctaagatccccatgaaaagcctctcactggaacccaaaccacagtgtgctcttactgcctcttttctgaatagtcagcaaaagcnnnnnnnnnnnnnnnttttcagaatgagggagaagcatttgcctgccttgtcataacaagactcagtgcttattttttaaactgcattttaaaaattgggtagtataataataacaaggagtaagccaccttttataggcaccctgtagttttatagttcttaatctaaacattttataattccttcttttggaaaaaacctacatgctacaagccaccatatgcacagactatacagtgagttgagtcgnnnnnnnnnnnnnnnnnnnnnngaattacaaaagtccagccattatcatcctcctgagttattttgaaatgattttttttttttgtacattttggctgcagtattggtggtagaatnnnnnnnnnnnnnnnnnntctctacttctgtatttatttatttattactagacctcaaccacagtcttctttttccccttccacctctctttgcctgtagggtgtactgtatgtagtcatgcactttgtattaatatattagaaatctacagatctgttttgtactttttatactgttggatacttataatcaaaac

SEQ ID NO: 14145 - DNA, 712 bp, Macaca Fascicularis
  misc_feature (1)...(712): n = A,T,C or G
aaannctnnnnngcnnnccatcctggccacaggcttgttgcagtcagcaggtgtgggcttaggcgggtaccctgtggccatggggactgcgtggggcccttagttggttctgtgcctctcaccagcacttagacacgtcaccagactttcaaggagatactgcagtgagtttctctggttggaaggggagggatggtgagtcctagaccttaaaaatacaaggttaagagggatcccaaagcaaaaaatcccaacccttttcctcccagtcattgaaacaccaaaactattataccggagggtgtaatggttttgcagtctggttgtggtaggccagtagtggccccccaagatacctatgtcctaatcccaggaacctgtcaaaattaccttatatggccaaaggggctttgcagatgtaatgaagttaaggatctttggtcgggaagattgtcccggcttgtccaggcaggcttgatgtcctcatctgggtccatataagagcagagcaggtgacgggagagcaggtgggaggtgtagtgatggagcaggaaactggagttgagggcagctcaagccgcggagtccaggccacctcagagccaggaaacacattctcccacagagccctgcaaggccccagccctgctcccacctggactggctcagtgaggctgattttagaattctggctgattttagaactctaagg

SEQ ID NO: 14146 - DNA, 762 bp, Macaca Fascicularis
  misc_feature (1)...(762): n = A,T,C or G
gcatgccatggccgtgtacgagcgtgccaccagggctgtggagcccgcccagcagtatgacatgttcaacatctacatcaagcgggcggccgagatctatggggtcacgcacactcgcggcatctaccagaaggccattgaggtgctgtcggacgagcacgcgcgtgagatgtgcctgcggtttgcagatatggagtgcaagctcggggagatcgaccgcgcccgggccatctacagtttctgctcccagatctgtgacccccggacgaccggcgcgttctggcagacgtggaaggacttcgaggtccggcacggcaacgaggacaccatcaaggagatgctgcgtatccggcgcagcgtgcaggccacgtacaacacacaggtcannnnnnnnnnnnnnnnnnnnnnnnnggtctccggcagtgccacgggcaccgtgtctgacctggccnnnnnnnnnnnnnnnnnnnnnnnnnnnnnnnnnnnnnnnnagcggnnnnnnnnnnnnnnnnntgaggcggagcgcgaccagccctcgcgtgcccagagcaagatcctgtnnntgaggagtgacgcctcccgggaggagctggcggagctggcacagcaggtcaaccccgaggagatccagctgggcgaggacgaggacgaggacgagatggacctggnnnnnnnnnnnnnnnnnntggagcagcagagcgtgccagccgccgtgttcggcagcctgaaggaagactgacccgtcccccctcccctccccaa

SEQ ID NO: 14147 - DNA, 769 bp, Macaca Fascicularis
  misc_feature (1)...(769): n = A,T,C or G
gccatgcgctgcccccagtgccagatcgtggtacagaagaaggacggctgcgactggatccgctgcaccgtctgccacaccgagatctgctgggtcaccaagggtccacgctggggccccgggggcccaggagacaccagcgggggctgccgctgcagggtgaatgggattccttgccaccnnnnnnnnnnnnnnnnccactgagcaagtggtgggaccccatgctgacccagccccacatccacattctgttacgggccagggctgggcttggggctttggctccaacttctggctgggagatgcttttgtgcggagaccaagtccctgagcttcgtggacggccttgcttgctgtagcgttgtaggggccctgcctgcactgctgttgtccatggtcacatctgccccagtgcgtttgtccttcccttggggcttgccagccagacttctctcccctgcagctcccacctctgcctgaccccagccttaaacacagcccctggccagagnnnnnnnnnnnnnnnnnnnnnnnnnnnnnnnnnnntccgcccaccacaacactcatctttcgaataccaagcactctcagcctcccnnnnnnnnnnnnnnnnntttccggggctaactgttctctgcctttgtggttggaggcccggggcgcttagaactcttgctaacctgttcagagccgggaaggagactgggcagttgaaagcacagcccctcaggtccagttctgcgtctccctctctgcagcgtgtgtaagc

SEQ ID NO: 14148 - DNA, 657 bp, Macaca Fascicularis
  misc_feature (1)...(657): n = A,T,C or G
cacttttttttttntnnnnnnnnnnnnnnngagtccggggtgtgaggaacannncccaccaggctagaggcaactgcccaggaaggactgtgctccctccacctctgaatcccttgtaaatgcctcatgaagannnnnnnnnnnnnnnnnnnnnnnnnnnnnnnnnnnnnnnnnnnnnnnnnnnnnnnnnnnncagttttatccacagaaacgttttcattttaggaaatccctggttttaagtatccaatcctcgttcagctggacaatatgaatcttttccactgaagctagggaggactgtgattttcagaacacttaaagaattttccatcaagaaagtagctcgagcctgaaacgcaaaacccatggaggaatttagaagccattcttcccttgagtaccaacagggtcagggaagactgggcctcctgaatttattcttgttctttaggaattacaggttgaggtagttgatggtggtaaacatnnnnnnnnnnnnnnnnnnnnnnnnnnnnnnntttcaaagattttagcaaaaactgagttaatagcattctctatcaatatattaaaaaactctattttttttttgcttacagttttaaattctgaataataattctctcatctatgtgtattgctaatcattaaggt

SEQ ID NO: 14149 - DNA, 807 bp, Macaca Fascicularis
  misc_feature (1)...(807): n = A,T,C or G
gatgcctcatgacggcagnnnntgagtctnnncaccccaccccacgtggctcatttcagattgtgttggccctgccctgcgaggatgcggtcacggagccaccaggaggctccatctgagccgcagggatgggtgtgcagggctccctcctcctggggcgccagggcagagattcccggcaggtgagcagagagagagaactgccaggccacgtcccctcagcctcctgcgcggccaccttctgattgaatcggcccagcccaagcccctctcccagcctccccttcagcctctctccccgcctgcttttataatgcacacttcactcagtgctgcaacagaaaaacaaggggccccagggagagggggcccagacggccacacatggatcaagcctccacagccccgggaggtggctcactctgtaccggtcttcagaggctgtgcttgtatctgactgtnnnnnnnnnnnnnnnnnnnnnttgcctaacggttcgtagcatggtttttatttcttacacattcttggcacacagtgtagctattctcctgacgaacaacccgtctgcgtacctaagtgtggctccccatgggccagcgtcccggtagcatggatccagtctggaaggtgaggacaacgtggaaactcatgagctgagcccgcccgctgggacacgtctccttcccacatcaccttctggtttcgggtgccctcaggtcagccctgaagcgttccctacaacattttttgaaattgtgcggaaaaccagatctcatttaaaaaaaaaaaaaaaaaaaaaaaaaagg

SEQ ID NO: 14150 - DNA, 724 bp, Macaca Fascicularis
tggtatggctccaccaatttccaatttgtttttctattacttgccaactgtcagattaaacagcattataatattttgttgtaagcataaaagcaggtttatgttccatgtaaggaaacttagtgggagagtaacagaatacctggagagcctaactctgagctcatgaagtagtcaaccagtttgtggtagaatggtaattgaattttcccaactgcatcagctgtaatgatatactccctctcctcctttatttagttaaaatcgtaggctgatttctttttacttacaatcttcctaataatttttgatgataatgacccctcatttctttctgcccgaagacctcattctttaaataaagcttgttattttggcatatttctggtagggcctattgcacatgtgtatcaatatagttattgtttcatattaactttataaattctcttggcttataatagttttatgatttttactatgtaggtaggatatttgattatcatttgtgacagaataatgtgaagttaagtaattactgaactctaaatggaaatagtatgcaagaaactcagacgttgaacttgaagataagaatattgttgctttaatccagtgtatttgttaatggaaagaaaaacataaaggcagactgttgagtaaaaaaaaaaattaaaatattgttaatattctgtattactattttggaatttaacctatttat

SEQ ID NO: 14151 - DNA, 457 bp, Macaca Fascicularis
  misc_feature (1)...(457): n = A,T,C or G
agttttnngaaagatatttattcaaaataagtgttttagaactttttttttttttttaggttaaacatcagcactttttagttccttaaactttagaagagagacagtcagaaatagatttccttccagtggaaagaaaggaggaagggagaattgagaaaatatattagtctattattttagagttgtaatgcactcctctaaaccttacatcgtagagaaaattgagggtaaatgactgtcttatcactcttatttgacacctgataggtgtaagagaaatggaaatgaatggtttcgacaaagatcatttaatnnnnnnnnnnnnnnngtgaccacgcatctttggaaagtgtaannnnnnnnnnnnnnnnnnnagcctaggtaatcggaaataataacctgttagggatgtatcctaggaaatcagaagtagtnnnnnnnnnntnatgggtag

SEQ ID NO: 14152 - DNA, 759 bp, Macaca Fascicularis
  misc_feature (1)...(759): n = A,T,C or G
gacttggcntnnncaggcccctnnngacctctgccctnctctggtcctggcatcccttggagctggagaaggtaggggtcttggcttaggtttagatttgctctccatgtgcagggaggcagtcctgggcctgacagctcctccccctttttgaggtagcagtgccttacggaggtttggcaccatgtctctagctccccaggcacacaccaggaaactgcagggcctcacggaggaagtgctgcctgggccgggaggactagctttcctccatagagaccatgtgcagaacacttctgcggtgcccagaacatgagggagccagtgtttcgtcagcaggaggaagggcctgctgggatgaaagtgagaaggaaacagtgagggttgggtagtcaggagacaccacaggggcaacagcacaggcccagagtacctgctgcctctgctgcgtctgtcccagggtcatgaggatgctgaggttgacgacaggttccaggtcctttcgctcctttggccaagggttggggggaggtggcccaagtggcatgctctctaggtaagacaataggagtggtcagagttccctcgaaggatcctgcacaccagagcacctgagaaggccaggaccagaggccctgtgtgatgtgtactccgcagccatttggggtgggacagttctgtacttcccgatttgcttatggctcagccattacctgtgtcagtctgtgattctgttgtaacagttttaagagtaaataa

SEQ ID NO: 14153 - DNA, 747 bp, Macaca Fascicularis
  misc_feature (1)...(747): n = A,T,C or G
agagcgccggggccgacacgcgccccactgtcnnnnnnnnnnnnnnnnnngcccacaagcagctctcagcttttggagagtatgtggctgaaatcttgcccaagtatgtccaacaagttcaggtgtcctgcttcaatgagttagaggtctgtatccatcctgatggcatcatcccagtgctgactttcctcagggatcacaccaatgcacagttcaaatccctggttgacttgacagcagtggatgtcccaactcggcagaaccgttttgagattgtctacaacttgttgtctctgcgcttcaactcacggatccgtgtgaagacctacnnnnnnnnnnnnnnnnnnnnnnnnnnnnnnnnntctgtgttcaaggcagccaactggtatgaaagggagatctgggacatgtttggagtcttctttgctaaccaccctgatctaagaaggatcctgacggattatggcttcgagggacatcctttccggaaagactttcctctnnnnnnnnnnnnnnnggtacgctatgacgatgaggtgaagcgggtggtggcagagccggtggagttggcccaagagttccgcaaatttgacctgaacagcccctgggaggctttcccagtctatcgccaacccccggagagtctcannnnnnnnnnnnnagataagaagcctgaagccaagtagctccagggaaggcatgtggatcctagacagcgccttatctaagattgagtgtcggtgtaaa

SEQ ID NO: 14154 - DNA, 790 bp, Macaca Fascicularis
  misc_feature (1)...(790): n = A,T,C or G
tgatgatacagctnncaagtgagnnnnnnnnnnnnnnnnggattcatcaacctcctatcattgacttccatgggtcttggaaaagccccttatcactggccacaacagcnnnctgagcaaggggtggcaggacagagggccaagctcctactacaatgtggaatatgctgtggggtactggatacacaagggaatgccctcagagaaggtggtnnnnnnnnnnnnnnnntatgggcactccttcacactggcctctgcagaaaccaccgtgggggcccctgcctctggccctggagctgctggacccatcacagagtcttcaggcttcctggcctattatgagatctgccagtttctgaaaggagccaagatcacgaggctccaggatcagcaggttccctatgcagtcaaggggaaccagtgggtgggctatgacgatgtggagagtatggagaccaaggttcggttcttaaagaatttaaacctgggaggagccatgatctggtctattgacatggatgactttactggcaaatcctgcaaccagggcccttaccctcttgtccaagcagtcaagagaagccttggctccctgtgaaggattaacttacagagaagcaggcaaggtgaccttgctgcctggggcctgctctctcccaggaattctaatgtgggattccccttgccaggctggcctttggatctctcttccaagcctttcctgacttcctcttaaatcatggattggacctggttttgttttcctgcagctgttgacttgttgccctga

SEQ ID NO: 14155 - DNA, 671 bp, Macaca Fascicularis
gtaaaagcacctggtccctgctctcagttcactgtctcgttggacgagaaaaacaataacgataaaagacagtgaaagaaaataacaataaaagacaaggaaacaataacaatgaaagttgataagtacgtgataaatgaggttcccgtgtgtaggtagatctggtctttagagccaggtagatctggtctttagaggcagaacgagtcaatgcaaatactctggtccgtgggccatatgaaaaggctaagcttcactgtaaaataataacttggaattttgggttgtgtatgagtgttggtgaacttggttttaattagtgaactgttgagagacagagctactcttcatgtactgtcaagacctgatttctgagcatttaatatggatgctgtgggagtgaaaaagtggagtatggccccagtaatgcattatgggtggtttaccatttcttgaggtaaaagcatcactttaacttgtaaaggaatttaaaaatcctactttcataataagttgcataggtttaataatttttaattatatggcttgagtttaaattgtaataagtgtaactaattctaactctataatgtgttcattctggaataatcctaaacatatgaattatgtttgcatgttcacttccaagagcacattttttttaaaaaaag

SEQ ID NO: 14156 - DNA, 716 bp, Macaca Fascicularis
  misc_feature (1)...(716): n = A,T,C or G
tnctaccaggtggccgccctgcaaggggacctggccagcctccgggcagagctgcagggccaccacgcagagaannnnnnnnnnnnnnnnnnnnnnnnnnnnnnnnnnnnnnnnnnngctccagctgtcaccgcgggactgaaaatctttgaaccaccagctccaggagaaggcaactccagtcagagcagcagaaatannnnnnnnnnnnnnnnnnnnnnagaannnnnnnnnnnnnnnnnnnnnnnnntgattgcagacagtgaaacaccaactatacaaaaaggatcttacacatttgttccatggcttctcagctttaaaaggggaagtgccctagaagaaaaagagaataaaatattggtcaaagaaactggttacttttttatatatnnnnnnnnnnnnnnnactgataagacctatgccatgggacatctaattcagaggaaaaaagtccatgtctttggggatgaattgagtctggtgactttgtttcgatgtattcaaaatatgcctgaaacactacccaataattcctgctattcagtttgcnnnncaaaactggaagaaggagatgaacttcaacttgcaataccacgnnnnnnnnnnnnnnnnnnnnnnnnnnnnnnnntcacattttttggnnnnnnnnnnnnnnnnnnnnntacttataccatgtctgtaactattttcttccctttctctgtacctataag

SEQ ID NO: 14157 - DNA, 744 bp, Macaca Fascicularis
  misc_feature (1)...(744): n = A,T,C or G
gcactgtttatggctgctatgnnnnnagagaatgtttatgcattnnnnnnaccaagaattaaaacttcagatnnntcaacatgagagaannnnnnnnnnnnnnnnnnngactcanncggcttcctctttacttttttgaccatctcagtctttatttgtgtaattcattttgaggaaaaaacaactccatgtatttattaaagtctacaatggaaaaaaaagcagtgaagcattaggnnnnnnnnnnnnntagaggagacacagtgagattagtacctccaacttcctttctttcctaccatgtaaccctgctttgggaatatggatgtaaagaagtaacttgtgtctcatgaaaatcagtaaaatcacacaagaaggatgaaatgccggaacaaaaatgaggtgtnnnnnnnnnnnnnnnnnnnnnttggggacattgagatcacttgtggtggggaggcnnnnnnnnnnnnnnnnnnnnnnnnnnnncagnnnnnnnnnnnnnnnnnnnnnnnnnnnnnnnnnnnnnnnnnnnntgtgagaatacgattttttccatatgtatatagtaaaatatgttactataaattacatgtactttataagtattggtttgggtgttccttccaagaaggactatagttagtaataaatgcctataataacatatttatttttatacatttatttctaatgaaaaaacttttaaattatatcgcttttggaaagtgcatataaaataga

SEQ ID NO: 14158 - DNA, 631 bp, Macaca Fascicularis
ctcgggggtggggggaaaagaagggaaacccatccagtcccgtgattctattgcaagcttcaaggggcttattgtttgaaagacaaaactccccgcctgggtctgttgtcatacatgccgctgtaggggtgatggatggcagcggatgctggattccccaagaacaagttaccctctggggtgaggctattccagggagatgggacatttccccatgggggcccactcccccctcttccccagcaggttgtagtttctaagctgtgaacatttcaaggtaaattaatagaggagaggaaaaagatggctcagctattctttcacaggtttacactagttgagctaatatgcgtgtctttggaaattaaacacaaatggtaacctagttcaaaaccagacccatcttgttgcctattgtgataaaataaaaagactgctgtatataacatattgggtattgcagaccaaattaagtgttttgccttgtttaaatgaaatgcatgtttagtgagcactaatacaatcttattccagaagactgtttttagtagcttattgtgaagtaagacaactataatgaatgtctatgtcttgttttgaagtcatatctgtctttgcacaaatgtaccaa

SEQ ID NO: 14159 - DNA, 755 bp, Macaca Fascicularis
  misc_feature (1)...(755): n = A,T,C or G
agacagggccctgcagggnnnnnntttgtggaaagctannnntaagggttgggcttgggaataggcannnncagattccagggcatgactctggactcagcgggtttatacctgtgtgaccattgcagttgnnnnnnnnnnnnnnnnnnnnnnnnnnnnnnnnnnnnnnnnnnnnnngctgttaaataaaaatattctgaatgtcacccctttnnnnnnnnnnnnnnnnnntccctannnnnnnnnnnnnnnnnnnnnnnnnnnnnnnnnnnnnnnnnnnnnnnnnnnntgcctgtgtccttgatttagcaggaaggaaagaaatggtctgggttgatggatgcccactcctcttctctttctcttggtcaactcaggagccttttagtctgagggaatggagaggcaaagaaataagggagagtaatagaaatgggagggcagagacttaagggttctgcttcacagcactagaaattctatcattgctcagccccaatgagaaagcagatacacctaannnnnnnnnnnnnnnnaacatctcaacttgccagttgctgggtgctgcgccctggcaggaacgggccaagccaagcaggggagaccagagagcaccaatggccaacgctgctgcctggctgtggaggctgtgctgtttcccccggagacctgaccagtctgtggttcccacaggaacagggttgtctttcgagcccccagtgtctggtttcattcatctcagatttgtattcact

SEQ ID NO: 14160 - DNA, 761 bp, Macaca Fascicularis
  misc_feature (1)...(761): n = A,T,C or G
atgctagnnnnnnnnnagcagcagcagcagcaggtggcagcctgtgagggccgggcctttgannnnnnnnnnnnnnnnnnnnnnnnacagctactcctnnnccannnnnnnnnnnnnnnnnnctcactgcacatcannnnnnnnnnnnnnnnnnnnnnnnagccgggcgagacccggaagatgatcagcacgtggaccgccgtgtgggtgaagatctgtgccagctgggcggggctgctcctctacctgtggaccctggtagccccactcctcctgcgcaaccgcgacttcagttgaggcagcctgccacctggtgcctcctgccacctggtgcctcctgccacctggtgcctctcggctnnnnnnnnnnnnnnnnnnnnnnnnnnnnnnnnnnnnnnnnnnnnnnngccccgactcctgccccagctccaggacctgcccctgagccaggccctctagtcttagtgccttcagggtccaaggagccccatccccctgccacacccacgtggtggagctgcctcttccttcccctccccgctgttgnnnnnnnnnnnnnnnnnnngatgaaagggctcccttgtccnnnnnnnccatgggagcnnnnnnnnnnnnnnnnnnnnntcagagccgctggagggcagagagctcccaccacagtgaggcatccggcactgaggccatggtgttcctggtcacatcccccaggggaccctgcccccttcctggnnntcgtgccttactgtgtctctaagacttga

SEQ ID NO: 14161 - DNA, 267 bp, Macaca Fascicularis
cccccccacctctccccacctctccccacctcacccctgccctgcttggctgcttctttaggattgcgatggttttttcagtttacatcagttttaatgagaggtatgcctgtactcgcttgtgcagaaaacattgtttcagattcaatcgactgggtttatgtcccttcacatagtttttaaggttatttatttaaatgtctaatgtattttattgtaacagacattgttttgccaacattgcctatttcagtggcacatcacaat

SEQ ID NO: 14162 - DNA, 745 bp, Macaca Fascicularis
  misc_feature (1)...(745): n = A,T,C or G
tttgatgacctagtacgagatttcaatagcatnnnnagcgatatgggggcctggaccttgccttcccatcctcctgaactcccaggtcctgagtcagagacacctggtgagagactgcgggagggacagacacttcgggactcaatgcttaagtatccagatagtcaccagcccaggatctttgggggggtcttggagagtgatggaagaagtgaatcccccagaccagcaccagactggggctcccagagaccatttcatagttttgatgacgtatggcctgtggacccccatcctagaaccagagaggacaatgatcttgattcccaggtttcccaggagggtcttggcccggttctacagccccagcccaaatcctatttcaagagcatctctgtaaccaagatcactaaaccagatgggatagtggaggagcgccggactgtggtggacagtgagggccggacagagactacagtaacccgacacgaagcagagnnnnnnnnnnnnnnnnnnnnnnnnnnnnnnnnnnnnnnnnnnnnnnnnnnngccttctccatcctggacttattcctaggacgttggttccggtcccggtagccttgttaaccctcagaggccttcaaagtcctttccacctttcacccattgcccaccattaataagcttagcttctcctcttgccacctcaggggcttggatatgtggaatagtgaattgggggcatgtcagtttgtcactcacc

SEQ ID NO: 14163 - DNA, 655 bp, Macaca Fascicularis
  misc_feature (1)...(655): n = A,T,C or G
cagcgccnntgcnnncagttccctcnatcaggagctctgttnnngacgtctccagttaagtttgagtttatgactgagaggcctgtactgtcagacgtgaatgggcctaacgggcaaatccatccctctctccctcacagttccaggagcagtttccctcgtctccccttactccacagggagcctcccttgccaggaccagggctgtgatggccatgcaggggcaggtgggtgccctgttggctgctctcagtgctgcccccaggctgcagttccggtccctggttgtcaggtaggaagagggtacactcgaagcacgtgctcatctcgtttccttaacgtctgtagtctgacacctcatttagactttcctccgccaccccagtccaggggagaggctcgctcccgctcgtggtcatcactggtctgtctcccctgttgtctcttctctccctgactccctcccaccgaaggcctgatggccactcacccctctgggatagctataggagaggaggagtgatgggggccaccgtcttttctacaggaaatgtgcccagcagctcttggtcaaagcactgttgctataagctatctctgggacgcctctaggcccccttctctctacacacctctgggaaaagatcacactgta

SEQ ID NO: 14164 - DNA, 770 bp, Macaca Fascicularis
  misc_feature (1)...(770): n = A,T,C or G
ttaactaaaaaactccannnnnnatgaattatagttaagagtgattacactgaattcaaataaaaggactataaaacatgtaattttctatgagggctataacatacatttcaatatccctgtttttaaataaaatacacttttatacagaagaaatcattcgatatataaattccattagttatctatccttttatgctgttgaagtcgtaagttacccctttccaacctccacttggtctttcattagagaatattattttttcaggtatgcaaaaatattatctgatgaaagtacaagtcggggttgggatttttaagttttaatgatttacaaagtattattttgtaaataaaacttaacattttggnnnnnnnnnnnnnnnnnnnnnnnnnnnnnnnnnnnnnnnnnnnccctaaatataacccccagacatgataacgtgtagtaagtggataaacacctccatgatggtgctattagctgaaaatataaacaaaccagcagatcctcactttaagtagcacaatgactcnnnnnnnnnncataaacaaagactaaacatattaaaagaattgtgtatagcattttacatataacattacctcacatcattctcccattatttctattgtaatttaaaataatactttggtttcagagaataaaaatcatgcttaatgattttgactgtttaaggaacaattttacaaaggttattaacagagctgaatgcatcacattttctcccgaaggactacagtgaaaa

SEQ ID NO: 14165 - DNA, 746 bp, Macaca Fascicularis
  misc_feature (1)...(746): n = A,T,C or G
gcactaacggcannnnnacgatgtgtccgtgacnnncagnnnnnnnnngcnntgggaatccagtggattgtagttagaatactagggggcatcccggggcccatcgcctttggctgggtgatcgacaaggcctgtctgctgtggcaggaccagtgtggccagcagggctcctgcttggtgtaccagaactcggccatgagccactacatcctcatcatggggctcctgtacaaggtgctgggcgtcctcttctttgccacagcctgctgtttatacaagcccctgtcggagtcttcagatggcnnnnnnnnnnnnnnnnncagccagtcctcggcccctggcagtgccacannnnnnnnnnnnnnnagcagcatctgaccaccgcccacgcccacccggccacagcaggcactcagcatttcctnnnnnnnnnnnnnnnnnnnnnnnnnnnncaatnnnnnnnnnnnnnnnnnnnnnnnnnnnnnnnnnnnnnnnnnnnnnnnnnnnnnnnnnnnnnnnnnnnnnnnnnnnnnnnnnnnnnnnnnnnnnnnnnnnnnnnnnnnnnnnnnnnnntatatatttatggacacatattttgcatcagaagatatttatagaatgtattttatacctgatcgtgtgtggtatgcgtgagggcaagctctgaggggctgaatcccactgggagggtgcgggcctgcaacccaaggaaggcttgtgtgtcctcagtgaaagctgtgcatatc

SEQ ID NO: 14166 - DNA, 721 bp, Macaca Fascicularis
  misc_feature (1)...(721): n = A,T,C or G
agttcgcagtgatcagggtgaagggccagagcttcatgannnnnnnnnnnnggaagatggttggcctggtggtggccattgtgaagggttatgcccctgagagtgtgctggaacgcagnnnnnnnncagagaaggtggacgtgcccaaggcgccgggacttggcctggtcctggagagggtgcacttcgagaagtacaaccagcgctttggcaacgatgggctgcatgagccgctggactgggtgcaggaggagggcaaggtcacagccttcaaggaggagcacatctaccccaccatcatcggcactgagcgagatgaacgctccatggcccagtggctgagcaccctgcccgtccacaacttcagtgccaccgctctcacgnnnnnnnnnnnnnnnnncaaggtgcccagtcccctgggaggcagcgaaggggacggagacaccgactgaggcggtgggagctgcccaccagagtgcctctgagcagctcacagtgtgtgcccaggcgtgccatccctgtgggcagcaagaagctgggatcgctgcagccatgttttcccagccatgagaaccatggtttctcagggctgcctggcagatgtggcctggcgttgtaacctcaggacctttccttgtaggaacagcctttctcgaatctattttcagctcttgcattgcacagatgaacctcagcatgtaaataacnnnnnnaaaagaag

SEQ ID NO: 14167 - DNA, 859 bp, Macaca Fascicularis
  misc_feature (1)...(859): n = A,T,C or G
agtatagtgccaagtctggagaggtgttggtgaatgttaaggagcactcnnngcagatcaatgacatccagttatccagggacatgaccatgtttgtgaccgcatccaaggacaacacagccaagctttttgactccacaactcttgaacatcagaagactttccggacagaacgtcccgtcaactcagctgctctctcccccaactatgaccatgtggtcctgggcggtggtcaggaagccatggatgtaaccacaacctccnnnnnnnnnnnnnnntttgaggccaggttcttccatttggnnnnnnnnnnnnnnnttggaagagtcaagggtcactttggacatatcnnnnnnnnnnnnnnnnnnnnnnnnnnnnnnnnnnnnnnnnnnnnnnnnnnnnntggttaagtccgtatccattacttcgacccacagtacttcgaattcgagtttgaggcttgagaagctggatctccggccgggcgcggtggttcatgcctgtaatctcaccactttgggaggtcaaggtgggcggatcacctgaggtcaggagtttgggaccagcctgaccaacactgaanaaaccccgtatataataaaaatataaaaattagcagggagtggtggcaagcacatatannnnnnnnnnnnnnnnnnnnngaggcaggagaatcnnnnnnnnnnnnnnnnnnnnnnnnnnnnnnnnnnnnnnnnnnnnnnnnnnnnnnnnnnnnnnnnnnnnnnnnnnnnnnnnnnnnncaaaaaaaaaaaaaaataataataagctggatctctatccgggccagagaagattctcacagaaggttttgaactctaagaaataaattggtttggta

SEQ ID NO: 14168 - DNA, 701 bp, Macaca Fascicularis
  misc_feature (1)...(701): n = A,T,C or G
tagccatcatnntgtgtgtgtagtaagaggcccatttctcaactgtcttttaaatatctaaaggtagttcctgtaacaactagttttaatgagtaaaaagtcaaagcctcagctctagttgatatccaagttatgatttattttgcaactacctcaggacagaaaagatttatggggattttaaaaatcattgaataactagttaaatgaaattttagctacacactgcctcccaaatattagttgtgnnnnnnnnnnnnnnnntgattttacagaaaaggaaatgacacttgagatccttggaannnnnnnnnnnnnnnnagtgtgcatatacttttttaacgtctcttcttccattacaatgtgtgttttgcaaggacaggttcatttttttagcccactttgtgaactccattgtgcttttttctggtgttttatgcaagttgactactaatgactaatgagaacaataatgaatgcattgttgctgcattagtgtaatgtggtgtggttttgcacttaaaagaggtattcatgctctagttgtaaatgttcatgaaaatccacttctgtactagtcgaactgcttttagtgtctcaccagtggttttacatctgcagagttttgagggctgtgctgacctttgagaggatttgaaattgcttcatattgtgatcctaaattttatattcactatatc

SEQ ID NO: 14169 - DNA, 630 bp, Macaca Fascicularis
  misc_feature (1)...(630): n = A,T,C or G
gtccaaataagtatcagagtacatgcgaagattcacagcccagtgatgatnnngttgtgagnntgatgtaaaaaatgaatgcatattggcttacnttcctcaatttaaagtcaaaagccaacaaccaggagcaggtcaggtacttcagaggtgcttaataatggagtgaaaannnnnnnnnnnnnnnnnnnntatatttgccccagttcacttcaaagcannnnnnnnnnnnnnnnnnnnnnnnnnnnnnnnnnnngtgttaggaatccagggataaagatgaatgaaatgtatttatattcttcagtagttcacattctagcatattccctttttcccccagtcatgcactctttttagcagccttctatgtactagaaaagattttttaaggtttatttaaagctgtgtagatgaagacttgatctaaaatagtataaggtctctggcttcagtaaaagtttttagtgtttacttaaattagtaatttatcactctctgtctggttaaaatgtctttaaaagaatttttttatttaatccatttagtagttacctccttcttacttttcaaattcacaaaattatatttctcataaattgtatagtatttaacttttgatagttaata

SEQ ID NO: 14170 - DNA, 711 bp, Macaca Fascicularis
  misc_feature (1)...(711): n = A,T,C or G
tacggctccatgagctnnnnngataaggtggccaacgggctggnnnnnntggccatccagagcctgcacccttgcccctcggagcnctgctgcagggcctgcgtgagcttctaccactgggcgatggtggccgtgacgggcggcgtgggtgtggccgctgctctgtgtctcnnnngcctcnnnnnnnggcccatccgcctgcgacgctggcaccctgacgcccggccctgattcccnnnnnnnnnctgcacctgtcaagggaacggcgaggatgtcccccggggcctcgaggagaagcccccactgcccctagctctcctctggacccccaccctccatcctcaccccactcccggggatggggtcgggtgagggcagcagggaggcctgccagggccttgtgaatgcaggggnnnnnnnngacccctgggctttgagggtgccccattctcaactccagcccagccctctggaggatttggggtgcccctctcggcaggaagtaggaatcccagaaggatctgggggannnnnnnnnnnnnnnnnnnnnnnnnnnnnnnnnnnnnnnnnncctgggggggctccagatgctgccagggccccctcaggacggttgggacctagaggagaccccgtcatggggtggtgggctgggcctggaccccgccgtggtgggcagcaggactgcccagtaggcttggtggactctgc

SEQ ID NO: 14171 - DNA, 689 bp, Macaca Fascicularis
  misc_feature (1)...(689): n = A,T,C or G
aggaaggggnnnnnnatgtacatatttatcacccctttcacatagccccaagaccttttgtacatttttacaggggtgcccctcccaacagtccccttcctggttaattaaatcctcagactggtgctgtgttcctagcctctggcctctctgtggggaagggagattgcagggggaagagccgggaagggacagtcaggcttctccctgggaaggtggggccagcaggagatgaccaacagggggcgggacctggggacctgggctggagggaagggcagaagcttcctgcttggcttacagccctggttcccccaacatgttcccattcactctgcccccaccctcaaaggctcagcctctaaatctcagactccaccacttcttaatggctcagtcccccttaccccatttccaagtgcccccaggactcctgggccctgcttccctgaaccctgttctccaaaaccctgccccaggctaagggtggccagagaaggtcaccatgtaccacacaccaaagaagggggtcggcccaggggtgggcgacacaggcagcttcttcggcagcctcacggcagcaaccccagccttcccaaagcagcaggcgcctccaggctggggcccaacctagaaggcaggggtcaatctaacaaaaccctaacgttgacttttttccccggttgggg

SEQ ID NO: 14172 - DNA, 1016 bp, Macaca Fascicularis
  misc_feature (1)...(1016): n = A,T,C or G
ctggcttgacgnctcccagcagcccggccaccaggnnnnnnacagggtgtatgggcagnngtccaccaaacactacgtgacgagctaacgccacgcaggcggcggggcgctggggaatcttcctccccggcccccgggctcgggagttatgcatccagagacctgcccttctaccttcctcgcctcccctcttcctcattccattgccccaggtcttttccttttggattttgttttggttttggctttgtttctgatttttttttattatgaatctcctggacgcacaggtgacagtgggagctggcctgggctgggaccgcaggtggccctggagatgggaaagtgtctgtgtcaaggcgctgagctctcttctgtctctccttttttcctctactccttccccttcacacccccgtggctggaaggagccttagcttccctgaaagcttgggggtcccacccttcttaccctgcccgggaggaacgcccagggtttgtttctcctcttgttttccttttgggcagtttgatcactgatcgagtaaggaatgacctttagattgtgggacttttgtttttgttttttatttttttaaaccaagaatgatttctcctgcttccttctcctcaccatcttcccagacggagttcaaaggccacttctcaagcagcttttggcaccttcagcctcagagtggaatcttttaaagacaggaaccctatgtccaggaaaggggaaaaggaactttgccaatgatagtgaccacattaaaagcaaataataataatattaataataataaagtgaaataaaagaaataataaaataaaaaaaaatagcacagcccttgttgaggtcagcagggaggaggggctgcccggagttgggtccttgcctggattttgacacagcaacttcctgtagtgagcactttgtatgaatcgtggacttcctgttctcaaggcgcaggtatttattctgtaatctgtctagagcacacaccaaaatccaa

SEQ ID NO: 14173 - DNA, 780 bp, Macaca Fascicularis
  misc_feature (1)...(780): n = A,T,C or G
gaacccgcnnnccatgtcttcaagcagatggagcaggtggctcagttcctgaaggcggctgaggactatggggnnnnnnnnnnnnnnntgttccagactgttgatctctttgaaggcaaagacatggcagcagtgcagaggaccctgatggctttgggcagcttggcagtcaccaagaatgatgggcactaccgtggagatcccaactggtttatgaagaaagcgcaggagcataagagggaattcacagagagccagctgcaggagggaaagcatgtcattggccttcagatgggcaccaacagaggggcttcccaggctggcatgacaggctacggacgacctcggcagatcatcagttagaggggagagggccagccctgagccctgccctccccagctccctggctacagccatcccgcttagcctgcctcacccacacctgtgtggtaccttcagccctggccaagctttgaggctctgtcactgagcaacggtaactgcacatgggcagctcctccctgtgtccccagcctcagcccaacttcttacccgaaagcatcactgccttggcccctccctcctggctgcccccaccacctctactgtctcctccctgggctaagcaggggagaagcgggctgggggtagcctggatgtgggctaagtccactgtcctccttggcggcaaaagcccattgaagaagaaccagcccagcctgcctcctatcttttcctggaatatttttggggttggaactcaaaaaaaaaaaaaaata

SEQ ID NO: 14174 - DNA, 698 bp, Macaca Fascicularis
  misc_feature (1)...(698): n = A,T,C or G
tcaggaatctggccatgaaaacctctttgtctgtagtgcttggctactctgtgatggcaggagggaaccttcagcctatctggctgctggacctggacaccagggctcannnnnnnnnnnnnnnnnnnnnnnnnnntggtagccatcagtgggtgtgtggggcagtggctgtgggggtgtaagaatgactgcaacaggcannnnnnnnnnnnnnnnnnnngttcacatggaccctgagcaaggagggagggagggaggggcagagtggagtttcattccagcattcccctcagaagggagagnnnnnnnnnnnnnnnnnnnntgggattggaataaaccaggaggctcatgggtggttgctgaatgaagaacagaatcttggtgctttatggctcaccacagccatctgtggggcaggcacacacacctccctgccagctccatttttgcgctttttccctgcttgattccaagagtgggtgctgcctagcagccctttgtggccgctctttactcaggagggccttgcagagtcctgcacccggcctgggtgagcgggtgcccctcttaccatatatgacacgtgnnnnnnnnnnnnnnnnnnnnnnnnnnnnnnnnnnnnnnnnnnnnnnctgctcgttactgtctgccttcagtggtctgaggtcccagtatgaactgtcatgaagtcaaaactc

SEQ ID NO: 14175 - DNA, 749 bp, Macaca Fascicularis
  misc_feature (1)...(749): n = A,T,C or G
gcagaagtacgagctgggcgcagcgctgtatatcggctgggcggccacnncgctgctcatggtaggcggcggcctcttgtgctgcggcgcctgggtctgcaccagccgtcccgacctcagcttccccgtgaagtattcggcgccgcggcggcccacggccaccggcgactacgacaagaagaactacgtctgagggcgctgggcacggcgggggccctcctgccagctacgcctgcgaggcgttggatgagcctggggagccccgcatggacctgcggcttccgccgggtagcgccgcgcgcaggcaccgcagaacgtccggctctgcaccccgacgcggttcctggatgggctcctgcctgcgcccgcagctgaccctctcctgccaccagccgggctctgcccttaacagacggactcggacagtttccttttctgtggggnnnnnnnnnnnnnnnngcagagcgggtgtcagactgaggatgccgcttcccctccaagacgctgggggtcttggctgttgcctgacttcccagaggctcctgctgacttcggaggggcggatggagagcccagggaccccaccggagagatgtgtacagctggtctttaccccatcagcagggcccgagcccaggggccagttacttggcctggacctcccggtctcactccaacatctccccaggcaaggcttgtgggcaccggagcttgagagtgggcgggagtgggaaggctaagaatctact

SEQ ID NO: 14176 - DNA, 658 bp, Macaca Fascicularis
  misc_feature (1)...(658): n = A,T,C or G
gagaaaaaggtggcgcttacggtggaggcgcaaaactcagccacagtgggtcttcaccctttactcttacagggacccaaatacaatagagacgctccaatcttttgggaaggctgttgactgggcaaagtctggaaaattcacacagcaagacatcgacgaagccaaactttctgtcttctcaaccgtagatgctcctgtcgctccttcagacaaaggaatggaccacttcttgtacggcctctcggatgagatgaagcaggcccacagggagcagctcttcgccgtcagccacgacaagctcctggccgtgagcgataggtacctcggcactgggaagagcacgcatggcctggccatacttggacccgagaaccccaaaatcgccaaggacccnnnnnnnnnnnnnnnnnnnnnggccctggcgcccccgactgcgcaggagcccctgagacaacaggcctctagagctgaatatgaagagtcagaaatgctactgctttttccaagaatattatgtcattcttaaggtgttgccactgactggcaagtcagtcttaagagcgaccaggaagatgttcattgaaatagtcatgcatgaaatgccaaagatgcaccacgtagaattttcactttctactgacagaaaggcttgttt

SEQ ID NO: 14177 - DNA, 1324 bp, Macaca Fascicularis
  misc_feature (1)...(1324): n = A,T,C or G
aacccagctccctataccccaccgccaccccccaccgcacagacctaccctcagcccagctataaccagtatcagcagtatgcccagcagtggaaccagtactatcagaaccagggccagtggccgccatactacgggaactacgactatgggagctactccgggaacacacagggtggcacaagcacacagtagccagtgtgacccagaggctcccagaggcccctgccggcttcctccaccagcgcctgcctctgcccctcctctgcccccgccagatcccgtggtgctggggatggggtcatcccagggctgcctccctccagcccactgcctcccctccgaggggcttccttcgcctccatagggccaggcatttttctctggattcaaacaggcaacaatgaccttttattttctgtttgtccccatctccccaaccttccacttcctgttcttcctaccttcttcctttttgactaaataatccccgcctcccttggtcatacagtgaggctacagtgactgaggggagaatcccttcctgttcactctcccaaccctgctccaacccctcagcttcccagaccctcatgcagttggttgtaaattctcccaggagctgttttactgtctacttttcaggattaaaaaaaaaaatcaaaactttaaaaaaaaaaaaaaaagtttaaaaagcaaaatggggagggaggaagcagtgacatatttttttggtaattatgcgcttttttttaatttttagaatttgtctgtttttactgtgggtcggctgttgatatttnnnnnnnnnnnnnnnntctttcctgagttcaggtgactgaggaagagccacaaaacaaaacacaacaaaaccaaaccacagaatcatctttaacccgactttttatacgatgccccagttccccataactttgcacacaagcttctgtgttcagttgaattgtaactgctttttgtattnnnnnnnnnnnnnnnnnnnnnnnnnnnnnnnnnnnnntccgggcgtcttggtagtttctggtgggattcagtgggtgagagggaaggaggggaggttggggggctccttcccttcagaacttgaagtttctcccactgcctcctctccagtgtctccnnnggtgccagacccaaaagcttttcctacagtgataccctttatttttacttccccttgactcatatgttttaacatgattttaacaaatctgcacttattaagaaatgtgtttgccctgttttgtttggtttcgttttgttttctttgaataaatgacatagcacctcctagcaggaagaagca

SEQ ID NO: 14178 - DNA, 652 bp, Macaca Fascicularis
  misc_feature (1)...(652): n = A,T,C or G
taagacaggcagagatgcagcccagggagggaccgtgtgggggactggtctaggtagtgagtccccactcagagcctctgtgatcccagacaatcacggaggagcagctggtgctgaagcgggtggccaacatcctcatcaacctctatggcatgacggctgtgctgtcgcgggccagccgctccatccgcatcgggctacgcaaccacgaccatgaggtgagtccagcctagcctcacacagggcctggctgctggcatctgtcctgctgcactttaatgaagttaattgttgaggagggtgtgggcgggtgtgggggagggctgggccagttgagggggtatccacaggtcctgcagggagaggctgtgggggaggctgtgcaagttcaccatgcggtggctgtgggagggtctgtgctgttcaggagatggggccgttccttttcttcttcctgcctgagagaagaggcgggtgagtgacaggggttcccgatcccagtgccctgacccccagtgaggggcagaccctgcacattgcccactctgctggggggaggcggtgcagtgtctgaggacccactgtgtaccaggatctctgcctgcacttcccagnntgcctgcagataccannnnngtgacatctgcctctc

SEQ ID NO: 14179 - DNA, 670 bp, Macaca Fascicularis
  misc_feature (1)...(670): n = A,T,C or G
gctcaaacagctctcttgccgcctattctccccagagactctgctcctatcctccccacctccccctaactgagcagcagtcctgaggccctgcctcccagtcnnnnnnnnnnnnnnnnnnnnnnnnnnnnnnnnaaagcagagaccaaacttcataccccaaactctggggggcggagggagctgagcgagtcggtctacacggatgtcctggaccggagctgcnnnnnnnnnnnnnnnnactatggagttcgagaagtggaccaagtgaaacgtctcacaggcccaggaattagcgaggggccagagccaagcatcagtgtgatggtcacaggaggcccctggcctaccaggctctccaggacatgtttgcactacctgggggagtttggagaagaccagatctatgaagcccaccaacaaggccaaggggctctggagtcattgctgtgcgggggaccacagggggcctgctcagagaaggtgtcagccacaagagaagagctctagtcctggactctaccctcctctgaaagaagctggggcttgctctgagggtctccactcccatctgcaggcagccaggaaagcaggaagaccttgctctgtgctgccatcctgcctccttcctccagcctcagggccctggggcctgggtgggagccaaggc

SEQ ID NO: 14180 - DNA, 801 bp, Macaca Fascicularis
  misc_feature (1)...(801): n = A,T,C or G
gccatgccaccnnnnnnnnnnnnnnnnnnnnnnnnnnnnnngatgatgaactcacgtataagacactctttgtccctgtcaatgaaggctttgtggacaacatgacgctgagtggcccagacttggagctgcacgcctnnnnnnnnnnnnnnnnnnnnnnnnnnnnnnnnnnngggaagttgcttccagcccactcaggcctcagcctcatcatcagtgatgcaggccctgacaacagttcctgggcccctgtggccccggggacagttgtggttagccatgtcatcgtgtgggacatcgtggccttcaatggcatcatccatgctctggccagccccctcctggcacccccacagcctcaggcagtgctggcgcccaaagccccacctgtggcggcaggtgtgggggctgtgcttgctgctggagcactgcttggcttggtggctggagctctctacctccgtgcccaaggcaagcccacgggctttggcttctctgccttccaggcggaagaggatgctgctgacgacttctcaccgtggcaagaagggaccaaccccaccctggtctctgtccccaaccctgtctttggcagtgacaccttttgtgaacctttccatgactcactcctggaggaggacttccctgacacccagaggatcctcacagtcaagtgatgagactggggctgaaagcagaggcacgcgtagggagaagaccacttttattgcttgtctgggtggacgcccagggtggacagggcgggaggggctgggggcctgtcccggacaataaaggcgc

SEQ ID NO: 14181 - DNA, 1117 bp, Macaca Fascicularis
  misc_feature (1)...(1117): n = A,T,C or G
agtgagttagcaannntctgcgatgcagaatgcnnntgcaattgtgttttaaggagaagccaagtggggatggttgtccctgcaacatggtgccactcctgggccatgtgcagcctnnnnnnnnnnnnnnnnntagtgctgaggccctggccccacctccagttaccctgtactgcctactgccttacagttcagtgtgnnnnnnnnnnnnnnnncattactagcctctctgctcagtgctctggagttcttgaccttgtcctttatcatgagatttgctgaactcactaatgaaaataactcccaaaagcaacaaacaaaaatactagtttaactggcactgtggtatgttaaaaggcacaagggcattgtggcttaannnnnnnnnnnnntcccaagagacgcacatgctgttagaaacagatnnnnnnnnnnnnnnngtattatgcttcagtgtaatcatcttggggtggtttggccaggannnnctaattnnnnnatnnnnnnnnnnnnnnnnnnnnnnnnnnnnnnaggcttaatatacagatgtaagatcagcagcgatttgtctaataagtgatgagatcagtagctgaagtctctaagctgggccattgctaaacaccatagccatgttggactggaaatttatccctctagtgtcttacctcacataagccatttgcccactgtgcaatatagaaaggtgttttcaagtatttggtcatagattttcacatccatcataaggttggcattcaataaggaaaaagttctttctaactccagtattaaattgtacataaatcccagacatttaaagaacactctgggacatgtttgttgcctgggattggtaatgaaaagttggttttcaaaacttgaaatttcaccattgtttttttttcctatcatttctgcatatccagcaaaaggaatctcatgttctgtgnnnnnnnnnnnnnnnnnnnnnnttcagtctgtctgtctgtccnnnnnnnnnnnnnnnnnnattgatccagtaatcaatttggcaactttaatcttgaggtttttaaaattccaaggagggttaataaagaatgataatctgttttatttgctaatagctaagaca

SEQ ID NO: 14182 - DNA, 764 bp, Macaca Fascicularis
  misc_feature (1)...(764): n = A,T,C or G
gttttgcaaaggagaagcagcaggagaaaagtctgtactaaaacattcttgggcccccgcatcgttggcttaaggcataaaanctcagttgaaacccaagaccacaaatctgctgtcaagggaaataacatacacaaaaactatgaaaatgtggaagcaggtcctcccaaagttaaaggaaaaaccgataaggaactatatgaaaacacacagcagtccaatttcgaggagcatatctatggaaatgagacatcttctgactattataacttccagaagcctcgtccttctgaagttcctcaagatgaagatatatacattcttccagattcatattagcttttcaaaatactgacttttgttattggatgacaaatactcactgtaatttttcaacagcaaagacctggaatcaaactaaatgtttatcaacagtagactggataaagaaaatgtggtgacaccatagaatactatgcggccataaaaaagaacaaaactaacatgggaacagaaaatcaaataccacatgttctcacttagaagtgggagctaaataataagaacacatggacagaaagagaggaacaacagacactagagcctacttgagggaggacggtggaaagagggggaggttcaggggaaaaaaaactatcaggtactatgcttagtatacaggtgatgaaataatctgtacaccaaacccccaagtcacaaatgttcctacataacaaacctgcacattaccccnnaacataaaa

SEQ ID NO: 14183 - DNA, 740 bp, Macaca Fascicularis
  misc_feature (1)...(740): n = A,T,C or G
tggaatgtttttgttagtttgtggtgaaggatatgaagacatctcagggtaaagtcagagggctgtcatcagtgtgctggggaggttagggacaggaggcattggtaggggttagatgtagcagcaatcaggctgggatcaagatgcctgggggacaggcttgtggcctttcagggcaagtgggaggccagaaaggtggctaggaagggacagcattcttcaggtaaaggtatagacttgggatgtgaggcattatgctgaaaggttctctgacaagcggatcagaggacaatggggaaattgggtgagttatctagcctatactgtctgcaggtcctgaaatttgatgctgtcatagtctttgcagtgtgtctcttggaatgattctgggggcagaagctcagagccccttcttagtaggaatggaggcggcccttttgctgccactgctcagccccctccactacatgacgaagggtggaggaaattcccagcaacatatggcccaggccttgcagcagtgtggaggtccaacgaaggagctccctgagtactttctttgggccgagtccttgaaagtcacaactcatagagtagagcccgtagaatgtggctttgacattcaggctgccaaagaggtctcgagggttttgcttgtacacgtcaaaggtgatgcgggcgatgtccttgctgtgcttgggcctctcccgtnnnannnnatatgacagcactccactcct

SEQ ID NO: 14184 - DNA, 729 bp, Macaca Fascicularis
  misc_feature (1)...(729): n = A,T,C or G
cacttttagaaaagtcgagaaagtgcactgtcgtnnnnnnnnnnnnnnnnnnncacagatattgtcaaaatgctgcttgattgtggagttgatgtaaatgaatatgattggaatggaggaacacctctgctttatgctgtacatggaaatcatgtgaaatgtgtaaagatgctcttagaaagtggggctgacccaacaattgaaactgactctggatataattctatggatctagctgtagccctgggctatagaagtgtnnnnnnnnnnnnnnngtcacatttgttgaagctgcttcaaaatatcaaggagtagacacattcatcagaaaatgtctgcccttttgtttacttggtccttataagtgatagttttgtttacttatannnnnnnnnnnnnnnnnnnnnnnnnnnnnnnnnnnnnnnnnntttaataaatatttctctgagtaattcactggtttataataaatttaataccctttttataactatgttttactgtgtatttaaaattataaattaatgnnnnnnnnnnngtaaatttttatggtacagatagttatnnnnnnnnnnnnnnnnnnnnnnnnnnatttgacattttcagaaattattctaccctagtcatcttcactcatgtattaagtcattcactttatatagggtttgttataaatccctagaaaaaaattgttcttattgttgaattaaaaagtgcacagtgtgattg

SEQ ID NO: 14185 - DNA, 759 bp, Macaca Fascicularis
  misc_feature (1)...(759): n = A,T,C or G
tgcttgcagcagctgtannncacactttgcctnngttannnnnnnnnnnnnnnnnnngttggagacgggtggtgtcaccagggaagctggtgggggcggggagggattttttccaaactgattgccatttcaccccaatgtcggtggatgccccgcactagtgtgcggaagaagtcaccctgtgctcccccacacaggtgctggacgtcattgctcctccttatacctctgacttcgtgcaacttttcctccccatcctggagaatgacagcatcgcaggtaccatcaaaacnnnnnnnnnnnnnnnnnnnnnnnnnnnnnnnnnnnnnnnnnnnnnnnntaacttcatcatggtgaactaatttagagcatcctccagcgctgaagcagaacattccagaaccagttgtggagaaaccctttcaagaagctgttttaagaggctcgggcagtttcttcaaaatgggcaccattgggaggaggnnnnnnnnnnnnnnnnaaaggaaaatggtagcagcttcagtgagaaactgctcttacgaacagtcccttctctgctgtcaatccagtactgctctcaaatcctgttttcggtgttcatttccttcaaggcaggcactgggctcgcatgacgcctcaggacagatccggccgtcagccgtgggccgctgggaactcagacactcggggaactcctttcaaagctgacctcagttttctcacaagaacnnnnnnttagttgatgttttaggataattg

SEQ ID NO: 14186 - DNA, 718 bp, Macaca Fascicularis
  misc_feature (1)...(718): n = A,T,C or G
gcggcagctgcagccatgggcgcggcgctgggctccatggtgggccttatgacctacgggcggcgccagttccagcccctggacgcgacgatgcggcgcctgatcccgcccttccgcgagnnnnnnnnnnnnnnnaccgcgctggtggactcggnnnnnnnnnnnnnnnncgcctacctggaagcaatgaggctgcccaagaacacacctgaggaaaaggacaggcgcacggcagccctgcaggaggggctgaggcgggcagtctctgnnnnnnnnnnnnnnnnggagacggtggccnnnnnnnnnnnnnnnnnnnnnnnnnnnnnnnnnnnngggaacctggcctgccggtcagacctccaggtggcggccaaagccctggagacgggtgtgtttggcgcgtatttcnnnnnnnnnnnnnnnnnnngggacatcacagacnnnnnnnnnaaggaccagatccaccatcgcatctccagcctcctgcaggaagccaagacccaggctgcactggtgctggactgcctggagacccggcaggagtgatggtgctggaggcctctccgggctctgtggtccctcctcgcccatccccagagggcagannnnnnnnntgggtcgggacacagtttgttcatgtggggcccggaggataggtgggtgggcaggggggcatctcccgggaatggaggtgctggtaggaaccaggagacccctt

SEQ ID NO: 14187 - DNA, 746 bp, Macaca Fascicularis
  misc_feature (1)...(746): n = A,T,C or G
taaagggagattgagggaaattttgctttttaacttcattttagatgctattacagagatgtnnnnnnnnnnnnnnnnnnnnnnnnnnnnnnnnnnnnnnnnnnnnnnnnnnnnnnnncccagcacaggtgtaatgaaactttcataatgcccctcccaccagcatacgtccttttgctacctcggcctcccctgaccataaaattacttacttgcattttgactcttaaatcttgtcctccattttattagccccttcccaacctttgacatttgttattaaataaatggcataatagatgtnnnnnnnnnnnnnnnnaaagccagttgcaaacaaagccttttttgggcaagtggaggcannnnnnnnnnttcctttcactggggccgtctccttccacagacctgctnnnnnnnnnnnnnnnngcaggtttcgtttgctctagtgtagtgtgatacatgtgtacttcacctgcagtcacctactcaggactgatttagacaaaattcatagcagagctgctcagatttgaaagtgcagaggagtcaggtggggtcttattaaatgcagattgggattcagtgggtttgggctagggcccaggaagctgcctttctaacaggttctcaggtgagacccagaaaggagctagagagctggttctgccctcttgtcttactctgtcttctgcactcttccacagaaaagaggttatggaggctgggcatggtggcttatnnnnnta

SEQ ID NO: 14188 - DNA, 728 bp, Macaca Fascicularis
  misc_feature (1)...(728): n = A,T,C or G
cattcactgnntnntannnnnnntgtgtttattactgtccagccncgtcttggttatatactaaaaatcaaacactttgctacagttgtgaattagtttgannnnnnnnnnnnnnnnaccatatcatgcttcaactgttaaattaaggccatcatgtcatagcacgaaaaagattcagttaaaaatcaagatttaaagaatatatattgattaaaatgtaccactagaaaggtattacatgtgtataagtatgggtaaaaaggcaagtcactagtttgagatgaaaattaaaattttcatggtaaaataccagcatatatgtacttgtataatgtgtacttctaaacagagaaggcttataaaagtaaatgcattaaggccaagtgcagtggctcacacctgtaatcnnnnnnnnnnnnnnnnnnnnnnnnnnnnnnnnnnnnnnnnnnnnnnnnnnnnnnnnnnnnagtctgggcaacatagtgagactccatctctataataaaaaaaaaaggaaatgcattaaatagaaggttgatagtttatcataaacctgtgagaaagaaactcagactttgtattttggtattttgggcattaatacattacaaacatgaagatgtttataaaattttgttgtagnnnnnnnnnnnnnnnnnnnnnnnnnnnnnnnnnnnnnnnnnnnnnnnnnnnnnnnnttctgagtcctctggacttcccctgcctat

SEQ ID NO: 14189 - DNA, 593 bp, Macaca Fascicularis
  misc_feature (1)...(593): n = A,T,C or G
gatgatccgcatggaccggcggggaggcacctggaagctactgggctctgtggtctatgcccacagcaaggagctggtcaccgcctggtacatcggcttcctctgtctcatcctggcctcgttcctggtgtacttggcagagaagggggagaacgaccactnnnnnnnnnnnnnnnnnnnnnnnnnnnnnnnnnnnnnnnnnnnnnncaccattggctacggggacaagtacccacagaccnnnnnnnnnnnnnnnnnnnnnnnnnnnnnnnnnnnnnnnnnnnnctccttcttcgcgcttcctgcgggcatcttggggtctggctttgnnnnnnnnnnnnnnnnnnnnnnnnnnnnnnnnnnnnnnnnnnnnnngcggaacccggctgcaggcttgatccagtcggcctgnnnnnnnnnnnnnnncaacctctcgcgcacagacctgcactccacgtggcagtactacgagcgcacggtcaccgtgcccatgtacaggtaccgccgccgggcacctgccaccacgcatctgtttcgttttttgttttccannnnnnnnnnnnnnnnnnnnnnnnnnnttcattattttgatt

SEQ ID NO: 14190 - DNA, 693 bp, Macaca Fascicularis
  misc_feature (1)...(693): n = A,T,C or G
cggtgtgggcnnnnnnnnnnnnnnnnnntggggctgcgtgcgctctctctctctctctctctttgatctcagggggtcctttttggagtttattgtattttattgtactaggtggggtgtttggggtggtgggaggagagcttgttctcatggggtttgtcggtaccttcagaaacttttaccaaagtcacgtttagctgcttgttgtgtggccccaactgccctcgggcactggggggctgggctggggccgctgctctggggtctctgggagccacagcttgggggtgagttgaagacctcagggggtgcggaagggtctgcggggccctcactgcacaggatggccttcagggaaggtgggcacggggcatggcgcagagcaggtgaccggagggagtcggtgacagagcggggccaagggaggggtccggagggagtcagggatcgagggcagagggagtggatatgggggtttgaggacgtatgacaagccccagcaggggtgggggccgggctgagggtgggggtgtgaggcggtcacccccatcgtgcccttggccgttcctccactcacccacctggcccagcccacgttgaggtgcaggactgggaaggcccgagtgtgtgcaccgggggcccaggccaggtgccccccagagcccgctggggtggccagagcaggagggggtg

SEQ ID NO: 14191 - DNA, 733 bp, Macaca Fascicularis
  misc_feature (1)...(733): n = A,T,C or G
atgagatccagtttgggcanctgcagcgacctacnnactacaatacttcttgggactgggctcgatttgaggtgtgggcccaccgctggatgnnnnnnnnnnnacacggctttggactggccctgctcaacgactgcaagtatggcgcatcagtgcaaggcagcgtcctcagcctctcgctcttgcgggcgcctaaagccccggacgctactgctgacatggggcnnnnnnnnnnnnnnnnnnnnnnnnnnncccacaagggctctttccaggatgctggtgttatccaagctgcctacagcctaaacttccccctattggctctgccagcccccagcccagcgcccgccacctcctggagtgccttttccctgtcttcacccgcggtnnnnnnnnngactgtcaagcaggcggagagcagcccccagcgccgctcgctggtcctgaggctgtatgaagcccacggcagccacgtggactgctggctgcacttgtcgctgccggttcaggaggccatcctctgcgacctcttggagcgaccagaccctgctggccacttgccccttcgggacagccgcctgaagctcaccttttctcccttccaagtgctgtccctgttgctcgtgcttcagcctccaccacactgagtccctggggctggggttttgtttgtggaaggttctggggactcctaatttctgtttccccagcctaaagcagggatcagtctctc

SEQ ID NO: 14192 - DNA, 769 bp, Macaca Fascicularis
  misc_feature (1)...(769): n = A,T,C or G
tgcagatatcaggctcgcgagaagatnncaggggcggacggcgtctcccatcattccccggccagaggtactccatctcccaagaggatgccctcaggtcgtgggggacgggaccgcttcaccgctgagtcctnnnnnnnnnnnggggacacgctgatcgacggcggggagcattactgggaggtgcgctacgagccggannnnnnnnnnnnnggtgtgggcgtggcctaccgcagcctgggccgcttcgaacaactgggcaagacggccgcctcctggtgcctnnnnnnnnnnnnnnnnnnnnnnnnnnnnnnnnnnnccaagcatgccaacaaggtcaaggtgctggacgcccccgtgcccgactgcctgggtgtgcactgtgacttccaccaaggcctcttgtccttttacaacgcccgcaccaaacaagtgttgcacactttcaagaccaggttcacacagcccctgctgcctgctttcacggtatggtgtggcagcttccaggtgacgannnnnnnnnnnnnnnnnnnttctgtgcgctgcctgcaaaagcgaggcagtgctaccagcagctccaacaccagcctcacctaggcccccaggcacccacccagctggggtgttcttgggggagccgctgccaggcccgggctgctggagccaggcaccctactctgtcatttgctgcttggagccttaactctggatggggggtcaccaagagggagcgggcaccctggcgggccctcctccccacctcacctct

SEQ ID NO: 14193 - DNA, 573 bp, Macaca Fascicularis
  misc_feature (1)...(573): n = A,T,C or G
caccaccaccaccccnngagtccggctgccgnngccgccgccgatgctgccgcagccgccgcggctgccaacatgtacnngtcggcaggagccgcgccgcccggctcatnngactactgccccagataacgcgggccccgccccgccgcgcccccgccccggccccgcacagccccgaggttcgcggggcccgacccccctgccccaagggccagcaagaaatatgtttcctcagtcccaggggccacttcgggtctccccttccccagcctcgaagccatgggggctccctcgccaccccccagccccttgggctatcgaagtatcccggttccccagtccctggagccaccgcgggtccttccccggccccgagggccacggggtccccgcccgccagtgccaaagcgcccggtcgcaggcggaaggaagtgatatttattgttctccccgagaccgcgtcgcccgcagcccggccggcagttgcagtgtagacaacccgagagccccgcctgcaggcggtgtagatacgtgtagatattgtagatactgtagataccgcgccggcgccga

SEQ ID NO: 14194 - DNA, 648 bp, Macaca Fascicularis
  misc_feature (1)...(648): n = A,T,C or G
cgggccgaggaggctgcgcccgccgcgcagccgggccccaaactctggtaccgggactttctgcagctggtggagccgggcggcggtggcagcgcgaactccctgcgcatgtgtcgcccacagcctgcgctgcagtcactgcccccggagtcgcggaggaagggccgtaaccggcggacccacgctcctgagccacgcgctgagcgggggccgcgcagcgtaacgcactggtgaccggactgtccccacgccgggaaccaagcagactacaggcgggagaggagccagacagaccctgaaaagacagacgggttggggccgggcacattgggagtcccaggccgacggagacaccaaccgacaggccctggctgagggcagctgcgcgggcttatttattaacaggataacccttgaatgtagcagccccgggaagggcggcacaggccgnnnnnnnnnnnnnnnnnnnnnngaagagagggggaagctgggctccagagcaacgaccagggccgaggaggtgcctggagtgcccaccctgggggacagaccccacctccttgggtagtgagcagtgagcagaaaactgtgaacaggctgggctgttggaggtggggcgaggcaggccaactgtactaaagtaacgca

SEQ ID NO: 14195 - DNA, 732 bp, Macaca Fascicularis
agccacatctctgatcacttacctggggctctacccacatgttctccagaaagtgcgagaagagctgaagagtaagggtttactttgcaagagcaatcaagacaacaagttggacatggaaattttggaacaacttaaatacatcgggggtgttattaaggagacccttcgactgaatcccccagttccaggagggtttcgggttgctctgaagacttttgaattaaatggataccagattcccaagggctggaatgttatctacagtatctgtgatactcatgatgtggcagagatcttcaccaacaaggaagaatttaatcctgaccgattcatgctgcctcacccagaggatgcatccaggttcagcttcattccatttggaggaggccttaggagctgtgtaggcaaagaatttgcaaaaattcttctcaaaatatttacagtggagctggccaggcattgtgactggcagcttctaaatggacctcctacaatgaaaaccagtcccaccgtgtatcctgtggacaatctccctgcaagattcacccatttccatggggaaatctgatgagcttgaatgctcaaacctcagacttattgcaagtgtacatatgagtttttaaggagtgttgtgttgactttatatttaatttctaaatgtatattataatatttatgtgttttgactatattaccacaatctttaaatattaaaataatgaatttgta

SEQ ID NO: 14196 - DNA, 749 bp, Macaca Fascicularis
  misc_feature (1)...(749): n = A,T,C or G
tgtgaacacagtgactgacgatgactacgcaggcttnntcttcagttatcaagacagtggccgatnnnnnnnnnnnnnnnnnnnnnnnnnnnnnnnnncctactggcaggcnnnnnnnnnnnnnnnnnnngcccagcccgggctgcagctcaaggcagtgacatcagtgtctggcccaggtgagcacctnnnnnnnnnnnnnnnnnnnnnnnnnnncacccctgatcaggtgcgactactgtggacggacccacgaaatgtgggctggnnnnnnnnnnnnnnnnnnnnnnnnnnnnnnnnnnnnnnnnnnnnnnnnnnnnnnnnnngggtgaagctctatgagggaccccagcttgtggcggattctggggtgattattgacacatccatgcgaggggggcgtcttggtgtattctgcttttcccaagaaaacatcatttggtccaatcnnnnnnnnnnnnnnnnnnacacagtgcctgaggacnnnnnnnnnnnnnnnaggcagctgctccagggaagggtgtgaggaggaggccaccggattcagaattcagaattttagaccctttggccttgggatccaccctggagannnnnnnnnnnnnnnnnnnnnnnnnnnnnnnnnnnnnnnnnnnnnnnnnnnnnnnnnnnnnnnnnnnnnnnnggggtggtcgccnnnnnnnnnnnnnnnnnntttttcaaggggtattactcaggcactaaccccaggaaagatgacagcacatgcc

SEQ ID NO: 14197 - DNA, 704 bp, Macaca Fascicularis
  misc_feature (1)...(704): n = A,T,C or G
gagccaggaattcccatgttacacaggaaaaaatagaagtctactgaattaattttttaaaagaaaagagatcagattaaatatttctttgtttttccttttggaaacttttatgtataattctttctgcctgcctacttttctgcaaaaatgagatgtacagatttcggttccctgctatgaaaagtgatgtggtggcaattttataaatgttgctttctgatttttatcagagtgagaaaataattaaaattattgatttgcaagtagtaaacagttcatattttgatttcccctcattttagtttaatataatttgcaataagtgtacatattgttgtttgtttcataaagcatatcactttaaaatggtttttactcctgtgattatgttggaatatttggaattttaaaggagtaaagactgtccagcatttggttttataatgtttgtcaccagatttttattaatgtaaaaaaaaaagtcaatttttaaaaaatagttggactttggcagctttgtaaggaaagttggaggtgttttaggattgctatcaattttcagcattgtgctactgggaaataagtgttttgcttttgtctgatggtctgggctcatttttatgtttattttagaaaacttgcatcaatatattatgtntcagcattgttcagcataggtaatgtgtgcactttttgtgtac

SEQ ID NO: 14198 - DNA, 751 bp, Macaca Fascicularis
  misc_feature (1)...(751): n = A,T,C or G
gggccaagagtttgagaccagcctgggcaacatagcgagactcttatctnnnnnaaaaaaaaaaaattttgatttaattctgttatttatcataaggggtttaattcctgaagtaaaggtatgctcctattaaacttaaaactgccaaatgagttttgttccctttatnnnnnnnnnnaannnnnnnnnnnnnnnnnnnnnnnntcctcctccctttcaagctagggcagcaggtagctctttccaccccctgagcccagccccttaccaagtggtgctggacaaaaaaactacatggcccttttatgtcttggggctggaaagggagggatgaattggggtgatagaaccctggtgaattcagagttatctttctttagaaaaatattgaaaaactacttcaggataggagtttagaaaaagcaccaaagctttcactttggtttggcaccagtttctaaccatctgttttttctaccctagctatcttttattggtaaaatataaatgtataattnnnnnnnnnnnnnnnnnnnnaggattttccctcctattttgtttgttgattagcaaatttttgattctccattttccaaaagtaaaagactccagcatggccttctgtttgccccgannnnnnnnnnnnnnnnnnnnnnnnnnnnnnnnnnnnnnnnnnnnnnnnnnnnnnnnnnnnnnnnnnnnnnnnnnnnnnntacctccnntgactccaacttgtgggtttgttctgttt

SEQ ID NO: 14199 - DNA, 608 bp, Macaca Fascicularis
  misc_feature (1)...(608): n = A,T,C or G
tacattatactattctnnttctttaataacttgggtagtacnntaatatttttaatcatcttgaagtatgatttgatatnannntattgaaattaccttatcatancttagagtccatctttatgtttaaaactaatttcttaaaataaagccttcagtaaatgttcattaccaacttgatagannnnnnnnnnnnnnnnnnnnnnnnnnnnnnnnnnnnnnnnnnnnnttttttttttaattattataacctgatttaaaaatctctgtaaaatgtgtagtgtttatataaaatctgtaacctgcattttaatgatcagctattataagctttaaatagtatgaaaattgttaggcnnnnnnnnnnnnnnnnnnnnnnnnnnnnnnnnnnnnnnnnnnnnnnnnnnnnnnnnnnnnngcttggaagagcctggacactaacaattctacaccaaattgtctcttcaaatatgtatggactgggtaactctgagaaacacatatagtataattgaataagcagaacatcaaattaaacagacagaaactgaaagctctatataaatgctcagagttctttatgtatttcttattggcattcaacataa

SEQ ID NO: 14200 - DNA, 762 bp, Macaca Fascicularis
  misc_feature (1)...(762): n = A,T,C or G
ttatttttttannnnnnngaagaggtggacattttggaagtggtggggactaagggaagaactctatagttccctcagtgtgaagcctgtcgtgttccctctcttcccttgcactggtcatcagtattgtgtannnnnnnnnnnnnnnnnnnnnnnnnnnnnnnnnnnnnnnnnatttgccatgctgctatgaagactacttttagaacaacaataaaaaaaaaacctacaaaaaaacctttattctttaattgttgcttttacagtgatattgtgcatgcaaaccaggagcattttgtgtcttaagaaaaataatcttagaacagatggctgtgaaaattacacccatgcacagaacnnnnnnnnnnnnnnnnnnnnnnnnnnnnnnnnnnnnnctttttcttgtaaacctggagggttgatatattctttccatgcagttattagaacttagttttgttccaacagttaaacttgcaatgaaaagaaaatgtgccatttttttttcacttggaattattcatagctgtatatttgaaactgctaattacacacgtgtgatgtatgttggttttttagtgcaatttcttctgtagctattctttgaccaaactgtgggtattgttaatattaatttatatttgtctcattttgtatgtatgtgtagtgtgtttgtatgtgtggtttataatctgacaaagtcatgaagctcagtttggctctaatttaattccccttcccttatttttatttatttttgta

SEQ ID NO: 14201 - DNA, 165 bp, Macaca Fascicularis
accctgttgagtatgctcacttggtacaggccatcatcgagaacccattcatcaatggagaggtcatcagggtggatggggccattcgtatgcagccttgaagggagaaggcagagaaaacacacgctcttctgcccttccttctccctggggtactactctcca

SEQ ID NO: 14202 - DNA, 695 bp, Macaca Fascicularis
agaaagctgcctctgaagtaatgcattacagctgggagaaagagcactgtggctttggcagctgttctacaggacagtgaggctacagccccttcacaatatagtatccctctaatcacacacaggaagagtgtgtagaagtggaaatacatatgcatccttacccagatgtcactgccttaggtatcttccaggagcttagatgagagcaagagcatatcattagaaaagtttcaacaatgtccattactcccccaaacctcctggttctcaaggctgaccacattctgatacagcttacttcaagccttttcttttactccccccccagcatttactgtaactctgccctcttccctcccacaattagagttatataccagcccctaatattcaccactggcttttctctcccctggcctttgctgaagctcttccctctttttcaaatgtctattgatattctcctattttcactgcccaactaaagtactattaatatttctttctttctttcttttttttgagccaaggtctcactacgttgccccggctggtctccaactcccgagctcaagagatcctcctgcctcagcctcataagtacccgggcttacaggcatgtgccaccacacctcggcttaaagtactatatcctattgaggtctaacctctatttcccctagccctgtcct

SEQ ID NO: 14203 - DNA, 744 bp, Macaca Fascicularis
  misc_feature (1)...(744): n = A,T,C or G
tttttatgattgccagactgatttccgattctactggatgcattcaaagttaccagaagaagaaggactgggagagaaaaccaagctcaatccttttaaatttgtggggctaaagaatttcccttgcactcccgaaagcctgtgtgnnnnnnnnnnnnnnnnnnnnnnnnnnnnnnnnnnnngacttctcttctaccacaagcagacccactacagccccggaagcactcccttggtgggctggctgcgtccctacatggtatcagatgtccttggtgtagctgtgccagctgggccgctgaccaccaagccagactatgctgggnnnnnnnnnnnnnnnnnnnnnnngcacaaaaagagccagaaggaaggcatgaaggagaaactcacacacacgnnnnnnnnnnnnnnnnnnnnnnnnnnnnnnnnnnnnnnnactcccaagttgaagagttctccccatagcccagaccaccctggaagcctcatggagaattaaagagggaagcctccttaacgagccacaggatggtacccggccccaaaaggaatcctgggcaggaggacagtgacaacaggtgacttcattctttagagtgaactttccaaagccagtctggctggaaacagcttatctataatctgaaatgctggctcaaacagttatggggaagttcccagattgggtagcattcagattgatttgagcagctcctactgtgataagtgtatcccagatccact

SEQ ID NO: 14204 - DNA, 723 bp, Macaca Fascicularis
  misc_feature (1)...(723): n = A,T,C or G
agcaggccaagagcaactcatannnnntcagagagaggccaatgctttggccatgcaacagaagtggaattccctggnnnnnnnnnnnnnnnntaccttaaaccttttaagcaaggaaattgaactaagaaatggagagttacagagtgattatannnnnnnnnnnnnnnnnnnnnnnnnnnnnnnnnnnnnnnnnnnnnnnnnnnnnnnnnnnnnnnnnnnnnnnnnnnnnnnncaaagtgaaccaattgaagagatcnnnnnnnnnnnnnnnnnnatcagttctcaaaatgatcagttgctaaatggaacggcagtggaaaatgggcatccagtgcagcagcaccaaaaggagccaccaaagcagaagaaacagagtttaggtgaagaccatgtgattctggaggaacaaaaaacaattctgccggtaacttcttgctttagccagccactcccagtgtctattagcaatgcaagttgcctccccatcaccacgtctgtcagtgttggcaacctcattttgaaaactcatgttatgtttgaagataaaaacgactttttaaaacctgttgcaaatgggaagatggttnnnnnnnnnnnnnnnnntcatctttcaaatttgtgaccacaccatggaagcatttacactagctttttatatatataatatatattatataatgtatattttttttaaaaannagatattactgggggcatcca

SEQ ID NO: 14205 - DNA, 750 bp, Macaca Fascicularis
  misc_feature (1)...(750): n = A,T,C or G
acacagcagcaatagnnngccaggannaatgatggannncaggaataaaggtgnnnnngagaagtatcgaaagctcgtgtctgcagttgttgaatatggtggtaaacgagtcagaggaagtgaccttttcagccccaaagatgctgtggctatcaccaaacagtnnnnnnnnnnnnnnnnnngagtagaaaatgtatatacacagcatcaacctttcctacatgaaacgctggatcatctcatcaannnnnnnnnnnnnnnnnnnnnnnnnnnnnnnnnnnnnnnnnnnnnnnnnngagacagcatctcgttctgttgcctaggctggatgnnnnnnnnnnnnnnnnnnnnnnnnnnctgcaacctcgacttcccaggctcaagtgatcctcacatctnnnnnnnnnnnnnnnnccnnnnnnnnnnnnnnnnnnnnnnnnnnnnnnnnnnnnnnnaccaaactggactaatttttaaaaattttttttgcagagctgggggtctcacaatgttgcccaagtggatctcgagctccttggctcaagcgagctccacctgccttggcctcccannnnnnnnnnnnnnnaagcataagccaccaggcccagcctttttttgttgttgtttttaaggaggaagaggggacatgagcaaggacgtaccctgtgcatttgctcccctccctgtagcttgattgctagttctatttttagttctttgagctagctctataatgttttccacagaggt

SEQ ID NO: 14206 - DNA, 657 bp, Macaca Fascicularis
  misc_feature (1)...(657): n = A,T,C or G
atcgtggtcatcctctgtggcaacaagaaggacctggaccctgagcgggaggtcactttcctggaggcctcccgctttgcccaggagaatgagctgatgtttctggagaccagcgctctcacaggtgagaacgtggaagaggcgttcctcaagtgtgcccgcaccatcctcaacaagattgactcaggtgagctagaccccgagaggatgggatcnnnnnnnnnnnnnnnnnnnnnnnnnnnnnnnnnnnnnnnnnnnnnnnnnnnnnnnnnnnnnnnnnnnnnnnnnnnnnnnnnctgctgagccttgtggagccagctcacctgttcttcaggaccagccctgcccttccggccggggcccaggcccaggcccaggctccgagaggccatgtcccaacctgccctggccccggagaagctgcgccgccacctgtcccccttccttggtggggcctggctttggggcaagactgagtcacgggggaagggggatcccgtacctgctgctgcttcctctgtcttggctaacctctgtccccctgaacccctaaccataccccaagagctcccaaagcctgagaccagggtcatttgtccctacctccccgcctggccctgctgttgctagtacctgttatttattacctggaggcct

SEQ ID NO: 14207 - DNA, 735 bp, Macaca Fascicularis
  misc_feature (1)...(735): n = A,T,C or G
acacacagcgnnnnnaggcaggaggagcagctgggacccagaactgagcctgggaggggtccaacagaaaagctcagggcaggtcttctccttgtgcccgggattgggctatgctgggtccaaccatgtactcaggcatggtgggtttgaacccataaaccaaaggcccttgtcatcagctcttaacaagtatattttgtattttaatctctctaaacatatggaagttttcgggccctaaggaaccttagtgatcatataatgggtctttctgaggtccagagagggttagtaacttcccccaggtcacacnnnnnnnnnnnnnnnggcagaagcaagctagtgctgggcattcggaacctaccacaatgtgccccctctcttgatgcttggcccctggggccttcagggctttgggacatcttgtcctcaaccctctccctagatcagtctgtgagggtccctgtagatattgtgtaccccatgccaatgtatatacaagtacacacagatgtacacacagatgtacacatgctccagccccagctctgcatacctgcacctgcatctcagccttggcccctgcctgcgtctgtgctgaacgcagcagctccaaccccacctctgtcctcttccccaccccgcgcctgagccctctgagcagaccaggcaccttggctgcaccagtgtgtggcccgctgtctcccaggcacagccccgctgccatggatctcc

SEQ ID NO: 14208 - DNA, 727 bp, Macaca Fascicularis
  misc_feature (1)...(727): n = A,T,C or G
cagagtggcttccaaggggctgtctgtnnncagccgcgcctgtgtctggtgcccgaggggcgggcggcggtgtctgtatgtatgtgtacatatgcacatagaccttagagtgtatannnnnnnnnnnnnnnctcacccatgcccacccagcgccgccgctggctctcggggcacctggcaggaggcgggtgtgtgaatagcatatatttttacatgtactatatctaggtgtgtgtacaagtgtgtgtaaaaatacataccttgtgtgtaagcagccctcttttatttttggtctccaccccctcccccctactcccaagggcccatctgccaagcctctgagttttcttttttttttttttaaccccaattatccttctctctctccagccccccaatcccactcccagggtgtcacgagccctgagctgcaatggcctgggcctgcagggcagggtgggggagggcaggggctcagccccgaagccagctcagtacccgaggggctgctctacgctgtgtatgcgcctctctggcatccgagacatcctcttggctggcgcttgctgcaggggggactcccccaggtgaaccaagggcctgctccggggcccatttccagcttggccgccgtctgtgaccttgggcaagtcacttgacctctgtgtgcctcaacttcctcctctgtaaaacggggacagtccctgcccctccctacctcacaggc

SEQ ID NO: 14209 - DNA, 754 bp, Macaca Fascicularis
  misc_feature (1)...(754): n = A,T,C or G
ggtggaaaatgaccgggaacggtatgggaaccgtaatgatgatagagataatagtaaccgtgacaggagagagtggggaaggaggagccctgaccgggacaggcacagagacttggaagagagaaatagacgctctagtgggcatcgagacagagagagagattctagagatagagagtctcgtagagagaaggaagaagcacgaggaaaggaaaagccggaggtgacagacagggcaggtggtaacaaaaccgttgaacctcccattagccaagtgggaaatgtagacactgcttcagaacttgagaagggggagtctgaggctgcagtcctaaagccttctgaagagttacctgctgaggctacctcntccgttgaacccgaaaaggattctggctcagcagcagaggctcctcgttaagagactggaatttgtgaaaatgtgacagtgacacttctggagtgtagagcttgaggtgtacagatgctgtattatatccgctcccgctgtactgcagccccgcgccagctggtggggaactgtaagcaatttgattgcttcccttctatttaaaaatagccacaaaataacaaaaaatactgaaaatatgaataaatattaccctttttgctgtaactttttaaaagttttgactttaaaaagtttacaaatcgtaattagaagtgctctctattttttttttttttttaatttaagacaaggtaacggtgaaagctcctcaaaacaataggg

SEQ ID NO: 14210 - DNA, 764 bp, Macaca Fascicularis
  misc_feature (1)...(764): n = A,T,C or G
cagatgaccatggcacagggaagaatcaaactcagtcaaccatccttcaacccaactgggagtctgtgaggcctagcacacaggtgctcaataaacgcttgtggcatgaagtgaaggaaccgatcttgttcatctctgtgccctagcacttggcatgtagcccatgacgaaaatgcagactgaacaactgtcatcctctttcttatcactagtgcccagcacacagtcagtgctcttgaggtgtgtggaaaagccaattaaagagtgagaagttcccacaccgtctagcagtgaggagaaaaaggaaaaacgtgaaaagtaccttgttcactcccattcccatcccacagctcagctccctgcacacagcaggggctaagtgtaccaaatcaataacttatctttgcgacacgagtgccaggcacacagtaggtgatcagtatgtgcttgaataaatggatagaagcatcttatttatctcaatattcccagagcctgggcnnnnnnnnnnnnnnnnnnnnnnnnnnnnnnnnnnnnnnnnnnnnnnnnnnnnnnnnnncactttgaggnnnagcgagttgcgaggnnnnnnnnnnnnnnnnnnnnnnnnnnnnnnnnnnnnnnnnnnnnnnnnnnnnnnnnnnnnnnnnnnnnnnnnnnnnnncagctacttgggaggctgagaaannnnnnnnnnnnnnnnnnnnnaggcataggctgcagtgagccannnatcataccaccgcactacagcctgggtgaca

SEQ ID NO: 14211 - DNA, 712 bp, Macaca Fascicularis
  misc_feature (1)...(712): n = A,T,C or G
gagcaatgaatgtgagagatgtggtcaccaagaaaccaaagttacttttgacaagacctaatatgaaataatagatttcatatttgatctctgtaataatcatctttcctataaaagtagcatttttagtaaagtttcaaagaagaagaaacagagatggaagagtaaagatatttttaaaatggctagctattgggcaccagtttttctgttacctaaaatttcacagaacttcattgtttttatttttatattatgagttgtccatcttaaagaaatatgagtaattctacatgtagtagaggtgtatgaagatcatgtaacaattaaacataagccagaaattaaaatgactatggacagcaagaactgagctaataatatgttttaactcaacaccagcaagaagtcagtcatttattgaacttttagctactaagattacttggtttttattattagtgaaaagaaaacacaatnnnnnnnnnnnnnnnnnaatttttgattcagtatttgaatttcttcttcataattgtagttgaatttatcctagtatttttctttacctgaaggagggccatttatttttaatttcactacattttcctttgcatgattattaaaaaaaactgcctctgttgtctttctcactggaggctggaatgaatgatcattaaacacaaaacagtgaatgatggcacttgaagttaaa

SEQ ID NO: 14212 - DNA, 941 bp, Macaca Fascicularis
  misc_feature (1)...(941): n = A,T,C or G
ccaagattgtggcatnnnnnnnnnnnnnnnnnnnnnnnngggcannnnnnnnnnnnnnnnnnnnnnnnnnnnnnnnnnnngagtttgnnnnnnnnnnnnnnnnnnnnnnnnnnnnnnnngtggggctgtacggggctcgaggcggagggattggggatcgggatggagtcatgccaaaaatggacatcatttctggaacacttggcaaagcctttggctgtgttggagnnnnnnnnnncagcacgagttcnnngattgacacggtacggtcctatgctgctggcttcatcttcaccacctctctgccacccatgctgcnnnctnnngccatggagtctgtgcggatcctgaagagcgctgagggacgggcgcttcgccgccagcaccagcgcaacgttaagctcatgagacagatgctaatggatgccggcctccctgttgtccactgccccagccacatcatccctgtgcgggttgcagatgctgctaaaaacacggaagtctgtgatgaactaatgagcagacataacatctatgtgcaagcaatcaattaccctaccgtgccccggggagaagagctcctacggatcgcccctacccctcaccacacaccccagannnnnnnnnnnnnnnnnnnnnnnnnnnnnnnnnnnnggaagcaagtggggctggaactgaagccgcattcctcagctgagtgcaacttctgcaggaggccannnnnnnnnnnnnnnatgagtgaaagagagaagtcctnnnnnnnnnnnnnnnnnnnnnnnnnnnnnnntcaggcctgagcatgacctcagttattccactcaaccccaggccattatcatatccagatagtcttcagagttgtctttatatgtgaattaagttatattaaattttaatctatagtaaaaacatagtcctggaaataaattcttgtttaagtg

SEQ ID NO: 14213 - DNA, 783 bp, Macaca Fascicularis
  misc_feature (1)...(783): n = A,T,C or G
ttggaaatgtgcaataccaattccatccactgtgtggaattcngggaagacagctggnnnnnnnnnnnnnaagttcttcgctctctcttgcccttacnnnnnnnnnnnnnnnnnnnnnnnnnnnnnnnnnntctggcttaagactaacagacacattcttaaagagaacatatgaatatgatgacatcgcacaagtctgtgtggtatcttctgccattaaagtggaaagctgaaggaaatttccaatgttatgcttttcatttagtttcacagaactgctttttgtcacctttgtaaaannnnnnnnnnnnnnnnnnngtaaatatgttacttctttcctgtaaaatagttaaaatattaaatatttgttttgaagagatctgattttatcttgtaagttatgttcgaaatgaacatgtgtagattttctacacctatttaatttcatttcattttagatgaccactggactttgttctccnnnnnnnnnnnnnnnnnnnnnnnnntgtccctagccagtatctagaacacaagtcagcaaactttttatgtaaggtacaagacactaaatattttaggctttgcaggccataannnnnnnnnnnnnnnnnnnnnnnnnnnnnnnnnnnnnnnnnnnnnnnnnnnnnnnnnnnnnnnnnnnnnnnnntggtgtacataaaaagcagcagctggactcaggaagctgaggcaggagaatcacttgaacccaggaggcgcaggtggcagtaagctgagatcatgccactgtactctagcctaagc

SEQ ID NO: 14214 - DNA, 744 bp, Macaca Fascicularis
  misc_feature (1)...(744): n = A,T,C or G
aagatgcaggtggtgtttggagaagcagttacttttcagttacaagacccatctccccagnnncagccttacaacaccaagagactatggaagagcgcttccttgcctccatgaggccagatggaagaaccatcccaatcatttgctctccagctccatagtagagagaaacctacaaaatgtcaaaccagcttcctgactcccaggagcccaagccaagcccagaggcagtggctggggtccctgcagatcatgaggggcctatgcctttattactcttaaacaccagcacccatcttttccccaacctaaaaccaaccaccagcatttcactacaggaccaaatggaaacagagggaaccctgggtcttgggaagagcaacaggaaaccaaggtctgacctaggttccctcccagtcttcacatcatcccggcctgatcaccaaggtgacagaggacacaggggaggggaaaacccacacacactccttgggatgggtcctgctatttatgcttgctgcacagacatattagaagaagaaaaaaaaaaagctttgtattattcttccacatatgctggctgctgtttacacaccctgccaatgccttagcactggagagctttttgcaatacgctggggaaaggggagggagggaatgaaagtgccaaagaaaacatgtttttaagagctcgggttttatacaatagaatgttttctagcagatgcctcttgttttaatata

SEQ ID NO: 14215 - DNA, 634 bp, Macaca Fascicularis
  misc_feature (1)...(634): n = A,T,C or G
ccccatctagggctgnnnnnnnnnnnnnnnnnnnnnnnnnnnnnntggcgagatgccccctcagtgcatgagggcacatatccaggtggtgcctttaatggtgacaggtttgtttgcagacaagggtgaccgatggtgctgcccccaagnnnnnnnnnnnnnnnnnnnnnnnnnnnggggtgggcaacatgacacccccccacctaagccggcctcctgccttctctccctcagtctcagggaccagccaagcccccacccccaaggaagccactgcctgccgacccccagggccggtgcccatccggtgacctgccaggcccaggagctggaatcccgcccctagcgctaccctccagaccagcgccacnnnnnnnnnnnnnnnnnnnnnnnnnnnnnngacctctctggaggttctgctgcctccaaaccggacttaggacttcaagaggggggcgtgccctctggagtcccctaccatgactgaaggcgccagaggctggacgcggtgtcttaaggctccaggcaccgccacgcgctgtcaagcagcactctagggnnnnnnnnnnnnnnnnnnnnnnnnnnnnnnnnnnnnnnnnngggttggaaggggttgagggaggtccgcacagcc

SEQ ID NO: 14216 - DNA, 711 bp, Macaca Fascicularis
  misc_feature (1)...(711): n = A,T,C or G
acagattcccgggtgctcnnnnnnnccttccatcactacagtaagtaaaaggaccatagaggggaaccaggaatcagagaatcagctgtgctcaatagccaacctccctgtccagatgcagctattttggtacctcctctcacatgcactctgaatcagggtttttctataagaannnnnnnnnnnnnnncaaaagtggggatgacctagacatcttgatttgcaaaatcacaaaactaagttgtcaattatcactatagatgagcagctcatctttttaaagtnnnnnnnnnnnnnnnnnnnnnnnnnnnnnnnnnnnnnnnnnnnnnnnacagtacaaatataactaattgggaaagttagaatgtcctttctgaacttttcattaaaaaaaattacattatctgaagtaacataaagctactaaactgctttgtattctattaagaaatagctcctaaagatgtagtcttgtttcatagttgttgcactatatcaaagcttaaaatgtaagcccaattcttctctgtatagaaaggaaacattgtgttacttaatgaattatttatacagagcatttgtnnnnnnnnnnnnnnnnnnnnnnccacacaggagtctgttttgaggtggcaatagcacatgggaagatgaactttccctgtttgtttacctgtttttctttggctgtatctgatgacagtataagatgtc

SEQ ID NO: 14217 - DNA, 716 bp, Macaca Fascicularis
  misc_feature (1)...(716): n = A,T,C or G
atatgtaagaacacttgaagagacaaggaaagaaaagacactgttgaatagtcagttagaaatggaaagaatgaaagttgaacaagaaaggaagaaagccatttttactcaagaagcaataaaagaaaaggaacgcaagccattttctgtttctagcactcccaccatgtcacgctcaagttcaataagtggtgttgatatggcaggactacagacatcttttctgtctcaggatgaatctcatgatcactcatttggaccaatgtctgtatcagcaaatggaagcaatctttatgatgctgtaaggatgggagcaggatcaagcattattgaaaacctacagtctcagctaaagctaagggaaggggaaattactcatttacagctagaaattggcaatctagaaaaaactcgatcaataatggctgaagaactagttaaattaacaaatcaaaatgatgaacttgaagagaaggtgaaggagatacccaaacttagaactcagctaagagatttggatcaaagatacaacactattctgcagatgtatggagaaaaagcagaagaggcggaagaacttcgattagatctcgaagcatgtaaaaaatatgtataaaactcaaatagatgaacttttaagacaaaggctcagttaacttgtgaaaatnnnnnnnnnnnnnnnnnnnnnnnnnnnnnnnaatatctaaacatttaat

SEQ ID NO: 14218 - DNA, 526 bp, Macaca Fascicularis
  misc_feature (1)...(526): n = A,T,C or G
ccatgaaccacacggtccaaaccttcttctctcctgtcaacagcggccagcctcccaactatgagatgctcaaggaagagcacgatgtggctatgatgggggcgccccacaaccctgctcccccgacgtccaccgtgatccacatccgcagcgagacctccgtgcctgaccatgttgtctggtccctgttcaacaccctcttcatgaacccctgctgcctgggcttcatagcgtttgcctactccgtgaagtctagggacaggaagatggttggcgacctgactggggcccaggcctatgcctccaccgccaagtgcctgaacatctgggccctgattttgggcatcctnnnnnnnnnnnnnnnnnnnnnnnnnnnnnnnnnnnnnnnnnnnnnnnnnnnnnnnnnnnnnngacatcattcaggccaggagctctgcccataacctgtgccccacgtgctccaccttccattcctcgccctgcccccagagccgagtcctgtatcagccctttatcctcacacact

SEQ ID NO: 14219 - DNA, 737 bp, Macaca Fascicularis
atgaagacaaataatgtggagtgaggcagggagcgtgaagataagtccaactctgactgtaaaatacatggtatctctttgtccattgtggccactacttagtgtccctcacctggcttagcgttctgtttcaacagtttccaagtttattgccctcagaatctttagaatagttaaataggcttgttcaaggtccttgctgccccacaacacaccttgcccatgcacaagcaatgagttttttcctatcactgtgactttgtgcttgttcttcctcttacctgtaatagcctcaccttcccaagttctttgcatttgtccttagaatactgtattgttacagctgaaagacattaaagaccatttagtcctcacctgttttagagttgagcaaactgaagccgacaggggtggaacttaattacctaagagctgcaataagccactggtatctcggggactagaacacaaatccaacgcctttcccacctccctggatgtattccccaattatcctccttcactccctgttattgtcactgatggtgtccccttgtgtggatttactttgtgctaagttgtcttacactactcaaatgctactcagtatatagccttaagtcttactgttttgtgcagtgtctccagctgattttagctttttggatggtagaaattttatctcttctttcttttgtatcctccattgtatcttcatacaaagaacagtacacatt

SEQ ID NO: 14220 - DNA, 752 bp, Macaca Fascicularis
  misc_feature (1)...(752): n = A,T,C or G
caggaacaaagagaacctacaaccnnnnnnnnnnggtgtccaaggtcaggtgcccatctccccagagcccctgcagcggcccgaaatgctcaaagaagagagtaggtnnnnnnnnnnnnnnnnnnnnnnnnnnnnnnnnnnnnnnnnnnnnnnnnnnnnnnnnnnnnnncttctgccaggggtggatgtnnnnnnnnnggtgttccctacctgttcagtggagcnnnnnnnnnnnnnnnnnnnnnnnnnncggggggacttggaagannnnnnnnnnnnnnnnntagaggggaaggaagaggggcctgcagcctgggagggccccaaccaggacctgcccagacgcctcagaggcccccannnnnnnnnnnnnnnnnnnnnnnnnnnnnagaagtatatgannnnnnnnnnnnnagaggannnnnnnnnnnnnnnnnnnnnngctcccaaggaggcccccaagaagctgatccgatacatnnnnnnnnnnnnnnnnnnnnnnccaaaggggagcgannnnnnnnnnnnnnnaaccctgaggccgaggagatgaaagccacatacannnnntcannnnnnnnnnnnnnnnnnnnnnnnnnnnnnnnnnctcgctggactctgcccgagccttttaggctcagatcccagagggatgcaggagccctatacccctacacaggggccccttaactcctgtcccccttctctattcctttgctccatagtgttaacctactctcggagctgcctcc

SEQ ID NO: 14221 - DNA, 729 bp, Macaca Fascicularis
  misc_feature (1)...(729): n = A,T,C or G
atgcctcccaccttcccatnnnnnnnnncatcgtgggagtagggaatgctgacttcagtgacatgcagannnnnnnnnnnnnnnnnnnnnnnnngaggtcacccaagggagagcctgttcttcgagacatcgtccagttcgtgcccttcaggaacttcaaacacgcatctccagctgccctggcaaagagcgtgttggctgaagtcccaaaccaagttgtggactattacaatggcaaaggaattaaaccaaaatgttcatcagaaatgtacgaatcttccagaacactagcaccatgaactccccacacagttttacagagttctgaaatactactcctgctaatatttcatatttaatacttctactactcctgtactttaaaaaaaacaacacatacacatttaaaaatagcacgttttggtgatttttaactatttgacaattttttttgcatgtgtagccctgaggcctggatctgttaaacccttgtatcgttaactttttacaaagaaatacagataataataacttactatttacattacagcatgtnnnnnnnnnnnnnnnnnnnatctgtatccgttttttatacaggtttgttgaaattttgctaaatttcttatctttacactctaaagcattttgaaacatttattgaacgttgatagccaaaatatacttggttttatctgctataggatgagagactttnnnaatggcagannc

SEQ ID NO: 14222 - DNA, 796 bp, Macaca Fascicularis
  misc_feature (1)...(796): n = A,T,C or G
gatgatnnnnnnngaggccaggtgggtggagatgtcaacgtggannnngacgctgcacnnnnnnnnnnnnnnagccgcnnnnnngaacgagatgcgtgaccactatgagaagatggcagagaagaaccgcaaggatgccgaggaatggttcntctccaagacagaggagatgaaccgcgaggtggccaccaacagcgagatggtgcagagcggcaaaagtgagatatcggagatctggcgcaccatgcagaacctggagagtgagatgcagtcccagatcagcatgaaagcatctctggagaacagcctggaggagaccaaaggccgctattgcatgcagctggnnnnnnnnnnnnnnnnnnnnnnnngcgtggaggaacagatggcccagctacgctgcgagatggagcagcagaaccaggagtacaagatcttgctggacgtgaagacacggctggagcaggagatagccacctaccgccgcctgctggagggcgaggatgcccacctctcttcttcccagttctcttctggctcgcagtcatccagagacgtgacctcttccagccgccagatccgcaccaaggtcatggatgtgcacgatggcaaggtggtgtccacccacgagcaggtctttcgcaccaagaaatgaggctgcccagccccgctcaggcctaggaggccccccgtgtgggacacagatcccactggaagctcccctctcttaacccctaagcacttcacacctggaccctgcttcaccctcaccccctcctggcaatcaatacagnnnnca

SEQ ID NO: 14223 - DNA, 729 bp, Macaca Fascicularis
  misc_feature (1)...(729): n = A,T,C or G
gcagtgcaccaccanntnnngnnttacagtnnnntcctcatagcgtccatggtatctactgtagtcctgcagatggaaatcctatcctgctaacagctggctcagatatgaaaataaggttttgggacttggcctacccagaaaggtcctatgttgttgcaggaagtactagttccccatctgtgtcctactacaggaaaataattgaaggcactgaagttgtccaggaaattcagaataagcagaaagtaggaccaagtgatgatacccctcgaaggggcccagagtccctgcccgtgggacatcacgacatcatcactgatgtcgccacattccagacaacacagggcttcattgtaactgcttctagagatgggattgtgaaggtgtggaaataaaaacctactgatttgtataaattgtaataaagttataaatatactactataactcaaaaggcatttctagagaacagattcatttgcttaattttcaaaattatgtctctatattactgtttcatgactgactaaatgatacccaaaatggttaagatgtacttaactagtttacttatgcatctctttgcaagaatcagccagccaacaatgtctgggatttttattgtatatgttatagaggtgagaaatataaaatatgaaaatgaatgtttattttgtattgaaaaagatggttgaaaagatggttgtaagctattataggtataaa

SEQ ID NO: 14224 - DNA, 745 bp, Macaca Fascicularis
  misc_feature (1)...(745): n = A,T,C or G
accnnnnnngtccattgaccacagtgtcacagggtttctgtgtgannnnnnnnnnnnnnncttctcagaagcaatagaaaagttcatccgtgaaccttccttaaaagccaccatgggcctggctggaagagccaaggtgaaggaaaaattttcccctgaagcatttacggaacagctctaccaatannnnnnnnnnnnnnnnnnntaatcagattctttttaagatctttatgctgtgttcattaatgtcacttttatggattgtggacccagttttgaaaccaaaaaagaaacctagaatctaatgcagaagagatcttttaaaaaataaatttgagtcttgaatctgagccactttcctatataccacacctccttgtccacttttcagaaaaacaatgtctcttatgctataatcattccacattttgccagtgttaagttacaaatgtataattccatgttcagcagagtattttaattatattttcttgggattattgctattctgtctataaattttgaatgacactgtgccttaatttgttttgatagtttaagtgtatatcatcaaagttgattaatttggcttcatagtataatgagaacagggctactgtagttcccatccaatgaagtgttcactgtcatctgttagggaatttttgttcgtcatgtctttgcccagatccgtagcgagagtgctctgtatttttttaagataatttgtattttgcacactaag

SEQ ID NO: 14225 - DNA, 730 bp, Macaca Fascicularis
  misc_feature (1)...(730): n = A,T,C or G
gtggaaggagatggcgaaaggggtggctgtgaaggtggaggagcccaggtataaaaaggacaagcagctcaatgagaagatctccctgttccgcggnnnnnnnnnnnnnnnnnnnnnnnnnnnnnnnnnnnnnnnnnccaacagctccctgctcggaggcggtggcgtgnnnnnnnnnnnnnaccgggccgccggccccctgcttaccgacgagnnnnnnnnnnnnnnnngctgtgnnnnnnnnnnnnnnnnnnnnnnnnnnnnnnnnnnnnnnnnngccaagtacgtcatccacacggtgggacccatcgcctacggagagcccagcgccagccaggctgccgagctccgcagctgctacctgagcagcctggacctgctgctggagcaccgcctccgctcggcggcgttcccctgcatctnnnnnnnnnnnnnnnnntacccctgtgaggcggcggctgaggtcgtgnnnnnnnnnnnnnnnnnnnnnnnnnnnnnnnnnnnnnnnnnnnnnnnnnnnnnnatcatctgcgtgttccgcgagaaggacgaggatatctaccggagccggctcccccactacttccccgtggcctgaggctcccgcagccnnnnnnnnnnnnnnnnnnnnnnnnnncgggaccccgctcccagctctgagnnnnnnnnnnnnnnnnnnnnnnnnnnnnnnnccnnnnngtccttctttccctctgcgccccgcccgaga

SEQ ID NO: 14226 - DNA, 709 bp, Macaca Fascicularis
  misc_feature (1)...(709): n = A,T,C or G
ctgaatcccagccctccctgccctcccacactccccaaccccacctgccctgccccacctcttccttcccccacccacactctcttgtcctctctctctctctctctacatatataaatatatatataaatcttttcttcttttgtcattcaatcaaattccaacaacccaaccagggccagtcaaatccaccacagtctcgcgctgagctaggaataaagttcacgtaatcacatgagagtggagaaaagtcccccatccgtaagttcaaatcaactcaaagttnnnnnnnnnnnnnnnnnnnnnnntgtaacaaggctaagaatcggttgcatgacaattgccgtcaagttttgtggaggnnnnnnnnnnnnnnnnnnnnnnnnnnnnnnnnnnnnnnnnnnnnnnnnnnnnnnnnnnnnnnnnnnnnnnnnnnnnnnnnntttgtgctgccacaatcttttttgctgtgctcattttcgttttgttcttggtgcttgcagtggttttactttctgttgtttggtttttcttgttcagcgtttttttatgcttctctgcgggcgcctggctgcctgtcgccggtggaggccacgccatcggccgggaacggtcgcgttgcccgggtcgtcgccgccgccgccgccgtcgtcctcgcctcttgcttccttcgggagctgcgcgcgctncnnncaccttcgcttcactc

SEQ ID NO: 14227 - DNA, 801 bp, Macaca Fascicularis
  misc_feature (1)...(801): n = A,T,C or G
atgtgaccagcgtgagcatcctgagtgacagaaagggnntgacccagagggaacggcgggagctgcggcgccggaccatcctgctgctgtactacctgctccgctctccgttatatgaccgcttctccgaggccaggatcgncnnnnnnnnnnnnnnnnnnnnnnnnnnnnnnnnnnnnnnnngcctggtcacaaggccgatcatggattacttgcccacctggcagaaaatctaattctacagttggggctgacagacctcccggaaggagggtgtggggaggggcggggcagggggcccccttccctaataaaactgactccagcagcgtcccagcgtgcggcctttccgtgcctaccggccaggccctgcacacagccctggtcgccaccagcgttcttcccgggaccctcttgactgcgccctcctgtgacgatgccactgcaacccgcaccttgtcactgctgggccaagaagccttcactaggagtggaatccagcctcctctcccnnnnnnnnnnnnnnnnnnnnnnnntggagactgggaagccgcttgcctcggcagccacaggagcgaacactgctgctctctcgctggccctggtgagggcaggaaggctgaacctgggtgatgcccgaacgctgcccagcgnnnnnnnnnnnnnnggccctctgcctgcccctgctctgcagggccgtgtggcnnnnnnnnnnnnnnnnnnnnnnnnnnnnnnnctccctatgacagagcctnnnnnnnnnnnnnnnnnnnnnnnnnnnnnnnnnnnnntcaagccctg

SEQ ID NO: 14228 - DNA, 760 bp, Macaca Fascicularis
  misc_feature (1)...(760): n = A,T,C or G
gagactggattttgaaaaagacattnngcagatgctnnngntncttaaagacgtgggtatagaggataaccaactgggagcattcctgacaannnnnnnnnnnnttttctctgaagaccttgaaaatctgaagatcagggtggcttatctgctttcaaaaaatttcagtnnnnnnnnnnnnnnnnnnnnnnnnnnnnnnnnnnnnnnnnnnnngaacttttcagtggaaagactggataacagattgggattttttcagaaagaacttgaacttagtgtgaaaaagactagagatctggtagttcgtctcccaaggctgctaactggaagtctggaacccgtgaaagaaaatatgaaggtttaccgtcttgaactnnnnnnnnnnnnnnnngaaattcaacatatgatcaccagaatcccgaagatgttaactgcaaataaaaggannnnnnnnnnnnnnnntgattttgtgcacaatgtgatgagcattccccaccacannnnnnnnnnnnnnnnnnnnnnnnnnnnnnnnnnnnnnnnnaaaatcaaagaaagacacttgtttcttacctatttaggaagagcccagtatnnnnnnnnnnnnnnnnnnnnnnnnnnnnnngacaaactcgtatctattcctgatgaaatattttgtgaagagattgccaaagcatcagtacaagactttgataaattcttaaaaacgctttagatttttatgtatgtgaagatgcaatattgtaaagtgaatatatgt

SEQ ID NO: 14229 - DNA, 766 bp, Macaca Fascicularis
  misc_feature (1)...(766): n = A,T,C or G
aaatgacatgttttttatctgtactaggattaaannnnatatgttatttctgaagaagattttgagaaaaaaatttactgaaattgttttgacactgtattttctgacgtggcattccatgaaatttttttcattgtaccctcactgtactatttaaataatgtttttaaacgagagatgaaaatcaatataagctaaataaaatataaaagatacaattaatttaaaaggctacctttgtgtaagataacttgcccataatttgctattttaaacaaatgataacacaaagcctgtttgccatctttcttataacattcatgtaactgtatatctttatgcaaagtcagctatatgttaaaaataaaaattaccagtaacannnnnnnnnnnnnnnnnnnnnnnnnnnnnnntcactatattgtttctttcattaacaaacagacttaatacactttaaatcattctgcacacaacttttaagaaataaatcagactgagcannnnnnnnnnnnnnnnnnnnnnnnnnnnnnnnnnnnnnnnnnnnnnnnnnnnnnnnnnnnnnnnnnnnnnnnnnnnnnnnnnnnnnnnnnnnnnnnnnnnnnnnnnnnnnnnnnnnnnnnnnnnnnnnnnnnnnnnnnnnnnnnnnnnnnnnnnnnnnnnnnnnnnnnnnnnnnnnnnnnnnnnnnnnnnnnnnnnnnnnnnnnnnnnnnnnnnnnnnnnnnnnnnnnnnnnnnnnnnnnnnnnntccagcctggcaacgaga

SEQ ID NO: 14230 - DNA, 821 bp, Macaca Fascicularis
  misc_feature (1)...(821): n = A,T,C or G
aagccagagaacattctggtgacaagtggtggaannnnnnnnnnnnnnnnnnnnnnnnnnnnnnnnnnnnnnnnnnnnnnnatggcacttacacccgtggttgttacacnnnnnnaccgagctcccgaagtnnnnntgcagtccacatatgcaacacctgtggacatgtggagtgttggctgtatcnnnnnnnnnnnnnnnnnnnnnaagcctctcttctgtgnnnnnnnnnnnnnnnnnnngttgggcaaaatctttgacnnnnnnnnnnnnnnnnnnnnnnnnnnnnnnnctcgagatgtatccctgccccgtggagcctttccccccagagggccccgcccagtgcagtcggtggnnnnnnnnnnnnaggagtcgggagcnnnnnnnnnnnnnnnnnnnnnnnnnnnnnnnnnnnnnnnnnnnnnntctgcctttcgagctctgcagcactcttatctacataaggatgaaggtaatccggagtgagcaatggagtggctgccatggaaggaagaaaagctgccatttcccttctggacactgagagggcaatnnnnnnnnnnnnnnnnnnagctgtggaggctcctcctccatctttctacagagattactttnnnnnnnnnnnnnnnnnnnnnnnnntctccttttgaggcttctccttctcctgccccactatttctctacactaaggggtatgttcccacttgtccctctccctacctttatatttggggtccttttttatacaggaaaaacaaaacaaagaaataatggtcttttttttttttttttaatgtttcttcctcgtgtttggcttt

SEQ ID NO: 14231 - DNA, 798 bp, Macaca Fascicularis
  misc_feature (1)...(798): n = A,T,C or G
taacagaacaaattataanannnnnnnnnntacccaaaggtcttcaaggagnnnnnnnnnnnnnnnnnnnnnnnnnnnnnnnnnnnnnnnnnnnnnnnnnnnnncacacacaagnntgnnncaannnnnnnnnnnnnnnnnnnnnnnnnaaaagaaccccgctgtttggcttaacacatctcaacccctnnnnnnnnnnnnnatcgtcacagatgaagacatcaggaaacaggaagagcgagtacagcaagtacgcaagaaattggaagaagcactgatggcagacatcttgtcgcgagatgttgatacagaagagatggatattgaaatggacagtggagatgaagcctaagaatatgatcaggtaactttcgaccgactttccccaagagaaaattcctagaaattgaacaaaaatgtttccacagggttttgcccgtaagaaaaaaatgtacccgagcacatagagctttttaatagcactaaccaatgcctttttagatgtatttttgatgtatatatctattattcaaaaaatcatgtttattttgagtcctaggacttaaaattagtcttttgtaatatcaagcaggaccctaagatgaagatgagcttttgatnnnnnnnnnnatatactggaaatgtagcacttacataagatatttgtttcccccacagttttaataagaacagatcaggaattctaaataaatttcccagttaaagattattgtgacttcactgtatataaacatatttttatactttattgaaaggggacacctgtacatcttccat

SEQ ID NO: 14232 - DNA, 773 bp, Macaca Fascicularis
  misc_feature (1)...(773): n = A,T,C or G
gaaaagagaaaggcagacgaatagcatggcttttactaaagannnnnnnnnnnnnnnnnnnnnnatactcagggcttaatgaactggaatctgcgtaactcagcagtcagcccggaagggaaatggttaaacagcttatttttgcctcagagagcccaagagcacccgcacacttcttccactccctgtctnnnnnnnnnnnnnnnnagtcatttggaattgcaaagtagttattaaggggtgttaaccagcctgcattacatccagaagtcaggacttggttgctgactgtgaagggccctgttttcgaaacctaacattgcaagtgtaagagagcaagaaggctcccttgtgcttttctttcctcttcagtaaatgttgcaaccttactgcatagaagatcccggaccatttactggaacctggttaagcaagcacaaatctcttttcctgaagatcaaggatgcaacctcaagttgagaaagaaacagcattacctgggcccattagaccgttcgcagggcttcactgcttcccctctgacactccacaactagcaaaaattgtctttgtcattggaaattatagagggatttgggtatccagattgtgtagatgcaaacttagattgtcttgatgcaaacttagaaccacagcaatgcttttaaaatgcctattttaagatggaattgatgtttttataatttgattttagtgttaaataaatgatggagtttgtacacgaatatgttttgtacaagtactctttctgt

SEQ ID NO: 14233 - DNA, 733 bp, Macaca Fascicularis
  misc_feature (1)...(733): n = A,T,C or G
atgcaagtgtaggaaggcacgctnnannnnnnatcccattnnnaagctgtcctttgccatctcattccttggcctgcccccaaccctgaggatgcccccgccatccccccagcctcctcatgttggctnnnnnnnnnnnnnnnnnnccatcctggttctctctgagggccacgggcttgggcagtggagagggtgtttgtgaaattgttgaatcagttacctgttgtagagatttcttttacttctaagttttnnnnnnnnnnnnnnnnnnnnnnnnnnnnnnnnnnnnnnttccttcaaaatccctcagccttgttcttcacaactatctgtactgagaatgtcatgtttccacaaaaggctgnnnnnnnnnnnnnnnnnnnnnnnnnnnnnnnnnnnnnnnnnnccagtagggtgggcaattcccaacttccttcctttttccttgagaaagcttcccaggctttctccnnnnnnnnnnnnnnnnnnnngtcccagatacactcatgggcnnnnnnnngcagccagcattcattgtaagttccctctttgaaaactggtgtgtgggtgttcagttctgtgtctggtgggtatggacagacagtnnnnnnnnnnnnnnnnnnnnnnnngtgaagcagctctggaannnnnnnnnnnnnnnggtttgaaccgtgaacaaaactgtgttttgagtttagctgagattaaagaaaaaaaattcatcaagtgactg

SEQ ID NO: 14234 - DNA, 856 bp, Macaca Fascicularis
  misc_feature (1)...(856): n = A,T,C or G
taccccagtagannnctnnnnnctagaagaatcagtagacagtctcgaaggaagtcagttgcctggctttgttttcaaagtttgaaacagaaagtcatgaactatcagaagtgcttctagacagctgctttttacaaataaaatgtgatacagcagatgacagtatcccatgctttccggaagtaatagaggaggatgaaatagtgtgcacacaacactggcaggatgctgtgccttggacagaactcttcagtctacagacagaggatggcttctggaaacttacaccagaactgggacttatattaaatcttgatacaaatgctttgcacagctttcttaaacaaaaaggcattcaatctctgggtgtaaaaggaagagaacgtctcctggacctaattgccacaatgctggtactacagtttattcgcaccaggttggaaaaagagggaatagtgttcaaatnnnnnnnnnaactgnnnnnnnnnnnnnnnnnnaggaatattccctgggcttttgaggctataaagaaagcaagtgaatgggtaagaagaactgagggacagtacccatctatctgcccacggcttgaactggggaaagactgggactctgccaccaagcagttgctgggactccagcccataaacaccgtgtcccctcttcatagagtccttcattacagtcaaggctaaatcaaatgaaactgaattttaaactttttgcatgcttctatgtagaaaataataaaatgataatagatgcttataatgaaacttcattaaagttttattcagtgtagcaattactgtctttaaaaataaagtggaagcaggattactttacaacaacaagc

SEQ ID NO: 14235 - DNA, 748 bp, Macaca Fascicularis
  misc_feature (1)...(748): n = A,T,C or G
ctgtaaactnnnnnnnggaagcatcactggataaatttatgannntnnnnnnnnnnnnnnnnagctttaaaagctnnnnagaaagtgaaactatctcatgaagaagtcatgcagaaaatcggggaactctnnnnnnnnnnnnnnnnnnnaaacttgagttcagacttcttgattactcctgatttctactgggacagagaaaacctggaaggactttatgataaaacatgtcaattccttagcattgcccgaagagttaaggtcatgaatgaaaaacttcaacactgcatggaactaacagatctaatgcnnnnnnnnnnnnnnnnnaagagggcactccgcttggagtggatgattgtcatcctcattaccatagaggtaatgtttgagctgggacgagtatttttctgatcaagtgataaccaaagtgtcactgcaagagattcaggttctacaatcaaaaaataaatgttcagccgggcgcggcnnnnnnnnnnnnnnnnnnnnnnnnnnnnnnnnnnnnnnnnnnnnnnnnnnnnnnnnnnnnnnnnnnnnnnnnnnnnnnnnnnnnnnnnnnnnnnnnnnnnnnnnnnnnnnnnnnnnnnnnnnnnnnnnnnnnnnnnnnnnnnnnnnnnnnnnnnnnnnnnnnnnnnnnnnnnnnnnnnnnnnnnnnnnnnnnnnnnnnnnnnnnnnnnnnnnnnnnnnnnnnnnnnnnnnnnnnnnnnnnnnnntcnnnnnaaaaaataaa

SEQ ID NO: 14236 - DNA, 770 bp, Macaca Fascicularis
  misc_feature (1)...(770): n = A,T,C or G
agnnnnnnnnnnnnnngtgggtgtgcctaccctgggcatggaccgtnncctccttgctctcctcccttaccctctacctgggcctggctcatgggcttgatcagcaagacctccgctacctccgggcccaactacaaagaaaactccacctgctctctcggccccaggatggggaggcagagtgaggagctcactctggttacaagcgctgttcttcctctccccctgaattctaaatccttaacatccaggccnnnnnnnnnnnnnnnnnnnnnnnnnnnttcatggactgaaggagctaccccttccactacttgagagtttattctctgggtccagctccacaccctaaattctgagtttcagccactgaactccaaggtccacttctcactagcaaggaagagtggggtatggaactcatctgtcccctcactgtttagggcatgacactttcgccctcaacagcctcctgagaaggaaaggatctgccctgaccattcccctggcactgttacttgcctctgtgcctcaggggtccccttctccacctccggcttccactccaagaagnnnnnnnnnnnnnnnnnnnnnnnnnnnnnnnnnnnnnnnnnnnaggccccacaccttgcctcaccactcctggtcctagtctctgcacctccttaggccctgcctctgtgcttagaccccaacctagtcaagggtattctcctgctcttaactcgatgacttggggctccctgctctcctgaggaagatgctctgca

SEQ ID NO: 14237 - DNA, 701 bp, Macaca Fascicularis
  misc_feature (1)...(701): n = A,T,C or G
catgannnatagcgagagaggtatnnnaggctaggatcttaatgcagccagatgcatgaggtcccaagtactcaggctnnnnngcgaggcatccattgagtgnnnnnnnnnnnaagttggtgggatggaaatgtttctcgaattatctgaggtggtttcaatggctgaatacaaaacccttcctctttcatttcagttcaacgaggatctgcataaacaggtaatattcctgctttgatttccttgtggggtgggttgcaggaggatatgagtcctttctnnnnnnnnnnnnnnnnnnnnnnnnnnaggaagagaatctcaggcctgaacccctctttcaacctcagccttcgggtgagtggggaaagagcattgcttggctccattgctgaaggaagcagagatcaactctgttctttatcagcctgagatagcctctcaccgtaatttttctctcttggacttaaaggaaggaggccagcaacctgggataacttgtcctttacccccacagggttcctgacctcaccgaaaagactaatgtgccttagaacaagcatttgctnnnnnnnnnnnnnnnnngattccaggacagacctccagcttcccaagaggatactgctgccaagaagttgctctgaagtcagtttctatcattttgctctttgatccaaagtattgtttctctcactgggcctcca

SEQ ID NO: 14238 - DNA, 708 bp, Macaca Fascicularis
  misc_feature (1)...(708): n = A,T,C or G
gcatgagtgnnccccgtgatgactaaactgcggcaagcggctgccccccgannnnnnnnnnnnnntctccctttgtgttccatacattgtgaatcttcccatctgaagaacgcccagcctgcccagacaaagccctgccctccccaaagcagagggacggggctcagaaaggagaagggctgtgatctccggccccttcccccatcatctcttccttagacggatgctttgactgaatcatcnnnnnnnnnnnnnttaaaaggtctctcttctcatctggtgccaaaggttccattgcagctttttacaaccatccggtgtggttcggaggatttgttttttgttttttttccccaacagaaaagaacagccattagaagaaggctcccattttctgatgttccgcccactgtgaagagtgtgcttgttttaaatttatgttgattcctgtaagcagtggactgtcttcatcaactatttccctacagaactcctcaagaaaacagatcannnnnnnnnnnnnnnnnnnnnnnnnnnnaagctgctcactgtattagacaggggtggtcatttattttaaagataaagtgacaaagtggggaaatttataaagctaaatattatatattttatttttcatacatgttcgaagtgcaaatctgtggatattccatttgtaggaccaagtcgacatgcccatcctgacat

SEQ ID NO: 14239 - DNA, 732 bp, Macaca Fascicularis
  misc_feature (1)...(732): n = A,T,C or G
tcccgcaggccgagctgcagggccgcgtgctgagcctgtnnnnnnnnnaccgcgaaagcctgggtcgcaacatctttctgggtgaagctgaagtgcccttggacacgtgggactggggctctgagcccacctggctccccctgcagccccgggtcccactctctccnnnnnnnnnnnnnnnncgcgggctactcgccctgtccctcaagtacgtccccgccggctccgagggcgctggactgccccnnnnnnnnnnnnnnnnnnnnnnnnnnnnggaggctcgggaccnnnnnnnnnnnnnnnnnngatccctggacacttacgtacaatgcttcgtgctgcctgatgacagccgggccagccgccagcgtacaagggttgtgcgacgcagcctcagacctgtgttcaaccnnnnnnnnnnnnnnnnnnnnnnnnngcctgccgacctgcgccaggcttgtgctgagctctccctctgggaccatggggccctggccagccgccagctggggggcacacgcctcagcctggnnnnnnnnnnnnnnnnnnnnnngcaggtgccctggatggattccacaccggaggagaagcggctgtggcaggccctcctggagcagccatgcgagtgggtggatggccttctacccctcagaaccaacctggcccccaggacatagcccgaccaagcctctctctctggacccccatctcagggcctgccctggctaaagt

SEQ ID NO: 14240 - DNA, 751 bp, Macaca Fascicularis
  misc_feature (1)...(751): n = A,T,C or G
aaatgtatgtctttggggatgtattatatgcctagctttataatcagtataaattttaattattccaggaatatgcataatattgaaatatttcgtgtactattttaatagaaaacctcagggcccaagtaactgatagaagttagaaaaacctttacttagaattgtccacctagtcagagcccaggaaggaattttcagtggaaaaatcaatatataacttagttctagctagctccacaagtagataatattatcatcacaatggctggtgagaccatataatcacagaaaaacgttgccttcnnnnnnnnnnnnnnncagcactgagggcactcttgagggtgttgttaatgaagacttaatttttaaatacaggtagttccaagctttcaaataggttatgctccaaaagtgttatttgtaagttaagttttttacaagtcagacaatattggaaatggtatttaggttctagatcagtccacgaaagttagcccatatgtatatcttgaatagtataggggagggtattcataaagtccttatgtggttttaactaagtgaaattacggacaagagaaataattttaaaaatcattttaaaggcaaatttaatttttactcctgtttatggaactttcgttctattaactgtcagacataatttctgttttcatctgagagacaactttcctttatttctacatttaaactaagaacatattgtacactattatataatacagaa

SEQ ID NO: 14241 - DNA, 767 bp, Macaca Fascicularis
  misc_feature (1)...(767): n = A,T,C or G
atgatgattcctcaaggacaaagccaagtccaagactctggatttcattgatgtgcttctgctgagcaaggatgaagatgggaaggcattgtcagacgaggatataagnnnnnnnnnnnnnnnnnnnnnnnnnnnnnnnnnnnnnnnnnnggccagtggtctctcctggatcctgtacaaccttgcgagnnnnnnnnnnnnnnnnnnnnnnnnccgacaggaggtgcaagagctcctgaaggatcgcgatcctaaagagattgaatgggaggacctggcccagctgccnnnnnnnnnnnnnnnnnnnnnnnnnnnnctgcggttacatcccccagctcccttcatctcccgacactgcacacaggacnnnnnnnnnnnnnnnnnnnnnnnnnncccaaaaggcattatctgcgtcatcaatattacaggtgtccatcacaacccaaccgtgtggccggatcctgaggtctatgacccctaccgcttcgacccagagannnnnnnnnnnnnnnnnnnnnnnnnggcttttattcccttctccgcagggcccaggaactgtatcgnnnnnnnnnnnnnnnnnnnnnnnnnnnnnnnnnnnnnnnnnnnnnnnnnnnnnnnnnnnnnnnnnnnnnnnnnnnnnnnnnnnnnnnnnnnnnnnnnnnnnnnnnnnnnnnnnnncgagggcgggctttggctgcaggtggagcccctgagcgcnnnnnngcagtgactctgtgatccatccaccttanttgcagatctcagaa

SEQ ID NO: 14242 - DNA, 719 bp, Macaca Fascicularis
  misc_feature (1)...(719): n = A,T,C or G
tgttacagatacatagagatagtaaaaaggtcactagtaaagcgaagcaagttaannnnnnnnnnnnnnnncacagctgcccgctcttgtttttgtggcacgagcagctcaaatccactcatttaacgtgaatcccgcatacggtcnnnnnnnnnnnnnnnnnnnnccgtgttgccctgccctggnnnnnnnnnnnnnnnnnnnnnnnnnnntggtggtggacctgctcagcctggactcatgtttactctttcagatccgaaggatgtcaggtgctcctccaccctgctgacggtaaggaccctattttcttgtcctcttctagaacagtgnnnnnnnnnncaagtgttctgaccacttccccagcctgctcctgcctttgtggtgtcagacagaaacacacagggtagacagaagtcnnnnnnnnnnnnnnnnnnnnnnnnnnnnnnnnnnnnnnnnnnnnnnntgggttttgctgataataaccttatcaacaaaacccaaacaagaggttcgatgccatccagatggagggcttcatgctaaggtaaaaccaaaggctgggtcctggccaggcctcctgaggggtggagacctcctggtttccccgggggcctcagcgtgactgnnnnnnnnnnnnnnnnnnnnnnnnnnnnnnnnnnttaagttggtggctacacatctcnnnnggctgnnnnntctgcccagcacgccattcc

SEQ ID NO: 14243 - DNA, 777 bp, Macaca Fascicularis
  misc_feature (1)...(777): n = A,T,C or G
atgccaggcacctcattggaagtcagtgcgcaagnnnnnnnnnttgctggcagcgtccgaggctgaggnngngcagctcctgtccgagagagccccgctcacagggcacagctgctacccagaggccctgctgcacttccggacccactgcttcaactggcactcccccacgtacgagtatgcgttgagacattnnnnnnnnnnnnnnnncctttgtgagaagccgtatccgcttctnnnnnnnnnnnnnnnnntggaccacgtgtgccttggtcactactaaagagctgcctcctggaagcttttccaagtgtgagtgccccactgattgtgtcctgatcagagactggagaggcggagtgagaagccccccgctgctccgggccctcctggggagcccccactccagggctcgctccagggccttcttcacaggatgacttgctcactattacctacttccccagtctcttctggaaaactacaaattggggtggggaaagctccgtatcgagaaggctcgtatttgcttcctaggaggtttgttgttttgttttgtttttgcccgttagttttaaggagcaggaagttcatgggggcttctgacgtagcccctcacaaaaggagtctttattctgagaaatttgaaccaaaacctctttcaatcttcacaatgattttattgaagagggcctcaagccccaaatggaaaactgtttttagaaattattatgatttttgattgcttttgtatttaattctgcaagatgcccccat

SEQ ID NO: 14244 - DNA, 831 bp, Macaca Fascicularis
  misc_feature (1)...(831): n = A,T,C or G
acccatcacaggtttttgaccctggatgtcagagttgatctaagacattttctacaataggttgggagacgctgatcccttcaagtgggaacagcaaaaagacaagcaaaactgatgtgcactttatggcttgggactgatttagggcatgttgtacagtgagtgaagtatggcctttatgctgcactctgtggccctagaatggcgaatcagagcatatctagttgtctcaacccttgaagcaatatgtattataaactcagagaacagaagtgcaatgtgatgggagggacatagcaatatctgctccttttcgagttgagaaatgtagactattttttcagtgtatatccactcagatttcgtgtatttttgatgtacactgttctctacaattctgaatctttgggaaaaaatgtaaagcatttatgatctcttgaaatgagtcagaggttaacttatttaagggggatgtacatatattctctgaaactaggatgcatgcaattgtgttggaagtgtccttggtgccttgtgtgatgtagacaatgttacagggtctgcatgtaaatgggttgccttatgnnnnnnnnnnnnnnnnnnnnnnnnnnnnnnnnnnnnnnnnnnnnnnnnnnnnnnnnnnnnnattttttttagaaagtatatttttgtatgctttgttttgtgacttaaaagtgttacctttgtagtcaaatttcagataagaatgtacataatgttactggagctgatttgtttagtcattagctcttaatagttgtgaaaaaataaatctattctaatgcaaaaccactaactgaagttcagata

SEQ ID NO: 14245 - DNA, 740 bp, Macaca Fascicularis
  misc_feature (1)...(740): n = A,T,C or G
ggcacagcaaaggcannnnnnnnnnnnngcagctagcgaaggccactcccacnnnnnnnnnnnnnnnctgccaaagactgatgaaggccttggttttaacgtgatgggaggaaaagagcaaaattcccccatttatatctctcgcatcattcctggaggggtcgctgaaagacacggaggcctcaaaagaggagaccagctgctatcagtgaacggagtgagtgtggaaggagaacaccatgagaaagctgtggaactactcaaggctgctaaagacagcgtcaagctggtggtgcgatacaccccnnnnnnnnnnnnnnnnnnnnnnnnnnnnnnnnnnnnnnnnnnnnnnnnnnnnnnnnnnnnnnnnnnnnnnnnnnnnnnnnnnnnnnnnnnncagnnnnnnnnnnnncaaacacaacaannnnnnnnnnnnnnnnnnnnnnagggaaagctacttgatcaaacatcctatagtcacaaatttgaaatcgtgcttcagaatcccagcacatagtaaaagacaacacagataattatacctgtcaagaagctgtgaacacatggtgtataaattctttaccaaggcaactcgacaccttctttctctgggcttgaaccgccactgctcacgtgggctttacatacattgaccttccattcacggcagtgggaattctcagtgtgcagagggagaggttttctagtctgcaaactgaaacagtnnangaagaataaag

SEQ ID NO: 14246 - DNA, 738 bp, Macaca Fascicularis
  misc_feature (1)...(738): n = A,T,C or G
gnnnnggagttnanngnnnacgtgcaggaggccatgcagnnnnnnnngagcaggcnnnnagcagccggcccaggaactctagaggacatgnnnnnnnnnntggccacagggtggggctnnnnnnnnnnnnnnnnnnccagggtggggaggccgcccttcctgcccgacccacagaatggtgctctcctttgccctccctgcccggcagcctgatgggactctcctagtccaacttggggtgggcaaggcagtcagnnnnnnnnnnaacaccacagaaccctgtccccagcatagacacacaccccctgacccttaccatctgcttcctgaaagacttcagcatcagctcccctacacatgcccccacgccttcaccccttgctcaggnnnnnnnnnnnnnnnnnnnnnnnnnnnnnnnatcttccctgaatcacagccccagctccttgacccccatctaggtgccaaatgttcatctgcagccgctctgcagcctggtgagagggagacagccatcgcgtagaaagtgaccttannnnnnnnnnnnnnntgctgagtggggtgggcgtagtgggattgtcctggctttgtcgacaaagtcccacttccctgnnnnnnnnnnnnncttgttatcaagtgaggtaaattcaccccatcacagggtctcgccctaccatcctggaattatttcgcttttaagataaatgcacnnnnnnnnnnnnnnnntctcattctaag

SEQ ID NO: 14247 - DNA, 850 bp, Macaca Fascicularis
  misc_feature (1)...(850): n = A,T,C or G
ctgccatgacattaatagggataatggtctatggaattaaaaaatatggtccgtctgttgcagcatatgctgataaaatcaatgagcaaaaacttgcccaactagaagngnggaagcnnnnntccatccagcaaatnnnnnnnnnnnnnnntatggagaagtcacagcaggcactgactcagaagcgccattacctttttgatgtgcaaaggaataacattgctatggctttggaggttacttaccgggaacgactatatagagtatataaggaagtaaagagtcgcctggactatcatatagctgtgcagaacatgacgcgtcgaaaggaacaagagcacatgataaattgggtggaaaagcacgtggtgcaaagcatctccgcagagcaggaaaaggagacagttgccaagtgcattgcggaccnnnnnnnnnnnnnnnngaaggctcaagcacccctggttatgtaaatgaatctgtcccaattgagacagctagaaacagttgacagactaaatggaaactagtctatttgatgaaatctttctgtattgatgtctactgaagttatagtttacccttcctaaaaatgaaaagtttgtttcatatagtaagagaacaaaatctctatcggccagtcaaatgtttctcatccttctnnnnnnnnnnnnnnnnnnttccatgatcacttctgaataagcagtttgtctttataaaaacttgcagcctgactaaagattaccagattatagtttaaatttgcaattaattctaccatcttgcaataaagtgacaattgaatgaaacaaggtttttcaagttgtataattctctgannnnnnnnnntttt

SEQ ID NO: 14248 - DNA, 772 bp, Macaca Fascicularis
  misc_feature (1)...(772): n = A,T,C or G
gtaatgttgtgtccagcactatgctgggtacaaaaatgagcaaggcatagtttgtccccagaacnnnnnnnnncaatctgtggatcaagggagaaaattaaacaatagannnnnnnnnnnnnnnnnnnnnnnnnnnnnnnnnnnnnnnnnnnncagaaagagaactctatatcccatccagccagcgggctcatgaaaccttcacctttcccaaaggaagtcgannnnnnnnnnnnnnnnnnnnnnnnnnnnnnnnnnnnnnnnnacatttaaatnnnnnnnnnnnnnnactagtccctgttcatggcatttcacatatattatttcatttaatcagctctcnnnnnnnnnnnctgcactttacggatgggaaagctaaagcctggaaaatttaagcaacttaacctggagggctaagacctgagactcaccccaggcagtctgggtccagnnnnnnnnnnnnnnnncnnnnnnnnnnnnnnnnnnnntggggaaaaaagtcgcacaccctttaggacagcagaaggatctagaaatgagtgcttaggttggaagataggaatgggaggaaaagatcagtgtcattgaatgagagaagcacagaggaccnnnnnnnnnnnnnnnnnnnnnnnnnnnnnnnnnnngcttcacctgtttgcctacccnnnnnnnnnnnnnnnnnnnnnnnnnnnngctcagncacctggcctcanaatcattcagttgcatgttttaanntgccaatcttgggccgcaaccccttccctatata

SEQ ID NO: 14249 - DNA, 736 bp, Macaca Fascicularis
  misc_feature (1)...(736): n = A,T,C or G
gctgcaggagagtcctgccttgatgctncccaagccccccaaacatcgtcccagaggacagcagtcaaagagcctcnnnnnnnnnnnnnnnnnnnnttcgcgttcctgaacgcctgacccgacggcctggccctggagccttcnnnnnnnnnnnnnnnnnnnnnnnnnntgtgctgcctgagcagcctcaaccgtagctgctacagtctccaggcaacttgacctgagaggaggaccctagggctacctcagtttcccccatctcctctgccagaggctctggctatttggacttgaatccctacaagggataggcaggtggcagggcctcagaaatgttgatctcaggagtcccagggggcagcccctgcttgtcttgccctcagacatgaggtttcttgtgtgaatatggaagcgactaccaggttctttatttcattttgatctcagctccctccttccccaggaggtcatgagcagtaagccaccgcctccccatcccttcggggtgggctggggactgaggctgggtttggtgcacgtgggctgagggtgtcttgtccgggctgccttgtgccgtctggtctttgaccatttcaagtttcagatccccacgtgacccttccctggctctcacctgctccttcatgctgtaattgcttcccgcacacgaagcctctgattggagcctctggtccatctcagaagaaccttccgagagcgctggggtttatgc

SEQ ID NO: 14250 - DNA, 741 bp, Macaca Fascicularis
  misc_feature (1)...(741): n = A,T,C or G
gaacatcgttaccgtatctttggggnnnnnatcgatatgcaagtgggtaattgtctggatcgttttgctcgagtgctgaagatttctaacgacccaagtccaggatacaacattgaacagatggcaaagcgaggcaagaagctagttgagctgccgtacactgtaaaggggatggacgtctcattctcagggatcctgtctttcattgaggatgtagcccatcggatgctggccacaggcgagtgtactcctgaggatctgtgtttctccctgcaggaaactgtgtttgcaatgctggtagagatcacagagcgagccatggcacattgtggctcccaggaggccctcattgtgggaggagtggggtgtaatgtgaggctacaggagatgatggcgacaatgtgccaggaacgtggagcccggctttttgctacagatgagagattctgtattgacaacggagccatgatagcccaggctggctgggagatgtttcaggctggacacaggaccccactcagtgattctggggttacacagaggtatcggacagatgaagtagaagtgacctggagggactaataagattaacagaatcacagtagacagttccttaattggaacccaaaggaccctgtgcctcaatcnnnnnnnnnnnnnnncgggagtcctagcaaagctgtagactccaagcaaggcttagggtcctttatggaaccccaagannntcagcaataaaat

SEQ ID NO: 14251 - DNA, 735 bp, Macaca Fascicularis
  misc_feature (1)...(735): n = A,T,C or G
accaccatcctgtatcccaccatcaccaccnctannnngnatcctannntaacctcagaacagttctccccacttttgttcttgtccctctctaaccccctctccacaagactgccagagtaatgtttttaatataaattggatccttcagttgcctgcttaaaaccctgaaggcttcccaatgcagtcgaaagaaatacattttccatggccccggatggtctgacccacctccagcctcagctagctttacccttctgacactctctatgtaacctccctgatcttcttttagtctctctattaaaggaaaaggtctttatgttaattatttacatattcctgcaggcctttcctctgcctgctggggtcctcctattctttatgccttaatttaaatatgtcacctcctaagagaaaccttcccagaccactctacctaaaatgaatcttctagaccgggtgtggtggctcatgcctgtaatcccagtactttaggaggccaaggtggggagatcacttgaggtcaggagttcaagaccagcctggccaacttggtgaaaccctgtctttactaaaaaatacaaaaaagttagccaggtgtgatggtacacccctaaaattccagctacttgagagactgaggcaggagaatcacttgaacccgggagatggaggttccagtgagccgaaatagtgccaatgtactccactctgggtgacagagtgagactc

SEQ ID NO: 14252 - DNA, 743 bp, Macaca Fascicularis
  misc_feature (1)...(743): n = A,T,C or G
gtgttatagtaacttgctttgcagtggcntnnnggtggcaagaagaatcctaccagtggnnnattagtagcattatgtggaattgtcttcaaacacaaaaaccagtgaatctgtcacccacctcccctgaccgccttcctgcattttgagttacagggagttgtagcgtggtcgtttacaaggaggaattgctgtcatcagtaacaacaaaaagccctcagtaaactccgagggattgcaagctggctcaagctgcccctcagctttggactgcttcttcaaggccaaaagggttgtttgtggagtctgggctgggcagcactgcctagaatgtcatgctctctctgtcatccaagggtgtttcttgaggaggggtggctctctctgcctccagttggaggccctagtacccgcttctaggtcactcttcgagatgggacctaccttgcgtcagtcccacgaagggagctagccatgggtgggtggtggggaatcggggagagaaaccctaataatcctagaaggaggagcagagtctggggagtacccagtaaatggcacattcctgacacttggctgttttgatgtttcttattcagaagcagaattaggtaagcaaaacccccgggtgtgactgaggcacacagaaggcacccgtacccccacctccagcctgttgaaagtaccattttgtagcagttttaccactgtatgatttttgtttggacatttgaagtagagct

SEQ ID NO: 14253 - DNA, 751 bp, Macaca Fascicularis
  misc_feature (1)...(751): n = A,T,C or G
tccccaacgcagnnnnnntcaacggtgccaacgtccggcaggtggacgtgccaacgctcaccggagccttcggcatcctggcggcccacgtgcccacgctgcaggtccttcggccggggctggttgtggtgcatgcagaggacggcaccacctccaaatacttcgtgagcagtggttccatcgccgtgaatgccgactcttcggtgcagttattggcagaagaggcggtgacgctcgacatgttggacctgggggcagccaaggcgaacttggagaaggcccaggcggagctgttgggggcagctgacgaggccactcgggcagagatccagatccgaattgaggccaacgaggccttggtgaaggccctggagtaggcggtgcgtaccccgtgtcccaaggcccggctaggggctgggcaggggtgccaggtgggcccnnnnnnnnnnnnnnntcccagccacctggggaagccgtgcctgtcgaggaggccaccagagggcagtgcaggctgctgcctgggccccagaccctgcttgtgtttaaagccctggggactggggcagggacagacgatcctcctcagctttgagctgtggctgccacccacggggctctcgttccacctctcaagatccccccagcctgacgggccgcataccatcccctctgccctgcagagccagccgccaaggtccacctcggcnnnnnnnnnnnntctctggatgagctgcccccagcccccgcccca

SEQ ID NO: 14254 - DNA, 728 bp, Macaca Fascicularis
  misc_feature (1)...(728): n = A,T,C or G
tctagccccaccccgaccaaggctgggctgaagcagcccgagggctttcctaattcctccccttgcccctgccannnnnnnnnnnngtgctgcaggggtctgggtttggcaactcctgaggcctgcatgggggacttcacgttttcctacctctccttctaatctcttctagagcacctgctacccccaacttctagacctgctccaaactagtgactaggatagaatttgatcccctaactcactgtctgcagtgctcattgnnnnnnnnnnnnnnnnnnnnnntctcctctcaggggcagcatgctaacagggtgatgccctaatccaactgggagaagcctcagtggtgcnnnnnnnnnnnnnnngactgtcaagctgggcagggctaggattgggggaatgaagctggggtttggctggggggtggtctgaagcagacagggaatgggagaggaggatgggatgtagacagtggctagtatggctctgaggctccccggggcctgctcaatctcctgctccttggtgttttctgatgacttgggagattgggagtccctttgtcctcatctgagactgaaatgtggggatccaagatggctttccgtcctcttacccttcctccctcagcctgcaccctctatcctggaacctgtcctccctttctccccaactatgcatctgttgcctgctcctctgcaaaggccagccagcttggagcagca

SEQ ID NO: 14255 - DNA, 656 bp, Macaca Fascicularis
  misc_feature (1)...(656): n = A,T,C or G
tgaaaaacagaannnnnaagagcagagcacctaggcctgnnnctgcctccccatctacctgactggccagggcccgagagccctgctgctccactgcagggccgggagggctgactccctgcttcctccaagctgctgcctcccctgcagccagggtctgggcagggtgcggccagtccttggggcacgcagcttccttcaagtgcactgtgtgtgcttcccggacctgcggcgatgccgcgggcctgccttttctacgcgcctcactagcttaccaccctgtgcnnnnnnnnnnnnnnnnnnnnnnncatcagcctttttctttccctgccaccctttatttatcaagcataatgttacactttaaaggacagcaaataagaactttgtagaatcccaccaggnnnnnnnnnnnnnnnnngtttggaaataaagaaatgctctgaaaaatatcagccaccaaaatagttttgttggcactgtgttcacacgcatggtccccacatccccaggttgggtgggttttttgggtttttttttttttggtatttttttgtttttgggctttttcatgttacatccatatctgtatttatatcttatttgtttcactttcaagtgtatcatggcaaatgtacagatttttttgttaataa

SEQ ID NO: 14256 - DNA, 763 bp, Macaca Fascicularis
  misc_feature (1)...(763): n = A,T,C or G
ttttgcacatccactggaaaggtgtcattagtgacccagtgttagnnnnnnnnnggtcaggttannnnntctagccctcatggctggaggcccagtcctggctccaccactcctccagccagannnnnnnnnnnnnnnnnnnnnnnnnncaccacagggcnnccagggagcattcgggtcaaatccatggataccttgggccacaaaccaagactgttgatcatcccacaccttgtggggcagtnnnnnnnnnnnnnnnnnacttggtgacttaactcctccaggagccctgtcagctgccctcctccacctaaaccccttagactcttctgctttggcaaataaaatgacatcggggaggggaggtgctctgcctcccagcttttctctaaatagtcctatagatactggtaatctggaaatgaagaagtaattctgtgtgtgcacctactcttgcagaatgttcaaggaagtattctgtgttagtattaatgccaaaaagtttttaaaggttttgtactcagcacatcataggaacacacattacttctgtcatttcagggcgtcgggactggctggcacccttgttatgtgctattttaatcagtgtaacgttggtcaagttgttacccatgtatgctgtgactattgcgtgtttatatcgtccagaaagtattgaggctttacgtagatgcaactggcgaaccctggagagagaatgccgattgtcttgaccaaaaccacagcctgtctcttctcttgt

SEQ ID NO: 14257 - DNA, 778 bp, Macaca Fascicularis
  misc_feature (1)...(778): n = A,T,C or G
tcgatgagtgtnannnncagagcccgagcccctcaacacgtctgactctctgactggtctagctttaatgccagcagtacccctggaccagaggaggtagacagcgcctctgctgccccagccttctacagccaggccccccggcccccggcttccccaggccggcccgagccgcacacagtgatccacatgggcaatcctgagcccttaactcatgcccctaggaannnnnnnnnnnnnnnnnnnnnnnnnnnnacnnnnnnnnnnnnnnnnnnnnnnnnnnnnnnnnnnnnnngacgccggcctgccttgggttggctggcccagctgctaaggagccgggccgggtctcggaagcgaccgctgaccctgctccagcgggcagggctgctgctactcctgggattgctgggctttctggccctccttgccctcatgtctcgcctaggccgggccgcagcagacagcgaccccaacctggacccactcatgaaccctcacatccgcgtgggcccctcctgagcccccttgcttgtggctaggccagcctaggacttgggtcctgtggaggagaggcggcgtaatggggaggctgggggcacctcttcactgcccctctccgtcaagcctaagacactaagaccccggacccaaagccgagtccaccagagtggttgcaggacgggcctggagtccccgcaggtcaagcatttgtcttgacttgctttcctcccgggtctccagcctcccaccccttgccccagaaggagctggcagg

SEQ ID NO: 14258 - DNA, 776 bp, Macaca Fascicularis
  misc_feature (1)...(776): n = A,T,C or G
aaaatagtgtgctacaaaactnnnaagatgttttagaaattannnnnncagctcgtgctatcctggaaaaatctgattttactatggattgtggaatttgttatgcttatcaacttgacgnnnnnnnnnnnnnnnnnnnnngtgataattcccagtgtggacaacctttccatcaaatatgcttatatgagtggctgagaggactactaactannnnnnnnagttttaacatcatatttggtgaatgtccatattgtagtaagccaattaccttaaaaatgtctgggaggaaacactgaaataagaatataacattttgatgaagagctggaaacttaaaaaattatcaaaaggnnnnnnnnnnnnnnnnnnnnnnatataaagcaagcaatactaacatcaaaaggacaggtatgatgatgccataataataaatatctgtgtttgtctnnnnnnnnnnnnnnnnnnnnnnnntnnnnnnnnnnngtccagttgaactttctgtgatccnnnnnnnnnntgtagaagtgtatttatacnnnnnnnnnnnnnnnnnnnnnnnnnnnnnnnnnnnnnnnnnnnnnnnnnnnnnnnnnncataaaatgagtttgggaattgtctatagttgaatttttgtgggnnnnnnnnnnnnnnnntcaaaagttcttgagactcttgatatttctctcttatccttgtgctttcctatggcaaaaatacatgtatagtttgttagatgtgagttatccaagtatttattttgtgtaagtataag

SEQ ID NO: 14259 - DNA, 707 bp, Macaca Fascicularis
  misc_feature (1)...(707): n = A,T,C or G
atgcaggacagagaaccactatttacaaacgagacccctctaaacagtatggactgaaaatgaaaacttcacgtgccttcttcagtgaggtggaaaggcgttttgatgccatgccgtttactttaagagcatttgaagatgagaagaaggctcggatgggtgtggtggagtgcgccaaacatgaactgctgcaaccatttaatgttctctatgannnnnnnnnnnnnnnnnnnnnnnnntttaaattnnnnnnnnnnnnnnnnnnnnnnnnnnnnnnnnnnnnaaccagtggtcccttnnnnnnnnnnnnctacnnnnnnnnnntggaggtccaggatgcagagctaaaggccctcctccagagttctgcaagtcgaaaaacccagaaaaagaaaaaaaagaaggcctccaagactgcagagaatgccgncagtggggaaacattagaagaaaatgaagctggggactgaggtgggtcccatctccccagcttgctgctcctgcctcatccccttcccaacacaccccagactctgtgaagtgcagttcttcttctccatctaggaccgccagcagagcgggggtctccctgcccccaccccagttccccaacccactcccttccaacaacaaccagctccaactgactctggtcttgggaggcgaggcttcccaaccacggaagactactttaaagaaaaaaagaa

SEQ ID NO: 14260 - DNA, 685 bp, Macaca Fascicularis
gacagagaacatcaccttccatgcagtctcttctgtggtgaacaactcgcgaaacaatactcctgagtgtctggctcctgtcgacttggtggtcaaaaaggagctcaaggcaagtggcagtagccagaggatgttgcagtggctggccacaaagtcacccaaaaaagaagactcaaaaacacctcaaaaggaagagtcagatgttccccagtggtccagtcagttcctgcagaagagttcactccccacgaagagaggcactgcaggactcctagagcaatggctgaagcgagagaaggaagaggaacctgtggccaagcgtccttacagccagtgacacaggactttcagagaccaaggccagggtctgcctcactgctgttctgataataggttcttacattgtatgtgtgtgtgtttgctttgggaggaggtggcactgtgttgacagttgtgggctcatggggaagtagcctttttggccatgagtaggagcccctagtggggctggtggacagctttggaagaggtgtcctgttgctgtcaccagccatgtgggccccatagggacactgtgcctgctgcccttttcctggcagggctggtggagtcttccctcaaagcatgctttacccagttgggaagtgtctgccctgatctggtactccttgtagtaagctatttt

SEQ ID NO: 14261 - DNA, 777 bp, Macaca Fascicularis
  misc_feature (1)...(777): n = A,T,C or G
cagaccgannnnntggtgaacagtacagcaactacagcgtgaacggggagccagtgaatgggcggcacaccctgggggagaacatcgccgataacgggggcctcaaggcggcctatcgggcttaccagaactgggtgaagaagaacggggctgagcagacgctgcccaccctgggcctcaccaataaccagctcttcttcctgggctttgcacaggtctggtgctccgtccgcacacctgagagctcccacgaaggcctcatcaccgacccccacagcccctctcgcttccgggtcatcggctccctctccaattccaaggagttctcagaacacttccactgctcacctggctcgcccatgaacccgcctcacaaatgcgaagtctggtaaggacgaagcggagagagccaagacggaggaggggaaggggctgaggacgagccccccgtccagcctccagggcattgctcagcccgcttggccacccggggctctgcttccccgcactggagggctttcagctggaaccgagcccatggtgtcggctctcaacagaacccaccatctgacccctgtgaagagccggacannnnnnnnnnnnnnnnnnnnnnnnnnnnnnnnnnttcgggtgtcgggcgggtggctcatcaggcctgggccccacgctgacaagcgccagatacgccacaaataccactgtgtcaaannnnnnnnnnnnnnnnttttggggaaactattttttaannnnttgtggaatacactnnnaaatcttcag

SEQ ID NO: 14262 - DNA, 422 bp, Macaca Fascicularis
  misc_feature (1)...(422): n = A,T,C or G
cacccccacccacctccagcaggcctctgttggcctcctcccgacttgactcaccttcacccggaagcagggcaccagctgctggggtgggacttgggccttcagatcataaactacgtattccctcttgacactcacaatctcgttcaccgcgtgggtctggaactctaactccatcgctgaggggtgggaatgagaactatgaactaggaaggagagatcccagctgccaagtctgggggtagcagactggagcccaggggtgatggagactgttgatggcttttggcagggacagacttggagacaaaaccagtccgtagatgggcttcccaaaccnnnnnnnnnnnnnnnnnnnnnncgtctccagttaaaggaaggcctttatcagattcatagatgagcttcatnnnnnaaataaa

SEQ ID NO: 14263 - DNA, 782 bp, Macaca Fascicularis
  misc_feature (1)...(782): n = A,T,C or G
tccataccgacctcagcggtannnnncacagaacgtggtggactnnnnnnnnnnnnnnnnnnnnnnnnnnnnnnnnnnnnnnnnnnnnnnnnnnnngaancaattccatgagtaatgccatcattacttcttggcaaagaactcccatgactcnnnnnnnnnnnnnnnnnnnnnnnnnaccaaggagcccgggagcatgcggaggcctgtgttcactctttggaacaagctgacggactacacatctctgagaatgccaaccagaggcggcagcccacccttcctgcctcctgccccactcagggttggcatgcgatgagccattcatgtgctctaaactccatctgcctgttacccaaacatgcctctcctggcagggtagacccaggcctctaaccatctgacagggactcgggctggacaccgtgtgatgcactctggccccaagcctttatgtgcccatcactctcagagaccgcgtttccctgactgtcatagagannnnnnnnnnnnnnnnaaaaccaggcccctgttgccttttaatcatctacagctccctcagtcctgcgctgcagaccctcaaatgtatttttctgatacagaccttgtatatggctttactgccacaaaagagtttttttccttaaaaaaggtgtcaacttggaaaataatggtttaaaaatgggataaccattaaggaaaaacactttcaatgtatcttccatttgatgaatttgtttttctctctttatcccnnncgtggtggacttccatgccctcaa

SEQ ID NO: 14264 - DNA, 674 bp, Macaca Fascicularis
  misc_feature (1)...(674): n = A,T,C or G
gccggtcnaccgnnnagtctgnnnactatacatnnnctgcccagggaggtgccagcactcgcatcatgcttcccgagaacggccacccactgatggactccaccctttagctaccttgaacttcnnnnnnnnnnnnnnnnnaacaaatccacagcccctgatgacttgtgggtgctcctggctcaacccaaccagcgggactgactgactgtcaggccagggtctggcacggcacagcaccactgccagccctccccaggcacaccactctgcccagggaatgggggcttggggtcatctcccactgcctggaggagtcagatggggcacaggaatctggctcttcagccatctcaggtttagggggtttgtaacagacatttttctgttttcactgtgtatccttggtaagccctgtggactgttcctgctgtgtgatgctgagggttttaaggtggggagagatgagggctctcttgggccatgctacccagtgtgactgggtaatgaggacagacttatggacgtcccatccacctgaggctgattctttagcagcagagactaagggatgcagagtgtgagctggcaaaggtttgtggctccttgcagcctccaggggctggcctgtctctgttagaactgaagcagtccactgggaggggatgatacaa

SEQ ID NO: 14265 - DNA, 676 bp, Macaca Fascicularis
  misc_feature (1)...(676): n = A,T,C or G
tggctggccttcgtgccctttattcttgtcataaatccgcnnnnnnnnnnnnnnntgcttcgcatcctggctccagcgccttctgatccccaaggcctgttcctctccccggcctaaccccagtgannnnnnnnnnnnnnnnggggtggnnnnnnnnnnnnnggtggggaaagaggtgggccagaaccactagagactttgatggatggtttccagccccagagatttcaggcatttcaccaccctagatagggtgatggcagaagagaaaggagtagttccagtcctagagatgataggacaatgggaaaaaaaggagtgggctccagtcccagaaatgggaaggggcannnnnnnnnncttggaggtgagggtggaaatagggagattccaggttttggctgtgttgctctggatcattgagggnnnnnnnnnnnnnnnnnnnnnnnnnnnnnnnnnnnncaccgggggtcaaggattccctggccttcaggtgaggggatctgggtggccaggatccggggctttagccggcgggggaggtggtggacgcatcggcctgagtcgaggtaccatcatgtccaggagcccagggaagtccagggctttgtccccaggcaggacaggtgcagggggcccatccaacacagnnntaggtgcaggtggggnnnnagct

SEQ ID NO: 14266 - DNA, 870 bp, Macaca Fascicularis
  misc_feature (1)...(870): n = A,T,C or G
tgaagcatatttttcatagaatgtagcgtgtaaatagctttttaaatannnncntttttataagagtaaaagtatctttaggaatttctttctatagagttcttcattaacatttatacgagttttttgctgagtcagatggacagtgggttctgatgctttttccttctcctttccttttattattattattatttttttctaagaactaaggtattgcctgaaaaacnnnnnnnnnnnnnnnagccttacactctctttacagaagcgaatagtacacaaaagatctattccagacacattttgaagatgaatcttcaactttaataccagctctttgttttccttcttgtatgatgaggggattgggggatacagttattttactagcaccttgtgaagtgtttccgtgttttgtgatgctgtaatttattaatgtttgtagctttttatatttgtacatttcttatgagctttgtttatatacccattacctggatgttttgtcctacggggagaggcagcttggtggaggccttatccactcccacttgtcctgtttggagggacgcagtccccagggcccgaggctgggagagggggagtctcgtggggccccaggcttattcagaaccggtgtttttaaagtttcctttaccctgcccttgttgaacatttatataatctaacctggacatcaagctgttctctctctctctcttttatttttaattttattattattattttggcaacatgtacatttctaacaaagtttatcgtggctattaaagtgttttatttcccaattcatattactcttgtatcgagtccatgaggtctaaggcaacttagatcaaagtttaaaaa

SEQ ID NO: 14267 - DNA, 712 bp, Macaca Fascicularis
  misc_feature (1)...(712): n = A,T,C or G
agcaatctgggatttnntcttcannngaaggatctccaaaagcatgcctttcaactccctattccaaagcaaagaaannnnnnnnnnnnnnncaagaaaaaaaataggctaaaaccaatttagattttacaatggtaaaccaaagagtctttagccttgatatannnnnnnnnnnnnagaacatacttcaccaaataaaacaaagacttgatgtcatagcttgaattttggaaatatgtccttatccatgtgactacttggaaaggcaggaagtatagctggcctgcccacttgaaaaactaaaacccattttgcccaggcatggaatgagagacagtagttaagaacattgttattaaacaccccatcaatttttaatatgggtgccannnnnnnnnntcaaatctagtagtnnnnnnnnnnnnnnnnnnnnnnnnnnnnnnnnnnnnnnttttttagcttgatgcagaaagtaggacctatttttttcaggctcgaaacnnnnnnnnnnnnnnnnnnnnnnnnnnnnnnnnnnnnngaagtacagacaggaaaagaaacgtgtaatttttttctaagcaatcagctatgaataaaatgcaagaatactttactcaccccacacggaaaatgtttcctaaaaacttcctttgttgatcttctnnngaatgagacatttgaaggtttgctctactttgaatatgggcatcaa

SEQ ID NO: 14268 - DNA, 702 bp, Macaca Fascicularis
  misc_feature (1)...(702): n = A,T,C or G
ggctacggaggnngttatgacanctatggagnnnnaaattatggannnngaaattacaatgattttggaaattataaccagcaaccttctaactatggtccaatgaagagtggaaactttggtggtagcaggaacatggggggaccatatggtggaggaaactatggtccaggaggcagtggaggaagtgggggttatggtgggaggagccgatactgagcttcttcctatttgccatgggcttcactgtataaataggagaggatgagagcccagaggtaacannnnnnnnnnnnnnnatcgaaataacaatgttaaggaaactcttatctcagtcatgcataaatatgcagtgatatggcagaagacaccagagcagatgcagagagccattttgtgaatggattggattatttaataacattaccttactgtggaggaaggattgtaaaaaaaaaaatgcctttgagacagtttcttagctttttaattgttgtttctttctagtggtctttgtaagagtgtagaagcattccttctttgataatgttaaatttgtaagtttcaggtgacatgtgaaaccttttttaagatttttnnnnnnnnnnnnnnnnnnnnnnnnnnnnnnnnnnnntgtaataagacataacgtttttcctttaaaaaatttaagtgcgtgtgtagagttaagaagctgttgta

SEQ ID NO: 14269 - DNA, 173 bp, Macaca Fascicularis
ggcctgggttttgttgcataccacagattgtctatgtaacgtgtagcgcacacctctcttggtgctatttcattcctgctgtaagagaatgacaaaaatattcatgtatagccaattgattgtgacgtgcttgtggtctgtgcttgctcagaaaaacagacagacaaacaaac

SEQ ID NO: 14270 - DNA, 733 bp, Macaca Fascicularis
  misc_feature (1)...(733): n = A,T,C or G
aaatggacttcctgnnnntcaannactcnannnnntcctacctgcggctgcactagcggtcctggagggcctgtggccacacggggcaagtgcctttccgacaggaaccccggggaatgcaggtgctgctggccccaggacccctcttcaagagccactgcgtgcactcacctggccgctggcccagcgggcgcagggcacacttggccgggcttgggggcagcccatctcccgtggccctgtatgcgtgtgcctgcttcggcctgtcgcttgaggcctgcttccttcacttgctccagctgacaggtacctctccaggccccgtagatgggcaaggacttggtaaccagggttttaggcttttaaaggccattttggggggtcagccctgcccctaaacctgtnnnnnnnnnnnnnnnacagaatgctgacaccagtgtccgtgtggcccgagcctgtgccctccccacctggcccaccctggcaaggacaggtgtggccaaggacgaaagccctcccttggctggcctcacgatggggccatcccgggagccagctgggagctgccttccactgccatcgggcctcctctgctctcccatgcggctggccctgccnnnnnnnnnnnnnnnnnnnnnnnnnnnnnnnnnnnnnnnnnnnnnnnnnnnnnnnnaacagagcccctggtgcaatgcagtcacaggttttatgggactttggtgagcgggcagtc

SEQ ID NO: 14271 - DNA, 772 bp, Macaca Fascicularis
  misc_feature (1)...(772): n = A,T,C or G
acaagtcaatgttagaccaaaatggtcacaagctgtancnaagtggagacaattggacccatagctgtnnnnnnnnnnngtgtctggaaggagaggtagattgctggccactcacnnnnnnnnnnnnnnnnngtgagtacacagctatcttagaaggggagtgttgtccccgctgtgtcagtgacccctgcctagctgataacatcgcctatgacatcagaaaaacttgcctggacagctatggtgtttcaaggcttagtggctcagtgtggacgatggctggatctccctgcacaacctgtaaatgcaagaatggaagagtctgttgttctgtggatttggnnnnnnnnnnnnnnnnnnnnnnnnnnnnnnnnnnnnnnnnnnnagaagaatggacaaaatgaccatccaacgtgattaagaataggaattggtggtttgggttttttgtttgttttgttttttttaaccacagacaatnnnnnnnnnnnnnntctgaggaaggtgtttggaggttgccttttggacctaccactttgctcattcttgctaacctagtctagnnnnnnnnnnnnnnnnnnnnnntaagtcaatggttgttaaaagaagtttcccgtgttgtaaatcatgtttcccttatcagatcatttgcaaacacatttaaatgatctcannnnnnnnnnnnnnnnattttttggcttattttgtgtacgaacataatagagactcagctccttttatttattttgttgatttatggatcaaattctaa

SEQ ID NO: 14272 - DNA, 640 bp, Macaca Fascicularis
  misc_feature (1)...(640): n = A,T,C or G
cactcaagatgtgcnnnnntcaaactcnnncagcgggcaaagcatgtgtacagcgaggctgcgcgagtgctccagtttaagaagatatgtgaagaagcacctgaaaacatggtccagctgctgggagagttgatgaaccagagccacatgagctgccgggacatgtatgagtgcagctgccctgagctggaccagctggtggacatctgtcggaagttgggggctcaagggtcacgacttactggagcaggatggggaggctgcgcagtatcaatagtacctgcggacaagctgcccggcttcctagccaatgtgcacaaagcttattaccagaggagtgatggaagcttagcaccagagaagcagagtttgtttgctaccaaacctggaggcggggctttggttttccttgaggcctgaaaaaatgtaaaaaatctcagagaaactatttaggacacttaggaattggcaggactttctatgccacagtaaattaatcttctttctgttttgtattatgatgaatggttgctattatatcaagatatattttcaaagaaatgattgaaagctctctatgcttcataatgattatttttccatcttaaaatatggttttactattaagagtcaagatcat

SEQ ID NO: 14273 - DNA, 757 bp, Macaca Fascicularis
  misc_feature (1)...(757): n = A,T,C or G
tagcatcatnnnagatgatctagaagatataaagctgtcgaacatggannnnnnnnnnnnnnnnnnnnnnnnnnnnnnntctttagttgacagttcacaaacttgtgtaaaggtttgtgaaattcatcnnnnnnnngcatcagcccttccttaagaatgaaaccgaccacgtggagggaaaaagaaaacaattctctcttggcttggttttttgagaagtttactgacaaattactgtccatcaaatctgaaatacagtcacctcacagctcttcaaagaaaacctttgaaagatttatannnnnnnnnnnnnnnnnnnnnnnnnnnnnaagtgcataattaccaaaattatatgtactattgtacatttttacaacagcattttcttgaacatcatctgtttaatgattattgtccactgagcctgtgctctgctttccataccaagtaaatatgaaataatctttgcacataacagaagaaactataattacttggctgttggagatttgtacttcagagtataaatgtacaccagtttttctatttgtgaactcatctgtgggaggagtaaagaaaatccaaaagcatttaatgtttttttttttgttctataaagatttgaaaatgtatttttatattattttacttatttggaatttacacagcacacctaagcaattaggatataacaaaattaaccatttttgcaaccattttgttttttaagcctttttatttctaaaaagatgaaaac

SEQ ID NO: 14274 - DNA, 672 bp, Macaca Fascicularis
  misc_feature (1)...(672): n = A,T,C or G
ctgacagcagcacacaagaaactgtgcctcaagatgactcnnnnnnnaacccagtggttggnnnnnnnnnnnnnnnnnnnnnnnnnnnnncagctgtctgtccaacaccgggnnnnnnnnnnnnnnnnnnaccnnnnnnnnnnnnnnnnnnnnnnnnnnnnaaagctggtggagagtgagctgctggagatcctgactgtggtgggcaaacaggagccagatgagaagnnnnnnnnnnnnnnnnnnnnnnnnnnnnnnnnnnnnnnnnnnancatggattatggnnnnnnnnnnnnnnnnnnttagacagggaccctcagggatgctgggagtggtcctgtactgnnnnnnnnnnnnnnnnnnnnnnnnnnnnnnnnnnnnnnnnnnnngggatcatagcagtgacaaggaagtctcaatataaaggaannnnnnnnnnnnnncctgagttgtgaatcttctcctttgtcctgacagagtttggatgtttcattctctctcttgcttcctatctccttacatctgtcaagtttcagaaattccaagaataattttcatccatgattagaacataggttggatcattctttttgtacccattttgaaggccannnataataggttgaagttttttatattttggaaaactggattttgtggtaaggtaggaac

SEQ ID NO: 14275 - DNA, 703 bp, Macaca Fascicularis
acaaacgaacaatgacccaggactctttgtttactgctgtgatttttcttccacagctatagagctggtccagacaaatccagaatatgatccttcacggtgttttgcctttgttcacgacctgtgtgatgaagagaagagttacccagtgcccaagggcagtcttgatattatcattctcatatttgttctttcagcgattgttccagacaagatgcagaaggccatcaacaggctgagcaggcttctgaaacctggggggatgatgcttctgcgagattacggccgctatgacatggctcagcttcggtttaaaaaaggtcagtgtctatctggaaatttctacgtgagaggtgatggaaccagggtttacttcttcacacaagaggagctggacatgcttttcaccactgctggactggaaaaggttcagaacctggtggaccgccgactgcaggtgaaccgagggaagcaactgacaatgtaccgggtttggattcagtgcaaatactgcaagccccttctgtccagcaccagctgagaggcacctgctgccaagacgatgcaagctcattgtgtttccgggcttttttaaaaaaacatctgtagcaccaggcatggtggtgcatgtctgtaatccctgccactcaggaggctgaggcggggaggatccattgagcccaggagtccagcctgggcaaaa

SEQ ID NO: 14276 - DNA, 733 bp, Macaca Fascicularis
  misc_feature (1)...(733): n = A,T,C or G
ctgtnnnnnnnnnnnnnnnnnnnnnnnnnnnnnnnnnnnntgagtgacnannnnnnncacnnnnnnnnctnnnnnnnnnnnnnnnnnnnnnnnngaggcnnnnnnnnnnnnnnnnnnnnnnnnnnnnnnnnnnnnnnnnntctcataagacctcttggtgaaggtgggaaaatnnnnnnnnnnnnnnnnnnnnnnnnnnnggagttggctgtgggtccattctgtagacgagtatctgatttaggaaagtcctatcgaatnnnnnnnnnnnnnnnnnnnnnnnnnnnnnnnnnnnnnnnnnnnnnnnnnnnnagtcctgcactggggnnnnnnnnnnnnnnnagcatcattattcagtttttgttcacgagagcacccgctgagctgaaatctcctttccagagggcagagtggtcccacgcacgcttctcnnnnnnnnnnnnnnaccatccatctgaaaaggacaggctcctcctcatcaggggagcccnnnnnnnnnnnnnnnnnnnnnngagaagtagagaaggcaaagaatttgcaccagtttatcccataatggttcagctgcttcagaaggctatgtctgctcttcagtaacaatatgaaagctttgttgatctccnnnnnnnnnnnacccattcatagttggcagttaacacatactccaaaagacagctactatccactattttaagaatgtaattgattgttctgtatttcctgtcaaccttta

SEQ ID NO: 14277 - DNA, 736 bp, Macaca Fascicularis
  misc_feature (1)...(736): n = A,T,C or G
ggtttttcaaatgctcnnnaaatttgtttaacatcttactgatattctcattaattaatgattgaataaaatttttgaaatgtatgagattcatgattttatcatctagaaaactgtattactttaccaccacccacctaacaaactctaaaagaacaatcacattcatatgcttcttgcaaaagttaaatggctcacaaagttcccatccatgattttatacacatactctaatgatcaagagaactgaacaaactgatcaccaatgtaagcgctggccttcaggtagaaagtgtgccttccctctgtatgtagttcatggtctctaggtatgaggagtattgggggaaaataaatatacattacatatatgtatttacatgtgcaaaaatataaatatatatgtatatatggagagacagaaagagtatatataggtatatatgtgtgcatgtgtctgtatgtgtataaaatgcagctcttcttcaatacctacctatactccttaatatcctctatttctcttttgacccacctcacaccctccacatgactctaggttcattatctttgagtttataattttctgtgtgtgcaggtgtgtcaaaaacatttatagtgataaagaaacatccacacctccttaccattctattttgaattgtactcatgtttatatatcaggctcagtttattgttttcacctttgtctatatagaatttactgcccactctc

SEQ ID NO: 14278 - DNA, 746 bp, Macaca Fascicularis
  misc_feature (1)...(746): n = A,T,C or G
aaacctgttcatgtcataaactggtttgtgtcctttggnnnngnnnnnnnnnnnnnnnnnnnnnnnnnnnnaaggaaccaagctgtttaaaactaattatctccgctatgaaggagaagtatttttaaggaatatcagaagaaagtagaaagtgagaggaggttccagttcagcttcctgggtcgagtaggggctcagaaagctgtgaaactcactcatttnnnnnnnnnnnncttactttggnnnnnnnnnnnnnnnnnnnaagatacatgcttaaaatattcctaacatcagaatttgtgcctgtgtttccttccccaagaaagctataaacagcaaaaattttgttgtaagcttcgctgtgtcctctctctctctctctcccttccccctcccctgaaactaaaaggaatgttaaaagcccctttttctgtgaccagcagaccttatctatgctcccaattccaattccttgtaaacacnnnnnnnnnnnnnnnnnnnnnnnnnnnntcctttgccatgccactgcaaggttataagtatatcaaacttaagttacaattccggtttgcctcaagatctgagtcatgttaattgtctttgtttctcactctggtagcatcttcctgccgcacatatttcccgccttaaannnnnnnnnnnnnnnnnnnnaaatctaacactggctacccgcttggtacctcttccacactgtggaagctnnnnnnnnnnnnnnnnnnnnnnaa

SEQ ID NO: 14279 - DNA, 847 bp, Macaca Fascicularis
  misc_feature (1)...(847): n = A,T,C or G
gaggagccaaagtgannnnnnnnnnnnnnngccttgaagataagcagtgcntnnnnagattcagacctcnnnnnnnnnnnnnnnnnnnnnnnnnnnnnnnnnnnnnnnnnnnnnctgaaagctgtttggaagaaacaggtggcctgggagtagatattgtcctagatgctggagtgagattgtatagtaaagatgatgaaccagctgtaaaactacaactactaccacataaacatnnnnnnnnnnnnnnnnnnnnnnnnnnnnnccactgggtaacaacagaagaaaaccttcagctggatcctccagatagccattgccttttcctcaagggagcaacgttagctttcctgaatgatgaagtttggaatttgtcaaatgtacaacagggaaaatatctttgtatcttaaaggatgtgatggagnnnnnnnnnnnnnnnnnnnnnnnnnnnnnnnnnnnnnnacccattcnnnnnnnnnnnnnnnnnnnnnnnnnnnnnnnnnnncagaaacatcaaggaagaaaaaagcaagttgttcaattttaattttcttctttctcagacttcnnnnnnnnnnnnnnnnnnnnnnntttgaagccaaaattttatttggaaattgttgagaaaaaccaaggaagagaaaagcaagttgtatttttaagcacgtttccctgctaagacaagatgctcagttgacacatttgaaaagtgtttgaaaaattcttgtgcaaatgatcaagaataattctataattaacatcttaaggnnnatttnnnnnnnnnnnnttnnnttatttctatatattttgccnnnnnnnnnnnnnnnnnnnnnnnnnnnnnnnctg

SEQ ID NO: 14280 - DNA, 749 bp, Macaca Fascicularis
  misc_feature (1)...(749): n = A,T,C or G
cttgctgccccagtttgcacatnnncacccaaaatgggtgtnnngaaggaggactgaggnnnnnnnnnnnnnnnnnnnnnnnnnnnnattagcacatgagggatagatacgcactgaaacatgtagtctggtctgacttgagagaaaaggaatgttgcacaagggttgtgaatgtgaaagggggaatggaggaatggaaataaaattgggatgagccctaatggaggaagtcgggcaaattgaaagtataaatgaatgggccatgagnnnnnnnnnnnnnnnnnnnnnnnnnnaatatactccttcagttgagttttcttgtcttgaaaataaaaagtgaataaaaataaatttagtaatactaaaacatacagagatactnnnnnnnnnnnnnnnnnnnnnnnnnnnnnnnnnnnngcagagagaacccaggttagaaggatgggaagagaaaaggagtagctttattgcttacagaaagccattctgaagggttggtggggtaagctcagtctattactcagacaatagtgagatggcttatatgtttcccctgttaatatctggttaaattatacatccatcaaatgatatgctcgcagcattagcaaaattaggagtttcatctttttcattgaatcataggtggagactcctattttcctttctgttttcaggcctttgagcccctgggagcccaaataccactcaattattttgtatttatgattaataaaagttcattttaa

SEQ ID NO: 14281 - DNA, 665 bp, Macaca Fascicularis
  misc_feature (1)...(665): n = A,T,C or G
cttgcatcaagtcacagagttaaannnnnnnnnnnnnnnnnnnnnnnnnnnnnnnnnnnncccaagttcctgttcttaaccactacactctagcagcctctaagtttagcnnnnnnnnnnnnnnnnnnnnnnnnnnnnnnnnnnnnnggtcctggaaaagttcaaggggaaaatatccaaatggctctgtctccaaatggggagatcctaagggccaaaggaggtgaggccaagggaagcctccactacagagagccaggcaggaccaaggacacccagggcaaatgagtgtgttccaccggcagcttactaccagcccagtctgactgcggagtnnnnnnnnnnnnnnnnnnnnggggactttgactttttctccaacctcgtaaccaaatgggaagctgcagccaggcttcctggagattctacacgccaggtggtggtgcgctcgggtgagaaacaggggcctgggtatcagacagggttggaatgtcttctctgggctggggaagtgatgggattaggagagctgatgggattaggagagctgagattacagagtgagaggatgctaccccttctannnnnnnnnnnnnnnagaagatgtggagtcttagagagccatactgctcacttctgttacagagccaagtcagcatggggagagt

SEQ ID NO: 14282 - DNA, 703 bp, Macaca Fascicularis
  misc_feature (1)...(703): n = A,T,C or G
ggtgttttgatgccccagggtcactgaaatctcccaggaagccccagagctttcctgaggctgcccggccttgatcaactcgggaagacaaaatcgagccattatctcctcttggaaaggaatcttgccagaaaaacgggatttcaggcccctccctccctgcctgggcgcctggccaccagaaggctctgccgagcacnnnnnnnnnnnnnnnnnnnnnnnagctgcttttgaacctgaggttnnnnnnnnnnnnnnnnnnnnnnnnnnnnnnnnnnnnnnnntcccttcctctccatctctccctctcttcgagactctggcggtggcctgtgatcctgaagacagctctgcagccaactggtgcttcggcctttgcgctgtcccggggccagcttccctcgacctggggaggccatggcctgtggaggaggcccaggtaaaggctggcagctgttgctggctctcctctctgcttctggaagcttccgcctcactcagaatgggcaggacagacccactgactggacttcagagtctggagggttccattggtcaggggaaagtgggcacgtggcctcttgctgtgccccttgtcacagacccgaggagcaactctgtcccctgagcattgggggtcctggggaagaggtggacacacagctccctccaactggcattcggcaacaggagcctggacttc

SEQ ID NO: 14283 - DNA, 199 bp, Macaca Fascicularis
  misc_feature (1)...(199): n = A,T,C or G
aaaagcggaccccaaatggttacattatacaagctgtgaggtttttaaacttgtgacaagggacagaagggaaattctactcattgcaaggaaatcctcacttaagcttcagtgagccacaagcacttaaaacccatgnnnnnnnnnnnnnnnntccttagccagtccaatctctacgnnnnnnnnnnnnnnnttcttg

SEQ ID NO: 14284 - DNA, 505 bp, Macaca Fascicularis
  misc_feature (1)...(505): n = A,T,C or G
ggcctgttttctttaataagagaaatcacatatgcacaattcctttttgttgcatcattgaactgaaagtcagtacaccatgtttatttcgaacacctcagccttccatacccaggtgtaaatacctccatatgtgcacgtacacacatgcttgcagatacacacgtaccctaaactcctgctgctaactttgactctgaacccaaggcccttgaacttgtgatttaatgaaacaagaaggtgtgctgaagcttgaggggcagtatcttccatgggcctggccgtcttagctaccagttggtagtgtttatgattttttaagttttgtaccatcacctcttgctggtagctttatctctaacttccctctttttttctccttaacaggaaagctttgaattttatgtacagcagctaaaagaattgagggaaaattcttcctgaaataagcanngcgatactttgttttgtatatatttgtgattctgtgtctacatgttatttt

SEQ ID NO: 14285 - DNA, 661 bp, Macaca Fascicularis
cgttcgctttgttagtgatgccacacctcaggctgaagtctgtctccgcatgtatcagctggagtctgggaagttacctcgaagtccctcttttccactggagccagaagatgaagtatttcttgctatagctaaagccatggaggaaatggtggaagacagcgtcgactgttactggatcacccgacgctttgtgaaccaattaaataccaagtaccgggattctttaccccagttgccaaaagcgtttgaacaatacttgaatctggaagatggcagactgctgactcatctgaagatgtgttgcgcggcgcccaaacttccttatgatctctggttcaagaggtgctttgcgggatgtttgcccgaatccagtttacagagggtttgggataaagttgtgagtggatcctgtaagatcctagtttttgtagctgtcgaaattttattaacctttaaaataaaagttatggcactgaacagtgcagagaagataacaaagtttctggaaaatattccccaggacagctcagacgcgatcgtgagcaaggccattgacttgtggcacaaacactgtggaaccccggtccattcaagctgaacgcacctgctggttgtggaccgtctgccaggcccaccctgagcgttgtgttcttggcat

SEQ ID NO: 14286 - DNA, 678 bp, Macaca Fascicularis
  misc_feature (1)...(678): n = A,T,C or G
tccccgccagcaccaaaggaccaaaaactgacactcagactccaccgccaggcggcccccgggccagtgtgttgannnnnnaggccatcgcctccctgctgcggnnnnnnnnnnnnnnnnnnnnnnncctggtcaaggtggcctccaacttccccacagggctcttcatggtcatgttctccatcatctccatggacnnnnnnnnnnnnnnnnnnnnnnnnnnnnnnnnnnnnnnnnnnnnnnnnnnnnnnnnnnnnnnnnnnnnnnnnnnnnnnnnnnnnnnnnnnnnnnnnnnnnnnnnnnnngaggaggcgctgctccgggccagcgtgctggccttcatcgcggtgggactggccatggcctggatgtccagcgtcttccacttctgcctcctggtacccggcctggtgttcagcctctgcacactcaatgtggtcaccgacagcatgctgaccaaggccgtctccgcctcggacacaggggccatgctgggcctctgtgcgtctgtgcagccactgctccgaacgctggggcccaccgtcggcggnnnnnnnnnnnnnnnntttggcgtccctatcttcggccacgtgcaggttgctatcaatgtccttgtccttctggtcctctgnnnnnnnnnnnnnncccagaggaaggacaaagtccggtgactgctgc

SEQ ID NO: 14287 - DNA, 768 bp, Macaca Fascicularis
  misc_feature (1)...(768): n = A,T,C or G
atagataaagtgatatnnnngcannncatcagcnntttacattgtccatgttaaaattataaaaatgatcctagttttcataggagtctaggattttgatatttttaaaaaatatagtgtgatttcatgcttttgaaaaaattttttttttcattgaaacaaattcaggttcctggcttaaaaagaaattagtgatgtctttaaaaaatattctgttacactacaattaccaaaacactgacaaagatatcggtactccaagagggtacgacttcgtgtttaattggggaacttgttttcaacattgcttatatttgaatagtagaaaaccggacactgatgtttcttcctgttgcaaggtggggctttaagctttcaaggtacaaaagtatgtcttttaaaatgaaagtaacatttgtttagctagtgaatgtgacaatattttttatgtatataatgagtctaatgtaattttaatcaactcggtaatgatgttattaaatagcaaaacaaatgcagtgtattaaagctaaacactacattgaaacacaaacaaaactctgatgaaataactgggctcttgattcagattaggtggaagctgagaaataaatgtatataaatatgtagctnnnnnnnnnnnnnnnttaaaaccatgattctgtgacttgtaataaaccaagctgtacaatttagtttataatagcagtatctgagctgctcaaaaatatatatatcaacagtggtaaatacgtagatttatatata

SEQ ID NO: 14288 - DNA, 535 bp, Macaca Fascicularis
ctgctgcaggtcatcaagccgttcagctgtgtgctcctcctgggcggcgttttcttggcgtattgcaggggggtgttcatcatggcaggagtcgtgctacccatcgtagtggtgggtatcacagtgcccctggttggcgtgttggtggggtactgcctggccacatgtctgaagatgcttgtggcccagcggcggacggtcagcatcgaggtaggggtgcagaacagcatgctggcgtcggccatgatgcagctatccttccgccgccttcaagatgattatgcctcccaggcccccttcattgtggcggtgagcggcacctccgagatgctggcgtcggtcattggccactgcatctacagtagcctgttcccagtttcttgaggcgtctgggtcaagctttcatcagccccagcccccacactccaccaaagttgtcatgcagtatgcagtcagaaaaatccaggcttattttttttactgattttttattctccagctttcagtgccacagaggccatgatgagttaggtag

SEQ ID NO: 14289 - DNA, 758 bp, Macaca Fascicularis
  misc_feature (1)...(758): n = A,T,C or G
gcagctcggccnngccgccgcnattaccccggccagggcctagggctcatgtacttcatccactactacctgcctgagggcctgcggcgccgcttcctgcaggccttcttcatcagtcactgtctgcctcgagcactgcagcctggccagcctggcactaccccaccacaggacgcagcccaggacccaaacctgagcctcggcccttccccagcagtggctcggtgagccctgtgcacctatggcccagccaatgcagcacagaaggctctgtgagcccttggttcctccccgaaaacccccagcattaccatcccccaagtctgtcctggaccctagcctaaaggatcctgcccccacttcannnnnnnnnnnnnnnnnnnnnncaggcccggtgaggccaaggtttcccagtgtgcctctgcgcctctnnnnnnnnnnnnnnnnccaaacagaccctcctggcacaacactctatcctgaagcttggagaactatgctggatggggagtctcgtgaaagacctcactgcagtctttcacaggactctgcagatggtgcctctgcaaactaaggagtgactgggtgggttggggtccccctcaggattgtttctcagcaccagtgcctcagtgctgcaattgagggttaaatcccaagtgtctcttgactggctcaagaattagggccccaactacacgcccccaagccacagggaaggttgtactgtacttcccaattgccacattaaaaaagac

SEQ ID NO: 14290 - DNA, 671 bp, Macaca Fascicularis
  misc_feature (1)...(671): n = A,T,C or G
aggggagagcaagggaggaaggcggtgagagaggcgggggcctcgggagggtgaaaggagggaggagaagggcggggcacggaggcccgagcgagggacgagaccgactccagctctgactttttcgcggctctcggcttccaccgcagccatgtcactcctcttgctggtggtctcagcccttcacatcctcattctcatcctgctttttgtggccactttggacaagtcctggtggactctccccgggaaagagtccctgaatctctggtacgactgcacgtggaacaatgacaccaaaacgnnnnnnnnnnnnnnnnnnnnnnnnnnnnnnnnnnnnnnnnnnnnnnnnnnnctcatggtgctctccctcattctctgctgtctgtccttcatcctgttcatgttccagctctacacaatgcgacgaggaggtcnnnnnnntgccaccggcctctgccagctttgcgccagcgtggcggtgtntactggggccttgatctatgccattcacgccgaggagatcctagcgaagcacccgcgaggcggcagcnnnnnnnnnnnnnnnnnnnnnnnnnnnnnnnnnnnnnnnnnnnnnnnnnnnnnnnnnnnnnnntacatccacctgcggaagcgggagtgagcgccccgcctcgcccggcggcccccgc

SEQ ID NO: 14291 - DNA, 763 bp, Macaca Fascicularis
  misc_feature (1)...(763): n = A,T,C or G
tcattgactgtnnagtgannnnnnnnnnnnngnnnnnngagacacagcctctccatgaggtggtgtacttcagcgctgcccatgcnnntcgtgagcatttaaatgctgctccgcgaattgccctccatactgcactcaacaatccttactattatctaaagaatgaagcactgaaaagcgaagaaggctgcattccgaatatcgccccagacatctgcatagcatacaaactgcacctagagtgtagnnnnnnnnnnnnnnncgtagnnnnnnnnnnnnnnnnnnnaacagttgtgnnnnnnnnnnaaaaaatggatgcaaattctgcaacctcagaagaaatgaatgaaattatccatgctcggtttattagannnnnnnnnnnnnnagaacttttaggattcataaaacctaccaaacagaagactgaccatgtggcaaggctaacatggggaggctgctagaaagcaaataagtgaagccagaactatgacattcagcttaagagaaaaaggtgaccaggcatatttacatacactagaggagcctgttttggtgagaagataaatgtgcnnnnnnnnnnnnnnnnnnnnnnnnnnnnnnnnnnnnnnnnnnncaaacaggcatatatcaaaacactgtggagtgctttagaatccaacaaataatacgtaactacaactgctcacacattttactgtactttccacaaagtcattactaaattgtgagtaaatctttcttgaacttacagagtataaaa

SEQ ID NO: 14292 - DNA, 768 bp, Macaca Fascicularis
  misc_feature (1)...(768): n = A,T,C or G
taaattcgaaccaccattnnnnnacccgaatgtgtacccctcggggacagtgtgcctgtccatcttagaggaggacaaggactggaggccagccatcacaatcaaacagatcctattaggaatacaggaacttctaaatgaaccaaatatccaagatccagctcaagcagaggcctacacgatttactgccaaaacagagtggagtacgagaaaagggtccgagcacaagccaagaagtttgcgccctcataagcagcgaccttgtggcatcgtcaaaaggaagggattggtttggcaagaacttgtttacaacatttttgcgaatctaaagttgctccgtacaatggcgagtcacctgggggggttgggcgggcgccatcttccattgccgccgcgggtgcgcggtctcaattcgctgaattgcccgtttccatacagggtctcttccttcggtcttttgtatttttgattgttatgtaaaacttgcttttattttaatattgatgtcagtatttcaactgctgtaaaattataaacttttatacttgggtaagtcccgcagcagcgagtcctcgctccgggatgcaggcatgcttctcaccgtgcagagctgcacttggccccggctggctgtatggaaacgcaccctccctctgccgctcctctctagaacctgggctgtgctgcttttgagcctcagaccccaggtcagcatctcggttctgcgccacttcctttgtgtttatatggcgttttgtctgtgttcg

SEQ ID NO: 14293 - DNA, 715 bp, Macaca Fascicularis
  misc_feature (1)...(715): n = A,T,C or G
acggcatggccctgcccaggccccgggaccgggctgtcttcccccaaaacgggctggtggtcagcagtgtnnnnnnnnnnnnnnnnnnnnnnnnnnnnnnnnnnnnnnnnnnnnnnnnnnnnnnnnnnnnnnnnnnnnnnnnnnnnnnnnnnnnnnnnnnncaggaagcagcggccaagcacgaggctcagagattggagcaggaagcccgcggccggcttgagcggcagaagatcnnnnnnnnntcagaagctgagaaagctcgcaaggaactcttggagctggaggctctgagcatggccgtggagagcaccgggactgccaaggcggaggccgagtcccgtgcagaggcagcccggattgagggagaagggtctgtgctgcaggccaagctgaaagcacaggccttggccatcgagacggaggctgagctccagcgggtccagaaggtccgagagctggaactggtctatgcccgggcccannnnnnnnnnnnnnnnnnnnnnnnnnnnnnnnnnnnnnnnnnntcaaccctcatcaccgatggctccactcccatcannnnnnnnnnnnnnnnnnntgggctgctggggatggggcccgagggtcagcccctgggcagaagggtggccagtgggcccagccccagggaggggatgtccccccagcctgctcaggcccctcaagctcctggagacaaccacgtggtgcctgt

SEQ ID NO: 14294 - DNA, 788 bp, Macaca Fascicularis
  misc_feature (1)...(788): n = A,T,C or G
caaatgagaaatttttatggaagnnntttaattcaagtagtacagatgannncacaaccaatacacagagtactacagaagtatataaatgaattactgcaccagtgannnnnnnnnnnnnctgtttacggcactggattccacactgattctattatcttgaacacagttgttgacatacatttttattaaattattgctttaggattttttaannnnnnnnnnnnnnnnnnnnnnnnnnnnnnnnnnntatttgatttgatctttcaagaatatgattgtatttgtagtataaacctctgttatgaattagaaaagattctaggtttgttagtaggagacctgggacatctttcttactgtattacataatgatgtgacacttgccctgnnnnnnnnnnnnnnnnnnnnnnnnnnnnnagggtctgaaccaaaacagcatgagtgtccttccagtttaaaaaagctttgctttgctctcctgatggctcatagtctgaatcatgtccgcccctcaaatcaggtgtacaccaatgtgtttcttttttactagcacttgggaaagttattaagtattttctttttccctgggtatcatgttctattattactttagaaaaaagtcataactagtgctgaatatatggtatatatgatattaaaatggtaattttgcaacagctcaaagttaaaaggttaatgttactttgctatgtgagctgtgattactaccgttagccacagacaccagtgcctcaactttttatgtacctgttgtgatttaatca

SEQ ID NO: 14295 - DNA, 741 bp, Macaca Fascicularis
  misc_feature (1)...(741): n = A,T,C or G
ggggagaaatgggacccatgggaggggtagtcatcatccctcacacaagaaatagcagccactttccttttgttgctgtcattctcatcctgggtgggtttctgtggcactcttttagaacatgtagcatcatcttagaggtctatttttacaaaatctgttgaagaggaaaaaaccattcttatgatggggcttaagtcattgtccaggaataagatgagtgtagtgcccataacatcaccatcactctgcctaaaagcattctagagcttcttgttcacgtggagaggaaggatatttggccaagcagcagccgcaggtggataaccctgttcacctgacaggctctggctgtgatagtaaatgtaataccaccgtttccctgggtacagatttgagtgttcatgtgatgagactgtaaacctcatttttcagttcctctgtttaaaaaaacatctgaaggatgaactaaggctgctggtgccctgagcaactgataatgcaaatgtggacaaattgtctgttttctactctagcctgttcatatggaccaaatttcaacaaggaactcaaggaaaatttgtacctgccgtatttatgctttcatgtaaaagggttggggggaggggtgtctttttggtgaactgtttttcaaaatcatttttccactgtttctgtctggttttaaaacaaattacagttttgtatggattttttaaatgtacattnnnnnnnnnnaaa

SEQ ID NO: 14296 - DNA, 751 bp, Macaca Fascicularis
cagcccgaaagatccagggaaaggaagtcacagaaactgcaggtgaggggtcagaatgcgtcattaaggaagaaacagaagagaacagtcaccgtgatactaacacagagatgcagcagattctcacacgggttcggcagaactttggtaaaatcaacgtggtgcctcagttttctggggatgacctggttcctgtggaggtgtcagatcttgaggaagagcttgagagcttttctgatgaagaggaggaggaacaggagcaacaaagagatgatgtagaagagtcttcctcggagcctgaggaggaacatgtgggaaacgacaccaaagccgttattaaagccctggatgagaagattgccaaatatcagaagtttctagacaaagccaaagccaaaaagttttcagcagtcagaatatccaagggactgagtgaaaagatatttgcaaaacctgaagaacaaagaaaaacgctggaagaacatgtagatgatacagcaccttccaaaaagggaaagaagcggaaggcacaaagggaagaggaacaggaacattcaaataaagctcccagggcacttacatcaaaagaacggaggcgagcagtacggcagcaacggccgaaaaaagttggtgtgcgctactatgaaacacacaacgtgaaaaacaggaacaggaacaaaaagaagaccaatgactcagagggacagaaacacaaacgcaaaaaattcagacaaaagcagtaatgttaaaa

SEQ ID NO: 14297 - DNA, 833 bp, Macaca Fascicularis
  misc_feature (1)...(833): n = A,T,C or G
ttttcaatattttatagtaagaaatgacagattgcctgggtncnnnnnnnannctgaaactctgcatttagatnnntnnnaaaggttattaagatgaagatttactgtttctttgttactcggtacagctgtttgttttacttgcacatttgtacatatacctaatgttttcaagtgccttaattgtttaaaatctctggcttcaaagtttcttggggaaaggtaggtttacctcacattttttgtttccattagtaatattctaggtacctcacaaaatgtattatggtgccatggctgttagtttttagtaagtgctgtaggattaatttgaaaataggcagaattccattcctccaaggtggcaaaaattagctacaatgatgtaattgtcctttacctgggtatgaattccgtgacacacattaatgtcaacatatgtagcaaattttgtgaaaatgtaacaatttgaaggttctgtaattttgagcactgctctaacaacaacaagcataatataaaattagttagattttgcaggtctacagatgagctcttgcaacagaactcacagcctttttactttttcccctaactttagcaatgtagtatcttgagccattaataatttttgggtttttttttttaaaatccagaaggtaatagaaaccttttcagatttttcatctgatttgttcttgcagatgttcttctatcagataccttattttaccttacagatattnnnnnnnnnnnnnnnnnnnnnnnnatttagacatttctatttcagttcattaaaaactgcaaaaccaatctgtatcatgtaccaaact

SEQ ID NO: 14298 - DNA, 689 bp, Macaca Fascicularis
  misc_feature (1)...(689): n = A,T,C or G
gagaacagcagccagccngnnaaaaaggccaannnnnnnnnnnnnnnnnnnnnnnnnnnnnnnaaacagcaacgtcccaagaaggcctccttccagaagccnnnnnnnnnnnnnnnnnnggcagactcagaattgtccactgtaccttctgtcagaaagacccaagcttcctccaggtgccaggatagcagtcagccagctggaaaagctgaagggatcagggagtccaaggtgactgggaagctaaagcaacgatcgcctaaattacagtcctccaagaaagttgccttcctcaagcagaatgcccctcccaagggcacagacacagaaacaccggctgtgttatccccatccaagactcaggccaccctgaaacctaaggaccatcatcacccccttggaagggccaagggggttgagaagcagcagttgccagagcagcctttcaagaaagctgccttccagaaacagaatgacacccccaaggggcctcagcctccgactgtgtctcccatcagttccagccgccccccaccagcaaagagnnnnnnnnnnnnnnnnnnnnnnnnnnnnnnnnnnnnnnnnnnnnnnnnnnnngaaaactagactggggtggctcactgccattgtcaccgggttggaactcttgcctctatgaggatgccttctccactgtgcaacccatgaaa

SEQ ID NO: 14299 - DNA, 751 bp, Macaca Fascicularis
  misc_feature (1)...(751): n = A,T,C or G
atgagcgagagtgcagcagtnnctncnnnntggtgagaagccagctccctgcaccctcgggccgagtcagatctgnnnctgccccgaaggccttgnnnaggccaggtcacactcatgccctggnnnnnnnnnnnnnnnnnnnnggccaatgacacctacctcactgggtcaccatcgagatcaatcctcctccctgccctgacgcctcgggcacatcgcgtgcactccgagcgcagagccaggcagatgcagcacctggacggggagcccagcgcccagcacagcgtggggcttccagggaggtggtgcggggcggtggggctgagccacgctctcgttttnnnnnnnnnnnnnnnnnnnnnnnnnccttgttttgtttttcttgtttttttaatatttatttttttnnnnnnnnnnnnnnnnnnnnnnnnntgggctggagaacagtgnnnnnnnnnnnnnnnnnnnnagcctcaaactcctgggctccagcgatcctcccccctcagcctcctgagtaactgggactttgacaggcatgcaccaccacacccagtcaaaacagccgtcttccccttgagagtcatcagaaaaatacattaggaaaatgtgtttagaaataaaagcacaaggcagggcgcagtgttcacgccnnnnnnnnnnnnnnnttgggaggccgagatgggagaagcacttgacgccaggagtttgagaccagcctgggcaacatggcaaaaccttgtctcttttt

SEQ ID NO: 14300 - DNA, 710 bp, Macaca Fascicularis
  misc_feature (1)...(710): n = A,T,C or G
gcagcctgtccataaatggagtgatctttggcctgacgnnnnnnnnnnnnnnnttccacctgggggccgaggagatcagtagttcttctggaacttcagacagattcagccgaatactcaagcacatcctgacccagagaagctactacccgctctacccaccccaagaagacatggccattgactatgagactttctatgtctacgcacagctgcctgtcacccnnnnnnnnnnnnnnntcccgtcagagctgagatacttcgtgaaggatgtcctcggctgtgtctgtgtgaaccccgggcgcnnnnnnnnnnnnnnnnnnnnnnnnnnnnnnnnncgactctacctcaggaggccagcagtggacggagtggagaggcagagtccgtgcgttgccgcgcaggtnnnnnnnnnnnnnnnnnnnnnncctctgctgtgtgggcccttaaagtcttagccaagagccaagacgtagccctgtgacaaggtgaacagttgggtaggaaaggagagaggagccagccagggaggggcagctgcagggaccaggcccagcagggagggctcgtgcagccgggcctgcctgtgagtggagcctctcctggaaggaggctgttgcctctcagtccatgctccaggtacagaagtaagccagctgtggatcccgcccactcagaaaaggcgagaaggctttgtgannnctgcagaa

SEQ ID NO: 14301 - DNA, 1180 bp, Macaca Fascicularis
  misc_feature (1)...(1180): n = A,T,C or G
gcagannnannnnnnnnnnnnnnnnnnnnnnnnnnnnnnnnnnnnnnnnnnnnnnnnnnnnnnnnngctggccaacgacatcgcgcggctgatggtgatggtgcggcaggaggagtccctgatgccttctnnnnnnnnnnngggcggcgcctttgnnnnnnncatgaacgggccgtttgggcacggctacggcgagggggccggcgagggcatcgatgacgtggagtgggtggtgggcaaggacaagcccacctacgatgagatcttctacacgctgtcccctgtcaacggcaagatcacannnnnnnnnnncaagaaggagatggtgaagtccaagctccccaacaccgtgctaggnnnnnnnnnnnnnnnnnnnnnnnnnnnnnnnnnnnnnnnnnnnnnnnnnnnggagttcgcgctggccaaccacctcatcaaggtcaagctggagggccacgagctgcccgctgacctgccccnnnnnnnnnnnnnnnnnnnnaagcgcaggcatgagtgatggcacctggccccgcacctgccatctgcacgcccggctgggaggcagagatggggggaggggaaggctcaccatttctcaaggtccataaagactgagcggatgtttcctcgcctctcgaaaaggaaaaccaccatctttattttaaggctgttcctgggcctggcgggggaggcaggggtgagatgatggaattttgtgcacaagaactatggatattttaatatataacgttagaggcagtgttctttgtcaccgcctcctctgtgtgacagccacatgtgcacagcctctgccccccaccggcctttgctctgctctggctgcagctggacagtgcagcgactgtgaccgcaggggagccaggtcgcccttttggcagctgctaggctgggactgcatggacaggaacaccgggcaccctccgtttgcttctgagctgaggttgcttcacggggccgtggcttccttcctcacccggctctgcctccccggggtctcgggcaaagtgggttcttgtgccttcccctccctggcccaggctccccgtgcgcgggccctgccctttcctcccacgccccaccggctctgatgcgccaccccgctcagcagtcacagaagcagggcccagcagcctttttcaggggtccagggagcaggaga

SEQ ID NO: 14302 - DNA, 712 bp, Macaca Fascicularis
  misc_feature (1)...(712): n = A,T,C or G
cagcagagacccaggtgcagggcgggctggtgaaggcccctctcnnnnaaggtggtagcaggaaaaggtccttgacttgatgaacttggtctgcctctgagccactggaggaagctgtgttttgagctagggttttttggcctaaagccagcatttcctcagtttccctttgtggtttaaaggatatggtatgctgcaatacatttcttccttcagatcctgccactgttttgttggcccacaactaataggacctcaaaataagnnnnnnnnnnnnnnnnnnnnnnnnnccttcctttgtactcttcattctggatgggcttgggcaaaacaggctcaggccaaaggcctcccaagctgtacttccactatcctgcaacagnnnnnnnnnnnnnnnnnccaagggtaaacaagcttgatttaggcactgctttatccaagggcttcacccgtgaaattaataaaacttacctgagtcacttgaaacttggttcccagaaaatacatttctggtttataaatctccttttannnnnnnnnnnnnnnnnnnattatctatccctgatgacgtgtttaaactgagtagcagaaaacagaggccacactttctgggaaattttaaaggaagaaaccatttttaatgagatgaaaatatttaatgaatttaaaaagctaatgacaattctgagaaaaggtttgggatgtatattgc

SEQ ID NO: 14303 - DNA, 769 bp, Macaca Fascicularis
  misc_feature (1)...(769): n = A,T,C or G
tgagtgcttctgtatgcaaggcactggggatacaaagaggtataattcatggctctgcccttaaggagctcacaatctagttggaaaaacaagacatatatatatacatacagaaatcattaacaacacagaggcctgaacaattgccaagtggacaacagtacagataataaagaagcaagaaacggggttcactaaaggctnnnnnnnnnnnnnnnnnnnnnnnnnnnnnnagtgggacttgaactggtattaaaaagaagagcatcccaggcaaagagaacaacactcacagctcagaggcaggaacacactctgcgggtctaagaaatgaagagttaaatgtggctagaatggaggtttggtgcggggctgagagagtaatactcgcgtacgcaggaaaggatgtgtttgttttacacatattgtatgtctgaggggctggcaggccttgcaagtgacagtgtctatcctctcagatttgggaggtcannnnnnnnnnnnnnnnnnnnnnnnnnnnnnnnatttcatnnnnnnnnnnnnnnnnttttcctaatgccaactctgtttcctgggtaggtgtttcactgcctgaatgaaatcctagatctctgtcacagtttttgtnnnnnnnnnnnncagaacctaggcccactggatgagcgtggagccgcccagctgagcattctcgtgaaggtgcgtctgcctggaagtatgcagccttgccgaaaggacagnnntggttttgtcatggagnatcatgatcttt

SEQ ID NO: 14304 - DNA, 494 bp, Macaca Fascicularis
aaaaaaaaaaaaaaaaaaaaaaaaaaaaaaaaaaaaaaaaaaaaaaaaaaaaaaaaaaaaaaaaaaaaaaaaaaaaaaaaaaaaaaaaaaaaaaaaaaaaaaaaaaaaaaaaaaaaaaaaaaaaaaaaaaaaaaaaaaaaaaaaaaaaaaaaaaaaaaaaaaaaaaaaaaaaaaaaaaaaaaaaaaaaaaaacccccctcaggaccctcgctggcccccactggctgcgggctcccttcctcccaaaagtagcgggggctggggcaggaggggaatgaggcaggtgacagtgaggtcctggggacctgacctccccctccttcccagctgcccctccctgccaacacccccacgccctcattacggctcctctccaaccacctttaccctcatctgtccggagaggagctctgtctgtccgtgttatttattgctacttcctgcctggtctcctgccccgacacctggccccagggcctgtacaaaagggacag

SEQ ID NO: 14305 - DNA, 730 bp, Macaca Fascicularis
  misc_feature (1)...(730): n = A,T,C or G
cttgtcctgtctggattctgcatctggaagcgctgcgtgcnnncagaggagcatgctcttttccgtgtagatggatagttttgttttgttgcctatttgaaaacaagtggttatttgcagttatttcagaactccaagtaagtggatggctttgggtgctttctgccttggtccnnnnnnnnnnnnnnnnnnnnnnnnnnnnnnnnnnncgggagcaggtgcgtgccagccacagctgccagacactgcagcgactgaccagctgccagaagattctggagccactaacattagttttgcacatattttcttgggagtgttacttgaatctatctcgaactgcagaaaaaattaaagatcaatagggagaaaaagttagacacaagtgtaactgttacataattttagataagaaacgtgagtcgtgtacataaggaaggtgggaacgtggtacagaaggctagaaggaattacaggtcttattcccctttcctcagtcctttgaagaaaaggacggtctcttgcgattttgtatatatcgtgttcaacacagccgctctctgtcctgtaaatagggaactaaaggctgtatgatttctcaagtgctgagttacacatcctgagtgagctttctgttaccatactttcacacgtgggctttatttctcactgtatgtttgatatgatattaccgtatnantttaagaaagcactaagatgtaataaagtg

SEQ ID NO: 14306 - DNA, 740 bp, Macaca Fascicularis
  misc_feature (1)...(740): n = A,T,C or G
annnnnnnnnnnncggggccacagctgctnncgtccagtggccggatcagcggcctatcccgggcatnngcatgtaccagatccagtacaacagctcagctgatgacatcctcgtctacaggatgatcccggcggacagccgctcgttcctgctgacggacctggcgtcgggccgggcctacgacctgtgcgtgctcgccgtgtacgaggacagcgccacggggctcacagccacacggcctgtgggctgcgcccgcttctccaccgaacccgcgctgcggccatgnnnnnnnnnnnnnnnnnnnnnnnnnnnnnnnnnnnnnnnnnnnnnnnnnnnnnnnnnnntcgtagcctcggtaatggtcttcatcttcgtgctgatgatgcgntacaaggtgcacggcggccagccccccggcaaggccaagactcccnnnnnnnnnnnnnnnnnnnnnnnnnnnnnnnnnnnnnnnnnnnnnnncccgcccacacccgccccgcccgcccctgagccggcggcgctcagggcccacaccgtggtccagctggactgcgagccctgggggccnnnnnnnnnnnnnntgggaccctagccaggcgccccccctttaaggcttctctggccccacggacagcaggacccggacaccctgtgggacctggcctcagactcaccaaattgctcatggtttttaaaactctgatggggagggtgtcggggacacagggcacaacaagaa

SEQ ID NO: 14307 - DNA, 526 bp, Macaca Fascicularis
  misc_feature (1)...(526): n = A,T,C or G
gccatactntgttacacaaaataatgctttttttgaaagtgtgtctctgcctgttcaaatcatattttatggcatcataggaagctttacgttgatcaccccagtgctgcttcactttattacaaaaggctatgtcattcgattgtaccatgaggccacaacagacacttataaagccattacctacaatgctttgcttgcagaaacgagtacattgtttcaccaggatgatgtgaaaattccagatgctacacatgtgtttaccacattttatgctaaaacaaaatcactgttagttaatccagtgctctttccaaaccgcgaagactttatccatctaatgggttacgacaaagaagaattcattttggatatggaaaaacccagtgaagagaaacagcataaagatgagaaatgagcctatttttaaatgtttgtgcttaaatgtgatttacgttttaatgtataataataaaatagccttttgcattctgttagtgactgattgttaaataatttgaattag

SEQ ID NO: 14308 - DNA, 704 bp, Macaca Fascicularis
  misc_feature (1)...(704): n = A,T,C or G
gcatcaatnnnattgtgtggtgctgtgnnnnnnnngagtcagtcctannnnnnnnnnnnnnnnnnnnnnnnnnnnnnnnnnnnnnnnngccatcatcacgttcatttggtcaccctcagtccagccagtgggcttactcttatttggcctattctcaggggtgggaannnnnnnnnnnncctccttctccttttgagaaaaccacagaactatgactcatgatttttcctttgnnnnnnnnnnnnttttcagctgggagtggtggggaaatgaggtctgatnnnnnnnnnnnnnnnnccttctggtttgtcccataggaatgtttttccaggtccttccagtctttttagaatgtggtggaggagggttgtgtgtgtcgcagggggtaggggttaggtgatgcagggaggatcttagcatttgttgttttctagtgcagtgctttagccacaattgtaaacaacaggaaaacgctctttagggatcctattagatttgctnnnnnnnnnnnnnnnnnnnnnnnnnnnnncatttcaaaaagaggttagactttcagacttcttttttctcaaacctcaaaacctccaccccaaacttcactctcagctggtgactttgcttccttatgtgtgtgtgtgtgtcagagaaagagagagagagagagaaaagggaggatgagaacgaatgggggaaagataaacttt

SEQ ID NO: 14309 - DNA, 787 bp, Macaca Fascicularis
  misc_feature (1)...(787): n = A,T,C or G
cttggcaccatgtctggctgtgcagcagactgtcagtactgggagcgcctgctggccaaggaatgcaggctgtactnnnnnngaaatggagatcgtatttcagtgtcggcagcctccaagctgctgtccaacatgatgtgccagtaccggggcatgggcctctctatgggcagcatgatctgtggctgggataagaagggtcctggactatannnnnnnnnnnnnnnnnngactcggctctcaggaaatatgttctccactggtagtgggaacacttatgcctacggggtcatggacagtggctatcggcctaatcttagccctgaagaggcctatgaccttggccgcagggcgattgctcatgccactcacagagacagctattctggaggcgttgtcaatatgtaccacatgaaggaagatggttgggtaaaagtagaaagtacagatgtcagtgacctgctgcaccagtaccgggaagccaaccagtaatggtggtggtggcagctgggcaggtctcctccgcgagggcttggccgactcagggacctgagccacgttaagtcccagaagaagaggcctagcctgagccannnnnnnnnnnnnnnnnnnnnnnnnnnnngaggtggtgacgtgcatcttctgcgtgttctctatctgaacaagtgtttcccccagggaagcttctgggtgccccactaagtagaataaagaaaaacggttataaatgcctcttgtggctgaatggggttgggcctgtggttgttgggtggggcaggaaaaaaga

SEQ ID NO: 14310 - DNA, 783 bp, Macaca Fascicularis
  misc_feature (1)...(783): n = A,T,C or G
cagggatgcctaagaaaacaagatggtatcaaaaggacaatttacaaactaagatagtaacatnnnnnnnnnnnnnnnnnnnnnnnnnnnnnnnnnatctacaaatctttcaagtcnnnnnnnnnnnnnnnnnnnnnnnnnnnnnnnngaacatgaatagannnnnnnnnncccaagnnnnnnnnnnnnnnnntttagatgagaagtccacacaacgaattgttagggaggattgggggagaagcagcccattgcttaatacattgaaaccctttccnnnnnnnnnnnnnnnnnnnnnnnnnnnnnnnnnnnnnnnnaatgattcttctgctcannnnnnnnnnnnnnnnnnnnnnnnnnnattatgagtgacagacatggaggcagaannnnnnnnnnnnnnnnnnnnnnnnnnnnnnnnnnnnnnnaatagcttttaaggttttactgttattttgtgattacaatgtcnnnnnngtttaagagggaagcaagcaatccaannnnnnnnnnnnnnnnnnnnnnnnnnnnnnnnnnnnnnnnnnnnnnnnnnctgcgagagagtagggcatcccttgtggtggaacctctatgtttaaagaaagaagaaaaaaacccagaatttggttgtagaaaacaatgcccacaacagactggccagtgcttagacaaatttggggtaggggggaacactttggtttgaagcacagagcagtttnnnnnttnnncgtctgtgcctaccatcctnnnttggcctcaacttctataagatnggggggacaa

SEQ ID NO: 14311 - DNA, 716 bp, Macaca Fascicularis
  misc_feature (1)...(716): n = A,T,C or G
aagtcacgtgacacgggggagacgtgaggtcgatggaactggccccgcacgggctctggaaggagatgatgcatgggtgttttcccggcaggcccccggggtcctcnnnnnnnnnnnnnnnnnnnnnngagagaaacgaaccgatggttgagggattgtcacgggaggaacacgatacccgaagggactctaggtgccctcggagcgcacacatgcccagaccttttcacacccgcacaannnnnnnnnnncanncactcctccacacacacacacacacacacacacacgcttgttcacactcagaacccaggacagcccacaggccctgcttaggggaagccactgcagatgccccaggaatgggcacagccaggnnnnnnnnnnnnnnnnnnnnnnatgacttgagagtttcctcgggcgccagggacagctcagaggcccccgaggtgtgtggaggaggcggaggcccgcagagcacagagcaggaggagagctcgggccctggaggagaaagccattctggacgccaggggacctggacggagggtcccccagcccctgccccacaccacctggacgccggaggggtcagtggcnnnnnnnnnnnnnnnnnnnnnnnnggcccggcttaaagcactaacccagcctccccctgtgacccacagggagtatcaagacccacccctcacactgcctacaccagtgacaccgct

SEQ ID NO: 14312 - DNA, 710 bp, Macaca Fascicularis
  misc_feature (1)...(710): n = A,T,C or G
tggtaggactgttgttcccagnnnnnnnannnaggccggccttggggtgaggtacccctcggtgtccccacctttgcattccactctgcaggccccccggagggaccacccagccctgtacagggacctgctaaggaccagccgcgtgcactggatcacggaggagccgcctgcagcgctggtccgggacaagatgatggagtgccacttccgattccgccaccagatggcactagtttgctgtgttctacaagggggannnnnnnnnnnnnnnnnnnnnnnnnnnnnnnnnngggccgtccgcctacacactccagaagggccagcacagaggtggggtggccatcgagaaccccagtgatggcccagaagacggcccaggcctgcgtcccttgccctgacagagacggagctgctagaaggaacctggagagcaggcccagggctgggtggnnnnnnnnnnnnncaggtccccaagggcccagctnnnnnnnnnnnnnnnnagannnnnnnnnnnnnnnnaagggtccgaaaagcctgcaggggcctcggcgagccccaggaagagcctcacctccaggctgcggctctggctgccagagcatctgctggctggtggggtggcccgagttccccttcaccacccccagggagggtttcccacctcagagcacaccgaggggacctgcaggggnnnnntgcagggacag

SEQ ID NO: 14313 - DNA, 738 bp, Macaca Fascicularis
  misc_feature (1)...(738): n = A,T,C or G
annttnnnttcaaatttcatgtgtctattagacattnnnnnnnnnnnnnnnnnnnnnnnnnnnnnnnnnnnnnnnnnnnnnnnnnnnnnnnntctggcagtgtcgaaaatagtaggagcccaaaactttgttcactgagtaagatgtagatttggagtcatcagcaagggaaacttgttaggtatcctttgtatctttttctatccatttgtattttttctttcccaaagagccgaaatcattttataccctgaatttaaaaggtaattgcttttttcctccttacgaaatcataccttaatttttttttcttttttaccatttatgatttattctcctgtgtgtcatatgaaaggccaaggggctttatcttttactaggaggcaagcctgggcatttctgcatttgtaccagctaacactacaagataaacttaattagagaaatttagacccagaattgcagcctcaacaacacaaaacaggaaagctagaagagattgctgtgtcaacctacgagatagtgattcttggaagttggtatggaccagaaagcattcccaggacatttaggctatggctgagttctctaagactcatggtgggagttataatccctggtcttagctgatgtgaaagtttctatgtgtgaaaatatggagttatatgttttgagattttctgccagttaagaaactaaaacaagatcgtactgtaaatgtttgtaactcacttcccc

SEQ ID NO: 14314 - DNA, 721 bp, Macaca Fascicularis
gatcctaccttgttacacatgttgggtttcctgataaaaagagagtattttattaaacctttgaaccagtgtcctagaccagatgatttttgcccatgtgcatccccatttaaatccctacaactaaggctcccagctttaatagtccagcagttgggttgtgtaacatcacacttcaaccagtagatggctctagtttcacacatttaattactaaagattgatgtttcagaatatttagaataaattcgttttctgctttctagttttgcagatctttacatttttattgcttttcttaaaataagggatagctttgcaaccactattgttttaatggaaagcaaaaaaccccccaaacatcagaatccttgttctttttcagactactgaaaaatgacatttactctgttaaatgtttaataaatgaataagtaaatgtatcaagttgtttatataataaattataaaactcgaggcatttggtatgttaaaaaattttaagatttaatatgatttaaaaatttgtaaatagttccaaagggcaatgttttctttaaatttcttatagtcttaattttgttatccatgtacataatttacctcatgatttcttttgaccaatcaggatctataacacaatatagaaattgtgtaataattattataaatgttaatacacttaactttcaagtaattttaactgattatttctttgctc

SEQ ID NO: 14315 - DNA, 718 bp, Macaca Fascicularis
  misc_feature (1)...(718): n = A,T,C or G
agaccacataggggtgcagcaggtgctggcgtaggcggcccagccctcccagagagacgtgactctggtggacgcagaacagttagttactatggatgnnnnnnnnnnnnnnnnnnaggaagagaagtaggagcggtgtttttcttgaagttttctttttcccacaaatgccactcttgggccaaggccatggtcccagtggctggcgtctggcgtctggcgtgagcttccctgaggcctgtgcgtctcctgaacacacagctcaaggtccacatctgcaaaagcctccttgccttcagctttctcagtattcagtttgtcaacgaagtgatggacgcctaaagccagtatatatactttgtggttaaaatacttgattccccctcctttgttttataaaaacagatgttttctagaaaaatgacaagtattaaaatgaaggaaaccctatgaaagaatggcaacagccggggtggctgggccctggcagtgggcggcggctgctggccgggcctgctgggtgtgccacagtcaccatagggttctgagaacatttcacagaagtgcctgagacacggagacacggctggtgtnnnnnnnnnnnnnnnagtagcagtgacgcgctctcagccaccaaatgtccctgacaccctccccagcccccagagataacatcagctgaggcttttttcactttgaacctgttctaaatcaactc

SEQ ID NO: 14316 - DNA, 699 bp, Macaca Fascicularis
  misc_feature (1)...(699): n = A,T,C or G
tnnnnncnnnnnnnnnnnnnnnnnnnnnccgacagctccctcactgannnnnaggagacccgcaggcagcctatgcccgaccctggcctgatgcccctgcctgacactgctgcggacttggattggtccaacctggtnnnnnnnnnnnnnnnnnnnnnngtccagagagcctcgttttttnnnnnnnnnnnnnnnnnnnnnnnnnnnnngagtgctgcatccnnnnnnnnnnnnnnnnnnnnnnnnnnnnnngcccagannnnnnnnnnnnnnnnnnnnnnngattcctctcccnnnnnnnnnnnnnnnnnnnnnnnnnnnnnnnnnnnnnnnnnnnnnnnnnnnnnnnnnttgaagaaggaaaaagaagacaaagcccaccttcaggcggaggtgcagcacctgcgagaggacaacctgaggctacaggaggagtnnnnnnnnnnnnnnnnnaagctgaagaagtnnnnnnnnnnnnncttcaacaccatagacatgagctagggaaggctgaggaggacaggagaagggcccggacactccctccagtgagtgtcctgcagcccttttccttccatagaaagcatcctcagagcaccttccctggcttcctactctgccccttttcggggagtgcacaacacaatagttgcagatcaacaatcatcacctgccttttgtnnaaaagaaaaacaaaaa

SEQ ID NO: 14317 - DNA, 735 bp, Macaca Fascicularis
  misc_feature (1)...(735): n = A,T,C or G
gaaaaagcacatgacagccattcagctgatccaatttgtcctggtctcactgcacatctcccagtactactttatgtccagctgtaactaccagcacccagtcattattcacctcatctggatgtatggcaccatnnnnnnnatgctgttctccaacttctggtatcactcttataccaagggcaagcggctgccccgtgcacttcagcaaaatggagctccaggtattgccaaggtcaaggccaactgagaagcatggcctagtaggcgcccacctaagtgcctcaggactgactgcaccttgggcagcgtccgtcagtgccctctccacctacacctgtgaccaaggcttatgtggccaggactgagcaggggactggccctcccctccccacagctgctctacagggaccacggctttggttcctcacccacttcccccagccagctccagggatgtggcctcattgctgtctgccactccagagctgggggctaaaagggctgtacagttacttcccactccctgccttaaacttgggagaggagcactcagggctggccccacaagggtctcgtggctttttttctcacagaagaggtcagcaataatgtcactgtggacccagtctccctcctccaccccacacgctgaagcagtagcttctgggccaaaggtcagggtgggcgggggcctgggaatacagcctgtagaggctgcttactcacttgtgt

SEQ ID NO: 14318 - DNA, 929 bp, Macaca Fascicularis
  misc_feature (1)...(929): n = A,T,C or G
acctccaaatggaagtgacacccccaatccagaggaatatcaagnnncatctggaatnnnnnnnnagacaagacataaagagggggctagccagagagctaagcagagccggagaaacctacctaggcggtcttcctttagattgcagactgaannnnnnnnnnnnnnnnnnnnnnnnnnnnnnagggaaacacatctgagtttttctgatacctatcaggattatgaggagtactggagagcttactacannnnnnnnnaagaatattatgctgccgcttctcattcatattattggaatgctcagagacatccaagttggatggcagcttatcacatgaataccatttatctacaagaaatgttgcatggtaaccagtgattgnnnnnnnnnnnnnnnnnnnnnnggaactgtcaacaaatgatacctttggatatccatcctccttgacttatagtacagtggtgtnnnnnnnnnnnnnnnnnnnnnnnnnnnnnncttgaggctttccactgggacacatccatttttcagattgttttgatttaggccaggtatattatcttcatttttaagagtttctttaagaaacttcatnnnnnnnnnnnnnnntaatttttgggacatagagctgaaagttnnnnnnnnnnnnnnnctataagatcttcccaaaagaaacatttaaaaagatgacatatataccactnnnnnnnnnnnnncaataaaaannnnnnnnntgagcagtaatgttagtttgctgtggagttctttacaaagggcttaggctgcatttccttctatagtnnnnnnnnnnnnnnnaatttgtggcatggtagatcagaaaatcctcttaggtttaggcaggagggaatatttaaacattgttttagattttcgtaaaggtatttgatttgatctgtttgcttcc

SEQ ID NO: 14319 - DNA, 776 bp, Macaca Fascicularis
  misc_feature (1)...(776): n = A,T,C or G
ttttcccgcccacctnnctncgcacataggcatttgtttgcttccatctttttttatgcagtgcctgtttttttaaccaattaatatcccttttgttgatgagctattgagagctgcagtagtttgcttttagtattgttgttgcacttgagacaaacctttattcatagtgtctacaggacatatgaagagtgcgatggcaaaacaagagcaaaaagcacttcctcccatgaccttnnnnnnnnnnnnnnnnnnnnnnnnnnnnngacattccatcattgcaatagctcacatttttattcctgtctttttctttgcacaccagctctactctttagtaaaattgtaaaaggctgccattatggacattaggtatcccaacataaccatctggagtgtgtccagtttgttcttcataggaccaatttttatttgcagcttgagtttttatatgaagttgcattattgtggacttggctgtcttgtgatgaatttttttcatatgtattctgtgccatactattgtcaaaatgnnnnnnnnnnnnnnnnnnnnnnnnnnnnnnngacctattaagggtttctttcgaatggcactactttagggacattctagtatttgcttctattgtttgggccttgtggataatgtacagatttaaaaacaaatcttgttgctgatttgtccatttctttccctgcactttgttacatctgggatacagtctaactcatctgatttaatatgcatttaaaaaaatgccataactattaaacac

SEQ ID NO: 14320 - DNA, 728 bp, Macaca Fascicularis
  misc_feature (1)...(728): n = A,T,C or G
tgaatacaaggactgccattgcatannnnnnnnnnnnnnncctgttccagctttctcatttgtaatataaagataaaatcatatacctcaagactctattgtaagaattaaatattttaaagactttataaaactaaagtattcaatatacttaattattgctccatgagaaaagagcagacaatttatgacaaaaagggccaacaggattactattaaaggccctggaaaggaagcacaacctcacaagccagatccagacagtaatagtaccaaaaggagttaaaagaaatagcatttgctccacagattttctcacatttaatttaaaaagttaaagaaaatgttcatgaaaagttattaaacattatactaaaattcaaacaaaagaaaacatatcttgaagaaaagttttcagagtgtgacctctactggctgtatacactactgcaaataactggagttttgctcaattttcgcatcatttgggcatatgnnnnnnnnnnnnnnntttcgtctgtgctacagactgaagatcttaaatgctcatttaaatgttatagcggaggagtaatagtgtgtggaccttctaattcagaaatgcatgtctccttagttgccaaggttggccaaaacatgttagggtccagaaatgatgattcccttgaattatatgacataaaaagtatttactaatgggaaatcaaagcacattctaaaaacaataa

SEQ ID NO: 14321 - DNA, 736 bp, Macaca Fascicularis
  misc_feature (1)...(736): n = A,T,C or G
aaaggaccagggacatggaaccaagccataggatcagagggctttgtccttgaacactactggggtnnnnnnnnnnnnnnncacacaactgctgggttcttgccctaacaaccctcccctgcaacatccgtcttggaggagagactgcagccacaaaaccctaactgccctttaaataaaggagggctatgggcagggccatgtccctttctcctctcccctcaacctcttactgctgttctccctttctctgtccttcatggannnnnnnnnnnnnnnnnnnnnnnnnnnnnnnngatggaatagaggttggggtgnnnnnnnnngtttttgggggtgaggaaaaaaacccacagggaccagaatgttttcttgttgttttgttttcttttttgtaccaaagtcaactgcacgtgttttatatttttaagagatcgtaggcaattagaaatcgaagcctcctatctccacatctctgaagaagttgaggggtaggggagacaatgacttctgccttcatctgcagtaacggggggacctatactgacctattccccagccatttggaaacaaattctagggtgggttgggaaatctccaggagccctgacctcatcttccacctcagcaannnnnnnnnnnnnnnnnnnnnnnnnnnnnnnngatttttcaatggaacccctgcccnnnnnnnnnnnnnnnnnnnnnnnnntgttttttttttctgccaattttg

SEQ ID NO: 14322 - DNA, 778 bp, Macaca Fascicularis
  misc_feature (1)...(778): n = A,T,C or G
gtgannnannnnnnnngaggnnnnnggcagccacagcggcagcgaggagcggctggaggccaccgcccgggaggacggggacgaggacgacccggcccggcagctctcaggattcaacacaaaccagtccaacaacgtgctgcaggcnnnnnnnnnnnnnnnnnnnnnnnnnnnnnnnnnnnnnnnnnnnnnnnnnngcagggagaggcggcctgagttagtgtgagctggggcggggccgggaccacaggtggcttctctctcacctgctcctgtccctccaggggggctctatgcgccgtcctggggtcccgtcctggagtcgctgctgagagcacctggacttggttgtcctggcagcacgcgccgcctcccggaagcttccaggagcacaagggccgcggggtgtgccctgcgctctcccccgcgccccggcccagctgagctgagaacactgctgtctagtgaagtcgcggtggccgtgctggtgcccacagggctgtgtggatggagggagctgaccgcatgccccggtcatcacagggacggcaggccctgccccgcctctcaggtctgttgcagggactccggaaaccgttctgggagctgtggatgggggcggaggctggggtctggtgcggtgtccagggtgcagtacggcagggcctcaatactggccctagactcccttttccagaacaccaggtatggccacctggggcttaggtacacagtggggcctctcggaagccaccgtgtagctttcacaggcacgtgt

SEQ ID NO: 14323 - DNA, 763 bp, Macaca Fascicularis
  misc_feature (1)...(763): n = A,T,C or G
agagatccatgtatagatatnnnnnnnnnnngaaaatggtgtgnnnnnnnnnnnnnnnnntgagtttcgatgttttgtcaaggaaaacaagcttattggtatttctcaaagagactacacacaatactatgatcatatttctaaacaaaaggaagaaatttgcagatgtatacaagactttttcaagaaacacatacagtacaaattcttagatgaagactttgtgttcgatatatacagagacagtagggggaaggtgtggctcattgattttaatccatttggcgaagtcacagattcaatgatgttcacgtgtgaagaactgatatctgagaacaacttaaacggcgattttagtgaagtagatgctcaagagcaggattccccagctttccgttgcaccaacattgaagtgacagtccagcccagcccctatttgagttaccggctgcccaaggactttgtagacctgtctacaggggaggacgctcacaagctaatagacttccttaagctgaagagaaatcagcaagaggacgactgatgagcgtgctggagctggagaagaggaggccccgccccgccgctcgggagctgctcatcagccgcagcttcctgccaaccctgatgcgggcgggccaggcagtgtgnnnnnnnnncgctttttatattcatgtacatcacctggggaaaaaaacagagggactttgctacttgtaaaaataacataataaatagatcttaagcataggaaatcatactg

SEQ ID NO: 14324 - DNA, 659 bp, Macaca Fascicularis
  misc_feature (1)...(659): n = A,T,C or G
tnntcctgggcgnnnnnnnnnnnnnnnnnnnnnnnnnnnnnnnnnnnnnnnnnnnnnnnnnntacgtgcggaccgctgtggaccagcacctggggccaggcgccgtggtgatgccccaggcagcctcgctgcacgatgtggttgtggagttcagggacctgtggcggatccggagcccctgtggtgattgcgaaggcttcgacgtgcacatcatggacgacatgattaagcgtgccctggacttcagggagagcagggaggctgagccccacccaatgtgggagtaccagtgccgcagcctctcagagtccgggcagatggtggcctttgannttcggcaggtggtgcccccacggcccgtgtgtgccgagggcaccatggagctcaggaggcctgggaggagccacgcagcagtgctgtggatggagtaccatccnnnnnnnnnnnnnnncgctcagcactggcctcctggagcctgcagaccccgagggaggctgctgttggnnnnnnnnnnnnnnnnnnnnnnnntnnnnnnnnnnnnnnnncctggatccnnnnnnnnnnnnnnnnggcccgcagacggtcagctatgtggtggannnnnnnnnnnnnnnnnnnnnnnnnnnnnnnnnnntcaggcttgcagacaccccagactc

SEQ ID NO: 14325 - DNA, 739 bp, Macaca Fascicularis
  misc_feature (1)...(739): n = A,T,C or G
tgtgatcacagcccactgcagcctcganctcccgtgnnnnnnnnnnnnnnnnnnnnnnnnnnnnnnnnnnnnnnnnnnnnnnnnnnnnnnnnnnnnnnnnnggcctagacccttactcttgctgttactttccatggannnnnnnnnnnnnnnnnnnnncgcacgttggctcacacagctctaggggcctgctcctctaagtcacagtggcttttgtgaggattgcttggcccagagaagacctgcacatctgaacaaaaacagcacaggcctgtctctcaacccactggcctgaatctacactggaaccaacttgctggcacccccgctccccaacccttcttgcctgggtaggcaaggctaaaagatcaccctacatttactcatctcnnnnnnnnnnnnnnnnnnnnnnnnnnnnnnnnnnnnnnncacnnnnnnnnnnnncacctctctcttcttgcaccgtccccagacttgctgtcaattcccagatctaatctccccctacgctctgccagggattgtttcagacctcactggcccaggcccagttgctccttgtcaggagaatttgcagatcattcttactctaaattcctggggctgatacttctctgtcttgcaccccagcctctgtaaatagatttaccgcattcacggctgcattctgtaagtgggcgtggtctcctaacagaggagtgttcattgtgtaataagttattcacctgagtatgcaata

SEQ ID NO: 14326 - DNA, 780 bp, Macaca Fascicularis
  misc_feature (1)...(780): n = A,T,C or G
gcaacagacgagatttgtttgtaaagttttgtagtatattaaccattggtttatgactctagattcaacatattaaaannnnnnnnnnnnnnnnnnnttttaatcagtaaagcccatctatattagttcttttatttcttctccttgttgacagctgttaattaaaggagtaaggatttccctgtttgtttgttttttaaccaaattcttagagatgctatagaatctaaatgagaactgaattgaaccttaagtctcctattcctactaatagagttctttgtgatggtaactgctgtgtcatttgttttccacaagttgggatggattcatgtcgatccattcccatgtccttgacctcttctggcattcttttgtgctctgacaaactgnnnnnnnnnnnnnnatctacatgaataaacgaactattttaccaagaaaaatctcagcttgctttctgctaattaaaaacctacaatttacacacctccctgccttcaagactgtgagctttagatagccctgcttaaatgtttgtcaacaacaagagtcatgtaatgtgtcannnnnnnnnnnctcctttgaaatttaactctttctatgttacatgaattgttttaaggnnnnnnnnnnnnnnntttattcacttccatgagaatggtgccaagtgtcagactttgatgagccctcagctcaggttttaatttctattgaatgctaacattcttctgattttttggtatcttttatatcggtttctgctgtattaatgacaattat

SEQ ID NO: 14327 - DNA, 563 bp, Macaca Fascicularis
  misc_feature (1)...(563): n = A,T,C or G
gccagaaagcccagaggcgcatagtgcnagtgcacnnnnnnnnnntttacattnnnnnnnnnnnnnnnnnnnnnnnggaaactcannnnnnnnnnnnnnngaaagggccttgtgtttatagctttgtcaagtaaatttggacgcagctggnnnnnnnnnnnnnnnnnnntgcacataaaaatattgtttatcacttttaaaaattcagtaatatctcagcggtcaggattctggttgtgaaatcacatcgtatgggatttataccaaattatgtatttgctaaactttcgctccacacgtgtacagcagagtacaaaaaggaaaattgtccatagggggcttatggatacaacagcaaacatcgtataaattatgcacatgtatgtattacacacatgcacacatatatgcacacacatgtgcaaacatagccacatttttgtcaagggttaccctctgtggcttcttaaaccagaatgggagtttgaaagagagatcatactccagctgaagtttgttgaccctcttctaaaattaaaaagatcaaatttagtatttgcggg

SEQ ID NO: 14328 - DNA, 709 bp, Macaca Fascicularis
  misc_feature (1)...(709): n = A,T,C or G
catctctcctggcctcnntgcacttcttcccgcctcccaaattctctggacctccaccctggcctcctcccaacttccattgtcttggcatctctcaaccctcagtcctctcctccttcccttatcatctcccctttcctctccacgtccctcccccttcctcttcctgcctcctcatctcccttaagcatcctcttctccaacctcccgtcaccgtttactctgcaaaaatgacagcacttagatgaggcttgggggcgggaagcagtgttgggagagggctccccaacccggggctccgactgttctctgctgggaccacccagggtcggacacccaagggtgtcttgcaggtcgtagagctggcaagccgggcctcgtgtggggactcgggcgagggtggcgagcactggttccgaacgcacgcaggggagaagggagggacgcggcgctgacccctccaggtcagctggagttgacccgcccacctgggcttttcaaccccagtccacgagttttttcttgaaggtgtcgggctagattcattcacgtgcttcgtaacgaaagaatccaaaaaaataggaccaaagcgcccactggcaggagcgagggcggggcggggcgctctataattattttataagctagaacgggggaggtattctgcacgcgacatcccgctgaggaggcgggcaccgagctacaacgc

SEQ ID NO: 14329 - DNA, 722 bp, Macaca Fascicularis
  misc_feature (1)...(722): n = A,T,C or G
gcagcacgnnnngctgccagccnnnctgctgtggnnnnnnnnnntgtggccaaaccannnnnnnnnnnnnnnnnnnncagaccagctcctgtgcacctgtctactgcagaagaacctgctaccaccccacatgtgtctgcctgcctggttgcctaaaccagagctgtggatccagctgctgccagccctgctgccgcccagcctgctgtgagaccacctgctgcaggaccacttgcttccagcccacctgtgtgtccnnnnnnnnnnnnnnnnnnnnnnnnnnnnnnnntcccaagagaaccaccgtcctcacacaagaactttctgctcgactgactgatcttttgggggactaatttactttgctgctgacagccaccatgctctcacccaaatttttatgaattctctgcgtgtataaatcttgggaatctgcttcagggacagcaaaatacttcatcctgattctccttttccttccaccttgtggatcatgtgccagcttcgtgtgttctnnnnnnnnnnnnnnnnnnnnnnctttnnnnnnnnnnnnnnnnnnnnnnnnnnnnnnnnnnnnnnnntttaggtttctgcgattgatcaataatctttgcaattgtatttttgttttcaatatcttccttatgtttcttgtatccttctttcttgtgttcatgataactttgggttatgtccctggtagcagaagttcttagctatat

SEQ ID NO: 14330 - DNA, 830 bp, Macaca Fascicularis
  misc_feature (1)...(830): n = A,T,C or G
ggcccatgaacannncccnnnnnnnnnnnnnnnnnnnnnnnngcctccactttgcacctccggaattnnnnntagagnnnnnnnnnnnnnnnnnnnnnnnnnnnnnnnnnnnaaagttggnnnnnnnnnnnnnnnnnnnnnnnnnnnnnnnnnnnntctgcncccaagtgcggcgcacgcgcgacggttttttcacgctcgacagcgccctcctgaggacccagtgggannnnnnnnnnnnnnnnnnngctatccgggctnnnnnnnnnnnnnnnncttcagagctggagaagagcttgggcccgcagctggacaccaaggagctcccnnnnnnnnnnnnnnnnnnnnnntcccagggcccgagctctaccttggtgccggagaggggtgcagggcactgaatgcccaggcagctgctggggcagtgaatggataaatagaagagctgctctgagctcgacctgatagctgtgcagaaagtgagagacagagagcaccttttatacgtgtgacaagaaactcaagctgtaacagaaagatcaatggacttgacccaactgaaaaggaaaaacttctgtatggaggaaaagacagtaaacaaatgacagactgatagaaagtactggcaggccaggcgtggtggcgggcacttgtaatcccagctactcccaaggcggaggcaggagaannnnnnnnnnnnnnnnnnnnnnaggttgtagtgcgctagacggtgcctgtgaatagccactgcactctagtctggggaacatatgagatccccccaaatctcaaaaaaaaaaaaaaattcccaataaactatgtgcccataa

SEQ ID NO: 14331 - DNA, 741 bp, Macaca Fascicularis
  misc_feature (1)...(741): n = A,T,C or G
gtaagaagagagnntnaaaannngagtgacatacgggaccttccactgaagctacagagttcacagaaggcaattttgcaatcttggcgttgggtggtggctacctgcattggggccacttnnnnnnnnnnnnnnnnnnnntcaaccgctctatggaccccaagaacatgtttgccatatggcgagtaccagcccctttcaagcccatcactcgcaaaggtgttgggcaccgcatggggggaggcaaaggtgccgttgaccactacgtgacacctgtgaaggctggccgccttgtagtagagatgggtgggcgttgtgaattcaaagaagtgcaaggtttccttgaccaggttgcccacaagttgcccttcgcagcaaaggctgtgagccgcgagactctagagaagatgcgaaaagatcaagaggaaagagaacgtaacaaccaaaacccctggacatttgagcnnnnnnnnnnnnnnnacatgctgggcatacggaaagtactgagcccatatgacttgacccacaaggggaaatactggggcaagttctacatgcccaaacgtgtgtagtgactgtaggagataactgtatataggctattgaaagaaggattctgcatttctattcccctcagcctacccactaaagtctttgggtagctcttatgccataactaaggagcagcatatgagatgatttctgaaaaacaatgttatttgttgatttaaaaagaaaact

SEQ ID NO: 14332 - DNA, 713 bp, Macaca Fascicularis
  misc_feature (1)...(713): n = A,T,C or G
atgnnnnagatcaagcgcaanntnnnntatggagacaacagcgacnnngccctagaggcatcctcgctgcnnncacccgacccctggcttgagacctcctccagctccccagcagagccagcacagccaggggcctgccgccgagacggctactggttcctaaagctactgcaggcagaaacggagcgactannnnnnnnnnnnnnnnnnnnnnnnnnnnagaccaaagagaacaacctctctgaagaagtcttaggaaaagtcctcagtgcggtgggcagtgcccagctactgatgtcccagaaatnnngcagttccgggggcctctgtgagcaaaacttgaaccctgatgccaacccacgccccacagcccagnnnnnnnnnnngttctgggacctgctacagctgtccatcgaggacatcagcatgaagttcgatgaactctaccacctcaaggccaacagctggcagctggtggagacccccgagaagaggaaggaagagaagaaaccaccccctccggtcccgaagaagccagccaaatccaagccggcagtgagccgcgacaaggcctcagacgccagcgacaagcagcgccaggaggcccgcaagagactcctggcggcgaagcgggcagcttctgtgcggcagaannnnnnnnnnnnnnnnnnnnnnnnnnnnnnnnnttatgtcccggaggcccagaccaggct

SEQ ID NO: 14333 - DNA, 689 bp, Macaca Fascicularis
  misc_feature (1)...(689): n = A,T,C or G
tgtactttgccctcagcatctccctncatgtgtgggtcacgaacttacgctggaaaaactccaacagcttcatatggacagatggacttcaaacgctgtttgtattccagagactagcggcagtgttgtactgctacttctataaacggacagccataagagtaggcgaccctcacttctaccaggactctttgtgggtgcgcaaggagttcatgcaagttcgaaggtgacctcttgtcacactgatggatacttttccttcttgatagaagatacgtttgcnnnnnnnnnnnnnnnnnnnnnnnnnnnnnnnnnnnnnnnnnnnnnnnnnnnnnnnnnnnnnnnnnnnnnnnntgttcagcactcaagaaggaagatattccctcttgcaaatcagagagtccccatcggtctccagagcagcataccttccctgcctcttacatccgttccaccccccttccctcctttcctctctgtaccactcattctccccgacccgcccttcttgctgaggattctgtggctcttacccctgtgaagatcttcccttagcctgggacagaaggacctcccagccccaaaggatatcnnnnnnnnnnnnnnnnnnnnnnagtgatagttacatnctactgaccgatcacaccgcagacatttagatttttataaccnnnnnncacttttaaaaa

SEQ ID NO: 14334 - DNA, 1047 bp, Macaca Fascicularis
  misc_feature (1)...(1047): n = A,T,C or G
agagagcagnnaccagacttggaatcccagtatccaggctcagggagtactcctccaaaccagcnnnctggtgaccctccacagcccaaccctgacagcactgctgcccagaaagttgccacaagtcccaagagtgccctcaagtctccatcttccaagcgcaggacatctcagaacttaaaactgagagtcacctttgaggagcctgtggtgcagatggagcagcctagccttgaactgaatggagaaaaagacaaagataagggcaggactctccagcggacctccacaagtaacgaatcaggggatcaactgaaaaggccttttggagcctttcgatctatcatggagacactaagtggcaaccaaaacaataataataactaccaggcagccaaccnnnnnnnnnnnnnnnnnnnnnnnnnnaccnnnnnnnnnnnnnnnacaacagatgccaagggaaaccctgccagctccactaacaaaggaaagaataaggcagcataatgacatcaatagaaaaatgaagaaatcctacagcataaagcacattgctgagccagagtcaaaagaactcttcttgtaaatcactttttaaattttctctcactgatgccctttggacactagtggaaatttctggatatcctctatggaaagagaannnatgaaannnnatgcctcanncagcagaagaacagaatatcaggatgccttaaatttatagtagactgtaaaagattccttttggggtgatatctgtatatataacttgtgtttttttttaaaaaaaaaaaaaaagatgctgtttaaaagcatgattgggaaaatgtnnnnnnnnnnnnnnnnnnnnnnnnnnnnnnnnnnnnnggacgttgaccaaaccactgatgccattttatatttcatcaattgcatgagtatttgctaatgttgattgaacctccctttccccgtaatgtggnnnnnnntgnnnnnnnnnnnnnnnnnnnnnnnnnnnnnnnnnnnnnnnnnnntcaagagttgttctttctgtcatttctactt

SEQ ID NO: 14335 - DNA, 681 bp, Macaca Fascicularis
  misc_feature (1)...(681): n = A,T,C or G
tgccaaaagaccagaaccagccgccgtgccnngtnccctcagaagcccaagaaacagccanntgcgccccccgcggtggtcagagcgccagccaagccacggtccccnncgaggtttgagcgtcagccacggtccccttcgaggtttgagcgtcagccacggtccccttcgaggtttgagcgtcagccacgcccccgcccagaggtccgaccaccgccagccaagcagcgtccccctcagaagtccaagcaacagcagcgcagcagccccctcagagggccaggcgccagttgtggggggtcccccgtcaaagcttttaggttttggtaacaccattttttcccttttgttccccnnncctaagattgaaaaggaagatcaggccaaccccaaaaaagaagtgatcaaggaagagtttaaagtgaatgaacggccttggcttctggactcattgcttcacaactcatttacccttggatgnnnnnnnnnnnnnnnnnnnnnnnnnnnnnnnnnnnnnnnnnnnnnnnnnnnnnnnnnnnnnnntcatggtccccatggcctgggggcctcagggcagcctgcctggagcactttgaagatgtcatcccattgttttttgacctctgtaattgccacggagagatttgctgtcagtttgcttatccttccatggactcaagt

SEQ ID NO: 14336 - DNA, 775 bp, Macaca Fascicularis
  misc_feature (1)...(775): n = A,T,C or G
cagaagttgttttnnngnttnnnaaaataattcntnnngcagaagaggtaagactgagacaaaaggtgtnncntctggtgtgctgctggaagtgtctactctacatttgtgtcagctcagggttgcagtgtgnnccannnnnnnnnnnnnnnattgtaaagggattnnnnnnnnnnnnnnnnnnnnnnttggctggnnnnnnnnnnnnnnnnnntaatttacaaactcccccactttattttgtgctatgtagatctggtcatttgactgtcttgcgttaaccacactttaagcaactcacaaatttcttcccagatttgtttcctagattnnnnnnnnnnnnnnnnnnnnntctcagtaagagtgtcttttctttctgggatgtgttctctcactccctcttaccaccatgctttttgccctcttctcctgcaagcatagtcttcacagggagtggcttccttcctaactttttttttttagttatttgaatgannnnnnnnnnnnnnnnnnngcaaacactgtttttccaaaaggctacactcagaacctaaccattgccaannnnnnnnnnnnnnnnnnnnnnnnnnntttactttagcattacttatttttttccatttgatggttcttactttgtaaaaatttaaataaatgaatgtctatactttttataaagaaaagtgaaaataccatgacactgaaaagatgatgctatcggatgctgtttagaaagcatttatcttgcatttctttattctttctaattatctaa

SEQ ID NO: 14337 - DNA, 734 bp, Macaca Fascicularis
  misc_feature (1)...(734): n = A,T,C or G
gtgcaacagcttataganccnnagcttaagaaataaaccaatcaccaattccaaattgcatgaagaggaaccacctcagaatatgaaatcacaatcaggaaatgataagccattatcaaaaacagctcttaaaaatcaaaggaagcatgaagctaagaaagccgcaaagcaggaagcaagaagtgacaagagtccagatttggcacctactcctgccccacagagcacaccacggaacactatctcnnnnnnnnnnnnnnnnggaccttgagacagacaaaaaatcaagaacctaaagaagaaactgaaagcaattgaacaactgaaagaacaagcagcaactggaaaacagctagaaaaaaatcagttggagaaaattcagaaagaaacagcccttctccaggagctggaagatttggaattgggtatttaaagattcacagaaagcnnnnnnnnnnnnnnnaatcagtgcaaacacatcttctgttaaacccattggtatacacagaatattcctgttctcacacttaatgtcaatctataattttaaccacttatctaagattctacataagtaaaattatttaataatgtctattgaattgatatttatatcttgcatcctatatcatgtcaatatgtgatatagaaaagagatacatgaattttttagctaagcttgacagattgaaagacaagtgtcatttttttgtggagtgtgatatnaccatata

SEQ ID NO: 14338 - DNA, 663 bp, Macaca Fascicularis
  misc_feature (1)...(663): n = A,T,C or G
gtccacattgctcacagggactgggatgacgatgcctgnnnnnnnnnnnnnnnngagaggctggggatgactcctgctgagannnnnnnnnnnnnnnnnaaaggggagaagtttggtcgaggagtgatagcgggactcattgacattggggaaactttgcaatgcnnnnnnnnnnnnnnnnnnnnnnnnnnnnnngaactagagaatcaagctgtactgaccaacctgaannnnnnnnnnnnnnnnnnnnnnnnnaaccccaggtggttactggagcccatacctaggaaaggaggcaaagatgtattccaggtagacatcccagagcacctgatcccttcggggcatgaagtgtgacaagtgtgggctcctgagaggaatgttccagagaaaccagataaatcatgacaccttcaattcaccatcatgacgcagacctatatacattaggttaaatctgaatttccactgctttggagagtcccacccactaannnnnnnnnnnnnnaacaggtttcttttctcagatgaaggaagtagggggaggggctttcctggtgtgatgccttcttagacacacaggcaatgtctcaagtactttgacctttgggtagaaggaaaagctgccagtaaatgtctcggcactgttgctaattttggtcc

SEQ ID NO: 14339 - DNA, 801 bp, Macaca Fascicularis
  misc_feature (1)...(801): n = A,T,C or G
agtgtggtacaacttcttccgagcctggaacggaggcnnnnctggaaacctggaaggagaaggcttcatccttgggggagttttcgtggtgggatcaggaaagcagggcattcttcttgagcaccgagagaaagagtttggagacaaagtaaacttactttctgttctggaagctgctaagatgatcaaaccacagactttggcctcagagaaaaaatgattgtgtgaaactgcccagctcagggataaccaggggcattcatctgtgttcatgggatgtattgtttccacttgtgtccctaaggagtgagaaacccatttatactctactctcagtatggattattaatgtattttaatattctgtttaggcccagtaaggcaaaatagccccaaaacaagactgacaaaaatctgaaaaactaatgaggattattaagctaaaacctggaaaatacaagccttaaaattgactgctgggcnnnnnnnnnnnnnnnnnnnnnnnnnnnnnnnnnnnnnnnnnnnnnnnnnnnnnnnnnnnnnnnnnnnnnnnnnnnnnnnnnnnnnnnnnnnnnnnnnnnnnnnnnnnnnnnnnnnnnnnnnnnnnnnnnnnnnnnnnnnnnnnnnnncaggcacctgtagtcccagctacttgggaggctgaggcaggagaatcacttgaacctgggaggtagaggttgcagtgaaccaaggtcatgccactgcactccaccctgggtgactgagactccatctcaaaaaaaaaaaaaaaattggttgctgtgcctcattacaaatgca

SEQ ID NO: 14340 - DNA, 708 bp, Macaca Fascicularis
caccccacagctgtgaagcctctcatcagagcttctggcagtttcctcaccagaagtggacaagtccagtcaggcagtcgtcatgccacagcagctcctgatcaccctgcctaccaaggccagcacctgggtgaagttgcaacatccaaagaaggccacggagggggtgccgctgtgggaggatgtgactaaaatgtttgaaggaaagggtgagaatggactgatggaggggggaagaaggggatctcatttgtgtgggaaaagatgggtacacacttcattgaagtggagagaaagagggagagaaggttctttgtgggttcatttcttgtggtttttgggaaggggacagctgtgagggaaaatcttgggttccagcatggactccttgtgacacgtgctttcagctgctctcatcacccatcttcagatactacatgcggcaggaagacagaacacaaggtgttctccaccagtggtgcctgagtgtgggaatgtgattcacagacaggggtctaagatttctgccctccttaagtcctctaagggttttccggcacaggttccaatggttttcaccccaacccaatatttatcacaagtatcatcgttttcatctgctgagaggcaggaatgacatgccagattactctcatgttatcctgaactgtgggagtgatgccccaaaatcacacccttctttagtgg

SEQ ID NO: 14341 - DNA, 683 bp, Macaca Fascicularis
  misc_feature (1)...(683): n = A,T,C or G
gacnnngaactttcttaagaaatgnctgatnnnnaggacnnnacacaaccaagggtacacacaggcatgcacgcgtttcttgcctggcgacagatgaagccagcccccgactgacctggccacactgctctccattaacacagatgtgtgctcttcatcttgaacttgggtgggaaaccccacccaaaagccccctttattacttaggcaattccccttccctgactcccgagagccagggccagagcagacccgtataagtaaaggcagctccagggctcttctaggctcatacccgtgccctcacagagnnnnnnnnnnnnnnnnnnntcctgtgtctttcgtccctctacatgtctgctcaagatattttctcagcccgaaagcttccccagccatctgccggagaactcttatgcatccctcagaaccctgctcagacaccattacttttgtgaaggcttctgccacatcttgtcgtcccaaaaattgatcactcccctttctcgtgggctcccatagcacactataacatctgctggagtgttgctgttgcaccatactttcttgtacgtttgtgtctgcctccccaactggactgtgagggccttgtggccagggagtgagtcttgcccgtttatgtatgctccgtgtctagcccctcatntcgctgaagcaagtag

SEQ ID NO: 14342 - DNA, 683 bp, Macaca Fascicularis
agggcatcagcagaagctgagatagagatattggtcatggttgactgtggagccaattaaaacctgtttatgcctagtgttccattattggaacgctaagcatgtgggagttatttatatcctactgctcaaggtcactgccaaggtctgattggaaaaattcaaaaaattgcaaccttaggcgtaaatgggttaaggacatcccaagcccacgtggtatgtgcctcactcagaactgacgggctgagttctatctagtctgtcttccagaacctgtttatggaactaactggataactgagacacttgtcatttctaaagacatttaagttgttccagggatttctgaacaaagacacagccttcctcctacagccagccctatataacatgcccacaagggcaacatttatcacagttaatacatgcctttcatgtcctgtctcactcactcctcacagccatcctaggagatacatactgttttcatcctgcagaaacagaaacagaaatgaaagcagagagcttaagtaatttgccacatgtgatgtcaaaactaggcctttgaaccaagacagtctagggtaaaatatactttcaaaatatgaataagaattggtatctgtgttatctttgagtaagaaactgtctgatatgaatcacaacatggatgaatgtagtat

SEQ ID NO: 14343 - DNA, 693 bp, Macaca Fascicularis
  misc_feature (1)...(693): n = A,T,C or G
cagcaaggtcatagannnnngagacacagccntnatcnnnnngcgtaagcggccactcatctttattcactggtaccaccacagcacagtgctggtgtacacaagctttggatacaagaaccaagtgcctgcaggaggctggttcgtcaccatgaacttcagtgtgcatgccttcatgtacacctactacactctgaaggctgccaacgtgaagccccccnnnnnnnnnnnnnnnntcatcaccannnnnnnnnnnnnnnagatgtttgtaggagccatcgtcagcatccttgcgtacatctggaggcaggaacagggatgccacaccacgatggaacacttattctggtccctcatcttgtatatgacctatttcatcctctttgcccacttcttccgccagacctacatcaagcccaaggtcaaagccaagaccaagagccagtgaagggttggagagaacagtgaagctccagtctctctcttctccagggcaccaagaggctgggcttagttttgggagaatgattaggttgccttacctgcatggtttccccagaggacgcgtgccccacggtggctggaatttttgagacaagaagggtgaccctgggatgggggtgtggtctgttactttgatgtttctgtttttaatgtgaaggccaagaaggccctgggatgggggatgggacg

SEQ ID NO: 14344 - DNA, 716 bp, Macaca Fascicularis
  misc_feature (1)...(716): n = A,T,C or G
gatgtactcatcannnctctgtatcacangaagagcaaatcaagcacatgattaagtaccggtacatcccgttcacacatgggaagaggaggtacagaggcaaggaggacgcnnnnnnnnnnnnnnnnnnnnnnnnnnnggactgaggctgcctcacgnnnnnnnnnnnnnnntttgagccattnnnnnnnnnnnnnnntttcttcacataaagtagttgattacgagggagttgaattttctttttaaaaaggagcttcaatgatttgtaactgaannnnnnnnnnnttgaagaaactggcacttaaaccaaatcgcatggatttctttttnnnnnnnnnnnnnnnntttctcacggatggaattctagtcagctgcaggcgggaagccaggcgggtggagcccatgggagcaagggcgagtggccggtccccccccggtgccaggtgggcaggcaggagcgaggcctgcgagggaggaatgggccgctccccgccagccgccttccccaccagccacaggtgtgccagccactccacagagcccgagtgatgatctagcctgattcctgcgtgtctgaaagaacttaacgttttaaaggtgattgtcaagtaactgtgtggggttctaatgccagtttcctaatccatctcactggagatgtttnnnnnnnnnnnnnnncctaatgactcaaaacttgttcttaactaccatga

SEQ ID NO: 14345 - DNA, 733 bp, Macaca Fascicularis
  misc_feature (1)...(733): n = A,T,C or G
tnnnnnnnnnnnnnnnnnnnnnnnnnnnnnnnncaatnngnnaaaatgaaacacgaacaggatatnnnnnnnnnnnnnnnctacaccccctacccccaagagagtctctctgtcagccaggctggggtgcagcctcaacnncctgggcccaagtgatcctcccacctccgcannnnnnnnnnnnnnnnnnnaattttaaatttgttatggagacggggtctcactttgttacccagnnnnnnnnnnnnnnnnnnnnnnnnnnnntcctcccacctgggcctccccaaatgctgggtgtacaggcatgggccactgtgcccagcttcattttcagagtgaggcatttgtattatggctatgtaggagaatattctnnnnnnnnnnnnnnntactgaagttttttagatataaattaccacagtnnnnnnnnnnnnntttccagtgactaagtggaaaaatataaaacatattaatataaagaaagagacaagtcaaatgtagcaaaatgacaacacttggtgaatctaggtgactagtcgacagatattcatgtactatcaatgcagctttgctgtgggtttgnnnnnnnnnnnnnnnnnnnnnnnnnnnggcggggagaaggatacaccaaaaagcttagtgattacctttggatgggaaaatggttggtaattgtattttctaaatgtcttctttgtattttttaacgttcaataatgtatatgtatcagtt

SEQ ID NO: 14346 - DNA, 705 bp, Macaca Fascicularis
  misc_feature (1)...(705): n = A,T,C or G
ctgtttgtggggctnnncgtggagcaggcggtagngggagatgaacagttcacaccctgcaaggcccacaggagggaagcaagctctctcgccgaggagccaggcaacttcagtcctgggagacccatgtaaataccagacagcaggatggaccccagagattgccaagccaaaaaccttagctccctcccacaccccaatgtggacctctactttcctggcgagtccggacccgcctcatcccgttacagctccccaagtggtttccacatgctctgagaagaggaaccctcatcttgaagggcccaggagggtctatggggagaggaactccttgccccagcccgccctgctgccttctgacggccctgcaatgcatcccttctcacagcacttactggccagcctggggcctggcggggaggtcaggccctggaactctatctgggcctgggctaggggatgtcagaggttctttgaggggctgcctctgccacactcggacgcaaaaccactttccttttctattccttctggccttttctctctcctgtttcccttcccttccactgcctctgccttagaggagcccatggctaagaggctgctgaaaaccatttggcctggcctggtcctgccctgaggaaggaggggaagctgcnnnnnnggagagnnnnctgggccccagactctgtaacatcacta

SEQ ID NO: 14347 - DNA, 359 bp, Macaca Fascicularis
gccgccacgggagagcagtagccatggctctacgctaccctatggccgtgggcctcaacaagggccacaaggtgaccaagaacgtgagcaagcccaggcacagccgccgccgcgggcgtctgacgaaacacaccaagttcgtgcgggacatgattcgggaggtgtgtggctttgccccgtacgagcggcgcgccatggagttactgaaggtctccaaggacaaacgggccctcaagtttatcaagaaaagggtggggacgcacatccgcgccaagaggaagcgggaggagctgagcaacgtattggccgctatgaggaaagctgctgccaagaaagactgagccgcctcccccggctct

SEQ ID NO: 14348 - DNA, 720 bp, Macaca Fascicularis
  misc_feature (1)...(720): n = A,T,C or G
gccatgggcatcagannntccatgcctttctgtccatctgcacactctctcagctggaggccatcctcctggactaccagggacggcaggagatcttcctgcagcgccatggacccctgtctgtccacatggcctgcctctccttcttctttctggctgcctgcagtgctgccaccgcagcccttctgaggcacaaagtcaaggccagactgaccaagaaagattcctgaggctggcaagtggggcaacgtgtggaggaagcccctcataatttggagaaaacttgatacaatagaagttgactttgaaaggattgccttttaaattaatacatatatccaagggtatgttatagctgcagtgtttgaaagccaaaggatttaagagttttgttgttaatgaaaggaatactccttttccttttggatcatagcttaaggcacaggaagggaagggatctctcataagattcatgagacattgaaaataaggagaatcgtcttcatgcctgaaaatttagcaaaattctgactatggcctccaggggcaattcctaaaagctgaatggataataaannnnnnnnnnnnnnnnnntaggtggctggtcctcaccctgttggaatggctatcctactatgctgttctttggtaatggaataaattgacccaaggacccaatttcatttggatttcaaattgtccagagggaacagnnnntca

SEQ ID NO: 14349 - DNA, 672 bp, Macaca Fascicularis
  misc_feature (1)...(672): n = A,T,C or G
aagagggcagctccagaagctgnnnaggnnnccgggagcccaccccatggtggcaggggcaacggtggggagtggctctttctggactcccagtgcctttttgctggacactgtgtccttctgacttcannnnnnnnnnnnnnnnnnnnnnnnnnaagccccagaacacccagacctcttgggaaccaatgccaactcccgctctgnnnnnnnnnnnnnnnnnnnnnnnnnnnnnnnngagctggaccaccccaagtctccagacacctagggaccagagcgggttttggaacatagacggaagacagcaggggaatgtagccgaaagccacagaacccaccctccccccgacaagcacaccccactgaagagcctgaatcccaggnnnnnnnnnnnnnnnnnnnncctgcccacccaccacgctggtgcccactgcctggccggcaaagccctgccaatcagacatacgggctccctgaagcccagnnnnnnnnnnnnnnnctgtggatgccaccaggcccagggactgcagccgcaacgcccagggcaggcgggtgaggactctgtcctgtgtcacctctctccaggtgtccagctgtctcgtgcctttttgtcctgtgaaaaaagtgttttctgttaggactaagttgtaagaacagaaaccctgccca

SEQ ID NO: 14350 - DNA, 741 bp, Macaca Fascicularis
aacatacatgagggtcatcattacacctcaccctccacaggccagcgagaagtcaggaacactggggcgggtctatcgggcacagctgggatggcacagggcgaggggctggatttgagctggcacagatgcaagagggaaaaggggtcctgagttacatgttcacagagaatgaaggagaaggccctggggcccaccaagcttccagccacagccccgggcagttgttaagaagcatccgcagaattgtaggggaagaacttggcggccttgcttggggtggtggggtttgggcactccgcctcctcgctcagcttgaagaacatctcctgctcccgcttcttttggttcagatcctcttccagagcctagggaagagaggacggatggcgcctggtcagatctgcaggccacacaagggtcccccactcacaggacccccactgatgtggccctctttggaacattcccttccaggcctcactgcttgagaaaccaggtcatccctctttcctaccctagagctcctgccactgccactcagaagctccctgtggaccgaagggtacagttgggggaaatgccaatctagatggggcagggaggaaaaaagcagatgcaaatctcctggcagggaaacagccagatgactggagaaaaacccgagagagaagagggagagagatttagcagcaaaggaagcagagatgtcagagttttgcttttcttttttttgttgtt

SEQ ID NO: 14351 - DNA, 755 bp, Macaca Fascicularis
  misc_feature (1)...(755): n = A,T,C or G
aaacacagcgtccagggcnnngcagnnnnnacagggtgacgagnnnnnnnnnnnnnnnnnnnntttgattttcaagggtgtcgtcaagacggggttgacacaatgctgcacatgtctggtcacacttagaaattgagctcttactctcttctgtaacacggggggacgtacagctgccgtggagctgaccacggtgttccctggcattgtccacacagatgctaaatggtagtacagacgtcatcctgcaaggttcctcttcctgcaagcgaaggggagagaaacaagaggcacctgtcaccttcatcgcagtcctcagtgcagagcaacttacgcatcctcaagaatccactgcttttcaggcaaggagggagaaatcctcctgcacactggctttgtcccggagtcggttccctcctgcccgcacatcttgagtaactccgagcagaaatcacgtcttgccgacatactgtaacctaagaaactgctattcaaggctgggcacgnnnnnnnnnnnnnnnnnnnnnnnnnnnnnnnnnnnnnnnnnnnnnnnnnnnnnnnnnnnnnnnnnnnnnnnnnnnnnnnnnnnnnnnnnnnnnnnnnnnnnnnnnnnnnnnnnnnnnnnnnnnnnnnnnnnnnnnnnnnnnnnnnnnnnnnnnnncagctactggggagactgaggtaggagaatcttttgaacctgggaagcagaggttgcagtgagctgagatcgcaccattgcatccaacctaggg

SEQ ID NO: 14352 - DNA, 743 bp, Macaca Fascicularis
  misc_feature (1)...(743): n = A,T,C or G
ataaccagatgattaatgggaaagtaccttaagtgtnnnnnnnnnnnnnnnnnntccatggcgttgaaggaaagttttgagagaaannnnnnnnnnnnnnntcacatagatttttaacacatccactttaagtaggtgaaacctttgagcagaaaatactggatcttttctccaaaaggtgtttaattttatggagatgttgaaaggtnnnnnnnnnnnnnnnnnnnatgtgtgaaaatatgaaaggagcaaatattaaaccttgaatatcaagtttacgtggggaaaaaaacattagatgaatacatttacatgcctcttcaagaaatagccctttggcccacagaatgtatactgtttgaaaatggaaagttattcttaaaagtctgctataatttattttagtcttgcacttacagtcccacttgcacaaagatcaaagtcaggatatgtggatcttgattgggccttaagatgccagttttgaagggctcaagtcagctgtgtaatactaagatgggccctttgactctttagnnnnnnnnnnnnnnnnnnnnnnnnnnnnnnnngtgtattgtcaagtacaagatttcttgaagtaagccacttgaaacattgtgaagctacnnnnnnnnnnnnnnnnnnnnnnnnnnnnnaaaatgggtgtataagtctttaatagaataaaccatgctattaacccaacatctgtttataaaggagcaagtttaacctgctttgca

SEQ ID NO: 14353 - DNA, 736 bp, Macaca Fascicularis
  misc_feature (1)...(736): n = A,T,C or G
cagagagccttcctgtgcccctggccagctgataatcctaggttcatgacccttcacttcccctaaccccaaacatagatcacaccttctctagggaggaggcaaatgcaggttatgtttttgttggtactttttgttttttgtgacttcgtgtgttccattactccccgctgccatcctgtctcccctgtttccttaagagctcagcatctgtcnnnnnnnnnnnnnnnnnnnnnngtaggtgggtagccctgataggggttgctgtgtttcaagcataacccacaggcgtcttttctaccacctcatccctgcatgcctgatccccaattcctataccttaccctccacctattgannnnnnnnnnnnnnnnnntagggcccccacctttactcacaccctgagaattctgggagccagtctgccattccaggagtcactggacatgttcatcctagaatcctgtcacactacagtcgtttcttttcctctctctggcccttgggtcctgggattgctgctgcttcaaccccagagcctaagaatggcagccatttcttaacatgttgagagatgggtctttcttggccctagccattttgggaagcttgatggcaatcctggaagggtttaatctccttttgtgagtttggtggggaagggaagggtatatagattgtattaaaaaaaaggtatatatgcatatatctatatataacatgacacagaaataaa

SEQ ID NO: 14354 - DNA, 723 bp, Macaca Fascicularis
  misc_feature (1)...(723): n = A,T,C or G
aatgannnnnngaaaaagaaacaagtaaaactggatgagcagctcatggagatgcagcacctgaggttcactgtgacgcctagcccgtcccctcatgcttgggatttgcagctgctccagcagcaagcctgtccgatggtacccagggagcagtttctgcagcttcaacaccagctgctgcaggcagaaaggataaaccagcacctgcaggaggaacttgaaaacaggacctccgaaaccaacacaccacaggccttgctaccggagcagcgagcagtgcatgcagattcctacagaaggattgggcacctgtgaaaactgggctgctatcgatggcatttcttaccatggcagacagatgcacacacccacccatgcacacacaccacacacagagacataagctgtgttggaattaagtgctcttttaaattattatttttactgttaaacctttgcagtattatgtctcttatttatttatgtagaaatgacagatcttgtgaatcaaattcacaaacatcaacttgttacaaatcattttatttataccctttaaagagtgtggatttaagattcttgaaaggatgtagtctatatattttctcattccatatgttgtaactatttttaacaaaaggtactacttttatatatggaatttgaagaaaatcaggggtatttatactgttttatataagatgtataaatgttttgacagga

SEQ ID NO: 14355 - DNA, 734 bp, Macaca Fascicularis
  misc_feature (1)...(734): n = A,T,C or G
gccgaggccaaaaagaaagccgtgaaggagtnntctatccgatctgtgcaggagaccgtactccccatcaagaannnnnnnnnnnnnnnnnnnnnnnnnnnnnnnnnnnaggaagtggtgaagcccctgctggtgtccaccctcggtgagaagagcgggaagggactgaagacctgtaagagccctgggcggaaaagcaaggagagcagccccaaggggcgcagcagcagcgcctcctcgccccccaagaaggagcaccaccaccatcaccaccactcagagtccccaaaggcccccgtgccgctgctcccacccctgcccccacctccacccgagcccgagagctccgaggaccccaccagcccccctgagccccaggaattgagcagcagagtatgcaaagaggagaagatgcccagaggaggctcactggagagcgacggctgccccaaggagccagataagaatcagccagaagtcgccaccgccgaccaanncancagaaaanacaaacaccgaggggagggagagcgcaaagacattgtttcatcctccatgccaaggccaaacagagaggagcctgtggacagccggacgcccgtgaccgagagagttagctgactttacacagagcggattgcaaagcaaaccaacaagaataaaggcagctgttgtctcttctccttatgggtagggctctgacaaagcttcccgattaactgaaataaaaaata

SEQ ID NO: 14356 - DNA, 509 bp, Macaca Fascicularis
agccagccagcccatcccatgcacaattggacgctgtcctgcgctccagctgcaagctgggctcctgttacacactggacagaccacccactgccgcagctgccaagccccctcctccccaccagactgccagacgactacatcattctgcccacagacctgcgctgccactgccatcgccatccatcgcatcccactgacagactgctgctcctagtgatctggactcacctcggaggtatctgggctggccacagtccttggacagtgatccagacagctggccccccaagggatctgtcaccttcagcgagacctatttcctccccacccccagaaacctcttgtgttccagcctagacccaggtgtgcctggcagccaaatcgagtctctcattttctcttgtggaccagttagttttgcctataacccagttttctgagtttgcaacaaaatctctgatgtgtgccttttgttcaacacagtaaccccaaaaagtgtgctatgc

SEQ ID NO: 14357 - DNA, 764 bp, Macaca Fascicularis
  misc_feature (1)...(764): n = A,T,C or G
gacgccagacacagccatttgcaganntccggcacagggactgcagcttgcgtccagccaaccaagcatggagccggggctcaggaagtcccttcccgccataccacagcctaattcttactgggacggaggcaactcggccatgctgggcaggaggacaaacccgagatgccactgtggaattagcaacttcggtgcacggtgtgacttgctaggggccgtgcccacgtgacagtcccttatgcagagaaggaaagagaagcccagagtggaagggcaacttgcccaaagtcacacagtgtgcgggcgagtccaggctggcccctgaggcccacgccccttgcacactggagaccactgtcagctagcagtggtcctcagggaaggcccggtctccaccctcccagcccagcctcaggggccctcgccctccccacatctgacctgctcacctgcctggatgctgggctgccagacacaggaagcatcaaaccccagcctcctgggtggggggcggggagcaggcatcaaagcttagcagccccggtttctccctcttgtctcctgggaagggcttgctcccgcccagctctcccgccaccggcctttcagggttgggctgggcccagcgtgccttttagttgcttctcacggtggctcgatggctcaacccagtcccaaacaggcccagtgacgctgccaactgctccccagctcaggcccccactgcaccagcaatgctagaaaaccaagccaataaaagt

SEQ ID NO: 14358 - DNA, 973 bp, Macaca Fascicularis
  misc_feature (1)...(973): n = A,T,C or G
aaccannnnnnnnnnnnnnnncgtgaggagcttgagaaatgtagnnnnagctgtatatgactgtacactcaatttcagaaataatgaaaatccaacactgctgggagtcctaaacggaaagaaataccatgcagatttatatgttaggaggatcccactggaagacatccctgaagacgatgacaggtgctcggcctggctgcacaagctctaccaggagaagnnnnnnnnnnnnnnnnnnnnnnnnnnnnnnnncacctnnnnnnnnacgcccatggtgcccccccggcggccctggaccctcgtgaactggctgttttgggcctcgctggtgctctaccctttcttnnnnnnnnnnnnnnnnnnnnnnnggagcgggtcttccttgacgctggccagcttcatccttgtcttcttcgtggcctccatgggagttcgatggatgattggtgtaacggaaattgacaagggctctgcctacggcaactctgacagcaagcagaaacagaatgactgactcagggaggtgtcaccatccgaagggaaccttggggaactggtggcctctgcgtatcctcnnnnnnnnnnnnnnnnnnnnnnnnnngggtgagccctcctgggcacggcggaagtcacggcctctccagccagggagtctggtctgaaggccggatggggaggaagatgttttgtaatctttttttccccatgtgctttagtgggctttggttttttctttttgtgcgagtgtgtgtgagaatgggtgtgtggtgagtgtgaactttattgtgtgatcatggaaagggtattttagggtgcaggggagggcaggggtggggaccgaaggggacaagttcccctttcatcctttggtgctgagttttnnnnncccttggttcccagagataaagtgaaaagtgctttaggtgagnnnnnnaacantaagnnnaagttcacactcaccacacagcca

SEQ ID NO: 14359 - DNA, 774 bp, Macaca Fascicularis
  misc_feature (1)...(774): n = A,T,C or G
ggggcaggagnnnnnnnnnnnnnnnnnnnnnnnnnnnnnnnnnnnnnnntccttctgctcaagcgctggcagtgacggggacaaaggtctacagcccagggaagaaggggaggnnnnnnnngcagggcctggcttcccagctggctcctgtgcagtgggtggcactgccgaggctgagaagacaaaggcaggnnnnnnnnnnnnnnnnnnnnnnnnnnnnnngggttttgtttcctccttgtccatctcacttttctccagggctcctctgtgatctcctgtggcacacactgcacgccaggcccttnnnnnnnnnnnnnnnnnnnnnnnnatcttcagtgatttgcctgcgcttcttattggccccacagcggaatcttctgctgaggaggatgaggagtcccacgatgaaggccagcccggnnnnnnnnnnnnnnnnnnnnnnnnnnnnnnnnnnnnnnnnnnnnnnnnnnnccacatcccctttggggctgccgcctctgtcagcaagtgcccctcttggtttccaggnnnnnnnnnnnnnnnnnnnnnnnnnnccttnnnnnnnnnnnnnnnnnnnnnnnnnnnnnnnnnnnnnnnnnccagcctaggaaggctgaccagaggggcctgctccttccccagnnnnnnnnaccccgtctgcctcctgcccaagttcagatggtctagcaagatgcattgaactcagggcgggtgtgtgccannnnnctgannnnnnnnnnnnnnnnnnnnntcttctatctgctgccgttc

SEQ ID NO: 14360 - DNA, 707 bp, Macaca Fascicularis
  misc_feature (1)...(707): n = A,T,C or G
gtggaacatttgacagatgatgtacagatttagatttgtgtgtnnnnnnnnnnnnnnntttttttatatgtttaatatagatgggtacattaattttgaaaacagttctttaattttatctctataatacatgtagcttttatgtcaagaacagtaggggattataacaaaaacaaaaaacaaagtaacagtgctatatagcagttatgtaacacctnnnnnnnnnnnnnnncgtgtgtttgtgtgtgtgtgtgtgtgtataagatttaatctttacaacaaccnnnnnnnnnnnnnnnattatcctcaatttnnnnnnnaggacatagaaacagagagtttaggaaatgtgacaaagggaacatagctaatagggaacagaatcatatgtgagactgcacagaatggacccagtgcatccacttaacccttgtgctatactacctcatctgcaggtagaaaatcttcattatactttgatctagataagagatactcttaactttctctacataagagttaactaagtgagacattataaaccctaaacctccataaataatcttattacatttaaatgttattgttaataatcattatcataatannnnnnnctctctcatagattatttaccacaaaccagtaaaataacactcttaccttnnncactnnnnnnctgctaattttnaannataagtgataattt

SEQ ID NO: 14361 - DNA, 742 bp, Macaca Fascicularis
  misc_feature (1)...(742): n = A,T,C or G
tttaagctctaaccaatcatgtaaacatagtgatcgtagcgtcannnnnnnnnnnnnngtgttgcagactacagaacattgttctcccttcgagcgctgtcaagtatcaacccggcagtggcaggcacagaaggaaaggctggattgggctcctttggcgtaaannnnnnnnnnnnnnnnnnnnnnnnnnnnncggtgttgggcctggtgactgctgtgagcagtgccctttcccatctgtgactttcccggcgcatgcaggaggnnnnnnnnnnnnnnnnnnnnnnnnnnnnnnnttaactcagctcaccataaaaatgccattaagagagtacctaaaatagagagaagaatgaactagaacattaaagactcttgtacttctaggtattgatttgctctacattttaaaaatgtgtcagttttttaaagtttgagtttttagctttcagttctaccttttatctgacacattattactggtgttaacttcgttagacctattgtcgtgtctgggtcagttccttgtatctattttcatattgctgagaacaaatctttttcttttttagaaaaattctagcttataataattctttccagactgtagttgcctgtgcttggaattggtcctagataaggataaagtagctaatccattattgatcacagtatgaaataaaactattctaagccatcaaatgaattagcaattctaagtatcaagattctcagattctct

SEQ ID NO: 14362 - DNA, 756 bp, Macaca Fascicularis
  misc_feature (1)...(756): n = A,T,C or G
ctcccgttagctgctggattccagnnncataaggggtctgggattattcagaccacgaacagatacagacagtttactattcttcatagcacagctgagcaagactgcttagcactggagggggtccggaccccagtattatttggttacactatgcaatgaggctgtaaactaagactgattggagctctcccgtgtcggcttgtagcccagaaggtgaagaacctgctgtggggccagggcttcccagattatgtggcnnnnnnnnnnnnnnngcaggcccaggatgtgctggactgggtgcccatccacttcatcacccagtcattcaacaggaaggattcctgccagctcccaggggctttggttatagaagtgaagtggaccaaatacggatccctactgaatccacaggccaaaatnnnnnnnnnnnnnnnnnnnnnnnnnnnntcctcctttcctgaggtcagctcaggaaatgaaaggacgattcttatttctactgcggttacttttgtggatgtgtctgcacctgcagaggcaggcttcagagctccgccagccatcaatgccaggctgccctttaacttcttcttcccgtttgtttgactctcgtttnnnnnnnnnnnnnnnnnnnnnnnnnnnnnnnnnnnnnnnnnnnnnnnnnnnnnnnnnnnnnnnnnnnnnnnnnnnnnnnnnnnnnnnnnnnnnnnnnnnnnnnnnnnnnnnnnnnnnnnnnnnnnnnnnnnnnnnttg

SEQ ID NO: 14363 - DNA, 722 bp, Macaca Fascicularis
  misc_feature (1)...(722): n = A,T,C or G
ctaaagtagaaagttaaaaagtagagatttcagtcttttcactaatgtcattttactgttccaagacccagccttgcatttagctgtcatgtctaagtcccgtcttccagtctgtgacagtgtatcataacaggggatacctgatgttgtaaagtatttccggatgttgttaaccttgatcactatgctaaggtggtgtctgctaggatttgctactgtaaacttactgtgttttccttgtaattattgnnnnnnnnnnnnnnnnnnnctgagactatgcaaatgtcccgtttctgcttaaacttttgctcattttactatccattggcagatcttgcttnnnnnnnnnnnnnnnnnggtgttctaatggtgattttctatttctctcaatccttctacatttattattggaattattctgtaaggaagagttgtcacttctggatttatatttttaactataataagatattcaggacaagtatagatttagaacttaaaaatgttaaatcatgttaaaattattccaaataccaatatcaaagaaaactaagttggtaatctatctcagaaaatatatgaacttaagaaggaaaatagtatttataatttgtagaactggttcaacttttgacttaatactgactttggattgaattcaaagttttcttgaaatttcgcatctggactttttnnnnnnnnnnnatttatattactttggg

SEQ ID NO: 14364 - DNA, 156 bp, Macaca Fascicularis
agcccgggcaccctgggcgtcttcagcctcatcctgccgttgcaggccggggacacggtttgcgtcgacttggtcatggggcagctggcgcacttggaggagccgctcaccattttcagcggggccctgctctatggggacccagagcttgaacac

SEQ ID NO: 14365 - DNA, 723 bp, Macaca Fascicularis
  misc_feature (1)...(723): n = A,T,C or G
tcaccacacacagcctanctgaggagtgcctttttttctatcctcattatttaacagtgtgtgccnnnnnnnnnaagcgatatgggcaggccctggtaaatatagcgttgctgtagtgttaactttttataaggtaatgctcaggttgcctgcagtgtctaaaattactctgtggccagggccccctgctttatcgctttctatagttttaaagtagtttgaagcttgaataacataaaataacataatataatgttatttatgttatttcccacgtgaagaacgcctgtaaaccttgcagtattgaaactcagtgaacaaggcatcttagacaagctgaaaaacaaatggtggtacgataagggggaatgtggagccaaggactccgggagtaannnnnnnnnntgaaggtctttttgtactgattagcaatcacattttgacccactgtttattttctatcctaaaacggctttccttcccaacacacactccctgacacagtgggaccccttttataacaacagcgctaaagnnnnnnnnnnnnnnnnnnnnnnnnnnnnnnnnnnnnnnnnntcaattgttgactctatagaactgttattatgattaggaaactcagtctggtctattgcatttccaaagttataaaataataagctgtgttataagggggttttactgnnnnnnnnnnnnnnnnnnnnnnaagagaaaatataacaa

SEQ ID NO: 14366 - DNA, 723 bp, Macaca Fascicularis
  misc_feature (1)...(723): n = A,T,C or G
gaaggaacgnnagcggcagaaagagctggagagcaattaccgccgggtgtggggctctcaaggtggggagggcacaggggacctggacgaatttgacttctgagaccaacactgcacttgacccttcatagaatccagagtcttcctggactggcctgcctcctccccacctccccaccctgggacccctgagggccaaacagcagagtggagctgagctgtggacctctcgggcaattctgtgggtgtgggggccctgggtgaatgctgccaccccagctggcagccaccttgagagctcacccggcctgtgatgtttgctctcctgagctttcgctcaatcctcttcctcttcctctgtggcttttcttgttattgtactctaatgataggatattccctgctccctacctggagattcggtaggatcttctgagtggaggtgggtagagagagcaaggagggcaggacacttagcaggcactgagcaagcaggcctccacctgcccttagtgctgtttggagttgctttacccccttctcttgaattgccttgagatgtccttctccctttccctgcccaccctgtcccctacaatttgtgcttctgagttgaggagccttcacctctgttgctgaggaaatgggagnnnnnnnnnnnnnnnnnnnagcacaatcccagtgaaaaagctgtgaagcatccaccatgnctgaacaatcagt

SEQ ID NO: 14367 - DNA, 779 bp, Macaca Fascicularis
  misc_feature (1)...(779): n = A,T,C or G
gacagagcataaaatgcgtgctcaggctagcaagaacagnnnnnnnnnnnnnnnngaaaaggcnnnnnnnnnnnnnnnngcagagctccgggatgacccaatcatcagcacacacttggccaagttgtatgataacnnnnnnnnnnnnnnnnnnnnncgagtcannnnnnnnnnnnnnnnnnnnnngattgaacacatatctagtctcatcaaactctccaaggccgatgtggaaaggaaattatcacagatgattcttgacaagtaatttcatgggattttggaccagggggagggtgtccnnnnnnnnnnnnnnnnnnncccagtagataaaacttatgaagctgctctggaaacaattcagaacatgagtaaagtagtggattccctctacaacaaagccaagaaactgacataggtgagtgctggcttcaggaccccagggctgggcagctctgttttttgcgtgtcgagactgaaaaaccacctcctggtgtcctcatggcttcctgattgacactgctctgtcttctcttgcagagttggatctgtagcggtcctttggagagtgtgtgtggcgggagagtgaaaccttgggggaaaatgctaggagattcttttttctttttgttctacttttcgctcggaaagtttttaaatcttcatttggtgcatctgtnnnnnnnccaataggtgtgccagttttcatgtaatctttactggcccaacttgggagtggggaaattgcttaaaaaaaaaagaaaaagaaaaaaaaaaga

SEQ ID NO: 14368 - DNA, 740 bp, Macaca Fascicularis
  misc_feature (1)...(740): n = A,T,C or G
acttnatcattagatgctactttgaagaacccaatcctctggaatgtggctgatgtggtcatcaagttccctgaggaagaagctccctcgactgtcttgtcccagaaccttttcactccaaaacaggaaattcagcacttgttccgcgngnntgagaagaggccccccaccgtggtgtccaatacattcactgccctgatcctctcgccgttgcttctgctcttcgctctgtggatccggattggtgccaatgtctccaacttcactttcgctcctagcacgattatatttcacctgggacatgctgctatgctggggctcatgtatgtgtactggactcagctcaacatgttccagaccttgaagtacctggccatcttgggcagtgtgacgtttctggctggcaatcggatgctggcccagcaggcagtcaagagaacagcacattagttccagaagaaggatggaaattctgaaaactgaatgtcaagaaaaggagtcaagaacaattcacagtatgaaaagaatgcaaaaaaaaaaactttatttaaaaaagaaaaaagtccagattgtagttatacttttgcttgttgtttttcagtttcccgaacacagagcagatacctggtgagctcagatagtctctttctctggcactgtgcaagatgctgtgaatattnctaagttacacccatatgttgcatttgaaaagttgaaatccttctgtacttttaggcttt

SEQ ID NO: 14369 - DNA, 807 bp, Macaca Fascicularis
  misc_feature (1)...(807): n = A,T,C or G
agcagtgttnnncagcnnnngnnnnnnntgccggggcagcgtttcannnnnnnnntcaattccctctctcagcacagcctggggagggggtcattgttctcatccatcggggatctcagaggctcagannnnnnnnnnnnnntgcccaagtcacacagctagtgaagaccannnnnnnnnnnnnnnnnngtgactccnnnnnnnnnnnnnnntccactaccccannnnnnnnnnnnnnnnnnnnnnnnnnnnnnnnnnnnnnnnngagaatgggacttttcttttgaggcatgcacatctggaattaaggtcaaacgaattctcacattcctctgaaattaaacttctgttaggaannnnnnnnnnnnnnnnnnnnnnnnnnnnnnnncttctgatggaannnnnnnnnnnnnnnnnnnncctctttggtagttgcattagtaactttgaaaggtacatgactgagcatagcatataggttaacttgcagaaacagtacgtaggtaattgtagggtgaggattataaatgaaatgtgcaaaatcacttagcagcaactgaagaccattatcaaccacgtggagaaaatcaaactgagcagggctgtgtgaaatatcgttgtaatatgcannnnnnnnnnnnngnactctacgccactccacaaatgatgttttcaggtgtcatggactgttgccaccatgtattcatccagagttattaaagtttaaagttgcacatgattgtataagcnngctttctttgagttcnnnaattatgtataaacacantgttgcatttagaaatcaaa

SEQ ID NO: 14370 - DNA, 726 bp, Macaca Fascicularis
  misc_feature (1)...(726): n = A,T,C or G
tcacccagcnnnnncccaccccgtccagannnntgcagccgtgtccaagctcaggaggaaggggacccttccgtcactcaccgggggctgctgcctgacccttggggcctgagaaggccttggaggctggggnttgtccacggannngctggagcagcnnnnnnnnnnnnnnnnnnnnnnnnngaggcccacagannnnnnnnnnnnnnnnnnnnnnnnnnnnnnnaccgagctcaccacagacacagtgcaggcgtgttcttctccagtgacacgtggacaaatgtgggctcatcagcccccagagagggtcaggccgaatcctgtttctcctcctcttagnnnnnnnnnnnnnnnnnnnnnnnnnnnnnnnnnnnnnnnatggaaaccctctagtctattatagtcacatagataatggtgccacgtgttttctgattcagtgagctcagacttggtgcttctctctccacaccccccgaccttgtttttcaggatactattattatattttcacagacttttgagacacaagtttattggcatttaatattggacatctgggcctttggaagtacaaatctaaggaaaaaccaacccacctgtgtaagtgactcatcttcctattgttccaattctgtgggtttttgattgaacggtgctataaccagggtcctgggtgacagggcgctcgctgagcaccatggtcatcacagacacttacac

SEQ ID NO: 14371 - DNA, 739 bp, Macaca Fascicularis
  misc_feature (1)...(739): n = A,T,C or G
gactgaataagaccaaatgggctattgggcctggaaaacctgnnctgactttgtcacccaattcacccagaaccatggtgggagagaacagatttggcattggagcagactggaagaataggggtgggagggtggaggggcttctcctttgcgaggaatgactcatgtcnnnnnnnnnnnnnnnnnnnnnnnnnnnnnnnnnnnnnnnnnnnnnnnnnnnnnnnnnnnnnnnnnnnnnnncattttgggggtcatgggagtgcacggcattagacagcgtttggttcaccctgtaaagtagccaagaaaagatgagaaaataacaagataggcctggcacactagacannnnnnnnnnnnngaaataacccacagtcttaagatgtaccataaaaatgttctgccaaggatctaaattaccttgggcttcgcatatatctatgaaattctgtgataattttnnnnnnnnnnnnnnnnnnctggcatctgtttttatttttcacttttaataactcatcactggtggtactttatcttgaagagtaaactaatatttttttatattttaacattnnnnnnnnnnnnnnnnttgtaatgatgtgtcagaagtaaagaaaaacccattaaaggtctagctaatagatgctgttgggggttaaattaatagtaaaataatccaatagagcacttttgatgatttttatataaaaatcaagtgtacatttcattcagaataata

SEQ ID NO: 14372 - DNA, 672 bp, Macaca Fascicularis
  misc_feature (1)...(672): n = A,T,C or G
ccccgctgccaggcccaggccatgggcagcttctccactcagtcgggccacagggtgggggaggaagtgcctgagccggaactgtccnnnnnnnnnnnnngggctgaccatctcccactgcccctcccccagacccccataagcaccttcccactgtttctgtgagttccagtctttagatccacccacagctnnnnnnnnnnnnnntctcttgcatctaccttatttcgctnnnnnnnnnnnnnnnnnnnnnnnnnnncattgtcacaggtgtgcattttataagagtacacgagattctcgannnnnnnnnnnnnnnnnnnnnncaggcccaaagaggtggcacctggcatgtggcagccagtcgtcttcagccttgagcttcctcaggctctcggatgcgtctcagctgagacatcagaacctgggaggcatagcctgggcccgctccacaggactgtnnnnnnnnnnnnnnnnnnnnnnnnnnnnnnnnnnnnnnnnnnnntaggtcatttgttacggggactttctgcacctggacactcacatttcagtcgggcccggcctggacgggagcaggaggggcctctggggactgggaatattcctctcgagttggttgctggctgcacaggtgttggtttgtgaaattcatcaagctgtgtgtcttct

SEQ ID NO: 14373 - DNA, 705 bp, Macaca Fascicularis
  misc_feature (1)...(705): n = A,T,C or G
ggaggagcccggaggttatccagtcgacagaactctaatcccaaaggggtgaccaggggccaaagccagctgctgtcctgtcctctgcttcctgccagggccctggtcctcactccctcctgcattcctttgtttaaggagtgtttattgagcacccgttgtgtgcagacatggctccaggtgcttagcaatcagtggtgagagtggtgttccaggctaaaggtaattaactgacagaaaatcagtaacaacataattacaggctggttgtggcagctcatgactgtaatcccagcactttgggaggccaaggtgggaggatcagttgaggccagagtttgaaaccagcctgggtaacatagtgtgagaccctctgtctctacaaaaaaattaaaaaatgagctgggcatggtggtatgtgctaacagctctagctactcaggaggctgaggcagcaggatcacttgagtccaagagttcaaggtagcagtaaactacgatcacaccactgcatgccaggctgggtgacagagggagacttcatctctttaaaacgtaataattacagactcaggaaatacagtgaaagaaaaatacaggttggccaggcgagnnnnnnnnnnnnnnnnnnnnnnnnnnnnnnnnnnnnnnnnnnnnnnnnnnnnnnnnnnnnnnnnnnnnngagaccagcctgggccacacagt

SEQ ID NO: 14374 - DNA, 738 bp, Macaca Fascicularis
  misc_feature (1)...(738): n = A,T,C or G
gtcacagtcaaggaaatcaatacttaccaaattaatctaaacgctatgatatataacagctctagctagtggtaaagtgtacagtcccagcttaattcagggcagggacatttccattagaacggtgctcttaaaaatagaaactgaaccagggcggtggtcagtctaaggccaagtgtttaagaagtagagtgtaactgccagcatagaaacccacgaaaaggaggccacaggatattcctgggagcactgagtgtagcaaaacaaagctactctctgcttcagtcgcaccatttgctaattggaaatcatatcctgaatcatactgagactgatcaactttggtagcttttttgttcagatcttatgacacactactcttctcaccatgagattttctcagccagtgatagtacattctgaaatgctggcaccaggagacggtcacagacacacactgctaaatgtgaagatggaactaaactggaagttaaattatactgacaatattatggcatttttaaagatcatggcattttaatttacattagagtggagttgcatcatactcaggggttagcttccaaggtcagtacataggtaaaatgggctattaggatgatccttgaaagccctttagaagggtgccatgttggaaaccntgtacatccactacaagtagcttttcccccccatgtggaaaaaaagactgtttctttgttgaaaatcaagtgaagt

SEQ ID NO: 14375 - DNA, 797 bp, Macaca Fascicularis
  misc_feature (1)...(797): n = A,T,C or G
taataataggcggagtcgatctggaacatacagctcgagatcaagaagcaggtcccgcagtcacagtgaaagccctcgaagacatcataatcatggttctcctcacnnnaaggccaannnnnnnnnnnnnnnnnnnnaaagttcaaacagacatggtcataaaaggaaaaaatctcgttctcgatctcagagcaagtctcgggatcactcagatgcagccaagaagcacaggcatgaaaggggacatcatagagacaggnnnnnnnnnnnnnnnncctttgagaggtcccataaaagcaagcaccatggtggcagtcgctcaggacatggcaggcacaggcgctgattttctcttcctttgagcctgcatcagttcttggttttgcctatctacagtgtgatgtatggactcaatcaaaacattaaacgcaaactgattaggatttgatttcttgaaaccctctaggtctctagaacactgaggacattttcttttgaaaagaactatgttaatttttttgcacattaaaatgccctagcagtatctaattaaaaaccatggtcaggttcaattgtactttattatagttgtgtattgtttattgctataagaactggagcgtgaattctgtaaaaatgtatcttatttttatacagataaaattgcagacactgttctatttaagtggttatttgtttaaatgatggtgaatactttcttaacactggtttgtctgcatgtgtaaagatttttacaaggaaataaaatacaaatcttgttttttctaaactgcttc

SEQ ID NO: 14376 - DNA, 653 bp, Macaca Fascicularis
  misc_feature (1)...(653): n = A,T,C or G
cctccattccagaaatttaggaccgaccctgactccgccccaacctgtttcagccccgccccttccccgtcagcgccgtcnnnnnnnnnnnnnnnnnnnnacgtcctcttcccctggggtgggggaagcctggccctcagtgctcccattggccaaaagtttgtagggggcgggcctcgctcactttcattggtcagttgctcgctgtggtcccatcccccatgctcccattggttgattgatcgaaaagggcggggactctgggcagcagttgcggagtgccgcgggtccacagtgctgcaccgagcagagaggaaggggcgtcccgggatatttggaggataaaggtgtgggcagggtatcatgtggaggcaaaggggcgagaagtgcggggcggtgggaggatgagcggggcgggcaatatgtgggattctcagaatgtcttttccgcagggtgatgaccacacctgccggctccggcaggggcttcggctccgtgtcctggtggggcctgtccccggcgcnnnnnnnnnnnnnngaaagtgagtcccagcacgcaaggtctgatacaccgtctgccttcccagcctgagcagnnnnnnnnnnnnnnnnnnnnnnnnnnnnncggtggcagggggcgcgctaacgttctc

SEQ ID NO: 14377 - DNA, 811 bp, Macaca Fascicularis
  misc_feature (1)...(811): n = A,T,C or G
gccccacggcggggctagaggagagcagtggtcagggaccaagctcaccgggggccctgctggggcagggccaggacttccagcagtctgcagannnnncggctgaaggaagagggtcccagggacccggcagacccgagccagcagggtagagtgagaaacctcagagagaagttccaggccttgaactctgttggttgatgctgactcctgggggagggaggagtcatgttggaggttggggaagaatctgggcatccttcccctcaagcctgggctcatggagcccctgcccagggccctccggcaggcggaaagtctgtcccctctgcccttcgggaaggatgctcccgtgtgcaggggtctcctgcctgtgccatccactggggctcgagacaacttctcactcacctgtgaggctggtgtggctgcttcccttgtaaatagttcttttctggtaagaagccaaatatcgaagctcacctcttcccagagagcaagctctgctcaggcctccagcgttggctggccatggccacagccagaccgaggagcccacccccagcgagactcaggcagtggcctggagaggctttactctgtaactgtggcttttcttagggtccaggcaggaatgaagccgataatttattgctttccattccgtggtatgatgtgcgcgtgcgtgagtgtgtggcctctgtttattcccctcctgtcaagaatgaagtggatgcagttcaggtacttttgagggttgttgcgctgaccctgtggttgtcgctgatgtacacacatttcattattgcca

SEQ ID NO: 14378 - DNA, 944 bp, Macaca Fascicularis
  misc_feature (1)...(944): n = A,T,C or G
cattatagagtngcnncatnnnaagatgctaaagaagcttanatttnctgtaataaaagggaaattgaggncagannnnnnnnnnnngagttgcaaggacccnnaggnnncannnntgccagaagccagccatccaaaactctgtttgtcaaaggcctgtctgaggataccactgaagagacattaaaggagtcatttgacggctctgttcgggcaaggatagtcactgnnnnnnnnnnnnnnnnctnnaaagggtttggttttgtagacttcaacagtgaggaggatgccaaagctgccaaggaggccatggaagatggtgaaattgatggaaataaagttaccttggactgggccaaacctaagggtgaaggtggctttgggggtcgtggtggaggcagaggcggctttggaggacgaggtggtggcagaggaggccgaggaggatttggtggcagaggccggggaggctttggagggcgaggcggcttccgaggaggcagaggaggaggaggtgaccacaagccacaaggaaagaagacgaagtttgaatagcttctgtccctcggctttcccttttccatttgaaagaaaggactctggggtttttactgttacctgatcaatgacagagccttctgaggacattccaagacagtatacagtcctgtggtctccttggaaatccgtctagttaacatttcaagggcaataccgtgttggttttgactggatattcatataaactttttaaagagttgagtgatagagctaacccttatctgtaagttttgaatttatattgtttcatcccatgtacaaaaccattttttcctacaaatagtttgggttttgttgttgtttcttttgatattattttttttttttcgcgttcgtggggttgtaaaagaaaagaaagcagaatgttttatggtttttgcttc

SEQ ID NO: 14379 - DNA, 731 bp, Macaca Fascicularis
  misc_feature (1)...(731): n = A,T,C or G
cnnnnnnnnnnnnnnnnggcttattgcttgcctctttataccaataagtcagtcactttgctcctctccaggggcaaggnnnnnnnnnnnnnnnnnnnnnnnnnnnnnnnnnnnnnnnnnnnnnnnnnnnnnnnnnnnnnnnnnnnnnnnnnnnnnnnnnnnnnnnnnnnnnnnnnnnnnnnnnnnnnnnnncttaaagaatgttactaagtagctacccccaaattgtcagccttgttacctggccaaggtgtccaagccagaaaggaagaaaggtagtggagtccttctcactctaagacagtgggagagggtggtatatagggaagggccagataggcaacttcctttggcctgtgtgcatctggcctggaactggtgttaacaaaagccaggtttttgcttgtttgttgccatccctcaccctttgccatttcccttttcagagaatgtaaatgannnnnnnnnnnnnnnnnnnnnnnnaacttatagggtacatatgttgtcataaaaggtaaaagtgatgcatgccaaaccaaactaaaccaatttggattatctgctgttcgggtaatcttcacagaaatgactgagagaagaatnnnnnnnnnnnnnnnnnnnnnnnnnnncctcctaccacctcaacaggactttgtccagactctcctcctcttacctttgtgccttgactgtggttctttgtggcaagatactttggttggtaaaataat

SEQ ID NO: 14380 - DNA, 759 bp, Macaca Fascicularis
acagaaatggatgaaaatgagtcatgaacacagaaagtctaagaggagaaatatgaaggatgaaaagctctgtagatgctgtatacacactacttattaagagtttattagggtagtatattatagtcatctgttatgctgtgaaacttgaaattcagtgttatcattttgaagtctgtaaattgtgttagtcattaacttagtcacctgttgtattcctgtatctacacaaaattattttaagtgctcatctgtgaggattaatatacaaaaagtatcctttgagatgaagtagtgttctcaaaataaggttatattattttcttcttctgcttgattttcatcttgtgttttgctttgtttttgtaaggaaccatctcttggtttggtcacatcatttcacagcagccatttgtttttaaggtcaaggctccagacaggttgttactggtgtttgcagcgtgtcagtacttgcagtactggaatatgttctaggctagtgtctgtgcgtcactgtggttttagtatggaaggacttacttgagaaatactaccttgcttttctatgatttctttttgcagaattatagtgtgtttactcctaagatgacagttatctttgtctatattcagcatctaagacaaatatttaaacattttaaagaaccactgtgttaagtttaggattatttacttaccaaattagaagtttgacttttatatgttatatacaattttaaaatttcacgaattcacctt

SEQ ID NO: 14381 - DNA, 742 bp, Macaca Fascicularis
  misc_feature (1)...(742): n = A,T,C or G
gaagacatagctgtgaagctgggaactgatctagaannnnnnnnnnnnnnnnnnnnnnnnnnnnnnnnnnnaagaatatctagccctctgttcaacaccaaacaatacacaatggaactagagcggctctatctacagatgtgggagcnnnnnnnnnctggcaacaaacctgaccacatgattaagcctgttgaagtcactgagtcagcataaataaagactgcacaggagaattacccctatacctgagcctcaaccttctgggggaaagggaactannnnnnnnnnnnnnnnnnnnnnnnnnnnnnnnnnnnnnnnnnnnnnnnnntatataatggtaatagaatagcacagccagacttgcttcctgcatggtagggagagacacaagagatgggaaactgctgttccacaaggaatctccgtagaattnnnnnnnnnnnnnnnnnnnnnnnnnnnnnnaaggtctgatctcccttggtctcttccatgggatggttagtgtggaggggagatatagattgtccggccgctttgtgattccatggattgattcagtcttctggattaacttttttctttatattttgggtactggagcttttaaaaatgtttggtttcaggtatttttattcatgtgaagtgtatatgattctcttgagataaggttttaagctaaaatgttactccctgttttagtttctgaactctgacagatcgacagggactttgctggtgtagt

SEQ ID NO: 14382 - DNA, 702 bp, Macaca Fascicularis
aaaggaaaggccagcttccccgtggacggccgactccctgcccaccgttgccccctcgttcagcaggtgactttctctctgccatctcttacccggcaaaggatcttgctcagtagctggaagaatgctgctctcacacagtctcttctcggaaacttcaggatgctccttggtcaccaggcagtgggagctgtagaccagccacgtgcacttgccccacgttcactgctgactggttttactagaacaggttcaggtcaccgtgactcctctcacagtcagccgcccgcccaacgtcatcacaccattgcatctgaaaactgaggaattcgctacttgtagtcggcttgtctgggttttcaaaattgtctaaggttattttgaagtctccttttttaaatgctaaaattaatgtcctcattaatgcaagtaattttagagcacagtgtagccatgtacagtttccattatttaaaataaatgaatgtgttggttcatttggtgtatggggaaatcatagtaactggaaataaaagttcgatcttttacaaatgtgcttgataaagctgttaagaaacacacagaatattgtctttcctaagtctgccaactgctgtagaggactcggctggggaatggcgctaacccgtgcgaccatgaatgtttgtgttgttttaaatatctagtgcagcacatcagcca

SEQ ID NO: 14383 - DNA, 750 bp, Macaca Fascicularis
  misc_feature (1)...(750): n = A,T,C or G
aggtgtacgggggtgacgannntattggnnnnngacgcacaaaatcactcacctgtccacactgcaggtggggtctctcaacgtcaagnnnnnnnnnnnnncatgtcacacttcaggacacgtctgttacttcgtgagcaggcccggcggctcggagccccctgctgtgttcacaggtgataccttgtttgtggctggctgcgggaagttctatgaagggagtgcggatgagatgtgtaaagctctgctggaggtcttgggccggctgcccccagacacaagagtctattgtggccatgagtacaccatcaacaacctcaagtttgcgcgccacgtggagcccggcaatgccgccatccaggagaagctggcctgggccaaggagaagtacagcatcggggagcccacagtgccatccaccctggcagaggagttcacctacaaccccttcatgagagtcagggagaagacggtgcagcagcacgcgcgtgagacggacccagtgaccaccatgagggccgtgcgcaaggagaaggacgagttcaagatgccccgggactgaggctgccctgcaccttcagagcatttggtcaagatgccccaggactgaggccaccctgcaccttcagagcatttgaggatgaggctcttttaggtaactggctttcctgctggtcgcnnnnnnnnnnnnnnnttgatttaaccttaatttcacagcccttggcttgtgttattggatgttctaatgca

SEQ ID NO: 14384 - DNA, 754 bp, Macaca Fascicularis
  misc_feature (1)...(754): n = A,T,C or G
aagcaaaatgagcatgcnnagataaaaaggaatagaagaagagagctgtggacacaaaaaagacaaantnnnngcctgtcccaagtgggtccagtaaatgagaatgttatggaagaagatctaaaaaccatgattgaaagacacttaacagctaaaactccaaccaagagagttagaattgggaaaannnnnnnnnnnnnnnnnnnnnnnnnnnnnnnnnnnnnnnnnnnnnnnnnnnnnntccagatgagtgaagttgatgaggaatctggattaaaggattcagaaccagagcgaaaacgcaagaagactgaagactcttcttcaggcaaatcagtggcatctgatgtccctgaggaattagactttcttgtacctaaggctggattcttctgtccaatttgttccctattctactcaggtgaaaaagcaatgacaaatcactgcaagagtacacgtcataagcaaaatactgagaaattcatggccaagcaaagaaaggaaaaggagcagaatgaggctgaagaaagaagctctaggtgattgggggaaagtggaaagaattatactagaaatttgtttagggtccagttgatttgtgtatttttgttatcatttaatttgtaattttcgtttcagaagcaaatattcgtgttgtacaaatttctgattgccctaaatgtagagagactgatggggaaagtatgatgggtttgatttttnnnnnnnnnnnnnnnnnntggagaaatatctt

SEQ ID NO: 14385 - DNA, 717 bp, Macaca Fascicularis
  misc_feature (1)...(717): n = A,T,C or G
agagcgtcatgtatcggnnnnttgtagggactgannncnatncctgcatcagactcgatgcagannngcccgaggagagttccgccaggaggggtcccggattccccaggctaggcccaggttgggccggggctcaccgccgactcgcagagggatgaaaggctcttcaggccccacatcccctaccccccggaccagggagagcagtgagctggagccgggaccctgctctgctaaaccagggctgcctcaggccaggcccccacggccccgctctgcccctgccttttctcctatatcctgtagtctgtctgactccccatcctggaattgttacagcgggggtcccttgggccaacctgaggtttgttttgtccctaaatctcccccactcactatttctccccgggtctgataatgcctttatgttgaagcccaagatatagccccaagatggggtaacacgtgggaaatatgctagttcccctccaggccgctgattccatgtgacagccgttaagtccttggaatgccagccacgctgtccaaagcattaaagagcagcaccttgagacagaacaaaacagggacctgccaccccttccttccctccacagcacaagattttgggaccacaaaaaaaaatctatatttttatattggggggagggagtagaaaagcaagcccctatactgggccctattcagtggcagctt

SEQ ID NO: 14386 - DNA, 817 bp, Macaca Fascicularis
  misc_feature (1)...(817): n = A,T,C or G
atgagagtacnnnnnnnnnnnnnnnnnnnnnnnnnnnnnagctggcatcagtgtggcagctgnnnncntactnnnnnnntccatgnnnnnnnnnnnnnnnnnnnnnnnnnnnnnnnnnnnnnnnnnnntccacggaaccgagcccatcttcttctccttctatgtcttcttcaccaagtttgcctctggagtgtcactgggcatttctaccctcannnnnnnnnnnnnnnnnnnnnnnnnnnnnnnnnnnnnnnnnnnnnnnngtgtcaagtttannnnnnnnnnnnnnntgaccatggctcccatagttctcatcctgctgggcctgctgctcttcaaactgtaccccatcgatgaggagaggcggcggcagaataagaaggccctgcaggcactgagggacgaggccagcagctctggctgctcagaaacagactccacagagctggctagcatcctctagggctcgccacgttgcccgaagccacaatgcggaaggccacaggagggatcaggacctgtctgccggcttgctcagcannnnnnnnnnnnnnnnnnnnnnnngaactgaagactcaaggaggcggcccaggacccttgctgtgctcaccgtggggctggctgctctgtggcctcctgcctcccctctgcccgcccgtgaggcaaagccctgggnnnnnnnnnnnnnnnnnnnnnnngactgatcgggcctagcccggaacactaatgtagaaacctttttttacagagcctaattaataacttaatgactgtgtacatagcaatgtgtgtgtatgtatatgtctgtgagctatta

SEQ ID NO: 14387 - DNA, 707 bp, Macaca Fascicularis
  misc_feature (1)...(707): n = A,T,C or G
gagcctttgccccagtgtgactgttcgttatgtacacaataatcccatctgacaagtttgcgaatttgggaataataaactcacaggaaattctcaccacggggccgagcaggaggcgccatcatgggagttgacatccgccacaacaaggaccgaaaggttcggcgcaaggagcccaagagtcaggatatctacctgaggctgttggtcaannnnnnnnnnnnnnnnnnnnnnnnnnnnnnttccacattcaaccaggttgtgctgaagaggttgtttatgagtcgcaccaaccggcctcctctgtccctttnnnnnnnnnnnnnnnnnnnnnngcttcctggccgggaaaacaaaacggccgtggttgtggggaccataacggacgacgtgcgggttcaggaggtgcccaaactgaaggtatgtgcactgcgcnnnnnnnnnnnnnnnnnnnnncgcatcctcagggcagggggcaagnnnnnnnnnnnnnnnnnnnnnnnnnnnnnnnnnnnnnnnnnnnnnnnnnctgttctgctctccggtcctcgcaagggccgagaggnnnnnnnnnnnnnnnnnnnggccccaggaaccccgcacagccacaccaaaccctacgtccgctccaagggccggaagttcgagcgtgccagaggccgacgggccagtcgaggctacaaaaactaaccttggatcctaccctc

SEQ ID NO: 14388 - DNA, 616 bp, Macaca Fascicularis
agatatgaagggtgcacggattgtggataaggagtatatcttctagccacgaaccggtagagaacagaaataatggttctctcaaacgttcagtaccctgggcactccactaagggtttaaagagatatgttgcggagtataactctcccttccctaccccatcactcttctttagtgccagggctgagggctggtcagcgtgctggaagaggttgacagttttggaattgactccatgctaaatgtcaattaccaatttggattgatgaaagtgatttttctgctttacccctttcccgtcagaaaggttttcttctgtgcttcccctaacttacggatgaacagactataactaggaaaggaggaaaggtatcagggatttttaagtctgtttagagagcaaaccatattgtgcctcttcatcttgaccccggctcttctagataggtcttaaacactgctgttcaccagattatcttaacaaataatactcaactaaatatttgcatttaggaatactcttaaaacagatattgccaactagatacactgcctcaatcttgaccagacaagagaacagttaaattctcttagttgggtagtaacttgaatatc

SEQ ID NO: 14389 - DNA, 916 bp, Macaca Fascicularis
  misc_feature (1)...(916): n = A,T,C or G
gcagcagatgagagcagcggtgcagtgcagtgnnnnngcgnncccagcaggtggcagtgcaggagcaggagatcgcccggcgggagaaagagctggaggcccgtgtgcggaagccagcagaagctgagcgctacaagctggagcgcctagccgaggcagagaagtcccaactaattatgcnnnnnnnnaggcagaagctgagtcggtnnnnnngtggggaagctgaggcctttgccataggggcccgagccagagccgaggctgagcagatggccaagaaggcagaagccttccagctgtaccaagaggctgctcnnnnnnnnnnnntgctagannnnnnnnnnnnnnnnnnnnnnnnnnnnnnnnnnnnnnnnnnnnnnnnnnnnnnnnnnnnnctggtgtccagcggcagtgggaccatgggggcagccaaagtgactggggaagtactggacattctaacccgcctgccagagagtgtggaaagactcacaggcgtcagcatctcccaggtgaatcacaagcctttgcgaacagcttgagccnnnnnnnnnnnnnnnnnnnnnnnnnnnnnnnnnnnnnnnnnnnnnnnnnnnnnnngttgcatgtaatncactggcctccntgagcatgtccattgannnnnnnnnnnnnnncctcatctctccttgccaaatagtttgtgccttgtcttgaagggggttgctccccttgccaacctcacactgctatgattgccaactccaatggtcccatgtcagccttctgatgatcccactccaccccatctcaacttatttaattcctaattaaatcagactgttggagcctgttgtctagaatactttcctgaccaagactgaaggatgtgctggaggttttcaactttgctacccnnnataaattgctataagta

SEQ ID NO: 14390 - DNA, 691 bp, Macaca Fascicularis
  misc_feature (1)...(691): n = A,T,C or G
gcaagctgcggaagataatgaacaccaagacctacctggagtggcccatggatgaggctcggcaggaagggttttgggtaaatctgagagctgcgataaagtattaggttcccacatttaaagccagtctttgtctagttgggatctttatatcactagttgtagataagttaattcagacataattatataaaagctacatggatgtaccgtcatttgaggacttccttactaaaactacaaaacttcaaattttgtatagggtgctgttttgtaaacatatgccagatttaaaaattggtttttggtttttagttttttctatgagataaccatgatcattagtctattattgatatctgaatatagtcccttggtatccaagggaattggttgcaggatcatcgtggatatcaaaattcatagatgatcaagtccttataagagtggcatnnnnnnnnnnnnnnnncaatttacattctcctgtatactttaaataatctctagattacttatgatacccaaatacaatgtaaatactatgtaaatagttgtactgtctttttatttgtattattattgtattattttttattttcaaattttttaaaacatacttttgatccacagttggttgacttcatggatgcagaacccatggatatagagggccaactgtaatctgtagcaa

SEQ ID NO: 14391 - DNA, 790 bp, Macaca Fascicularis
  misc_feature (1)...(790): n = A,T,C or G
tacatacagaannnctnnnnnnnnnnnnnnnnnnnnnnnnnnncagctggcaatgtgacaaaagtctttcctgggacaacaatcaaatcatgtatttgtatttttttaagtttaccaatgaattgtacaacaatgtaaaaataaagttcatcctaatatgatgtgcacatcnnnnnnnnnnnnnnnnnnnnnnnnnnnnnnagagtgatgtttccctcacacactgcatgtggcacgagcctcttgtttttcttaacaatgagctgaaaagacagcagatgttcacagctaatgctnnnnnnnnnnnnnnnnnnnnnnnnagctctgtgcccgcaggtaagcacgcacagtcttatagttctccttgtaaaatatcatcacccttcctgcctgagaaacgagtgcatttgtattttatataacaacaatagtcaaggcagcattgcaacactgagcagggtgaggtgggggtgctgagcacaggacaagtgggaggaggcctgccctccagtcagacgcatccgcgtcgcccttctgtgtggagtcacgttgagactgcacacagcatgtgtctcctcttgggagataacttttgcctctgagttgttttaagcaattagaatcaggtcctgaatccccagactgttcagagacttcaagggacacctccctcacaagaaacctggcacccccactgtgtacctgtgggagggaaggagtgcgtttgtgttcatctgcattctgtttgtcagtggtaacagactctatcaatgtaaaaancatggttgtc

SEQ ID NO: 14392 - DNA, 749 bp, Macaca Fascicularis
  misc_feature (1)...(749): n = A,T,C or G
ggaggtgnnnnnnnnnntcangggnntcaggaaagtggatgcgnnnnnnnnnnnnnnaagattagtgagtgctttnnnnnnnnnnnnnnnnnnnaatgttnnnnnnnnnnnnnnnnnnnnnnnnnccatgagaaagttgtgctttgtgctgagcctcctgggaaactcacctgtcttgctcctggannnnnnnnnnnnnnnnnnnnnnnnnnnnnnnnnnnnnnnnnnnnnnnnnnnnnnnnnnnnnnnnnnnaaaaacacagagaggggtgtcctcctgaccnnnnnnnnnnnnnnnnnnnnnnnnnnnnnnnnnnnnnnnnnnnnnnnnnnnnnnnnnngaaggcttagatgcattggctccatccaacacctgaaaaacaaacttggcaaggattacattctagagctgaaagtgaaggaaccttctcaagtgactttggtccacactgagattctgaagcttttcccacaggcagcagggnnnnnnnnnnnnnnnnncttgttaacctataagctgccagtggcagacgtttaccctctnnnnnnnnnnnnnnnnnnnnnnnnnnnnnnnaagcataannnnnnnnnnnnnnnatacagcctttctcagtgcacattggagaaggtattcttagagctttctaaagagcaggaagtgggaaattttgatgaannnnnnnnnnnnnnnnnnnnnnnnnnnnnnnnnnnncattcagatgaacctaaaacctcaaacctagtaattt

SEQ ID NO: 14393 - DNA, 698 bp, Macaca Fascicularis
  misc_feature (1)...(698): n = A,T,C or G
aaagtatcatcgtcaggcccaacccttagtttaaaaagtcagnnntccatcccattgggttcactgaggcacataaagcaattgaggagaaggaggacccctcgtccccctaggagcagacccaagcctgtggcaccaggcatnnnnnnnnnnnnnnnnnnnnnnnnnnnnnnnnnnnnnnnnnnnnnnnnnnnnnnnnnnnnnnnnnnnnnnnnnnnnnnnncctgaagcccgatgacgtcttacgaggtggacgttggactgttcacgcacatcgggcgtcagtgactcatggagaagaaatggggtaaatttttagtgatgttgctaatcattgaattctgttctctattaaattaagaaaatgttccaaaagccataagcctgaaggttggccctgtgcacacacacatacacacagacacacaccacaacacactacacatacacacacacaaggagagagagaacactgatgtggaaaacaagctgtgtcttcttaactgcccaagtgaaaagcaaccaagtccaggaaattgcaatagctgttaaggaaaggaaataatggtacagatctttttctgtctatcaaaactatttgatccaagtgaaaaaaaagactagaaagctacggaacctgccattagtattgtggtgtatttttaagattaaaggcacactgatggacaaaaaaaaaa

SEQ ID NO: 14394 - DNA, 713 bp, Macaca Fascicularis
  misc_feature (1)...(713): n = A,T,C or G
tggcagtcgggctggggtagggtgggaggacatctcaaagaagacagtttcctaatgctaaagcttgagggaggggaggggaacaagtaaaaggggccnnnnnnnnnnnnnnnnnnnttccaaagaaccaggtgggactccctttttcaagctctagtcccaccagcctcctggagaatagtgaggccctcaaggagctgtgatcaaatgctgaggacagtgattccagacttctctgtctacaggctctgttccaagagggggtccctctgccacgcttcctaggccagacccccggctttcccgnnnnnnnnnnnnnnncttcctgcccccatcaccagaatcacccccaaactggggggacaatctgactcgagtcaaccccttctcactacgggaagacctcaggggtggcaagatcaagcttttggacacacccagcaagccagtcctgcctcttgtgccaccatcaccattcccctccactcagctgcccttggtgaccaccccggagacgctggtccagcctggaacacctgcccgccgcnnnnnnnnnnnnnnttcatcccctgagctcccccgccgtatggagacagcacttccaggtcctggccctccccccgtgggcccctcggctgannnnnagatggagtgtgagggcagcagccctgagccggaacnnncaggaccagcgccccagctncctctggctg

SEQ ID NO: 14395 - DNA, 838 bp, Macaca Fascicularis
  misc_feature (1)...(838): n = A,T,C or G
cccatgacattagcacataaaaaaggactgcactgttnnnnnnnnnnnnnnnnnnnnnnnntgactccgtgagtgtgagacacatgtttgaactgcttttctatcaatggagcactccatagtctcaaactgtcccccttatgaccaannnnnnnnnnnnnnnnnnnnnnnnnnnnnnnnnnggtgtactttatagctatgnnnnnnnnnnnnnnnnnnnnnttggaagctaattagcccacnnnnnnnnnnnnnnnntagcttgggccttaattagcgttgtactctaatcaaaggactctttctaaaccatatttatagctttcttaacctacacatagtctatacatagatgcatattttacccccagctggctagagatttatttgttgtaaatgctgtatagatttggttttcctttctttacttaccctggtttggatttttttttgaatggatttatgctgtcttagcaatatnnnnnnnnnnnnnnnnnnnnnnnnnnnnnnnnnnnnnnnnnnnnnnnncgtggcctgtgctgtccccgggcataggacagcagcatcaccattgcattcccttgggattcatgcccctcccggatggttttgggttttttcgggggttctttggggttggtttgtttgcttcttttccagagtgtggaaagtctacagtgcagaaaggctttaccctgccagttgatttgaaatactttcccctgcgcagggccgtatgcatcctgccaagctgcgttatattctgtactgtgtacaataaagaagtttgcttttcgtttaccaaaaaaaaaaaaaaaaaaaaaaaaaaaaaaaaagg

SEQ ID NO: 14396 - DNA, 665 bp, Macaca Fascicularis
  misc_feature (1)...(665): n = A,T,C or G
gcacccccagcanntgcagtcctcactgaaaagnntcatcaggatcgtccaccgtgtatattatacgcttnnnnnnnnnnnnnnnnnnnnnnnnnnnnnnnnnnnnnnnnnnnnnnnnnnnnnnnnnnnnnttgattgctgacagctacagtcaannnnnnnnnnnnnnnctttttttaatgtagtacaacagtgacaattatgaaaggcttaccttggaagagttgtcatttttactgccaattttttggatgaagatgtttttataaacctttcaaaannnnnnnnnnnnnnngcaggaattgcacaattaactcaataatactgtgtgttctcaagaagctcccttagtgaggccgatcttaggannnnnnnnnnngcctgttgaaggcatcctgggaaagaaaacaagcatcccagcgggcatctgaccacgacttctcctggagtcctcacnnnnnnnnnnnnnnnnnnnnnnnnttttacgaagtannnnnnnnnnnnnnnnnnnntaccctgtcctgccccaccttccctgctaacattgaggtgtgtgcagttaccttctgagcttggaacaagcagactggaattttcctctgctacctcttgtgtataaaatcttgtttataaaatttcaaaagtaagtagatacactagggaaa

SEQ ID NO: 14397 - DNA, 455 bp, Macaca Fascicularis
gctgtacatgtacatcacatcacggcctgacagagtggcctcagagacacaatggctccagctggaacaagaggtggtgtggctcctggctaagcttggtgtgcagagccccttgcccctagtcactggctccaactgccagtgtaatgtagaggtggtcagagcgctcacggtgatgttgcatagacagtggctgacagtgcggagggcaggtgggcccccaaggactgaccagcagaggcggacagtgcgctgtctgcgggacacggtgctgctgctgcacggcctgtcccagaaggacaagctcttcataatgcactgtgtggaggtcctgcatcagtatgaccaggtgatgccgggggtcagcatgctcatccgcgggcttcctgacgtgaccgactgtgaagaggcagccctggatgacctctgtgccgcggaaaccgatgtggacgacc

SEQ ID NO: 14398 - DNA, 707 bp, Macaca Fascicularis
  misc_feature (1)...(707): n = A,T,C or G
ctgnnnnnnnnnnnnnnnnnnnnnnnnntggatctgccgctagcagtgctctccaaaatggacatcaaccggcgacgctacccagcccatctggcccgcagctcttcccgcaagtatacagaattgccccatggtgccgtctctgaagaccaggctgtgaggcctgcggaccttccctgtgactccacgggccagacctcaacctagaaaggtggccacaggacttgcaactcagggtggtgtctgaagagcagagggtggcccggccnnnnnnnnnnnntctagtcttttccaaatagatcgtgggcctgaggtctccacttcttgaggtctgaggcccagcaacctctagaaggtagcctcctggtatttgctctcccagtaaaatggttttgggcaataacnnnnnnnnnnnnnnnnnnnngccagggaggctctctgtctctgccggtgatggcgaggggaccaggggtgcctctgagccccattctcgtgtttccctgtttttaccttttgcctgtagggcagagagatctggtttttagcaaattcccagtaggatnnnnnnnnnnnnnnnnccccctccttttagagattggaggctataagagtccagatgttggagccaggctgtctgnnnnnnnnnnnnnnnnnnnacacttgcaagcttgatgacattactcaaattaatctttgtgcacttcagc

SEQ ID NO: 14399 - DNA, 748 bp, Macaca Fascicularis
  misc_feature (1)...(748): n = A,T,C or G
cctccctctcctcccactcccatctcttctccctnnnnnnnnnnnnnnnnnnnnnnnnngcgccctggggcctgtatgggggcatcgtggacaccaagggnnnnnnnnncctggcagcgtggacccnnnnnnnnnnnnnnnnacggcgtgctatgacattgacgtggaagtagaggagccattaaagggacagatgagcagcttcctcctgtccacggccaaccagcaggagatcagtgctctggacagtaagatcgggcacaagaccattgagtccataaaccagctcaannnnnnnnnggacttcatgctaagcttctccagagaccccaaaggctatgtccaagacctgctccgctcccagagccgggacctcaaggtgaagagggagactcagggagtactggagtggaagacaagcacatcgggaaagacagtaaacgttgtactccaggggcaggtgaggggattcggggctcagggctcaccccacgctccctcccaggtgatgacagatgtagccggcaaccccgaagaggagcgccgggctgagttctaccaccagccctggtcccaggaggctgtcagtcgctacttctactgcaagatccagcagcgcaggcaggagctggagcagtcgctggttgtgcgcaacacctaggagcccagaaataagcagcacgagggaacttccggccgtgccccgggccccagtgctttgccctgggctccagcatcactcctctgc

SEQ ID NO: 14400 - DNA, 760 bp, Macaca Fascicularis
  misc_feature (1)...(760): n = A,T,C or G
cctgtgaaagtagctggtgcacctnnnnnnnnnnnnactgcccctgagtactacaagttccggcatgcccaggtgtgcaaggcctcagcactgaagcatggtggggnnnnnnnnnnnnnnnnnnnnnggacagagatctttggtgttctctctgtggccaccatcaagtttgagatgctgagcacagccccacagagtcagctcttcctggctctggctgacaagaacatctccacaaagggcacaaagnnnnnnnnnnnnnnnnnnnnnnnttgtgcccgtcttgccacactctttgagagttacaagtgtagtatggaacaaggtctgtaccccacttttcctcctgtgagcagtctggacttctcactactacatgatgagggtgagtggttgttgctcttcaacaatatcctcccctttccggatctgctgagccagacagcaannnnnnnntgcacagccccagggctccacatcactgcacgcacagagatgatgtgcaannnnnnnnnnnnnnnnnnnnnggatttnnnnnnnnnnnnnnnnnnnnnnnnnnnnnnnnnnnnnnnnnnnnnnnnnnnnnnnnnnnnnnnnnnnnnnnnnnnnnnnnnnnnnnnnagggctgtgcgtgaggtgctccatactggcctggctatgctgggtctccctccacnnnnnnncatctgaggccacagaggctccaatatttgggaatgttcaaagtcatcnnnnnnngaaaaaaagcaaaaacccacgg

SEQ ID NO: 14401 - DNA, 764 bp, Macaca Fascicularis
  misc_feature (1)...(764): n = A,T,C or G
gacatggaaaatgannnngttatgggtacgcacaaatccaccaaacaagtagaattgactgcacaagatgtgaaagnnnnnnnnnnnntttatgacacccctggaattacaaaagaaaactgtattttaaatcttctaacagaaaaagaagtaaatattgttttgccaacacagtccattgttccaagaacttttgtgcttaaaccaggaatggttctgtttttgggtgctataggccgcatagatttcctgcagggaaatcagtcagcttggtttacagtcgtggcttccaacaccctccctgtgcatatcacctccttggacagggcagacactctgtatcagaagcatgcaggtcatacgttactccaggttccaatgggtggaaaagaacgnnnnnnnnnnnnnnnnnntcttgttgctgaagatattatgttaaaagaaggacgggggggatctgaagcagtggcagacatcaagttttcctctgcaggttgggtttcagtaacacctaatgttaaggacagactgcatctccgaggctatacacctgaaggnnnnnnnnnnnnnnnnnngccccctctcttgccatatattgttaacatcaaaggagagcgcatcaagaaaagtgtggcctataaaaccaagaagcctgtttcccttgtattcaannnnnnnnnnnnnnnnnnnnngatagatgtatgagaccgaccttgttcactccagatattaactgtattgaacacaagaatatacactgaaat

SEQ ID NO: 14402 - DNA, 747 bp, Macaca Fascicularis
  misc_feature (1)...(747): n = A,T,C or G
tcacatcccaaaatagtgttgacatccctgnnngcgcttgctgtcccacccccgactcccaccaaagcggcacctcccgcgttgnnnnnnnnnnnnnnnnnnnnnnnnnnnnnnnnnnnnnnnnnnnnnnnggagatggtnnnnnnnnnnnnnnnnnnnnnnnnnnnnnnnnnnnnnnnnnnnnnnnnnnnnnnnnnnnnnnnnnnnnnnnnnnnnnnnnnnnnnnnnnnnnnnnnnnnnnnnnnnnnnnnnnnnnnnnnnnnnnnnnnnnnnnnnnnnnnnnnnnnnnnnnnnnnnnnnnnnnnnnnnnnnnnnnnnaaggtcaactactgcnnnnnnnnnnnnnnnnnnaaggactggaaggnnnnnnnnnnnnnnnnnnnnnnnnnnnnnnnnnnnnnnnnnnnnnnngacgaagtccacgtggctgaaagcgtgatggagaaggtgaccgtgtgaggctccatcggccgccctgggagctggggcccctcgcactcctgtgaggcttttgcaggtcgaaggcccccctgaggactctggggggacgttgagaagaggggtgtgggaaggtaaagaaacnnnnnnnnnnnnnnnnnaacnnnnnnnnnnnnnnnnnnnnnnnnnnnagcggactccccccgcccgggccccccgcccgcnnnnnnnnnnnnnnnnnnnnnnnnnnnnnnnnnnnnnnnnnncttgcccacagggcctgtgctgcgacgcatgtacatacgtgtc

SEQ ID NO: 14403 - DNA, 780 bp, Macaca Fascicularis
  misc_feature (1)...(780): n = A,T,C or G
ttcccccccgctttgagaccaagtttcactnnnnnnnnnnnnctannnnnnnnnnnnnnnnnnnnnnnnnnnnnnnnnnnnnnnnnnnnnnnnnnnnnnnnnnnnnnnnnnnnnnnnnnnnnnnnnnnnnnnnnnnnnaacgtatgcccnnnnnnnnnnnnnnnnnnnnnnnnnnnnnnnnnnnnnnnnnnnnnnnnnnnnnnnnnnnnnnnnnnnnnnnnnnnnnnnnnnnnnnnnnnnnnnnnnnnnnnnnnnnnnnnnnnnnnnnnnnnnnnnntgcgcctggccgtggacctggctgtctttatcatccccacaaacattttgaaactggaatatttgtcttcagaaaatggaaacaagnnnnnnnnnnnnnnnnnnnnnnnctagcaccacctctcctgtgtgtggactagagctcctcatgctatcagcacttaccctgtgtttaaaaagatcttgcaccaagccaatggcgttcctggctctcctgcccccagaatgaacattttcggcttccttaggagttttgccctaccgtattccaaagcgtgtgctggtttctcatattgtctgtaggctcactcggcccgcagtttatgtgtgtgcttttttctatgaaaaatgatgtattttgctacttcctgtgtacaaagttttattgtaaatgttttttgtgctttgcatgaacaggggccacgttgttgcaattgtttcagtaaaactggtttgatttctaaaatgttcctgtaacatatcttttatgaacaaatctgaaca

SEQ ID NO: 14404 - DNA, 671 bp, Macaca Fascicularis
  misc_feature (1)...(671): n = A,T,C or G
gctgcctggaatnnncagacctgtcactttgaccgaatgtgcagaccattactaaggcaannnnnnnnnnnnnnnnnnnnnnnaaagaaatgaaacaatgaaaggaacatttgaaggaaaatgtgggtagacattttcttgaaacttgggggaaagcttagaattcttttgagtgaactacttttttttctcctaaagtttcaggtgatcataatagcaacacttcactattctgttacttcttagtgtaagtacacaattctttcaggagcagagcagtgtcctataatcctagaccttttcatgacacttaaaaaacgatgtttcatcctctgattgcnnnnnnnnnnnnnnnnnnnnnnnnnnnnnnnnnnnnnnnnnnnnnnggttgatgtttaatgagagggatgtcaaagatacattttactttattcaaataaaaataattggttactgggaaaaggtcaagaaagaggcagaaagaggtcagggagggataaagttgtgtcttatgccaagcaaagtgaaaaatatcattttcactttatcaactgagtctttggggcctgtaagcttgaggcaagacagaaataagagaatcaagatttgactgtaaaaattgacaactttagactctgaggctagactgagtacttattatatggctacat

SEQ ID NO: 14405 - DNA, 698 bp, Macaca Fascicularis
  misc_feature (1)...(698): n = A,T,C or G
tagggcagagccaaaaannntgnctagttgggtcctcaacacttttctgggctatttaaagcaacagnnnnnnnnnnnnagtgagagtcctgtcacacccnctgcactcgctgagcttcttgatcnnnnnnnnnnnnnnnnnnnnnnnnnnnnnncagctaaacaggtgtttgaggaactgtggaagagggaaggcaagactnnnnnnnnnnnnnnntcagaaaagcagcttgaactgatggaggaccggggnnnnnnnnnnnnnnnnnnncactccatgatggaggcnnnnnnnnnnnnnnnnnnnnnnnnnaagaagnnnnnnnnnnnnnnnnnnnnnnaannnnnnnnnnnnnnnnnnnnnnnnnnnnaaagccgagcagatccagccatgataaaggagatcctggagaagaagctgtcttcgtgagatgtttggggtccccatccccaagggagaacagtgcagcctgnnnnnnnnnnnnnnnnnnnnnnnnnnnnnnnnnnnnnnnnnnnnnnnnnnnnnnnnnnnnnnnnnnnnnnnnnnnnnnnnnnnnnnnnnnnnnnnnnnctctgggccctgtgcctggaggtgcctccacagccaaccggcagccacccccgcctnnnnnnnnnnnnnnnnnnnggtccggtgatggctgtagcagtggttaaggagtaacaccttcttgtattaa

SEQ ID NO: 14406 - DNA, 711 bp, Macaca Fascicularis
tttccactgaaactccatcttagtgcattttaaattacccagagatgtcaaactgccaaatcaaaatatttcagtagtctttacatcagcttaccttgtaccagaaacattgacaatttactatcaaattatagtaattgagcctgtgtgaaagcatctcatcattttttaaaggaacaccttgtgcgatgccagtgagcatttctaaaaagggtgtgagacagaggtgaaaataagataagagaccatttcagaatgcaccgttgcccaaaaaggtgatctggttctttcttcagagatttctgaagtagaaaataggagtccgccctcattaatctgtgactccacctcttgcatcaaatcaatatctatttgttgagcacttattgattaagaccttgcatatgtctgtccgttttgatttgagatataactttttgtgtgggttgaatgacaagtcaccccaaacacagctgggcacagagagtcagctaggagaccagttattcagggtccatttctcttggatgtaaaagagtcctgggtgaaaggtggctgtagcctaaaccaactagtccttgtgatttgtttctgccctctgtgtttcctgttgtcaaatgctaagtgtgtgtttttgcagtcatgaactaaagcacaaaaagacgcatgagacattgtagtcatatgtctggtgtgacacttggagcaaaa

SEQ ID NO: 14407 - DNA, 781 bp, Macaca Fascicularis
  misc_feature (1)...(781): n = A,T,C or G
tgcgctnnntgatgagcttctggctgatgaagacagnnnntatntggatgaggcagcatctgcacctgcaattccagaagnnnncccactgacaacaaaaaacaaggatggagttctggtggatgaatttggattgccacagatccctgcttcatagatttgcatcattcaagtatatcttgtaaaacaaacacgtattacgggactaggaaatatttatctttccaaatttaccataacagatgtaggtttctttcctttctttgaaggaaagtttaattacattgctcttttattttttccattaagagactcattgcttgggaaatgctttctttgtactaaaatttgattcctttttttcttaagaaaaacaaactcagtttaaaagtatctttagctcgtatgacttgttttcattcaataataataatttgaaataaaactaaggaaatggaatcgtaaaaatctatgacagtgtaactctacagtctcaaaatgacctgataaattgataagacaaagatgagattattggggctattcatattatgattcagaatcattttctattgtggtattataggttggttaaagtgatggcctttttgatgggttttgttgtgtcttgtgaacaagttattactgtgtccattattggaatggaattatcactactgtatcatgagtgggtattttgattctatggttccctcagtattacatgttgacttgtaatcaataatgaatatttcttgatatttaatgtataggacattta

SEQ ID NO: 14408 - DNA, 803 bp, Macaca Fascicularis
cgagcagagcagacgggaggagctggacggcagcgatatgtcagccatcatctacgaaatcccaaaggagcccgaaaagaggcgcgggagcaagcggtcacgggtgatggacgctgacggcctgctggagatgttccactgcccatacgagggctgcagccaagtctacgtggccctcagcagcttccagaaccacgtcaatcttgtgcatcggaaaggaaagaccaaagtgtgccctcatcctggctgtggcaagaagttctatttatccaaccacctgcggcggcacatgatcatccattcaggtgtccgtgaattcacctgcgagacctgcggcaagtccttcaagaggaagaaccacctggaggtacatcggcgcacgcacaccggcgagactcccctgcagtgcgagatctgtggctaccagtgccggcagcgggcgtccctcaactggcacatgaagaagcacactgcggaggtgcagtataacttcacgtgtgatcgctgcgggaagcgctttgagaagctggacagcgtcaagttccacacgctcaaaagccacccggatcacaagcccacctgacccacctgacgactgaccacccctatttattcgtccgctcggacaccactcccgggcttgctgtggcctggacagctgcgagggccgcccggaccgcgggccggaaggaggcgcccccgccccgccccagggctgggccccctgggcaggttccccaccccgccccaccgcatccttttcggagctggtacctggggctgcattactggaactgtcaaga

SEQ ID NO: 14409 - DNA, 732 bp, Macaca Fascicularis
  misc_feature (1)...(732): n = A,T,C or G
gatggagcccggctcctgaccacggaccagaagagcgagatccgaatttannctgcttcccagtgggactgccccctgggcctgatcccacaccctcaccgtcacttccagcacctcacnnnnnnnnnnnnnnnnnngcatcctcgctacaacctcattgttgtaggcnnnnnnnnnnnnnnnnntttcaaaagttgtaccccctatgaaatgaggacgatcgatgtgtttgatggaaactcagggaagatgatgtnnnnnnnnnnnnnnnnnnnnnnnnnnnnnnnnnnnnnnnnnnnnnnnnnnnnnnnnnngggggacacgctggcctctgcaatgggttaccacattctcatctggagccaggaggaagccaggacccggaaatgagagacactaaagaaggtgtgggccagacaaggccttggagcccacacatgggatcaagtcctgcgagcagaggtggcaatttgttaaagggccaaaagtatccacggctagggttggagcaggggtgctgggagctggggcgctgtgggactgggacacttttgtgttaatgctctggacctacctccagagactgctccagagttggtgacgcagctgccccaagggcccctctgtatctagcctggaaccaaggttatcttggaactgaatgacttttctcctcctctcagtgggtggtagcggagggatcaagcagttatttgatttctgctcactttg

SEQ ID NO: 14410 - DNA, 735 bp, Macaca Fascicularis
  misc_feature (1)...(735): n = A,T,C or G
aagccgtnnnnnnnnnnnnnnnnnnnnnnnnnnnnnnnnnnnnnnnnnnnnnnnnnnnnnnnnnnnnggaagcactgtcatgtggacgtggatgaatgtaggaccggcatcaccctctgctcgcaccgttnnnnnnnnnnnncaggcagcnnnnnnnnnnnnnnnnnnnnnnnnnnnntgctaggcctggacgggcgcacctgcacggaggggtccccagaacccccaaccagtgccagcatactcagcgtggccgttcgggaggcggaaaaagacgagcnnnnnnnnnnnnnggagattcgcgagctgcgaggnnnnnnnnnnnnnnnnnnnnnnnnnnnnnnnnnnnnnnnnnnnnnnnnnnnnnnnnnnnnnnnnnnnnnnnnnnnnnnnnnnnnnnnnnnnnnnnnnnnnnngctgtgggnnnnnnnnnnnnnnnnnnnnnnnnnnnnnnnnnnnnnnnnnnnnnnnnnnnnnnnnnnnnnnnnnnnnnnnnnnnnnnnnnnnnnnnnnnnnnnnnnnnnnagtcatcgataagaagcctctacagcacccctaatttatacagaagccagacccactaatcctctgggattggccgactgtgagcnnnnnnnnnnnnnnnnnnnnnccaaagagcaatgaacaatggaaacttcagagagctgaagaaagggggaggcctgtgttctgggcccacccctgagtcttctggctgggggcaggttgcctggg

SEQ ID NO: 14411 - DNA, 788 bp, Macaca Fascicularis
  misc_feature (1)...(788): n = A,T,C or G
cacatgaacgnnnnnnntgcagcctgtctgtgcacanngacaaggnctcacactgtggcggctgagccaggtgcagcccgagctgtgctcctgcnnnnnnnnnnnnnnnnnnnnnnnnnnnnnncagatgatggtgccagtctccttttcctggactttggaggtgctgaaggcgagatccagctggacctgcactcgtgtcccaaaaccatagtcttcatcatccactccttcctctcggccaaagtcacccgccttgggctattggcctagaagtcaccggatgcgctagccctgaagaggggtgtccatgacatggcctgagctgggcctccaccgactgcctgctcacccctgggctgagggaagggagaggagaggaacaagggcctctgagaccccacccctgagggagactggattggtcttggggcccggggcccaggacccagacccaggacagagtggactctgcctgtgatggggtggccctcctgctgccccccaccaccagtgccttttgtggagagatattttgtgtacacagaagccattccgagtctgggacctgcccctgtgcggatcctgaccccagccaacagctgagctgccaggcctccttgaggcccctaagccacccctagaggtcccatctgaagctggagtcccctggggtcagcggcaagagaaacaagaggagactttgtttgtttttcccctcagccctgccaccttggggagtctggtttttctcttcatcctctctctcctccttactcttggataaa

SEQ ID NO: 14412 - DNA, 811 bp, Macaca Fascicularis
  misc_feature (1)...(811): n = A,T,C or G
agccaaatccaaaccccacccaggctggttnnnctggtagcttctcagatgctgaccttgtggatggcgtttcaggtggagaaggaaaaggaggcagtgatggtggaggaagccacaggaaagaaggggaggaggcggacgccccaggtgtgatccccgggattgtgggggccgtcgtggtcgccgtggccgatggctcatacctgtnnnnnnnnnnnnnnnnaaagaagctgtgcttcaaagaaaacgcagaacaaggggaggtggacatggagagccaccggaacgccaacgcagannnnnnnnnnnnnnnnnnnnnnnnnnnnnnnnnnnnnnnnntcggcagaaacagcccaggcttggcggcagggttagaacagctgcctgaggctcctccccgannnnnnnnnnnnngagannnnnnnnnnnnnnnnnnnnnnnnnnncggattctttgttttaatcttgcgatgtgctttgcttgttgttgctgggcggatgatgtttactaatgatgaaacatccaaagggggataggcacttggacccccattctccaaggcccgtgggagaggggttnnnnnnnnnnnnnnnnnnnnnnnncattattaagtccccgtaactcaaacgtcaaccccaccgaggcaccccctgtcccccagaatctcggctgtttacaaatcacgtgtccattgagcacgtctgaaacttccctggtagccctgacttttttttttaattaaaataaggtaagcccttcaatttgtttcttcaatatttctttcatttgtagggatatttnagcaccccca

SEQ ID NO: 14413 - DNA, 283 bp, Macaca Fascicularis
gttcgctgttggctgtcccggtccgcgccagctccctgcgcgccttgtcgccatgcctcggaaaattgaggaaatcaaggactttctgctcacagcccgacgaaaggatgccaaatctgtcaagatcaagaaaaataaggacaatgtgaagtttaaagttcgatgcagcagatacctttacaccctggtcatcactgacaaagagaaggcagagaaactgaagcagtccctgccccctggttggcagtgaaggaactgaaatgaaccagacacactgattgaa

SEQ ID NO: 14414 - DNA, 730 bp, Macaca Fascicularis
  misc_feature (1)...(730): n = A,T,C or G
tcacaggaagcannnncgggcatgtggnnnnnnnnnnnnnnnnnnnnnnnnnnnnnnnnnnnnnnnnnnnnnnnnnnnnnnnnnnnnnnnnnnaggcttttgcagaacagctgggcaggcgggcactggccctccacggaacgtgcacgggggagcatggcatcggactgggcaagcggcagctgctgcgggaggaggtgggcgccgtgggcnnnnnnnnnnnnnnnnnnnnnnnnnnnnnnnnnnnnnnnnnnnnnnnnnnnnnnnnnnnnnnnnnnnngtgaggggctctgagcacttagcccacaagttccaagactacggannnnnnnnnnnnnnnnnnnnnnnnnnnnnnnnnnnnnnnnnnnnnnnnnnnnnnnagctgacgcagtcttgctgccagtgagtccactgtatctgggcccaaggtcagagcgcnnnnnnnnnnnnnnnnnnnnnnngctactccccgtccttctggctggctccaggagcctttggttcagtaaacgaccctgggtnnnnnnnnnnnnnnntgcttcctctctgctcctacgcatcctgtcctggctggaagagaccatctgggtccactcaagactctgatgacactcctcacctgaggcctcccactgctggggtcccaggacccttccctcttcacctggtgacaggcactcctttcctggtatgggacgtgagctcccgtgccatgctggtaggtcttctc

SEQ ID NO: 14415 - DNA, 731 bp, Macaca Fascicularis
  misc_feature (1)...(731): n = A,T,C or G
tggggagatcactgccatttttacacacttgactttttaaaaatacaaccaaccaaccaccacaacttcttatacatttgggacatgagccagagtttaaaagggaaccaacaaaacactataacttaaaaggatggggttttggattttgtataataataaaaacaatacagcatatggctagggaaggacatggtgtatataattgtaaaatactgttctaaattattcaggcctatagtttccattattggagtcctccattgtgtggccacacagtgtcgttgatttaaaggagccagtgcttcccctctccccaggtagttggtcagctgtggactctgtgacctttgtctaaacctgtgttgtaagatcttgggactttctccctctctttctatgtctatctcttccccccaacactttctcttcttagtctctctttatttttcaatctctgaatcttttagtctctctctctgagtctcattttttaaaatgctcttttagaatgggaaacnnnnnnnnnnnnnnnnnnnnntggggcctatgtgtctctgtcgcgtctgctgtgaagcacatgatgctctatttattgtagaaagtgactttatttgctttctagaattgtttataacagatggtataagagaggtaataaacagagaaaaatctatgcttgtaaagaatacaaaagttaattttacctactataatatgactgtctgaaa

SEQ ID NO: 14416 - DNA, 1382 bp, Macaca Fascicularis
  misc_feature (1)...(1382): n = A,T,C or G
atatgacagatgnnnngatcannatannnntacttaccannnnnactccaaagacctccaaaacnnncaggaatccttggatcaccagaactcatcaattggaaacagcatttacagattcaaagttcacagcctagcctgaatgagactatacaaaatcttgcagccattaagtccttcaaagtcaaacacacacaatgcattctctatatggcatccgaaacagccaaggagctggctcctttcctgctggaatcaaagacatcatctcccagtggtggcaaacccaaggccatcaaccaagagatgtttagactctcatccatggatgttaactatgctcacttggtgaataaattctggtattttggtggtaatgagaggagccagagattcnnnnnnnnnnnnnnncagacctttcccaccagctgtctcttggggcctgagggaacccctgtgtgctggaatctaatggaccacactggagagatgagaatggcaggcaccttgcctgaataccggttccagggtcttgtgacttatgtcatctatcaccacgcccagaatttggccaaacttggctttcctgtctattctcatgtagactacagcaatgaagcnatgcaaaaaatgagttaccaactgcaacatgttcccattcccagaagctggaaccagtggaactgtgtgcctctgtgatgccaatctnnaacataagacagtgttgggcaggtctgggcatgtaattggaggagtggatggtggataaaaagaaagaataaattgtaatcagcagtaaaggagtgggcactgtttgggctctggggaagcagtgtgatgttcaacaggattgccatggtccctgcattcacaggtttctcagtgggaaggaggcccaggtcctcttacatttaaccgatgcaatttagctccccacatttccaggacctctatgacacttcatcagatgcatattgctccaaattatttctcctggaatccttggttcctcggttgcaagacccttgccagtttttctgggagctaggaaaaggtgaatagtattttctgagcactgtgatttatttctttccctttctaaagtctttcccttgtgatcaacaagtggactctccttcataggtctttagagattatcctctcctgttattgctactttataggtacattaaatatactagacacaaatatatatgggatattaggctaaatacagtatacatgatatagcagggaatgttactagaagaaataccaactgatgatatcctatcctctcccagctcctattataggaaaaaagatccaatgttatttctaaggatgagcttccgaaacccaccacaactcttaaataataa

SEQ ID NO: 14417 - DNA, 751 bp, Macaca Fascicularis
  misc_feature (1)...(751): n = A,T,C or G
gagacagaaacgnnnnnnnnnnnnnnnnnnnnnngtgatagtagnnnnnnnnnnnnnnnnnnnnnngacctcaaaggtagcttttaaatattgccagaaatatggaagtgacaaagtacgtgtgataactctggtgaagnnnnnnnnnnnnnnnnnnnnnnnnnnnnnnnnnnnnnnnnnnnnnnnnnnnnnnnnnnnccttatgnnnnnnnnnnnnnnnnnnncaaagtttccagatgttgagaaattagaaaagggactaaatgacctannnnnnnnnnnnnnnnnnnnnnnnnnnnnnnnnnnnnnnnnnnnnnnnttggaaaaagaatcaattgctcagcgttcttacttccgtactcttctcatgtatgggttccactttctggtgtggttcnnnnnnnnnnnnnnnatcagggacacacagtgtgggttcaaattatttactcgagaagcagcttcgcagacgttttcatcgctacacgttgaacgatgggcatttgatgtagaactactgtacatagcacagtgctttaaaattccaatagcagaaattgctgtcaactggacagaaattgaaggttctaaattagttccattttggannnnnnnnnnnnnnngcaaagacctactttttatnnnnnnnnnnnnnnnnnnnnnnnnnnnnnnncttgagcaaactcggaaaatgaattaggttgtttgcagtcttcagttgtgttcatatgcgtcannnnnnnnnnnnatttca

SEQ ID NO: 14418 - DNA, 714 bp, Macaca Fascicularis
  misc_feature (1)...(714): n = A,T,C or G
gtttcaagcagatgggacctacaccctaatcatccgggtgcggcacaacgtgattaagacaggtgtacgcatgatcagcctctcctattcccgaatctccttggccgacatcgcccagaagctgcagttggatagccccgaagatgcagagttcattgttgccaaggtggggctggttcaggaaccacagtgaccaggttgtcactttcctgccaatctcaggaggcaggagtgggaggagtttggccaaggaggggaataggtaaagcaatggcatagtcatttcagggagggcctgtcgtttgcagtgaagccaagaagttgccagagagagaatggatgcacatgtgagtgtgagtgtaggtgtgtgcacatgttgagtttatgatagtgcttgtgagtgtgagaatataaggagggcagaggaatgggaaggaacaagattttctctggtttagaagatgggcatgctgggccaggcgcgnnnnnnnnnnnnnnnnnnnnnnnnnnnnnnnnnnnnnnnnnnnnnnnnnnnnnnnnnnnnnnnnnnnnnnnnnnnnnnnnnnnnnnnnnnnnnnnnnnnnnnnnnnnnnnnnnnnnnnnnnnnnnnnnnnnnnnnnnnnnnnnnnnnnnnnnnnnnnnnnnnnnnnnnnnnnnnnnnnnnnnnnnnnnnnnnnnnnnnnnnnnnnnnnnnnnnnnnnnnnnnnnncgcac

SEQ ID NO: 14419 - DNA, 702 bp, Macaca Fascicularis
  misc_feature (1)...(702): n = A,T,C or G
gttcggggagnnnnnnnnnnnnnnnnnnggacacggacgccttcgtnnnnnnnnannncnnntgcagcccggacagtttcgaccacgtcaacgccccgctgcagcgcatcgcggagaccaggccggcgggcgcgcccgaagcgcccatcctggtggtaggcaacaagcgagacaggcagcggctgcgcttcggaccgcggcgcgcgctggccgccctggtgcgcaggggctggcgctgcggctacctcgagtgctcggccaagtacaactggcacgtgctgcgtctcttccgcgagctgctgcgctgcgctttggtgcgcgcgcgccctgcacacccggccctgcgcctgcagggggcgctgcatccagcgcgctgcagcctcatgtgacccaattggacagtgccatccatgggccccaccttgtgactgggacaacccgggacgtggattggacaggatcgcccaacttcactgggactggacagggcaatctctgcnnnnnnnnnnnnnnnnnnnnnnnnnnnnnnnnnnnnnnnnnnnnnnnnnacccaaccaggtcccaagctccattggagatgaccagtcctttctgggacctcagtgggtcacaatcccactggatggaaaggacttggctatgaatttggaaacgcgaggcctgctcctggagcttcactggacatattctttatgccactcc

SEQ ID NO: 14420 - DNA, 776 bp, Macaca Fascicularis
  misc_feature (1)...(776): n = A,T,C or G
agccaggctgccaaagagaacgagaccagtgatggccaggcttcgggagagcaggaggaagccggtccctcctcttcccaagcagagccctcaaatggggtagccccnnnnnnnnnnnnnnnnnnnnnnnnnnnnnnnnnnnnngccaggcctcgacctgtcaaggccaggcccctggactggcgtgtccagtctaaagactggccccacgccggccgccctgcccacnnnnnnnnnnnnnnnnnntacagagacctgtgggagagagggttcttcctcagtgcggctggcaagttcggaggtgacttcctggtctatcctggtgaccccctccgcttccatgcccactacatcgctcagtgctgggccccggaggaccccatcccactccaggacctggttgctgctgggcgccttggaaccagcgtcagaaagaccctgctcctctgttctccgcagcctgatggtaaggtggtctacacctcnnnnnnnnnggnnnnnnnnnnnnnnnctccaagacctagggggacatggctgtgtctgcagcaagagcnnnnnnnnnnnttccccagctcttctctgggagtctagaacatcctcctacctttctctgcgagttagtttttgattccaggttttcgaacactacatcctttttatgttcttccttgtttgaaagcacttattggctgtgtttttgtagttacctgttttcacactatgagcttcctgagaatggggcctgggtttgattcatctgttttctacagggnnta

SEQ ID NO: 14421 - DNA, 760 bp, Macaca Fascicularis
  misc_feature (1)...(760): n = A,T,C or G
taattaatactaaatattgtgatttctaatntgaggttcaacatgacctacttgaaactttgatacatattagaatacattgtgttaataaacttacagctttttgtgaaacacctcaatcttttctcttgaactttcccttcctgtttgataccaggaaaaaacagtcgaagcttatcaacaattgtaggtgctcctagggattctgtgcttcttgagaacaggacctcttaacgtaaattcttaatgcctccagggcccagtgcaatgcttagccatcaaaggaacttgctgttattgaatgtctattaataattaaaccttcataacaactcagtgaagataggtatttgcattttgcaggtgaggaaaccaaagctcatgatgttggttgaatgaataaaatgctaacatacaaagctggtgtgataacaaccagttattaaccaagcctttacatgtgaataatgcttgctttatagttaacaaaacacctttgtcaatatgggtacccttgtctttagaacagaggtctgttatagaaatggtcacttagatgatagtacattgttagaaacttagatttgcctctttaaattttttaaaaaattattatgggtacataatggttgtcacattggtagaaatttgagagcaagctgcttgggtagtggtgttggttgttatatgtctaagattgtatttatgtagccttttcctttagttattaagcatctgtatatatttggaccttagttca

SEQ ID NO: 14422 - DNA, 1253 bp, Macaca Fascicularis
  misc_feature (1)...(1253): n = A,T,C or G
agtacaacatgccccagtatnnnnngcgtgagnnnnnnnnnnnnnnnnnccgggatgggcagtcaaggacnnnncggcagttccagttcacagactggccagagcagggcgtgnnnnngacaggcgagggcttcattgacttcatcggacaggtgcacaagaccaaggagcagtttggacaggatgggcctatcacggtgcactgcagtgctggtgtgggccgcaccggggtgttcatcacgctgagcattgtcctggagcgcatgcgctnnnnnnnnnnnnnnnnnntgnnnnnnnnnnnnnnnnnnnnnngtacacagcgnnnnnnnnnnnnnnnnnnnnnnnnnnnnnnnnnnnnnnnnnnnnntgcggccctggagtacctcggcagctttgaccactatgcaacgtaactaccgctcccctctcctccgccacccccgccgtggggctccggaggggacccagctcctctgagccataccgaccnnnnnnnnnnnntcctacacagatgctgtcactggcagagcgcagcccacggggatcacagcgtttcaggaannnnnnnnnnnnnnncagagagcctagaacatccctgggcaagtgggtggcctggcaggcaggcactgtggnnnttctgtcccaccaggcccacctggagcccgcttcaagctctctgttgcgctgctgcgtttctcatgcttcttctcatggggtggggttggggcaaagcctcctttttaatacattaagtggggtagactgagggaattctagcctcttccctctgatttttccttttgcgaatccatatctgcaaagtgggccactgtaggggttggggtttattttgtttattttgagttcactttggatcctcattttgtatgacttctgctaaaggacagannnnnnnnnnnnnnnnnnnnnnnnnnggccgccagcctgagcagaggctcggccgtgggctgggaggcagcgctgatccggctgctcctccagcccttcagacgagatcctgtttcagctaaatgcagggaaactcaattttttttttaagttttgttttcccttaaaagcctttttttaggccacatcgacagtggtgggcggggagaagatagggaacactcatccctggtcgtctgtcccagtgtgtgtttaacattcacagcccagaaccacagacgtgnnnnngagagcctggcaaggcattcctcatcaccatnnnnnnnnnnnnnttaaaacaaaaa

SEQ ID NO: 14423 - DNA, 726 bp, Macaca Fascicularis
  misc_feature (1)...(726): n = A,T,C or G
cgcggcannnnnnnnnnnnnctcgannnnnactgtggccttggctttgccctgtggtgtctgtgcagtgtctactcgggacaccaatcagtgctggtgcccccgctggagctggagagcaatgtgtccctgtggctnnnnnnnnnnnnnnnnnnnnnnnnnnnnnnnnnnnnnnnnnnnnnntctgtgatggagatgtgcaccaagggcctgggcgcacagacgggtgtcctcaggatgaagggggtgaacctgtcatgtgtgcgcacatgcatggtggtcgccgaggagcggcccaggattgcgctgacccagtccttctccaagctcttcaaggacctgggcctgccggcccgcgccgtaagcaccacgttcgggtgcagggtcaacgtggccatctgcctccaggtgaggcgctggggcctgtggttctcgaaagctggctgttggcagcgtggagaccaagcttcccagctgttaatgtgcaattttgtgcctgcctgatctctttctccttctctgagcctttgatgtttcatttccacgtaatattttagcttcaagagttttatttttaaagatattctattctagttgaacaaaggcttatttggaaaaaaacacaaattgtttttgaacagtgactaatatcttacctgtaagactctctaagttagatataatacacagctaagttcttaaagcaagattgaacttactgtttaag

SEQ ID NO: 14424 - DNA, 763 bp, Macaca Fascicularis
  misc_feature (1)...(763): n = A,T,C or G
aaggatcgatggaccgtaaataagctgccgttaacacatcnggttactgctataacacgactaataaagcctaatgcctgttccccttacctgtgtgggggacaagcagatgagtgaattggaatgtccagcagagttaccatcccaattatatgttcattttgtatattttttgggcgggggaataattgacctgcggtaaaaaaaacctttgaccatttttatgtccattgagtattttccttttcatcctgttaaaaaaaaagataactagtactaatcattggagtggcctaagtgtgatttaactctttggaagtcacaccctcagaaagatgagtagaaaccagcaccagcacagcccagatcttttctttcctctccttttcctcgtttattcctaaaggaatctgaccattttaagtctctacggcccaaaaaaaagacaaaactaaaaattcctttttattcctgtcaactggatggaaacaaatttaatggagctgtgtaccattgaagaaacctggtgtcnnnnnnnnnnntactgtaaagaacttcctgtaaaacacgttctttaacaaatgaaaagcattggagcgtgtgaatgaaagacttgtgacctcctgctgggactctgatannnnnnnnnnnnnnncttcgtgtgtcttcagtgtctcattgtcatccctgcttctgtttggtcttagagtgtttggatataactgaattgtagatggtaaaggaaatttgatgtgtttttgtt

SEQ ID NO: 14425 - DNA, 713 bp, Macaca Fascicularis
  misc_feature (1)...(713): n = A,T,C or G
tgattacaaactcctctaaaaaaagcaaagatgaatttaaaatatcgatatacatatttatctaaaaagcaaaagagaaaaaaacccctgcaaatacagggaatcatatcataaaacatttatacacaaaagcttgtatactgcaagactgaactacacaccaaggatcttgttcaaatacaaatgttcctcctcagaagagtctcttgttggttgatttttttttatataaaagtttaaaataccttaaaaatattttgaagttttaaaaaaatgtcctgatgagccagacatatttctggaaggaggcaagacccacgttctcagttttctcttgtgctaaatacagagtcacagttgctagggattgggagattaattgggtaaaaaaaaaaaatgaagccaacatttcaatttgaagtcaaatatataacaggatgctccatccctcggagaacatgccagaacatgtctgtagtgacacccacaagaaaacaatgaaaaaatgcttcctattacaatgatatatattctgagggtcagggagagaaggaaagggggagggcttccccctgctttctggactgcccacctctacaagttttgctctctgggtttgttttgtttagtcttgtggttttgtacttcgatttttgcacacagtggtatttactgcatctacacagacnnnnnnnnnnnnnnnnnnntgggtc

SEQ ID NO: 14426 - DNA, 753 bp, Macaca Fascicularis
  misc_feature (1)...(753): n = A,T,C or G
aatagccaagcaaaatgatagtaattctttgtcttgttctttcagtcagaggtannnattaagtnncnactgtgtgctcagcactaaaggtttgttgataaaatgacaattaaaaaatggcatttagccaaaggccnnnnnnnnnnnnnnnnnagaaaagatgattagtgatatttggaaatacctggatatttgctagaggaaaaatgaaagcaaaactttgtgcacagtgccttgcccnnnnnnnnnnnnnnnnnnnnaattgttcctcatagagtctcttgccatggtttatggtgttttttgaaatttgtcttaattgaaaaaagaccaaatatttcaaatgagcttataggcaactgtggccagttaaaatatggggttgtannnnnnnnnnntagaatgttattttgcactagttgtcacttagaaagatggggttcctgtagattttttggnnnnnnnnnnnnctttgtcattatgatgaagtaagtgttaagtgtcacataaatagcacacaaaatagttatttctgctggtctgttttttctcttcgttgttgttgtttttaattgtaaattgttatcaatcaaactattgtagcagctacaaaataatnnnnnnnnnnnnnnnnatggtcaaaaaataagtcatcagcacttaagaaatgaaagcaacttttgaaattttctgttaaaattgtcaaatatattttatgaagaatttataaaagggggaaatgattgtaattta

SEQ ID NO: 14427 - DNA, 825 bp, Macaca Fascicularis
gatagggagatgaaaaattacgttcctcccaaaggtgataagaaagggaagaaaaaggatcccaatgctcctaaaaggccgccatctgcctttttcctgttttgctctgaacatcgcccaaagatcaaaagtgaacacccgggcctatccattggggatactgcaaagaaattgggtgaaatgtggtccgagcagtcagccaaagataaacaaccatatgaacagaaagcagctaagctaaaggagaaatatgaaaaggatattgctgcatatcgtgccaagggcaaaagtgaagcaggaaagaagggccctggcaggccaacaggctcaaagaagaagaatgaaccagaagatgaggaagaggaggaggaggaggaagaagatgaagatgaggaggaagaggatgaagatgaagaataaatggctatcctttaatgatgcgtgtggaatgtgtgtgtgtgctcaggcaattgttttgctaagaatgtgaattcaagtgcagctcaatattagcttcagtataaaaactgtacagatttttgtatagctgataagattctctgtagagaaaatacttttaaaaaattgcaggttgtagctttttgacgggctactacatagttagattttacagcttctgatgttgaatgttcctaaatatttaatggtttttttaattttttgtgtatggtagcacagcaaacttgtaggaattagtatcaatagcaaattttgggttttttaggatgttgcattttgtttttttaaaaaaaattttgtaataaaattatgtatattatttctattgtctttgtcttaatatgc

SEQ ID NO: 14428 - DNA, 547 bp, Macaca Fascicularis
  misc_feature (1)...(547): n = A,T,C or G
tcatgnnnnnnnnnnnnnnngaaaaggagaaccccatgcgggaacttcgcatccgcaagctctgtctcaacatctgtgttggggagagtggagacagactgacccgagctgccaaggttttggagcagctcacagggcagacccctgnnnnnnnnnnnnnnnnnnnnacnnnnnnnnnnnnnnnnnnnnnnnnnaatgaaaagattgctgtccactgcacagttcgaggggccaaggcagaagaaatcttggagaagggtctaaaggtgcgggagtatgagttaagaaaaaacaacttctcagatactggaaactttggtnnnnnnnnnnnnnnnnnnnnnnnnnnnnnnnnnnagtatgacccaagcattggtatctacggcctggacttctatgtggtgctgggtaggccaggtttcagcatcgcagacnnnnnnnnnnnnnnnnnnnncattggggccaaacnnnnnnnnnnnnnnnnnnnnnnnnnnnnnnnnnnnnnnnnnnnnnnnnnnnnnnnnnnnnnnnnnnnnnaatannttcccnt

SEQ ID NO: 14429 - DNA, 751 bp, Macaca Fascicularis
  misc_feature (1)...(751): n = A,T,C or G
aagtannnnnnnnnnnnnnnnnnnnnnnnnatccnnnnnnnnnnnnnnntctccagtgaaatattgtataacaccatttggaactactgaaaagacaaggcttttctacagggctcttccttattgcaccatttttgtattaaccatagaaactaagcatcagaatttatgtacaaagaatatgttatttttccttttgctctgaaatactgagatttggggaagcaattcttttttaaaaaaattttgaataactatcttttgataacacattnnnnnnnnnnnnnnnnggaatttagcagaactatcaaatccaaaattgttttcaaatcaagatgtttaaattataagttgttttgttttccagtaagtatgaatgaaaatattcatatgtaaaatatgttttgctaaatttggacaatttacacacccaacatttactttttccaaaattatttctgtgggacacaaagtatacctttaaaaaggtgaccttatatattgtttattaacatagaaatagacaatttggctctcataccataagcattttaaaacacatatgaaacgttttgatttcattgtatggtggtgtgtttttatttttatttctgaattttccatatgctttaatacttgtttaagaatatttttatatctgttccatttttatcatttcccttatcgttagaaagtttgacaaaaatacttgaatattggttctctaacatatacttttagttgtgttaac

SEQ ID NO: 14430 - DNA, 748 bp, Macaca Fascicularis
  misc_feature (1)...(748): n = A,T,C or G
gtgtgaacnnnaaagctcnnngaacagtcttgccccccgctcaccctcctatgggcacctctttctgggaacccgctgagcaagaaatgcttgagccagaaaaggagtcggagcggcggtggcgggtcatgcgggacgcggatgcagacgcaggcggaagcaccaactgcggggatagccaggnnnnnnnnnnnnnnnnnnnnnnnnnnnnnntagcggcagctccagccggcggagctcccccacctcacgcctcaggtcctggcagagacgccccgtctgtggccagggggccaggaatgcggccacacgtattcaccctcagcgtgccttttccgacccccttagaggcggaaattgtccgtgggtccctggcnnnnnnnnnnnngccccaccaaagggtggttgggaagaatctcgcagtgagcggcaggatcttggccgtccgctgggaagctgaagactgtcgcctgctccgaatttccgttatcaactttctcgaccatctttnnnnnnnnnnnnnnnccatgcagcactatgggccccccnnnnnnnnnnnnnnnnnnnnnnnnnnnnnnnnnnnnnnnnnnnnnnnnnntctcctcctaggcagtgcatccattcttccctagggcagggaattcccatagttgctactttcctggaaggnnnnnnnnnnnnnnnnnnnnnnnncttaggatactcaggggccccttgttttatctggttcttaaatgttgtaccacag

SEQ ID NO: 14431 - DNA, 856 bp, Macaca Fascicularis
  misc_feature (1)...(856): n = A,T,C or G
cgttgggccatcactgagctgagtgctcagtannncaagagactgtttattctgctcannncccagggcctggttggtcaaactcttggcaaagggttttcaggatgaggaagtcaagacaggatctgcagagctaccgagttcatcggtgggtattgggggcaagtggggactgaagtcctgtccaggctgtgctggccccacctgccttgtgtcctggagtggggttnnnnnnnnnnnnnnnnnnnnnnnnnntctctgttgtgcacaaaggcaannnnnnnnnnnnnnnnnnnnnnnnnnnnnnnnnnnnnnnnnnnnnnnnnnnnnnnnnnncctgggggcttgttaggaatgnnnnnnnnnnnnnnnnnnnnagacctcccgactcagaccctgcattttagcaagaccctcacctgattcctataagcacttcagagtttgagaaacaaggacctaggctggggatgtcctccgagcagagggtgaagttctctccctgccactnnnnnnnnnnnnnnnnnnnnnnnnnnnnnnnnnctaacccagccctgggaggcccttggcctgttagattgtttcagagtctgcgtggcactcctgaggaagnnnnnnnnnnnnngtcaccagaagatgagggttaggtgtgcccggccctccagacttggcctttctgattaacccctgcatgccaagctgcctgctgtcccaggtccctcacctcaggtctgtgaaggggcagcttctgaaagttgttttctcctctgcttgggagagttnnnnnnnnnnnnnnnnnnnnnnnnngggcagccacagaagcccccaaatcagagctcacagtgagtgagcccct

SEQ ID NO: 14432 - DNA, 707 bp, Macaca Fascicularis
  misc_feature (1)...(707): n = A,T,C or G
gagaaaacagaaggggaggaagagcaggaggaggaggaggaagaggagggaggagacaagatgaccaagacagggggccaccccaaactnnnnnnnnnnnnnnnttgacccttgcctttgagcccccaagaggggaagggatcatggagnnnnnnnnnnnnnnnnnnnnnnnnnnnnnnnacagctttcagggtgtgtttgtgagtgactccacccaagcttgtagctgttctctcccatctaacctcaagcaagatcctggtgaaacagcatggcatggctttcggggtggagggtgggggtggaggtcctgctcctacagatgaactccatccagctccttaattggcaggtgtatgtgctgacagtaatgaaagctttcctctttaaccaatccccacacccacccagaggtcagcnnnnnnnnnnnnnnnnngggctttgggaaagtcacttagctctttaagtgctaaagtgcttttagacccttccaaggaagaggccagaacggacattctctgcgatctatatacactgcctgcatccagaaggctacacaccagcaaacagtgaaggagaatgggacactgggtcatggcctggagttgctgataaattcggtggggtagatacttggtctacttcagatcagtgtcaccgagagcccaccatatagtttcataggtgctaaattttctatatgctat

SEQ ID NO: 14433 - DNA, 739 bp, Macaca Fascicularis
  misc_feature (1)...(739): n = A,T,C or G
tttccctcactggatattttggaatctcctttgttctggctttgattaaaatttttggtgcacttattgctgtaacagtgacaacaggaagaaaagcaatgaccattgtactttcgtttatattcttcgctaaaccattcacatttcagtatgtatggtctggtttcttagttgtccttggtatatttcnnnnnnnnnnnnnnnnnaatatggataaannnnnnnnnnnnnnnnnntatgatttgataaacaaatcagtggaagcaagaaagtcaaggacgctggcacaaactgtatagacagtgatttgtcctatttaaaatagaattttaagggaacaatcaattaactttccaaagggactgataaaaaccaaaggatctggaggcattgctatcccctttgtggatagatttcatatgaagttatttgcggtgtcaggcttttcttcagagcacttgtttgactgacttccaaagcgaccaagacagccgcatctagcacgctttacaataaaatgtcaatatnnnnnnnnnnnnnnnnnagcattttattaagaatttcactggaaatggaccacgtgttgcaagactaactggctataattatgacatatcaaagaaatcgatatgtaatagcagattgttttatattcattccattttgatggtgttatttaaattgattctctgttataagagtaaactgatgagttgaagtctggagagaataacattca

SEQ ID NO: 14434 - DNA, 724 bp, Macaca Fascicularis
  misc_feature (1)...(724): n = A,T,C or G
cagccagcaagacaggatgtgatnnnnnnnnnnnagttctttctnttnnnctgaatgaattagatggtgttggacttaagacaatagagagaagaggaagtaaatcaagtcaannnnnnnnnnnnnnnnnnnnnnnnnnnnnnnnnnnnnnnnnnnnnnnnnnnnnnnnnnntgatgtgttagatactgctttgttacgacctggaagattagataagatcatctatatcccacctccagatcacaagggcaggctttctattttagaagtctgtacaaaaaacatgccaataggtcctgatgtctccttagaaaacctagcagcagaaacctgttttttttctggagctgatcttagaaacctctgcacagaagctgctttgctggctctgcaagaaaatggactagacacaactacagtgaaacaagagcactttctaaaatcacttaagactgtaaaaccatcgttaagnnnnnnnnnnnnnnnnnnnnatgaaaacttatttaagaaaggaggattttctaacttggaaggtatttaaannnnnnnnnnnnnnnnnnnnnnnnnnnnnnnnnnnnnnnnnnnnnnnnnnnnnnnnnnnnnnnnnacttcacacttttagaatttgtgtttgtgtttcctgtaggtaaataaataaaaacaaaaaaacaaaaaacgcaaaaccttgtgcnnnnnnnnnnnnnnnnnnnnntnttaaaaggc

SEQ ID NO: 14435 - DNA, 1233 bp, Macaca Fascicularis
  misc_feature (1)...(1233): n = A,T,C or G
aaggagcaaaaaattgtaaaagctggtaacaatgtaaatcagttgcagatctcaccttttcaagaaatgaaaaaaccaaagcatttttatattaaatctttttaacagctatgaaagcacagaacaaaattggtcatttaacctatgtaattattatatatttatattcttagctctagtgctattttgagaacaaccatcgttttcctctcaattcaacaaatatttattcctcactaatgttataaaagatgctaatgtgaggatttggggtttggactnnnnnnnnnnnnnnntcttttacagtttnnnnnnnnnnnnaattaacggtccagttgtcaagaaaacatttctannnnnnnnnnnnnnnnnnnnnnngatacagatacagggaatatgcagaaagaggttatgagcgtcacagagcaagtcgagagaaagaagaacgacatagagaaagacgacacagggaaaaagaggaaaccagacataagtcttctcgaaggtttgctctttaataaaatagtgagccaacagtatgggagagattttgacttagtacattatcgcattggaagaggggaaattttggcctatgaaccagtctttcgtaagttatgaaacgaagcagtgcttggtttcattaaagaaaaattcagggccttgtctcaaattttttttaaaaaattaaacaaaatacctattgtttgccaaaaatcaaccctttacagtatttccagttttgagttagtgcttgtttctaatttgttactgtatattataatatgcatttcagaagctgtataggcactgggaatctgagatagtatcagtgaagatggccctataaaataaatacaatccctgcataaaagtcacannnnnnnnnnnnnnnnnnnnnnnnnnnnnnnnnnnnnnnnnnnnnnnnnnnnnnnaacccagtgttatattgagaatttccttagagtgattggatttttgtcactgattgtgtatttaaacagaacacaccttttttatttcagtaatagtagacgtcgccatgaaagtgaagaaggagatagtcacaggagacacaaacacaaaaaatctaaaagaagcaaagaaggaaaagaagcaggcagtgagcctgcccctgaacaggagagcaccgaagctacacctgcagaataggcatggttttggccttttgtgtatattagtaccagaagtagatactataaatcttgttat

SEQ ID NO: 14436 - DNA, 716 bp, Macaca Fascicularis
  misc_feature (1)...(716): n = A,T,C or G
caaaatgcccgnnnaagccacagaaaccgtnccngctacagagcaggagttgccgcagccccaggctgagacagggtctggaacagaatctgacagtgatgaatcagtaccagagcttgaagaacaggattccacccaggcaaccacacaacaagcccagctggcggcagcagctgaaattgatgaagaaccagtcagtaaagcaaaacagagtcggagtgaaaagaaggcacggaaggctatgtccaaactgggtcttcgacaggttacaggagttactagagtcactatccggaaatctaagaatatcctctttgtcatcacaaaaccagatgtctacaagagccctgcttcagatacttacatagtttttggggaagccaagattgaagatttatcccagcaagcacaactagcagctgctgagaaattcaaagttcaaggtgaagctgtctcaaacattcaagaaaacacacagactccaaccgtacaagaggagagtgaagaggaagaggtcgatgaaacaggtgtagaagttaaggacatagaattggtcatgtcacaagcaaatgtgtcgagagcaaaggcagtccgagccctgaagaacaacagtaatgatattgtaaatgcgattatggaattaacaatgtaaccatttgaaagnnnnnnnnnnnnnnnnnnnnnnnggagtaactacagcttggttgaaatttgta

SEQ ID NO: 14437 - DNA, 758 bp, Macaca Fascicularis
  misc_feature (1)...(758): n = A,T,C or G
tcccatcacaagcagctgctcgacaaggggcgcagggtggctgtctttgttccagcactgttcaggctgcctgtcatcccgggcctgccagctcccctgagtgatgagcacttccaagcacccctctgccctttgtctgtccttatgcagtcacagcctcgccagccctctggggcgttgtgggagnnnnnnnnnnnnnnngagcatgctctgttgcttgggagcctcttgcnnnnnnnnnnnnnnnnnnnnnnnnnnnnnnnnnnnnnnnnnnnnnnnngacttcaggttgagagtaggcccaggccccnnnnnnnnnnnnnnnnnnnnnnnnnnnnngttcagacaagtgcccttagagaggaaaaccnnnnnnnnnnnnnnnatttcctctggagtttgagaccctgacannnnnnnnnnnnnnnnnnnnntgctgttcttgagttttcatttaggattagttgagttccagctgggtgttgggagaaagnnnnnnnnnnnnagtcttggatgttagggcaagaccctgcaatttgagtattagtaggagagcttgtctttcaatgcaggttcctggggcttcagggctggaagggaggagcctgcccttttaacagaaccccagtcacatgcggcccaagccactcagaggctgttgcatttcagggttgtgttggtcctttgtttacctcctaaaccacagctgtttgtgtttcacatatgttgtgaattttccttggtcttttaaaggaatg

SEQ ID NO: 14438 - DNA, 254 bp, Macaca Fascicularis
ggcacaataccaagatttttgataaccagcaacatccctccaacctcaccccccctaccaataatacccttctacctaaaactctcagccctgtgcgcaactgccctaggcttcctaatagccctagacctcaccctcataacaaacaaactaaaaataaaaaacccatcacaagtattcaaattctccaacatactaggatattttcccaccacaattcaccgcacaatcccctatcaaagcctactcataag

SEQ ID NO: 14439 - DNA, 680 bp, Macaca Fascicularis
  misc_feature (1)...(680): n = A,T,C or G
ctgggcactggatttagatgactttgccggcttctcctgcgaccagggccgataccctctcatccnnnnnnnnnnnnnngaactgacaatgcctgcccagggtgttgtaaccnnnnnnnnnnnnnnnnnggcccccagcctgggagcagcagcttgttcctctcttatctgggagaaagcctccccttagcctgcagcgtgtcacccccacctgccctcnnnnnnnnctggttnnnnnnnnnnnnnnnnnttccatacgtgccnnnnnnnnnnnnnnngcttgaagttccaacacgaggtcagccctctgaacctgagcatggccccagccccggacaagacacgttctgccagggcaaagctgatgggctctatcccaaccctcgggaacggtccagcttctacagctgtgcaggggggcggctnnnnnnnnnnngctgcccggcaggcctggtgttcnnnnnnnnnnnnnnnnnnnnnnnnnnnnnnnnnnnnnnnnaggcccctccagtcccagcttcgaggctgggcccaggatcactctacagcctgcctcctgcggtttccctgtgggctgtgatctggctcctgcaggcctctctgtggtcttcctttacccaggctttctgctctcagccctgcctcccttttttctgggtctcctgggctgcccctttcac

SEQ ID NO: 14440 - DNA, 755 bp, Macaca Fascicularis
  misc_feature (1)...(755): n = A,T,C or G
gagatagatacatgtagtgtgtttgtaaattaaaaagtgctacactaaggaannaaatgnnggaattaactgcatacgtgttggtgttgcttttcaaatgtttgaaaagaaaaaaaaaaaattaagaaatgggtttcttgccttaaccagtctctcaagtgatgagacagtgaagtaaaattaagtgcactaaaccaataagattctaaggaagttttatcttctgcagtgaggatggcccaatgtttttcgtggctgagcagatgtaatgggaagaaataaaagcctaagtgttggtaaatccaacagcaagggagatttttgaatcataataactcataaggtgctatctgttaagtgatgccctcagagctcttgctgttagctggcagctgacgctgctaggatggtacttcacaataaactacacaaggaaagtcagccaccgtgtcttacgaggaattggacctaatacattttagtgtgccttccaaacctgagaatatatgcttttggaagttaaaatttaaatggcttttgccacatacatagatcttcatgatgtgtgagtgtaattccatgtggatatcagttactaaatattacaaaaaaattttatggcccaaaatgaccaaaaaaattgttataatagaattcatccaattttgatatttttatattcttctaccacacctggaaacagaccaatagatattttcgggttttataatgggaatttgtataaaagcattact

SEQ ID NO: 14441 - DNA, 773 bp, Macaca Fascicularis
  misc_feature (1)...(773): n = A,T,C or G
aggacatggctggacnnnnnnnannnnnnnctgtgtgannnaagttctggctagggnnnnnnnnnnnnnnnnnnnnnnnnnnnnngcacacttgatttgctaaggctcgagacaggcaccattgccaaggggctggtcctgnnnnnnnnnnnnnnntaagcccgtctctgccccacattctagccccactatgtgggggtgctgttgtcctgcctgtgtctcatccctggctgcctaagctagggacnnnnnagnncttctttccttgccccatcttcctcccaactggaggcctctgagcctcccctgtgccttgggccctgaagccccatatgtagtatagagcaaaggtggnnnnnnnnnnagaaagggtggaaaggcccttcagtcnnnnnnnnnnnnnngggttctccatgcccatcagtctctgcagtttctctacctgcccccagagctgaggccatctgcaagcccctgcccatggcccaacggggagcctccagacaccagttccctgtccttatcagccactgggtggttcccactgcatgacctctatccctcccatctgtccccatggtttccagctcaatccacccccgacccacctgtcagccctcgcccagggagcnnnnnnnnnnnnnnnnngcagtaggctgggcctggcctcagaacctggcagctcccgcctgctccttcacttttgtaaaaccaaccctgtcaccagaatggcattaactcctggtgctttgtactactggtccagctgccct

SEQ ID NO: 14442 - DNA, 711 bp, Macaca Fascicularis
  misc_feature (1)...(711): n = A,T,C or G
aaagttcttnnnggcaagagtgaatttctgtggatnnnnnnnnnnnnnnnnnnnnnnnnnnnnnnnnnnnnnnnnnnnnnnnnnnnnnnnnttnnnnnnnntactgtgtcgtctccgtgccagatgtggcgagatcaccattagaaatggaaatcacatttgaaagccattagacttctaggtgatgcaagcatctnnnnnnnnnnnnnnnnnnnatagaggcataagtggtatcagttttctaattgtttaaactgtattttataccagtgtttgaaagtaattgggtgttagcttgagatggttaaaggttgtttggggagggagtttgttgtaatgnnnnnnnnnnnnnnnnnnntttnnnnnnnnnnnnnnnnnnnnnnnnnnnnnnnnnnnnnnnnnnnnnnnnnnnnnnnnnnngctgctcattcttgcctactttactctcnnnnnnnnnnnnnnnnncgttgaaggtggtannnnnnnnnnnnnnngcctgttcaattctttgtttcttctccttccccctccccctacctccttcccctcactcctcccctccttcgctcgctcaacctcttttgttcagtatgtgtaacttgaagctaatttgtactactggatatctgactggagccacagatacagaatctgtattgttcttactgaaacacagcatggaattaacattaaacttaaataaaacaaacc

SEQ ID NO: 14443 - DNA, 764 bp, Macaca Fascicularis
gatgtccaaagaaaatatgaagcttccacagccaccagaaggacaaacatacaacaattaattttagtggatctcaaacttgtcttaaatcaacaaccttctactcatgttaatgtcttgattaaatatcacaatgaaaaatacccacacattaagtaaaagaattccagctggtaaacatgacctggacatttgtaagaatatatttaatacatgtacacccattatgttttcaggtaacaggaggaaaaatgcagcacaattttttttctcttgttaaggcactgtcatttaagcataaacctggagtactcaaagtagaattcaggtttacaagatgaaagcgtgtggagaagtgtcagatggcagtggaagcatgtgtgtttctaaaaagtgaaaatctcaagaaagaaaacagaaatggcatgctttacccatcttgcttagtgaaagagagctgcagttgaaattgtttaaaaagtagcaggtacaacgaatattgtcacagatgtgttaatttttgaagcggtgtgggtgctgactactagtagtatcaaaaatatgttcaggattgttttgatacctgtatttataataaaaaatgttgggggaagttgatgaatttctgttaaaagctgttcttgtgtgttacatgtaacagacatggtaaatatttgtttacagtctttgtttaaccatgcatttaagtttaagtgaagtcaacaaaacggaaataggtgtatggatatgtgatttggagatta

SEQ ID NO: 14444 - DNA, 749 bp, Macaca Fascicularis
  misc_feature (1)...(749): n = A,T,C or G
agaatgatacagagtagcaggttttnnnaaggaaatgccgttcaaatgcctcctaacttttatagttattttgttttaatatttctaaattcttgtatcagatccaaagctctattgtacagcaaattattcttcaaaatgattatannnnnnnnnnnnnnntatttctttttgcnnnnnnnnnnnnnnnnnncaacttaaaatttgggggaaaaagaatgcaggagtgaaataaccaagtcaaaaccatgtactatctccttgggggttagggatgctaagaagagcccacaaatagaggattactcttcccccgaatctctctaaactcagaaacagttgccaaaaaatacataactcttccctgtaggaccctttccttattcatttaggtagtgtgaacattaagtataaaataaattatgttcnnnnnnnntctnnnnnnnnnnnnnnnnnnnnnggaacagaaatcattctaagcaggaaaatacttccatttttttttttttttcaagtatctctctaataactaaatgccacttatttgcattcccctccttgtggattttttgtcacctaaggaaatgcatttgatgagtgctggaaacttcttaagtgctttannnnnnnnnnnnnnnnnnnnnnnnnnnnnnnnnnnnnnnaaagattcattgcacttatgaacaaggaaccttcttttcaatttctgtgtaatttgcaaggctgtacaatgtgtgctgatgcaagcc

SEQ ID NO: 14445 - DNA, 728 bp, Macaca Fascicularis
  misc_feature (1)...(728): n = A,T,C or G
tattggccccggctcaattcctgtcctccagcccccggcccacgagcagtggctattcgttcttccacctggcaggatctacgcctttccctctgctgatggggcctccggggcccaagggagactgtggtttgccggtaagactgnnnnnnnnnnnnnnnnnnnnnnnnnnnnnnnnnnnnnnctggggcattggtcaagtggttgcccctggtaaagaaggaaaaggagcagcttagagcagggagctggttatgggcacatcctcggctccagccaggcccctggctcctctggctctgcnnnnnnnnnnnnnnnnnnntctgctccagactcatgatccactgggannnnnnnnnnnnnnnnnnnnnnnnnnnnnnnnnnngcacccctgggctttggttggcccaggtccaagcccattctttgctaannnnnnnnnnnnnnnnnnacagcttaaggaaagcccgtagctgtctggccccnnnnnnnnnnnnnnnnnnnnnnnnnnnnnnnnnnnnnnntccnnnnnnnnnnnnnnnnnnnnnnnnnnnnnnnnnnnnnnnnnnnnnnnnnnnnnnnnnnnnnnnncatggggagctctggatatgttttgtttggcacgttcagtgtccttttttaaaaatccaataagttactaacatttgaaaaatgtgagagatttcttataaaaagnnnnnnnnnnnnnnntctcntgaaagtgggag

SEQ ID NO: 14446 - DNA, 660 bp, Macaca Fascicularis
ggcagtttgaattcagtgtagattcttttcaaatcaaattagactctcttctgctcttttacgaatgttcagagaacccaatgactgagacatttcaccccacaataattggggagagcgtctatggcgatttccaggaagcctttgatcacctttgtaacaagataattgccaccaggaacccagaggaaatccgagggggaggcctacttaagtactgcaacctcttggtgaggggctttaggcccgcctctgatgagatcaagacccttcagaggtatatgtgttccaggtttttcatcgacttctcagacattggagagcagcagagaaaactggagtcttatttgcagaaccactttgtgggattggaagaccgcaagtatgaatatctcatgacccttcatggagtggtgaatgagagcacggtgtgcctgatgggacatgaaagaagacagactttaaaccttatcaccatgctggctatccgggtgttagctgaccaaaatgtcatccctaatgtggctaatgtcacttgctattaccagccagccccctatgtagcagatgccaactttagcaattactacattgcacaggttcagccagtattcacgtgccagcaacagacctactccacttggctaccctgcaattaag

SEQ ID NO: 14447 - DNA, 948 bp, Macaca Fascicularis
  misc_feature (1)...(948): n = A,T,C or G
caggagctgacaccagcagcggtgtnnngctgnnnnnnntcgaccctgacaccaacattgtctacctctgtnnnnnnnnnnnnnnnnnnnnnnnnnnnnnnnnnnnnnnnnnnnnnnnnnnnnnnnnnnnnnatctctccatgttcagttccaaggagtcccagcggggcatgggctacatgcccaaacgtggcctggaggttctacaagctgcacgagcggnnnnnnnnnnnnnnnnnnnnnnnnnnnngcccaaagtcggacctgttccaggaggacctgtacccacccactgcagggcccgaccctgccctcacggctgaggagtggctggggggtcgggatgctgggcccctcctcatctccctcaaggatggctacgtacccccaaagagccgggagctgagggtcaaccggggcctcgacaccgggcgcaggagggcagcaccagaggccagtggcactcccagctcggatgatatgtccaggcagccagggaataaaactgggagggtggggtggggctggcgtttggggcagctccaactcacaacattgaggaaacattccaggccaagtagagcggtaatcctgaggcctcagaacacaggtttcacacccatcnnnnnnnnnnnnnnnnngcagcaaccagctgagtgactaaagggcccaaggccagggctctagggatgaggctcagcagatgctggggtaaggggagccagggaggagctgggcctaacacagcaccgggtccccaggatgctgtgtcccggctggaggaggagatgcggaagctccaggccacggtgcaggagctccagaagcgcttggacaggctggaggagacagtccaggccaagtagagccccgcagggccttcagcagggtcagccattcacacccatccactcactccccattcccagtcacatggcagataaaaaa

SEQ ID NO: 14448 - DNA, 792 bp, Macaca Fascicularis
tacagagaccatgagctccctgtcccctgggaagccgtggcagaccaagctgagcagtgcgggactcatctatctgcacttcgggcacaagctgctggcccagttgctgggcactagtgaagaggacagcatggtgggcaccctctatgacaagatgtatgagaactttgtggaggaggtggatgccgtggacaatgggatctcccagtgggcagagggggagcctcgatatgcactgaccactaccctgagtgcacgagttgctcgacttaatcctacctggaaccagcctgaccaagacactgaggcagggttcaagcgtgcaatggatctggttcaagaggagtttctgcagagattagatttctaccaacacagctggctgccagcccgggccttggtggaagaggcccttgcccagcgattccaggtggacccaagtggggagattgtggaactggcgaaaggtggatgtccctggaaggagcatctctaccacctggaatctgggctgtcccctccagtggccatcatctttgttatctacactgaccaggctggacagtggcgagtacagtctgtgcccaaggagccccactcattccaaagccggctgcccctaccagagccatggcggggtcttcgggacgaggccctggaccaggtcagtgggatccctggctgcatcttcgtccatgcaagtggcttcattggcggtcaccgcacccgagagggtgccttgaacatggcccgtgccacattggcccagcgctcatacctcccacaaatgtc

SEQ ID NO: 14449 - DNA, 709 bp, Macaca Fascicularis
  misc_feature (1)...(709): n = A,T,C or G
acagcactgcagtcactgtcacccacaggagttgcctagccatggcctttgtggcattcaggaggaagggcccggcctggctggctgtgcacctggctgtctgcgtggtgtcagtgctgggccccctggtgctgacctgcagcctgtgtgcaggtacgtgcagcactacggcctgggcagtgcctgtgacagcatagagcgtgtgctgaagagtgtggctgtgaagctggggaagacacagaaggtgaaggtgctcacgnnnnnnnnnnnnnnnnncgttgttcagcctgactatcctgcggcagcccgnnnnnnnntccataccttccgccgcgggctgctgggccccgtgatgctggacctcgacatcctgcgtggccaccccccggccgagactgtgccctgaacttgtccgggtggggagggccacgagtggcctcccagacctcctcacctgggtggttgaggctcaagacagctcaccnnnnnnnnnngctccacgctggccactagggtgctgtgctctctggtgcccccacggcctggctagctccaggggccccagtttcaggggccaagcaggtgggagtggacaccaggcttcccaggtgacgtccctgagcagctctgcatgcttggatctcccggagcttcctgctcaggcctcttgagaaatggatgctgtctcagaaggagttaaagctataac

SEQ ID NO: 14450 - DNA, 886 bp, Macaca Fascicularis
  misc_feature (1)...(886): n = A,T,C or G
agtagaaaactcctatgtgtgtatcacatnnnagggcnnnnntaggtannnntggcagacnnnnccaaatctttagatggactgggttgtacagcatgccctcccccaaatatggaatctgaaaaaaatactacactattgatagtggagatatattaattttaaaactgtaaagtaaatgtggtctctagtctaggtttnnnnnnnnnnnnnntgtgttaatgtatagggaagagacaatgacttgatggttatggggagtnnnnnnnnnnnnnnnnnnnnnnnnnnnnnnnnntaaattattaacagctttnnnnnnnnnnnnnnnnnnnnnngaatggcctaatcagaaaaatgaaggagcaaagatgcaagcttgccaagtgatgaaacgaacacgattttgtatctattttttatcaggtgttgtaaaatttgtgcatggcttttttttgttgttgcttagtaactggtagagaagaaaagatgaggaaagaaactcagctttcctcactaatcttttcagaggtacacagttagggagtaaaatctgactggcctaatcgatggaaaagaccctgtccttttcaccccatcctgcaatcctctgtgtagaggaactcattgttgtattctagtaattcactgtgatttataacaaaccagtgatgtcattctattgtgcacttttgtcaannnnatttatgtgactttaataaacatagtaaacnnnnnnnnnnnnnnnnnggtccattagtgatttatatattgcatgacattttctattttgagtttgacatgtagagtcatttttagtttcatggcaattgacagtcctaataactcagctaattgaaactaacaatcttgctgtgtaaaaggaaaa

SEQ ID NO: 14451 - DNA, 743 bp, Macaca Fascicularis
  misc_feature (1)...(743): n = A,T,C or G
gagctgtttggacaaannnnnnnnnnnnnnnnnnnnnnnnnngcctggcttcagcttggaacccaacacctaggcttccatgccaccctgagccagggacctctggaagttctcttcctgatggtcctttaggtttgggccactaaatataattacctctcctctctcccattttctctctagggagcaatggtcacagtccctggtacctgaaaagggaccctaggtctaggcccttcttccctttcccttcctctctcctacccgagacctttggctcccttttccttctctctctggtggctccaggaggcctnnnnnnnnnnnnnnnnnnnnnnnnnnnnnnnnnnnnnnnnnnnnnnnnnnnnnnnnnnnnnnnnnnnnnnnnnnnnnnnnntcagacctatatggccatgctctggctttacccttgggaaagcctgatcctggtgtgtggcnnnnnnnnnnnnnnnnnnnnnnnnnnnnnnnnnnnnnnnactatgcactctcccagggagggaaccagtatgagaagtgggggcagggcacacatttcatctttgcaggaaggtctggcctggggtcaagtggaggagggcccaggtcagttctggggtcccagtnnnnnngctttgatattnnnatggtgcnnnnntgcnncnnnnnnnnnnnnnnnnnnnnnnnncagctggcagttgagctgcctgagccaatngtgtctgtctttggtaactgagtgaacc

SEQ ID NO: 14452 - DNA, 764 bp, Macaca Fascicularis
  misc_feature (1)...(764): n = A,T,C or G
tttacatcagcaccctcaaaacagagnnnnnnnagggcatgatcttannnacagtgaatggagagtcagtagacccagtggggcagccagcactgaaaactgaggagcgcaaggctaagcctgctccttcaaaaacccaggccagacctgttggagtcaaaatccccacttgtaagatcactcttnnnnnnnnnnnnnnnnnnnnnnnnnnggagctctatagagtgtttannnnnnnnnnnnnnnnnnaggcctttacccatgctcccgcaannnnnnnnnnnnnnnnnnnnnnnnnnnnnnncatggtagatggcaacgtttctggggaatttactgatctggtccctgagaaacatattgtgatgaagtggaggtttaaatcttggccagaggggcactttgccaccatcaccttgaccttcatcgacaagaatggagagactgagctgtgcatggaaggtcgaggcatccctgctcctgaggaagagcggacgcggcagggctggcagcggtactactttgagnnnnnnnnnnnnnnnnnnnnntatggcgcacgcttattttagggccagcggcaggggacttcagcctcctggnnnnnnnnnnnnnnnnnnntcctgactgggacttgcgactcacaggattgcatcgtcccagccgctaacttggggccagggcccctcccctccacatataccttgggtttgtgcatgttttcttctgggtgggttcagagggcaatttctcttttatgtgtacaa

SEQ ID NO: 14453 - DNA, 747 bp, Macaca Fascicularis
  misc_feature (1)...(747): n = A,T,C or G
cagagcacagctatccacagggagactgggatgtttnnnnnnncactccattactcagtacctccatacccagcactatgctcagacccacaggtggggaaactgaggcaggaaccgggttctgccctcccagagcttccactctgggaggccagaatgaaagccagaagggacctgaggatcatccagtctcatgtctcaatgtacatacgaggaaactgaagccaggagaagaagagggagaaactgtccaaggcctcacagggaggcgttcacagagctggagaaaccagggatcctgacccatctattgctacacagaggtgcacatggaaagagggtttaacagaccttctctaggacataactgtttctgctttgagcaataatttctaacctgatgccaacatgccccactgcccttgggttggctggggttgtttcctgagccaaacatccaatatcatgccccactaaatggccnnnnnnnnnnnnnnnnnttggggaaacagatggagctcttggggccagccagctgggcctgggacttctgcctctgccgcctcccgagtggcccagcagctttgccggagctgtggagcgagggtagtaggagctttccccagagtgctgtgacttgcatgatggattctaggctgcggcaagggctgatttctgggttgggggagggtgggaaaatgtatttttatgaaaccagagggaagacttcattgnnngttgttattt

SEQ ID NO: 14454 - DNA, 725 bp, Macaca Fascicularis
  misc_feature (1)...(725): n = A,T,C or G
agcatagagtgtggaccatnnnatgggtcaactaactannnccccnncccagggcagagaaagcccctcctacccagggctcttcccccaacctgagctccatctctggggccagctctggaatcctaaggtgtagctctccaagtgtagcccttcctggggactcgttagacatgcaaattctcaggcctcactcagatctactcagacagacgctgggtagggcccagaaattcatattttgataagctttccaggagattccggctccnnnnnnnnnnnnnnnnnnnnnnnnnnnnnnnnnnnnnnnnnnnnnnnnnnnnnncatctcagtgtttctgggctgagctgtgtgaccctgcagagcccctcatgatccccgggactcagttttctcatctttttacttggtgtagggattcaatcacatgcttcaaagatcacagtcagaggttgaactggggccccaaagttcctgcgggggcccacgaaggggggcatctaggtggggaggtgtcttggattgaccctgggtacacccctgacaaggaacctgtttcttcctgtatacaacaccaggataataggagatctgcccggctgnnnnnnnnnnnnnnnnnnnnnnaagagaagattggcggagggcttaaaaaagttggccagaaaatcaaggattttttggggaatcttgtacccaggacagcgtcctagtgtgtgccctactg

SEQ ID NO: 14455 - DNA, 777 bp, Macaca Fascicularis
  misc_feature (1)...(777): n = A,T,C or G
tgtatgtagaccgaaaactacaccnnnnnnnnnnnnnnntcaagatttgtgctcgcatanggctgatcaaatcaagatgtgtgnnngctatgttctaagtccannntctgtcccattcgtgttagnnnnnnnnnnnnnnnnnnnnnnnnnnnnnnnnnnnnnnnctagtaaattgtaaatgaagtaatcctgtgttcctcttgactgttatttttcttagtggggggcctttggaaggcactgtgaatttgctattttgatgtagtgttacaagatggaaaattgattcctctgactttgctattgatgtagtgtgatagaaaattgacctctctgaactggctccttcccagtnnnnnnnnnnnnnnnnnnttgtataattctcaccaagaagttaaaatgttttattactctctgttnnnnnnnnnnnnnnngagtcacattgtgtgatttaatttcagtcagtcaatagatggcatccctcatcaaggtgccagatggtgataacagtaagggactactgatgttctgtgatacatcaggtttcagcacacaacttnnnnnnnnnnnnnnnnnnnnnnnnnnnnnnattatgatgttcataggttccctcttgtttgaaagtttctaattattaaatggtgtcggaattattgtattttccttaggatttcagtggaacttatcttcattaaatttagctggtaccaggttgatatgacttgttaatattannnnnnnnnttaagtcttagttttcgtttgtgcctttgattaa

SEQ ID NO: 14456 - DNA, 665 bp, Macaca Fascicularis
tcaggatgaatgtgaccgaaggcttcgaggagtcaaggatggtggccggagagactctgcaagctatcgggatcgtagtgaaaccgatagagctggttatgttaatggcagtggctatggaagtccaaattctgcctttggagcacaagcaggccaatacacctatggtcaaggcacatatggggcagctgcttatggcaccagtagctatacagctcaagaatatggtgctggcacttacggagctagtagcaccacctcaactgggagaagtttgcagagctctagccagcagtttagtgggataggccggtttgggcagcagccacagccattgatgtcacaacagtttgcacagcctccgggagctaccaatatgataggttacagggggcagactgcctaccaataccctcctcctcctccccctcctcctccttcacgtaaatgaaaccactcaagtggtagtgactccagcagacttaaattacattttaaggaacactctttccttttttttcctcttccccttttcttttttttttttttcctttttcttttctcttttttttttttattaatttttctccccaaccatcgtgatttgtcttttcatgcagattagctagaattcactgccaggttcttctgcccgccaaaatgat

SEQ ID NO: 14457 - DNA, 872 bp, Macaca Fascicularis
  misc_feature (1)...(872): n = A,T,C or G
gaatgttgaagagctggttnnnnnnnngaagagngaannnnnnnnnnnnnnnnnnnnnnnnnnnnnngaagatactgacaaatacagacaannnnnagtgcgaacgttgcattcctgttctgtccgatttccagatatggctgcaaatgttattcctgtgttaatggaatttctcagtgacaataatgaagcagcagctgctgatgtcttggagtttgttcgtgaannnnnnnnnnnnnnnnntaacctgagaatgcttattgttgagaagatgcttgaagtctttcatgctattaaatctgtcaagatttaccgaggagcattatnnnnnnnnnnnnnnnnnnntagtaccaaggaagacattcagagtgtgatgactgagatccgcaggtcccttggagagatcccaattgtagagtcagaaataaagaaagaagctggtgaattaaaacctgaagaagaaataactgtggggccagttcagaaattggttactgaaatgggtacctatgcaactcagagtgcccttagcagttctagacccaccaagaaagaggaagacagacctcccttgagaggattccttctggatggagatttctttgttgctgcgtccctnnnnnnnnnnnnnnnnnnnnnnnnnnnnnnnnnnnnnnnnnnnnnnnnnnnnaagaaaaagcaaaatgtaggttcatttattgtacatttatgcaacaattaaacattgagtgcctactatatgcattgaacagtgaggtatgcaaaaattaataccaagtttctannnnnnnagagtttatgatttaatagcagaagtggacacgataatacattactctaaaattgataaagtatcttcctcttctgttgga

SEQ ID NO: 14458 - DNA, 704 bp, Macaca Fascicularis
caaagtcatcatctaaattcatgattctttcccatcaagaggatctggagtcttctgttcccattaaaactgaatttatggcagtgcaagcccgggccagactgggtaaaaaatgatggaagcacatttatattcttaaaaatgtctgcagattgcatagaaagttctcagatttgtaaaagtttatttctattgtaattctttgcatgttcattttgttaaatttgcaatataaaccagttgcacatcttttgctatctggcctcctaggttgagggttagggtttgctttaagcaaaactgagataactataatgtgaactggcctactggattgcccacttttatcaatctgcaagggtggatctatttctaggtcttaatttcaaggtttactttcccttttccttagattttacttggatcaaagggcatggaaatatattttttgcttaagtcttatacaaaggaaactgtggccccagaaattattttgctttgaaagtatgtagatgaaataagtatttttaaatgtcttgattaaataaagcattctatgatctgattgtcagctcagtatgtaggctaagggtatacctttacttctcttttttatgctcaaattttttttcatgtgattgttattttcatttcaccgaggactacaatgattgtcatctctaggaatttagtttgtttttagc

SEQ ID NO: 14459 - DNA, 695 bp, Macaca Fascicularis
atcaggacctgttacagatgtttatgccctttgggaatgtcgtgtctgccaaggttttcatagacaagcagacaaacctgagcaaatgttttggttttgtaagttacgacaatcctgtctcggcccaagctgccatccagtccatgaacggctttcagattggcatgaagcggcttaaagtacagctcaaacgttcgaagaatgacagcaagccctactgagcgtgctcccctctgagactggagtgagagggtcttctgattcctgccgtttgttcatcgttgtgcctaaagcatgtcgatgtggcgtcaagtacatcgtccaaatccctgtctcttcagcttctctgatgcttgaactctcacctttgaccttgtgttgacctttgatgctgacgtgtatttttattatgtttgtttctttcttcgttttttttttctttttctttttttctttcctttttttttttttcccttttgtgctgccaaattggttttgctagaacgactgctgaaggggaaatatttaaacttgcatttgaatataaaaaaaatctatttttctagaacttcataagataaccacttgattttgtgattccaattctttgtaattgtcttcagagcagccctactagcacataccgcgtggtgtttgtatttctgtgaacacacagccagtccgtttctaggctt

SEQ ID NO: 14460 - DNA, 727 bp, Macaca Fascicularis
  misc_feature (1)...(727): n = A,T,C or G
gatgcaaggcttgctggagggcgtgaacacggagatnnnnnnnnnnnnnnnntnnnnnnnnnnnnnnnnnnnnnnnnnnnnnnnnnnnnnnnnnnnnnnnnnnnnnnnnnnnnnnnnnnnnnnnnnnnnnnnnnnnnnnnnnnnnnnnnnnnnnnnnnnnnnnnnnnnnnnnnnncggtgcctggagctgcagtgtcagcctgactcctcaaccctgccacccccacggagtccaggggccctggaggccacagccctgacagccccgcagcgccctctgctcctcctcctgctgctgctgcctgtgggcctcctgctgctggccactgcnnnnnnnnnnnnnnnncagaggacgcggcggaggacaccccgccctagggagcaggtgccccctgtccccagtccccaggacnnnnnnnnnnnnnnnnactgacctggcnnnnnnnnnnnnnnnnnnnnnnnnnnnnnnnntgagccaccgcgcccatccgagaacatttctgtcatggccacgttctcttnnnnnnnnnngccctagcacacagggaggacactgaggcacacagaggggagtcaccagccagaggatgcatagccggcacacagaggaaatgggctagaggctggtcccttccttgggcccaatacccctctcattccctccccaggatggaggcaacgccagaacgcagcaccggccccacttacccaactctgtacaaagccc

SEQ ID NO: 14461 - DNA, 683 bp, Macaca Fascicularis
  misc_feature (1)...(683): n = A,T,C or G
gaccttcaacttcncagggtgttgtagaaatcttggtcattgaatgtaaagggacttagtaaagggtatagatgtttttaaaaaatgaaaataactttttttcttgtaagtgataagcttttataaagatcataggaaaactagaaaaaaatgtaaaatgtagaaaattgtaaaacaaacttcattagagatattttgatatgtatcttttcagtgtctatttacaaattttttcttttaacatagatagggtctcactatattgcccaggtcaaactcctgagctcaagggatcttcccacctgagcctcccaaaatgttggaaacacaggcgtgagccactgctcccggctaattcacaaatttttttaaaggacaaacatggtatcatcgatacatactgttaggttgtcttttttaaaaacctaatataatttgttcatctttttataaatatagctcaacacagttatattccttttgtgaatgtattatatctacaatttaccttttttcttacattttacatgcattttcccaaatctttttgttttcctatctgtaaaagtaatacattctgattatgaaaatttaaaacgctacatagaaatgtactattatctatctgccagataattattattaataatatgtatttatttttctgggaattaaaatctatc

SEQ ID NO: 14462 - DNA, 706 bp, Macaca Fascicularis
  misc_feature (1)...(706): n = A,T,C or G
gaaaagctttaagagtgtagcaaatgtgggaaactcttaggccaatgcctccaacttactgtatggtggggaactagcagtagttaatgagtgcagcagatacaggaaagcctttccttggaggctgaaccttacccgccactggaaaatttcacaccagacacaggccttagcagtccaagcaatgtgctatctctgttcagcctaacagctcnnnnnnnnnnnnnnnnnnnnnnnnnnccattgtgannnnnnnnnnnnnnnnnnnnnnnnnnnnnnagatacggacnnnnnnnnnnnnnnnnnnnnnnnnnagcaccaagtatgtgagatgctttcaacagctgtgtcgcactttttaaatggctattggcctttgctggggcaggagccatctgcccctaccattnnnnnnnnnnnnnnnnnnnntaccatttaccccagcatgcttatgacaggcagacctctcttctctccccagtccctaaaaggattgtaagtggtctcacagcccactaggggtcttaattttctctcttttgatgtaaatggcatggaaataannnnnnnnnnnnnnnnggacacaaaaagattcnnnnnnnnnnnnnnnnnnnnnnnnnnnnnnnnnnnnnnnnnnnnnnnnnnnnnnnnnnnnnnnnnnnntccaatctccaagtcacccagctctcgaactgcctgcttcaca

SEQ ID NO: 14463 - DNA, 762 bp, Macaca Fascicularis
  misc_feature (1)...(762): n = A,T,C or G
accagtgtgatacagcataggctcatgcgagcccatcnnnnnnnnnntccccgaggaggctgtgaacatgtccctgggcctgtcnctggcagccaccaccagccccccccagctgcnnnnnnnnnnnnnnnnnnnnnnncagacttgcagtgagaacacgtatgtgaaagggctctgcttcctgtttggatccaacctacggcagcagccccagaagttcccggggaccctccgagnnnnnnnnnnnnnnnnnnnnnnnnnnnnnnnnnnnnnnnnnnntagcatcaacccacgtgaatttcagcagatgaannnnnnnnnnnnnnnnatgatggagcaatnnnnnnnnnnnnnnnnnnnnnnnnnnnnnnnnnnnnnnnnnnnnnnnnnnnnnnnnnnnnnnnnnnnnnnnnnnnnnnnnnnnnnnnnnnacccgagatcacnnnnnnnnnnnnnaacgnnnnnnnatgggcggannnnnnnnnnnnnnnnnnnnnnnnnnnnnnnnnnnnnnnnnnnnnnnnnnnnnnnnnnnnnnnnnnnnnnnnnnngtaagatcctagttgtnnnnnnnnnnnnnnnnnnnnnnnnnnnnnnnnngggatatgaggacgtgattcctgaggcagacagagannnnnnnnnnnnnnnnnnnnnnngggtatnnnnnnnngctctcagggtgatgcttccgtggagggtttctatgtgggtccatcctccaatttgcaaatattaataaaatcaaagtgacatgagagc

SEQ ID NO: 14464 - DNA, 754 bp, Macaca Fascicularis
  misc_feature (1)...(754): n = A,T,C or G
ttcagcctagccacagagnnnaagattctgtnnnnnntgacattttggaaatgatacactactggcttaagtgatgactctttttcagattttcagtattttatacaactactgccacatccttatactttattgcttttctgtcttcaacctgggagagaccttgaatttaagtgtgttctctaatcgatagtgttttagctttcttaatatttctatttcactcttgtttctagggttttttatttgcagtttaggaactattannnnnnnnnnnnnnnnnnnnnnnnnnnnnnnnnnnnnnnnnnnnnnnnnnnnnnnnnnnnnnnaaaagataattcaccaaacaatgattaatcagatagaagttctagtcaggagggatattgttgaagttacctcttttagcctagatacatggattcttttcaaatcaggaaagattagaaaaggaacccaaaaaaccctttaacagtgtgaatcttaatagtatttgaaaatgagaagaagcaaaagattgtaatttggtttattggatgtgatggacgttctgtaatagaaaacctgaaatgataattgaatgggaaaaagnnnnnnnnnnnnnnnnnnnnnnnnnnnnnnnnnagacttattttctttattaaagtattataagaaaacatatgtatttgtnnnnnnnnnnnnncnnngtgtcatagtannnnnnnnnnnnnnnnnnntaaactgttcttgtaatagctcattattttgaaag

SEQ ID NO: 14465 - DNA, 681 bp, Macaca Fascicularis
  misc_feature (1)...(681): n = A,T,C or G
ctaagtccttataataattgccaaaattatttgaatgattcttcaagattaggctgatccctggctaaggtctatgtaaggcagacaagcattattgatcatatcaagttccctacaatatcctgtcctcaaaaccggaagcaatgaacatgatcctcttcggttggataaatgaacttcctgtttggcctgcttctaggccctgccagattctcataacatcatatacgtaagtatagttcctcaaagtgactgacatttattttaattttgccttgtttttgttttttattttctcccccattcctttattttgtgttattcctgattcacttgacactctctgatgcnnnnnnnnnnnntgtttgggatttaatatccagggctgtgtttacagtaaaaaagcaggcagtcccttttagtttttcctttttaaatttttttgagattcttcatttcaggatttaaaactatagcagtccatcttaaggaaagtgtaacnnnnnnnnnnnnnnnnnnnnnnnnnnnnnnnnnntgctctatcagggttgtttattgccctttctacgttctggactccttgccgagactgtttaacttgaagattaaagaaactattgcaannnnnnnnnnnnnnnaacctaagagtggtcaaatattatgtgcaattttttgaaagaa

SEQ ID NO: 14466 - DNA, 749 bp, Macaca Fascicularis
  misc_feature (1)...(749): n = A,T,C or G
gatgaggatgatgtgtggggttccaagcaatcaggacttgtattgtcagaggatgatcaagagctcataatcccctgccttgcactggtgagagcatccaaagcctgcctgaagaaaattcggatcttagtggcagagaatgggaagaaggatcaggtggcacagctggacgacattgtggatatttctgatgaaatcagccctagtgtggatgatttggctctgagcatatatccacctatgtgtcacctgactgtgcgaatcaattctgcaaaacttgtatctgttttaaagaaggcacttgaaattacaaaagcaagtcatgtgacccctcagccggaagatagttggatccctttacttattaatgccattgatcattgcatgaatagaatcaaggagctcactcagagtgaacttgaattatgacttttcaggctcatttgtactctcttctccccctctcnnnnnnnnnnnnnnnctctgatgtctgcttttaaaatggagctagaatgcttgctggattgaaagtgagtgcctgtctatatttagcaagagaaactattaccaaagattgttggttaggccaggttggcacctatttataaaccatatgcatataatatatttttctgtgctatatatgaaaaataattgcatgatttctcattcttgagtcatttctcagagattcctaggaaagctgccttattctctttttacagtaaagtgtgttgttttcattgtaa

SEQ ID NO: 14467 - DNA, 784 bp, Macaca Fascicularis
  misc_feature (1)...(784): n = A,T,C or G
caagctagagctcggactgaaagagaagagctggattatatgtttcccagacttcaaaccctggcagaagctaaggcttgtgatttgacctgagacatttgtttcaggtaatcgtatagaatgaagtatctcagtttaaagggtaagagagaagttgtttctggtttttccttgcccctgtgtgaaaacaggtccgaaatgactgactgacttcactgcattagaccctataactggtttcacaagacnnnnnnnnnnnnnnnntcactcactctcagcagcttccttgcagcagagcagggctgaggggaaggggctataaatgtttgtatacacgttcacagggcatggaaaattttatgctgctccatcataaaccnnnnnnnnnnnnnnnnnnnnnnnnnnnnnnnnnnnnnnnnnnnnnnnnnnnnnnnnnnnnnnnnnccagccaacacatggnnnnnnnnnnnnnnnnnnnnnctgttttttttcttaaacacattttatattactgaacaaccaaatctaccctccatggccctgaggccttatcagttccactgattaaaaactttctctttcacggactttnnnnnnnnnnnnnnngagaaaggaggagggggannnnnnnnnnnnnnnnnnnnnnnnnnnnnnnnnnnnnnnnnnnnnnngggccaaggtttgtacctaccnnnnnnnnnnnnnnnnnnnnnnnnnnnnnnnnnnnnnnnnnnnnnnngtatactgtgtgtgtttgggttgaagcactacctgacataaagga

SEQ ID NO: 14468 - DNA, 683 bp, Macaca Fascicularis
  misc_feature (1)...(683): n = A,T,C or G
acctnnnnnaggnnngggggcagcctggccctggagaccctggatctccgtagaaactcgctcacagcccttccccagaaggctgtgtctgagcagctctcgagaggtctgcggaccatctacctcagtcagaatccgtatgactgctgtggggtggacggctggggggccctgcagcaggggcagacggtggccgactgggccacggtcacttgtaacctctcctccaagatcatccgcctggcggagctgcccgggggtgtgcctcgggactgtaagtgggagcggctggacctgggcctgctctacctggtgctcatcctccccagctgcctcaccctgctggtggcctgcaccctcatcgtcctcacttttaagaagcctctgcttcaggtcatcaagagccgctgccactggtcctctgtttactgacctgcctgtgtgccaagactcgaaacttggtccgcacacaacaggacattttctcttttctctgccagctttcaagatgggatgcagaggccaagtctgacgaattgaagtttcaattaaaatttaaaatgtttccattcctcatctccactccccaccgcccacccaagttctttttccatcattataattcatcctcattatcgtggtaaaatatttattaggtaacattttatagaaataaaaggcaa

SEQ ID NO: 14469 - DNA, 721 bp, Macaca Fascicularis
  misc_feature (1)...(721): n = A,T,C or G
atagatgtagatataaaaacataaaacagacacaacgcaagcggacgctgtcgtgtgcttactctcaggtccctgacaccaagggaagcacggaccccctccccagtgtgctttcccgcggcgcaagcaccgcagccaggccagggctggggacgtggcatgccttggggcggggattctccagtttggcagggagggcctgagggctggggagggggctctgggtgtcactggccccctgtggcagcatcacccccgtgcctgctcccgcctgccccccgtcgcctcccacaagagcatgaagcaaaggttaaggctttgatgaaagggacagcggcggccggagcactgacacatcagacacggtgcggcagcacagcacacagacacgggacacaagcccgcccgccgggcaacacaggacacatggagccgggccccccgccacagctggctggctggccgtctgtccacctatccaccaccacccagagcaggccagggcagaagcattggccttgccaagctacaagcttccagcggggtccgtgaaaggcaacacgttagttaggagtagcctggcgggggacactcggtcccggagcccacaggctgtgttggaaggaaggtgggggctctggatgcctctgtccatctctgggacccgtccgtannnnnnnnnnnnnnnnnnnnnnnnnnnnnnnnnnnnnnnnnatgggtg

SEQ ID NO: 14470 - DNA, 755 bp, Macaca Fascicularis
  misc_feature (1)...(755): n = A,T,C or G
agnnnnnnnnnnnngaacaaagccctggaattctggactgtgggccagaccctgaaacatctgatgtttgagaaggnnnnnnnnnnnnnnnnncatgtggactttgtggcagcggcagctagcctgcgatgtcagaactatgggattccacccgtcagccgtgcccagagtaagcgaattgtgggccagattatcccagccattgccaccactacagcagccgtggcaggcctgttgggcctagagctgtataaggtggtgggtgggccacggcctcgtagtgcctttcgccacagctacgtacatctggctgaaaactacctcatccgctatatgccttnnnnnnnnnnnnnnnnnacgttccatcacctgaagtggacctgttgggaccgtctgaaggtaccagctgggcagcctgagaggaccctggggttgctgctggctcatcttcaggagcagcacgggttgagggtgaggatgctgctgcacggcccagccctgctctattccgccggatggtcgcctgaaaagcaggccctgcgcctgcccctcagggtgacagaactggttcagcaggtgacaggccaggtacttgctcctgggctgcgggtgttggtgctggagctgagctgtgagggtgaagaggaagacactgcctttccacctctgcactatgagctgtgacaaggcagccaccccatcacctagctcaatggagccctggatcccaagcactgcattgtaagcccacagta

SEQ ID NO: 14471 - DNA, 742 bp, Macaca Fascicularis
  misc_feature (1)...(742): n = A,T,C or G
atcggctcaggnnnaatacaagggnctannnantgnctattacnnnnnnnnnnnnnnntccccacntccncngggtcaaagggctacnnnnnnnnnnnnnnnncgggctgactcctcctccctgactgcaaaggctcgctttnncctccaagctcccacaatgcttcacggctctgccacttaccaagcttgtcctacagtggcaaatggaacttctctgatctcccccaacaaaactggagccctgaaggatggaggccatgtctgtaccatctctgtttcccctgtttccccacatactgggtgctcaattcatgcctgtgaatggagcaagcccataatggatacacagaagttgtagcagatggtgtgggtaccccacccagatcccctccaggcccaaggcccctctccttgagtgaggccaggtgttggcagccaactgctccaatctgcctccttctcttnnnnnnnnnnnnnnnatacagggagctgcctgcccctcgccccacctctcccaccaagaggccacctgtcactcatggccaggagagtctgacactatggagggtacaactgccagctctcctgcctctgtgcaggattgtctgggcnnnnnnnnnnnnnnnaattcctcctgggatcgggctgaggccaggcctctcctggaaccacctctctgcttggtcggaccccatggcctattcagttttcctggttccctcacaggnnctccagaaag

SEQ ID NO: 14472 - DNA, 749 bp, Macaca Fascicularis
  misc_feature (1)...(749): n = A,T,C or G
tgtggagcgcaccttcacaggagagcacgtggtggccctgatgcccgaggtgggcagcccacagcatgcgcgggtgctgcagtaccgggagctgctggacgcgctgcccatgnnnnnnnnnnnnnnnnnnnnnnnnnnnnnnnnnnnnnnnnnnnnnnnnnnnnnnnnnnnnnnnnnnnnnnnnnnnnnnnnnnnnnnnnnnnnnnnnnnnnnnnccacagacctcatgaaactggaccatgaagaggagccccagctctccgagccctacctttctaaacagaagaagctcatggccaagatcttggagcacgatgatgtgagctacctgaagaagatccttggggagctggccatggtgctggaccagatcgaggccgagctggagaagaggaagctggagaacgaggggcagaaatgcgagctgtggctctgtggctgtgccttcacccttgctgatgtcctcctgggggccaccctgcaccgcctcaagttcctgggactatccaagaaatactgggaagatggcagccggcccaacctgcagtccttctttgagagggtccagagacgctttgccttccggaaagtcctgnnnnnnnnnnnnnnnnnnnnnctgtcggccgtcatcccnnnnnnnnnnnnnnnngtcaagaggaaacccccatccttctttggggcgtccttcctcatgggctccctgggcgggatgggctactttgcctactggtacctcaagaaaaaataca

SEQ ID NO: 14473 - DNA, 996 bp, Macaca Fascicularis
  misc_feature (1)...(996): n = A,T,C or G
gcacagaggtnnnnnngacacccaccagccccagcagagcagacttgaccggggacgggcaccatggagggctgcagcctggaatctgacatggcccctagcgctgtctcaggagaaggctctggaggacttttggggcatgctgggcctggtgcagcgatggcactaaggagacccggggagagacagtgtcgtggtcctgtgtgcttaggaagcagcgcggccgtgtcctcagggatgtttgcgtccagtaaagacagtagtaactgcacttcagctaatacgcttcatggcagtgtcgacctcgggttagcttctgttgtctgtatgggtggttttcctggcgcggcatgacattgacatgttctctggtcccatgtcttagtggggcttggtacagttttgtgcctgacgcgtgcattagggtgttctcttatactttctggaacgcctttccactgtaagggccaaaccctcctggttcccttgagagtctttttggcctgatgatgactcttgagtgataccctgcgatgtaggcacgccccaaatggattctactttctttaaaactaggaactttgaagattaaaaaatagattgtcactactaatctgacacctaacttaagaagcttcacgtctaatgtgaacttttccagaaaaactgtgctatggacatttttcctttggggaattaacatccagattctggtaactattaaaagacagatctggttaatttaaattgagcgttgtatttttttccttaaacagctaaagctcacctttcaactttcttaggtgaggatatggtgagctaccagggagataaaagnnnnnnnnnnnnnnnnnnnnnnnnnnnnnnnnnnnnnnnnnnnnnnnnnnnnnnnnnnnnnnnnnnnnnnnnngaaggataagcccagggcagccccttctttccttaggaaataggattcagcagtcacaggaactatttgtatggtttttatgacta

SEQ ID NO: 14474 - DNA, 635 bp, Macaca Fascicularis
ggcagttcccttctctggcttgccctgagaccgcctggcccacatgtccttctcttgctctagcacaagttccccaagatgcccagggcaagtggggggattccttccatcccacctgtctaggagaaggccagtactcatctatgaggtccacaagccaagccagtcatagaagaatcacagatattttattttcctgactgaaactaagttaattctacctagtttgggtggggagtggttagccaaaccatgaaattactaactttttgctaacgtattgtgtaatcaaccctagatgttaataaaggtttgcttgtttgtttcaggcaaatactaatgtagcccttttttcttagcgtatagcttccggcctgggcttggcctggattgttggacgagttctttatgcttatggctattacacaggagaacccagcaaacgtagtcgaggagccctggggtccatcgccctcctgggcttggtgggcacaaccgtgtgctctgctttccagcatcttggttgggttaaaaagtggcttgggcagtggatccaaatgctgccattaaagaattttaggggtttaaaaactcttattcattttaaatgacttacctttatttccagttacatt

SEQ ID NO: 14475 - DNA, 750 bp, Macaca Fascicularis
  misc_feature (1)...(750): n = A,T,C or G
gnctngtgacaaactagaaattggaaatgaggactgtcctgggaaaagggtagacacaggcacctctctccacagcctgctaacataatgtgggcagaactgaaagatcactgcagtggaaactgttctggaagaggctgcagcatagcccatgcttagggactggatggtttttgcaagagctttttttttttaactaccatctcccaacttttaaagccagatacttgataaggattttagatcttaatgggttcgatggtagggaatatggaaaggatacactgctaatactgtgtctaacaataaagcaaacaactcgatgctgtaagaagacaagctgtttgagctttcaaacacacgtgcacacagcacaattcagaaatacccaggtggactcctgcaggcttaacagttggcatcctactgaaacgaaacgtgtattaacaagaaaatgtcaaacttttggggaaacaaattttctattatttcccacccaactaaaagggaagataaaaccatcatcatcagaacaaaacagattttttccaaacaagtacaatgatagtaccgggttggcagttaactctttcaccctactaaattcaagagatcatctccatcctgtcctgtatattttctacatttctattaagaggctacttggtagtgtcagtgggcatctcttacaccttctagtagctcaagctagtaaagccttgtacttatccatgctcaaccataaaagca

SEQ ID NO: 14476 - DNA, 777 bp, Macaca Fascicularis
  misc_feature (1)...(777): n = A,T,C or G
gcaacgtgannnnnnnnnnnnnnnnnannnnnnnnnnnnnnnnnnnnnctttgannnnnnnnnnnnnnnnnnnnnnctgcagaagctnnnagcagatgctgttggcatgagtacagtaccagaagttatcgttgcacggcactgtggacttcgagtcttcggcttctcactnnnnnnnnnnnnnnnnnnnnnnnnnnnnnnnnnnntggagaaggccaaccatgaagaagtattagcggctggcaaacaannnnnnnnnnnnnnnnaacagttggtctccattcttatggccnnnnnnnnnnnnnnnnacaaagccagttgatctgccctggagtggtnnnnnnnnnnnnnnnnnnnnnccaagtagctgctaccttctttgacctcttgctggagtcacgtgcctctgtccttaggttgtagcagaaaggaaaagatttctagccttcacctttcccactttcttccactagacccttctagtgccagatcctcttctcacagctgggattacaggtgtgagcatagtgagacattggcgctacaannnnnnnnnnnnnnnnnttctgttctttcttatacaagagctggagcccatgccctaccacgcatctgtggaggtgcccaggatttgacttgggcctnnnnnnnnnnnnnnnnnnnnnnnnnnnnnnnnnnnagataatacattcctgggggctctgttctgccttatctaaatcaccagagaccaaacaaggactaacccaatacctcttggactttatttaatgtcat

SEQ ID NO: 14477 - DNA, 785 bp, Macaca Fascicularis
  misc_feature (1)...(785): n = A,T,C or G
gtacggctgggctggctcaggcagcnnngagtgccagccannnntgcaagcaccntnnnagcccttggggccaaccccaggaccttggctccgtccatcaccagcaaccaatccaccgacagaatgtggtttctgccatcctgggcagaagctaaaggccaacttcacatttctgctgagagaaggcgacttaccgccttctccggccccagctccaggcgttttgaggcctctggtgcctggtggtaggtatggtgtgtttgttctgtcccccgggcgctggagtcacctggtgtcnnnnnnnnnnnnnnnnnnnnctgttannnnnnnnnnnnnnnctgctgtcttctgtgcgtttagttttcttgttgtgttctcgagccctggagcaggagctcagtgtgacttgctacccacctgatacctcagggcaaggccctttttccctccagccaggtgagtgttttnnnnnnnnnnnnnngggccctgggggagctgaggctctgtgctgcgcccccagccnnnnnnnnnnnnnnntcactggagctcttccaggccccactggagagcagagggcctgatcccccaccagaggggtccggtgcgcagagccggcctcccagtgtgccaaaatgaactgctctcagccgatggctgtattctgactttgannnnnnnnnnnnnnngcaggggggctagaggagggagattccacctcccttcccaagtgatcctcctcctgcctctggtatccttcctgctnnnnnnnnnnnnnnnnnngaaga

SEQ ID NO: 14478 - DNA, 399 bp, Macaca Fascicularis
  misc_feature (1)...(399): n = A,T,C or G
cagatcgagagcaaggctgcttttcaggaagccttgaacaccgcaggtgataaacttgtagtagttgacttctcagccacgtggtgtgggccttgcaaaatgatcaagcctttctttcattccctctctgaaaagtattccaacgtggtattccttgaagtagatgtggatgactgtcaggatgttgcttcagagtgtgaagtcaaatgcatgccaacattccagttttttaagaagggacaaaaggtgggtgaattttctggagccaataaggaaaagcttgaagccaccattaatgaattagtctaatcatgttttctgaaaacataaccagccattggctatttaaaacttgtaatttttttaatttacaaaanatataaaatatgaagacataaa

SEQ ID NO: 14479 - DNA, 708 bp, Macaca Fascicularis
  misc_feature (1)...(708): n = A,T,C or G
tttacctttgtcttttacttcttctttttgtgaccctccttttttagacccctctttccccaagactttcttcctccagtttccccttgagttctccccactgaatgtgtgtatgtatgtgcacacacacacacatgcgtgcacacacaatgcacacaactatgactggctcctacttannnnnnnnnnnnnnnnnnnnnnnnnnnnngggcaggggaaagtcttaggatggttgtacaattgactggaggatgttttccccttgagacactattgatcgcaccctgctgacttttcctgatgcttgccagaaggaacccatcctggctagaaagggtgatggtactggaccagtattcaacctcgagttttcaagctgcaaaacaggtcttaagggaggtgcttatatcccaccaacactctcccagctcccgtgtccccaagacctctggagtttcctcttgaatgtacatgannnnnnnnnnnnnnnttagacttttaattgagtgtgcaattgttttccatggagtttggtccattcattattttttagttaactacacttcttgatattcaaatgttctattaaaaaactgagtatgaagaaaaacactttactactgtagaaggaagaaagaatatcatgtgaccatcttcaggtataacagtgttgtttaaaagagaattattgtatgattataaaagatg

SEQ ID NO: 14480 - DNA, 716 bp, Macaca Fascicularis
  misc_feature (1)...(716): n = A,T,C or G
catcaaggaagacagcttcttannnnnnnnnnnnnnnnaccccnnnnnnnnnnnnnnnnnnnncagcatagacgacaccttcctcccnnnnnnnnnnnncataaaccagtcnnnnnnnnnnnnnnnnnnnnnnnnnnnnnnnnatcctgtctatcacaatcagcctctgaaccnnnnnnnnnnnnnnnncccacactaccaggacccccacagcaccgcagtgggcaaccccgagtatctcaacactgtccagcccacctgtgtcaacagcacattcgacagccctgctcattgggcccagaaaggcagccaccaaattagcctggacaaccnnnnnnnnnnnnnnnnnnnntttcccaaggaagccaagccaaatggcatctttaagggctccacagctgaaaatgcagaatacctaagggtcgcaccacaaagcagtgaatttattggagcatgaccacggaggacagcatgagcccttaaaatccagactctgtcaatacccaggaccaagccacagcgggtcctccatcccaacagccatgcccgcattagctcttagacccacagactggtttnnnnnnnnnnnnnnngnnnnnnnnnnnnnnnnttccacctcaggcgcattttgggaagnnnnnnnnnnnnnnctttgtcttcaaactgtgaagcatttacagaaacgcatccagcaagaatattgtcccttgagcaga

SEQ ID NO: 14481 - DNA, 788 bp, Macaca Fascicularis
  misc_feature (1)...(788): n = A,T,C or G
cnnnnnnnnnnnnnnnnnncantgctgggctagaaaactccatnntagcttttannngactagtatctatgaccattcaatatttgaagcctttagtaaggtggtacagaaactcattccacaannnnnnnnnnnnnnnnnnntattaaatatctttatatcaaattcaggtattgaaaaagcttttctctttgatgtcgtcagcaaaatctacattgcaacagacagttcccctgnnnnnnnnnagtcttacnnnnnnnnnnnnnnnnnnnnnnnngttgtaattgatgtttcttgtatatatgggttaaaggaagatggaagtggaagtgcttatgacaaagaatctatggcaattatcaagctgaataatacaactgtcctttatttaaaggaggtgactaaatttttggcactggtctgcattctaagggaagaaagctttgaacgaaaaggtttaatagactacaacttccacnnnnnnnnnnnnnnnnnnnnnnnnnnnnnnnnnnnnnnnnnnnnnnnnnnnnnnnnnnnnnnnnnnnnnnntagtgcctccagtctgaaagcgctgacacacaatggcacaccacgaaacgccatctagnnnnnnnnnnnnnnnnnnngctctgtgccagcttannnnnnnnnnnnnnnnnnnnnnnnnnnnnnnnnnnnnnntgagagccgccgcttgtgggaatctggtgcctgttccactagagacaaggggtagagtttctcatttggatgaaaaccccttcagctggtggtgtacaactgaagct

SEQ ID NO: 14482 - DNA, 765 bp, Macaca Fascicularis
  misc_feature (1)...(765): n = A,T,C or G
gcagaggcacggggagagggaggatgagacaatttaggacactggacatgagtttnnnagatggccacggtgagggcttggaaggagacaggaatggggcgaggaaggagccaggcccggcatgaggacctgatgctgagatagaaccatcataccccaagctnnnnnnnnnnnngtggagggggcggctaccccagtgccccccggctccagaggaaggaaagctgtgggggacgggggnnnnnnnnnnnnnnnnnnnnnnnnnnnnnannnnnnnnnnnnnnnnnnnnnnnnnnnnnnnnnnnnnnnnnnttccatgcaggccaggggatgggaggggtcccagagcccttcccttcccctctaaggaggcagcagttgaacagagtggggaagccgagtggcagctcccttgggggtttagccnnnnnnnnnnnnnnnnnnnnnnnnnnnnnnnnnnnnnnnncagagccaatgagaaggaaacctcatctttgcatagcccannnnnnnnnnnnnnnnnnnnnnnnnnnntcacatgcttctcacctaagtccccagggtccaagggagaagccccagacccccttctcttgcagagtgtgggggtggtggtgctgcaggggcagggctgggtgggggtcaccagactttttctgcccttagggcagtacnnnnnnnnnnnnnnnnntagactcttgtctttggaattggggggaggggggagtgtttcaatctgttatatgttctgtgtttaatgaagta

SEQ ID NO: 14483 - DNA, 1111 bp, Macaca Fascicularis
  misc_feature (1)...(1111): n = A,T,C or G
gagcagcgtgggggactcgaggctcncnntggtctgagnnnncctcgaggaggaggctggagtgcaggatgctttgaacatcagagaggccatcagcaaagcacaggccacagagaacgggctnnnnnnnnnnnnnnnnnnnntccctaatgggaccaggtccgaaaatgaaaatctcaatcaagaagaaagtaaaagagcagttgaagacgccaannnnnnnnnnnnnnnnnnnnnnnnnnnnnnnnnnnnnnnnctcgaggtgaagctggatgggggatccagnnnnnnnnnnnnnnnnnnnnnnnnnnnnnnnnnnnnnnngtttccttgttaacatttttctttctgcagagaggaagatatgtttttgctgctttatataaaaatgttttttttaagttattttaaaaatctagcttccctttttgattaagattgccatcttgcttttaggcaaaacaaaccagttaacaaacagccacaagaaagggggaagaggtgcctgtgggagattttgcagacctgttgtgagcataggtatttnnnnnnnnnnnnnnnnnnnnnnnnnnnnnnnnnnnnnnnnnnngtgggcctgtcatcttgacgaccannnnnnnnnnnnnnnnnnnntcctgccagccagagctggtggtgggactcggggattcagcgtgaaggtggggaagctgcacagcagaaaacagaacggaagttgggaaactttagagtctgggcaaaatgtttggtttttctccttaaaaaaaaaaaaaaaacaccccattaccaaaagcaaaggtaaggtggcaaccttatttttaatagtttgaaatgttgatgataatcctaattatataaatatatatatataaacacacatctatatatctagtgatttctaaagatttgtttacttttgtgttttgttttactgtactaagaacttgtcctttctccttgaatcaaagtaggacatgcatcatcctcctaattttaaatgttggctctgattttaaagtggtgcatttgattccagccttggtaatggagagtttgcaaacacacagcggcccacagcttcacgtggtggtgtgcagtgtgaggcagctcc

SEQ ID NO: 14484 - DNA, 533 bp, Macaca Fascicularis
gcaccactggtgcatgaggtgaggggcacgtggttcctgaccgggctgcacagcttaggagatgcttgccaaggccccgccaggccggcggtcttcaccgcgctccctgcctacgaggactgggtcagcagtttggactggcaagtctacttcgccgaggagccagagcccgaggccgagcctggaagctgcctggccaacatgagccaaccagccagctgctgacaggggacctggccgttctcaggacacgagaatgcagacaggcaaacagcattactgcccctgccctccccaccttgccatgtttgattccaggcaccagggcaggcccagaagcccagcagctgtgggaaggaacctgcctggggccacaggtgcccactccccaccctgcaggacagcggtgtctgtggacactcccacacccagctctgctcccacacaggcgtcccagctttcctcctcctttaccctttcagatacaatcacgccagccatgtgttttgaaaatttctttttttggggggcag

SEQ ID NO: 14485 - DNA, 738 bp, Macaca Fascicularis
  misc_feature (1)...(738): n = A,T,C or G
taatcgttgcctctcctcttccttctcagctctgggannnncatccccgcagtctatggcnnnatggagcaccccatcttcttcatgtttatccagatcgctatcatcgccatctttaagtcctacccaacagtgggggacgtggcgctctacatggccttcttccccgtgtggaaccatctctacagattcctgagaaacatctttgtcctcacctgtatcatcatcgtctgttccctgctcttccctgtcctgtggcacctctggatttatgcaggaagtgccaactctaatttcttttatgccatcacactgaccttnnnnnnnnnnnnnnnnntgctcatctctgattacttctatgccttcctgcggcgggagtactacctcacacacggcctctacttgaccgccaaggnnnnnnnnnnnnnnnnnnnnnnnnnnnnnnnnnnnnnnnnnnnnnnnnnnnnnnnngacctcagggggctgaggggccagaagnnnnnnnnnnnnnnnnnnnnnnnnnnnnnnnnnnnnnnnnnctcgggcagaagaggttcgagtccagggtcacaagtctctggtaccaagagacccatggctgatagtaaggcctgtggggaagaactggaagctccccaacttggacccccccacttcgtggctctgcacaccaaggagccccctcccaggcaggaaggagaagaggcaggtgagcagggcttgttaggttgtagctac

SEQ ID NO: 14486 - DNA, 917 bp, Macaca Fascicularis
  misc_feature (1)...(917): n = A,T,C or G
agagttgcagtgagtgagatcannnatgcanncagcctgggataagcatttacccggctagcagcactgttctggtagtgctgctgtgacctcactcaccccagggctgagactcaannnnnnnnnnnnnnnnnnnnnnnnnnncctcgtggttctcgccaatctcccggcacatgctgaagcacagggcaatcatattgtgcttctcactgtctccaggacggcagcgtttgatgtagtccagcagggctgtcttcagggtaccactctgccaagaataaaagggaatagcaaggtgtcagnnnnnnnnnnnnnnnnagacaggactagctgagtcatctggttctgcattccttaaaaactcccaagaaaaaggaagagaggagcaaaaatgagaatgaatacaagttttatgctgtcccaagtatgaggaaacaggcatgtgcgctttcctgttgggagtgtgaaaggcgaaacttttctaaagggagaagccttaaaaatacactcgcataagctgatctaacaattcaatttctaggaatctatccctaaagagataagcagagaagatgaatgtaacagggatatttaatagcaaacaattagaaataatccagatatccaaaaacgggaagagaataccatgtagccattaaaacttatgtaggagatgatttgttgatttgggaaatagtcatgatatactttgttaagtgagaaaagcaggatatttcataccttcactgtataagtcttattaaaatgtaattatatatagatgtcttcgggtacatgttcaaagaaagggcctataccaaattgttagtggctgtctctggatgatggatagatactgagggctttttctgtgttgttctgttttccaagtgtcttacctggaatatgcattactt

SEQ ID NO: 14487 - DNA, 762 bp, Macaca Fascicularis
actgctgggcaccgtcgccgcgctgaaggtggttctgtacctgctccgagtgtgcttagcgatggcctggaaatccggcggcgccagccactcggagctaatccacaatctccgcaaaaacggaatcatcaagacagataaagtatttgaagtgatgctagctacagaccgctctcactatgcaaaatgtaacccttacatggattctccacaatcaataggtttccaagcaacaatcagtgctccacacatggttggatgtactggaaaagtcataggaattgatcacattaaagagctagtagatgactcaataaataatgtcaggaaggacgatccaacacttctgtcttcagggagagtacagcttgttgtgggtgatggaagaatgggatatgctgaagaagccccttatgacgccattcatgtaggagctgcagcccccgttgtaccccaggcgctaatagaccagttaaagcctggaggaagattgatattgccagttggtcctgcaggtggaaaccaaatgttggagcagtatgacaagctacaagatggcagcgtcaaaatgaagcctctgatgggggtgatatacgtgcctttaacagataaagaaaagcagtggtccaggtggaagtgattttatcttctgctctttcttcttccacacatgcaaggtgaaagggtgtggattttaagacattagattacaagagctgttttggttgtcacctttatgctcctccattataacatcagaaa

SEQ ID NO: 14488 - DNA, 750 bp, Macaca Fascicularis
  misc_feature (1)...(750): n = A,T,C or G
gagcgagaaannnnnnnnnnnnnnnnttcgttaactggcagttaagcacatagtacatttcacctctagcaaacggaacacttggattccatctcttctctgaggagcttgacggcataaatcagaagcaagcacacagtttgtcaggtttgaagcccctatgatggtatgtgtcaaatcagttgtagctaatctgtccagggagaatactggcttcattacacttgtatannnnnnnnnnnnnnnnnttactgctgtttaatagaacatgattagtcatcaccgagaagaaagcatattagccgaggagnnnnnnnnnnnnnnnnnnnnnnnnnnnnnnnngatnnnnnnnnaatactcttagaagcatcatattatcccagacatgttctttcaagcccttggagccctcctttctaaattcactgtcataatttagtnnnnnnnnnntttttcagtccaaagagaggaaatcagtcgctgagtattannnnnnnnnnnnnnnnnnnnnnnnnaaacaaaatgggaaaaataaataagaataactcagaaattcaaaaggaaatcacaaattcagctaacaatagcatttcgagtatatttcgtaaactaagtaaatacacaaaaggctattttttccgaccgtaagagagattttatgtccttttgccgaggtggatgtgttagtctcaggcccnnnnnnnnnnnnnnnnncaagtcacacaggcttctgtattatgtatttagata

SEQ ID NO: 14489 - DNA, 750 bp, Macaca Fascicularis
  misc_feature (1)...(750): n = A,T,C or G
aggggcctcagtgagaccagattgtgtcatttgactccaggcctcatctaaccagagccagctgacctcagattgccgaaaaactagaagccacttgcatggtgtggccagagcctcagctggatgagaggctgagatgggtggccagcttgtacaccagtccctgaaccgagctgtttacaagactggggaggctccacccagaaggctttnnnnnnnnnnnnnnnnggagtgactgggaaaaactcacttcccggctgctgagtggagagaggcctcgtccagctttgacctgnnnnnnnnnnnnnnngcctccaggagcagcaatcataagagtggggtgcagtgaagatccccttccttcaaaatcnnnnnnnnatggtttcaggccctctggtgccatgaccaatttgtgtgtgtgtttaatttttgcttcaagctctagcaggacctgccccacgcacacccctacccctctgtgaggagctatgggaagtgtgggtttgtttccggaacagaagagaatgatggatgttctggctctggggccttctccacctccactcacagtagccttgctgaagccattgcagatgggagaaggtcannnnnnnnnnntccgatgaggggccccagcctgaagctgccaggccctgaggttcagaccctggaccctgcagctggaggcctgtggtgccagaagcccagattagggtggctgtccatccctggatagctattgcacgaatc

SEQ ID NO: 14490 - DNA, 679 bp, Macaca Fascicularis
  misc_feature (1)...(679): n = A,T,C or G
tgatggttagaaagaaacaggtcagctctcagatcacctggcccggggcagctgaccccctagaaccctggctctgccattagctaggacctaagactctgcccacattttggtctgttctctcccattacatgtaggtttgtcttagcatgcaagagttttccttttttaaaaaaaagtaaataagcaatgctttctctaaaatcaaagagggagtcattttattccaagatgttttatcttttatgttaagagatcaaagcttataattttctttttttttaatttttgaaggagggatcaactccaccagtttccaatgtctatgtgtctatgtgtgtatgtgccatacatatgtattcacatgaagaccggcatggccaagttctgctggaggagcactcaagtgtgatgagcagggccactggaccctgcagggctgtggtgtacatagtgcagctttggaggtggaactctattttcacacttttctatggagccttccgagtcccaggttttcactcgaggcgtctgtctggacggcggttttcagacctccattaacatccctacccagcattctgtacttcgggggccttctctcttgttataaaactttttaccaagtgaaacatcgataccacccttgtttccatnntcnntggtgtaaatacagagt

SEQ ID NO: 14491 - DNA, 699 bp, Macaca Fascicularis
  misc_feature (1)...(699): n = A,T,C or G
acatgaccagcaaggcatnnnnnnnnnnnnnnnnggctcccagaaggtcctgaacgcccccccagggacctcgttcatctccttcagtgacaaggccaaaaagaagatgtactcccgcaagacgaagcccttctccttctacctggacatcaagtggctggccaacttctggggttgtgacggccagcccaggatgtaccatcacacgatccccgtcatcagcctgtacagcctgagagagagcctggccctcattgcagaacagggcctggagaacagctggcgccagcaccgcgagaccacagcgtatctgcatgggcgcctgcaggcactgggnnnnnnnnnnnnnnnnnnnnnnnnnnnnnnnnnnnnnnnnnnnnnnnnnnnnnnnnnnnnnnnnnnnnnngtggaccgcgtgacggaggccctaggggcggccttgcagcactgccccaagaacaagctgtgacctgcctgctggcacacacccggcccatgcccaccccgagggatcaggaggatcaggagcaagnnnnnnnnnnnnnnncccccaggcctggggacaggaaagccacggacccagcccgggaggcagaaccaggcagcccttttccctccagtggcacctcctggnnnnnnnnnnnnnnnncgcaggacccagtgccttccaaatgagcggcagttccccggccgtgagcc

SEQ ID NO: 14492 - DNA, 795 bp, Macaca Fascicularis
  misc_feature (1)...(795): n = A,T,C or G
atacagatttggcatagagaaccatgtgatgctgtcaantnnnngtgcactacctggnnnnnnnnnnnnnnnnnnnnggatgactgcgagcccagcaatttagatactaaagtaaannnaggaggtggaatcactgctacaaaatctgttacctcaatggagcagaagcccattcctgctttgcttccactcactgaagagtctatgccttggaaatcaagcctaccccaaaagactagtcttgtacaaaacggggatgacccagaccaaatcaagccgccaaaagtgtcatcacaagaaaggccccttaaggttccatcagaacttggtttaggagaggaatttaccattcaagtgaaaaagaagccagtaaaagatcctgagatggattggtttgctgatatgatcccagaaattaagccttctgctgcttttcttatannnnnnnnnnnnnnnnnnnnnnnnnnnnnnnnnnnnnnnnnnnnnnnnnnnnngatgcagttttcctcaaaattnnnnnnnnnnnnnnnnactgagggagaggctgaaggctgggaagaagaaggggagctgaactgggaagataataactggtgacaatagatgcctgtgcatagtccacagtggttcacaaatgaagtggcattttggaannnnnnnnnnnnnnnnnnnaagacagctcagatgccaagtgtctttggatatttttgtcaagagagttgaaaagaagctgtcaacgttctatgcttatctcatgaaatataacattaacatgatggagacagatgggatact

SEQ ID NO: 14493 - DNA, 754 bp, Macaca Fascicularis
  misc_feature (1)...(754): n = A,T,C or G
gtaatgttgcatgcccaccacctcctgtntgaagtcaacagaaaganntgaaatggaatcttgccgttattcagctttttnntgctgaaggaatggannnnnnnnnnnnnnnnnnnnnnnnattgaacagtattctgactcagccttggaggctccatgtcaacatggggactacccttcacagagttactannnnnnnnnnnnnnnnctgcacactcactcttcttaaaactatgttaacagaactcctgagaggtggatcctttgagtttaaggacatgcgtgttccttcagcgcttgttactttacatatgctcctgtgctctatccccctctcaggtcgtttggatagtgatgaacagaaaattcagaatgatatcattgatattttactgacttttacacaaggagttaatgaaaaactcacaatctcagaagagacnnnnnnnnnnnnnacttggtctttaatgttaaaagaagttctttnnnnnnnnnnnnnnntnnnnnnnnnntttttttctggactcatactcctttcagagctgctgcctctnnnnnnnnnnnnnnnnnnnnnnnnnnnnnnnnnnnnnnnnnnnnnnnnnnnnnnnnnnnnnnnnnnnnnnnnnnnnnnnnnnnnnnnnnnnnnnnntaaaaaacaaaaaccctcatctcccttcctcccaaaaagacataaaannnnnnnnnnngggggagataaaactgcaacaagttggtcatgaggaaatatgggggt

SEQ ID NO: 14494 - DNA, 714 bp, Macaca Fascicularis
  misc_feature (1)...(714): n = A,T,C or G
gcccaatgatgcagttttcctcaaaatttgctgcagcagaaattactgagggagaggctgaaggctgggaagaagaaggggagctgaactgggaagataataactggtgacaatagatgtgagttaaactttaggaaaaaggattccctttttttaaaaaaaaaaaatcaatacctcaaaagcaggctttgggacaagaaaaccccaaagtggcctgcttttcccatcccaggagctcattatccagtctgcaccaacagaaatatgagactgactgcgagtgctggctaaaagccctgggggtgaggctcannnnnnnnnnnnnnnggaggaagagcctttgtgcatttgactgaggccagtttctttgaagagcaagtagctgaggagaggtcaaatttactnnnnnnnnnnnnnnnnnnnnnnaagtaaagaaaatgtaagaattcaagctggttagcttaattttgtgccatttctttaacataagagtaagctctattatgaaatacaacttaaaaaaattttagctataaattatataaatgattttaaattgctgaggtttccttaggcagcttatttatttgtttacagttatactatctgagtaaatggttctttgtggacctgggcagttcctgactgttccacatgtagtacattgtaccaaagttcttaatgagaatattccccnncnatcctgtctctaaa

SEQ ID NO: 14495 - DNA, 743 bp, Macaca Fascicularis
  misc_feature (1)...(743): n = A,T,C or G
tagtgatggcnnncaccccagatgcaagcgtggattgggnnnnnnnggagagaagctgcagccatttgggcaactgaagaggccccgtagaaatggcctggggctcatctccaccatctatgatgagcctctaccccaggaccagacggagtcactgctccgccgccagccacccaccagcatgaagtttcggacagacatggcctttgtgaggggttccagttgtgcttcagacannnnnnnnnnnnnnnnnnnnnnnngttgggggnnnnnnnnnnnnnnntctcatagctacatgatgagaaccctctgccccggcctcatctaccactgaagcagaaaggagtctgggagcagcagtcttcgtggctggttcagggtgctttgctctgagcctgcctgcctgccggttctctacctcggggatttttacaaaaagccccctcccgtcccctccccttggatatcaggggtaacgaccgattgtctttggtctctaaccctagtctctgggcttgccctttgccnnnnnnnnnnnnnnnnnnnnnnnnnnnnnnngaggctatcagcacagccttccttggggactctgaaggtgtcccgacgaaggccagaaaggggggggaagggacctggacgaggagaggatttgtgagcttggaagagccggccttgggcgggcccttcaccgcctcactaggtgggactgcagcagagagtccgcgggaagtggcttgggtgtg

SEQ ID NO: 14496 - DNA, 810 bp, Macaca Fascicularis
  misc_feature (1)...(810): n = A,T,C or G
cccannnnnnnnnnnnnnnnnnnnnnnnntaacagagagannnnnnnnnnnnncccanctccccagaagtcactcagcgnnnngctggatgccagtgcagnntangccacgtctcgctacatcgaagannnnnnnnnnnnnnnnnnnnnnnnnnnnnnnnnnnnnnnnnnnnnnnnnnnnnnnnnnnntgggagcatccaggttctgaagcacatgtccggccgcgttgggnnnnnnnnnntgggagcatccagcnnnnnnnntgccttcgcccaagagatggaccacacccagtcccgcatggacggggtcctcaggaagttggccaaagtatcccacatgacgagtgaccgccgacagtggtgtgccatcgccgtgctggtgggggtgcttctcctcgttcttatcttacttttctctctctgaccccagccctcccngnnnaggttggtccgttaagctctgtgggagccaccaagcactttggagctggcctagccccctaggaggagagggttcctcctgggtagctggaaagtagaggttccnnnnnnggggaactgtccccacggctcccccccagagccagtggtacccttcaggaccctgggccgaaaccaccaccactggtcctgtctcaagtgcacttagggggtggtagaggcagcgtcacctcagacacacccctctccatttccagttttgggaccccaaagccattcgcccctgtgccttacacatgtgccaacctggaaataaaacgtcagccttttttaaaaaaaaaaaaaaaaaaaaaaaaaaaaaaaaagg

SEQ ID NO: 14497 - DNA, 767 bp, Macaca Fascicularis
  misc_feature (1)...(767): n = A,T,C or G
atcatgatcttgttttgctgtatcatgtgacatatttatacattttatctatnncntcgtggaaaaatattttgtttaaaacataattatcttaattcctgtgaaatggcactctacactctaaacttttatctgatgtacataaaagcattatcttaatttttaagtctgtaaatatattttaaagttacataataatggctttataacagatgactgtcaagtgaatgagctgttcatatcctgtcagttcagtcaaaatatgttgtattttacaaatgtatttagactaatatctacatgtagttttactggattcctgtccttttacagtattaaatgattttcactgatatattttttactgctatcatctaaatcagtggaccatggaagaaacctcaatatatcattcagttcaatccccttgcttcagaatcagatcatagcatatctattcgaagtagaggaatgcttttttccttttcttgaaagtttctctttnnnnnnnnnnnnnnnnnnnnnnnnnnnnnnnnccctcacattcaggaataattttatgtacattttcatgctttgtaatgttcttacttttttattcaattttgtctatatgtggatgattaagatgtattttatttatttttatccatagctttttccatataagtatatatcttagggtcagaactgctaaaagagacaaactcagccagaagcacttggaaagcatattttggtatctgcattgctttgcacatctaaat

SEQ ID NO: 14498 - DNA, 669 bp, Macaca Fascicularis
  misc_feature (1)...(669): n = A,T,C or G
atnnnnnnnnngcncnnnnnnncgaggagcagcacccccggagtcccctcggccttgctctctgcccatccgcccctgctatggttcagagcctggcccagctactccagacttctatgccttggtgnnnnnnnnnnnnnnnnnnnnnnnccaagagcaactgaaatctccacctagcccagaattacagggtcccccacccacagagaaggaagccatactgcggaggctggtggccctgctggaggaggaggcagaagtcattnnnnnnnnnnnnnnnnnnnnnnnnnnnnnnnnnnnnnnnctggtgcgcctgtcctccggctctttcgcccgcctggtggagctgttttgtagccgggaggacaacnnnnnnnnnnnnnnngcatgccccgggccgccgcctccttccccggagcccctggcccgcctggccctggccatggagctgagccggcgcgtggccgggctggggggcaccctggccggactnnnnnnnnnncacgnnnnnnnnnnnnnnnnnnnnntccaggcccacgggggctgggagggcatcctggccgcctcacccgtggacttgaacttgccattggactgagctctttcnnnnnnnnnnnnacaagatgacacctcatgtccctgccctcttcgtgtgcttttccaagcctg

SEQ ID NO: 14499 - DNA, 869 bp, Macaca Fascicularis
  misc_feature (1)...(869): n = A,T,C or G
cttgcatgaaccaagaaatttggaaatacaatcacatcaaagaacaaattgtcacggcttttgacgtttaagccaaacaaattttgtagggcagatttcaaaaaggtgtgaagttataacaatttaaaaacacagttaacctacttctaggaatgcaaaacatacaatcataggttattttcaatacaagaaaacttaaatttgtttgctttaatttcttaaaactactaagacaaagcactagcttgtatttttatttacagcatactccatactcctatgtaatctatcccaaatccaaaaaaatgaaactgtccaaaaccaaaggttctgcaaaatcatgatttaacagtgtgcccagcttgttttgaagctaaaatgaagcctgaaaccatannnnnnnnnnnnnnnnnnnnnnnagggaactctgcannnnnnnnnnnnnnnaagagcatttatgaaaagaggaaaaataaaaagacttgagtatatacacaatagtgatttcttcagcccaatacaaannnnnnnnnnnnnnnacttaaagatgaaacagttaagccaatttttttttttgaagaatgtagatctagagccaatcgtatcttgccagtatcattttcaagcccttacttgtctacttccactgttgcccataagtatcctgataaattcctggttgtnnnantgtaaccatagttaccagaatagtcaccaccttgctgnncgctgctgnnngatgggttgggaacccnnnnnnnnnnnnnnnnnnnnnnnnnnnnnnnnnnnnnnnnnnnnnnnnnnnnnnnnnnnnnnnnncttgcctcctacattgcccccacgattgccccgnnntccacgggaaccac

SEQ ID NO: 14500 - DNA, 775 bp, Macaca Fascicularis
  misc_feature (1)...(775): n = A,T,C or G
tataatggacgaagaccagtccaaattagcannnnnncttgatctaaataatgctatcctgcagctggtaaagaaatacaagagcatgaagctggagaaagaagaatttgtcaccctcaaagctatagctcttgctaattcagactccatgcacatagaagatgttgaagccgttcagaagcttcaggatgtcttacatgaggcgctgcaggattatgaagctggccagcacatggaagaccctcgtcgagctggcaagatgctgatgacactgccactgctgaggcagacctctaccaaggccgtgcagcatttctacaacatcaaactagaaggcaaagtccccatgcacaaactttttttggaaatgctggaggccaaggtctgactaaaagctccctgggccttcccatccttcatgctgaaaaagggaaaataaacccaagagtgacgtcaaagaaacttagagtttagttaacaacatcaaaaatcaacagactgcactgacaatttagcagcaagactatgaagcagctttcagattcctccatagcttcctgatgagtttctttctactttctccatcatcttctttcctcttccttcccacatttctcttcctgtttattttttctccctttcttctttccccctcccttatttctttgcttctttcattcctagttcccattctcctttattttcttcccatctgcctgcctgccttctttcttttctttgctgctctcgttcctctctttactcatcttcctcc

SEQ ID NO: 14501 - DNA, 690 bp, Macaca Fascicularis
  misc_feature (1)...(690): n = A,T,C or G
gaagctggaacttactgactgtaagaggatagaggtggaccgagaaggactttcccagtcttcagtggcacttcccaagatctcccttcccttgtgctctgtgctgattttaggacagctaagatgactgccatgcgctgtggcaggcccaatttgtcttgttctttcctttccatatcccagtataatctnnnnnnnnnnnnnnnnnnnnnnnnagaatccatgtgttctcccgagtaacnnnnnnnnnnntcttgttcattccatcctccatttccgactcctttcagactcaacatagttcccttctnnnnnnnnnnnnnnnnggcctactggctggtctagctgacggtggtggtatttagcaaaggccactgttcccatagtgaccagctgataccacttcctgccctctagtgtgcaattgggtgttgcctcagtttcctcccagctcagttttattagatcaaagctgctgttgggcaccaggtcggccacctcaatcaccagccaagatggtnnnnnnnnnnnnnnnaggtcaatcacctctctggtgctgtagttcccagctccttcctgatttttctaatcgctccttctgggaaacaggaagttgatattgccatggtggcggggtatgccgtcacctcnnntagttttactgtaaaagggaaannnaacaacaaaaac

SEQ ID NO: 14502 - DNA, 689 bp, Macaca Fascicularis
  misc_feature (1)...(689): n = A,T,C or G
cacccgggaagggaatgagctctatcactgtgtcatctacctggcnnnnnnnnnnnnnnnnnnnnnnnnnnnnnnnnnnnnnnnnnnnnnnnnnnnnnnnnnnnnnnnnnnnnnnnnnnnnatgtcnnnnnnnnnnnnnnnnnnnnnnnnnnnnnnnnnnnnnnnnnnnnnnnnnnnnnnnnnnnncctgacgggggactggaaacatggcttcttctcactgacggctgtgggggccaccaacgtgggctccattcgcatctactttgaccgggacctgcacacaaacagcccgaggcacagcaagggctcatacaacgacttcagcttcgtgacgcacaccaatagagagggcgtccccatgcgcaagggcgagcacctgggcgagttcaacctgggctccaccattgtgctcatctttgaggcccccaaggacttcaatttccagctgaaaacaggacagaaaatccgctttggggaggccctgggctcgctctagagcctctttcctgattatggctgctaagggatcttttccaaacagagtgagggtcttttagagagggaggcccatgaggccatccaggtgagggcctgcctcagagtgggtgagagtctgaccaggtaggacttgaatgactcggctcccacctgttccggaggtgcagacaagaggtggtgagagcccc

SEQ ID NO: 14503 - DNA, 750 bp, Macaca Fascicularis
  misc_feature (1)...(750): n = A,T,C or G
cagcaaggaccgnnnnnnnnnnnnnnnnnnnnnnnnnnnnnnnnnnnnnnnnnnnnnnnnnnnnnnnnnnnnnnnnnnnnnnnnnnnnnnnnnnnnnnnnnnnnnnnnnnnnnnnnnnnnnnnnnnnnnnnnnnnnnnnnnnnnnnnnnnnnnnnnnnnnnnnnnnnnnnnnnnnnnnnnnnnnnnnnnnnnnnnnnnnnnnnnnnnnnnnnnnnnnnnnnnnnnnnnnnnnnnnnnnnnnnnnnnnnnnnnnnnnnnnnnnnnnnnnnnnnnnnnnnnnnnnnnnnnnnnnnnnnnnnnnnnnnnnnnnnnnnnnnnnnnnnnnnnnnnnnnnnnnnnnnnnnnnnnnnnnnnnnnnnnnnnnnnnnnnnnnnnnnnnnnnnnnnnnnnnnnnnnnnnnnnnnnnnnnnnnnnnnnnnnnnnnnnnnnnnnnnnnnnnnnnnnnnnnnnnnnnnnnnnnnnnnnnnnnnnnnnnnnnnnnnnnnnnnnnnnnnnnnnnnnnnnnnnnnnnnnnnnnnnnnnnnnnnnnnnnnnnnnnnnnnnnnnnnnnnnnnnnnnnnnnnnnnnnnnnnnnnnnnnnnnnnnnnnnnnnnnnnnnnnnnnnnnnnnnagtgcaatcctgagggtggactccagatctgcaccgtcggccagctggggtctgactgcacatggcttctcatgaatcttgcgttttttacaaattggagcagggacagatcatagatttctgattttatgtaaaatttg

SEQ ID NO: 14504 - DNA, 715 bp, Macaca Fascicularis
  misc_feature (1)...(715): n = A,T,C or G
actggcagatgnnntcttgcagaagtacnntcccccgctgatccccccacgaggggaggtgnnnnnnnnnnnnnnnnnnnnnnnnnnnnnnnnnnnnnnnnnnnnnacaaaaggaatnnnnnnnnnnnnnnnnnatcaggagctctaccgcaacttccccctcaccatctcggagcggtggcagcaggaggtggccgagactgtcttcgacannnnnnnnnnnnnnnnnnnccggctggaggctcgcaagaaagccaagaacaagcagctgggccatgaggaagacnnnnnnnnnnnnnnnnactgcatcatgcacggctacatgtccaagatgggcaaccccttcnnnnnnnnnnnnnnnnnnnnnnnnnnnnnnntgttccccaaccgcctggagtggcggggcgagggcgaggccccgcagagcctgctgaccatggaggagatccagtccgtggaggagacgcagatcaaggagcgcaagtgcctgctcctcaagatccgcggtgggaaacagttcgttttgcagtgcgacagcgacnnnnnnnnnnnnnnnnnnnnnnnggagctgcgtgacgcctaccgcgaggcccagcagctggtgcagcgggtgcccaagatgaagaacaagccgcgctcgcccgtggtggagctgagcaaggtgccgctggtccagcgcggcagtgccaacnnnctctgacccgcccgcccgcct

SEQ ID NO: 14505 - DNA, 713 bp, Macaca Fascicularis
  misc_feature (1)...(713): n = A,T,C or G
ccccccaaatannnctccagaaactaggcctgactggggacacctgaaagtagtatagtagtgcaaaatggaagactgatttttgactgtattttaatcagcttcagagattctttaaaccttcctaatttcctgctgtaggctggtaaatacaaatatttctttaaggggtgatgaaaacctcggaagttttaatctgaagttatctgctatgaaaggctaaagtgattaagtctcatgcttttttttttttttgatcctgctctttcttatattcttttnnnnnnnnnnnnnnnnnaggaaggtagttggaggtataaaacaggaggaaatattacggaaaatgaaaatagggaaaataactgaatcattttaggagcagctaatttcttttctcaagagtatcccttcnnnnnnnnnnnnnnnnnnnnnnnnnnnnnnnnntgggttgaaaactctagctaaagaaagttatcaaatcttaatatgcattcctactattattatagtttttaaggtttcaatacaatcttctgaacggcgtaagtccttagtattttagccttacctcctgcatttgcaatatgtaaaactaatcagtgggcnnnnnnnnnnnnnnnngagaccctgaaatgaacaattacattctgactctgcatcttgtccccaatccttccaaaattattgttgctgatttgtgctgccattaactc

SEQ ID NO: 14506 - DNA, 624 bp, Macaca Fascicularis
  misc_feature (1)...(624): n = A,T,C or G
agcaaggnnnnnnnnnnnnnnnnnnnnnnnnnnnnnccatcgtgttccaggnnngcannnnntgcttcctgtgcnnnnnnnncggcatgcccaacannntcaacnnnnnnnncattcggttccagtggtggctggtccccctgccctacggcatcctcattttngnnnatgatgagatccggaagcttggagttcgatgttgcccagggagctggtgggaccaggaactctactattagaggnnnnnnnnnnnnnnngcatccctgcaactgccacagcaggtgggggcggggatcgtgggagcctctggacagccaccaagtcatctgagcaaccaagagtcccagccccaccagaatctgcttctgcagcccacggcaccccacatnnngaaggacctgcccactcccctcccccatccccaagtttgcacctcccggagcagcagcacctgggcagtcctctgagctggccttgggaaagcccccacctacggtggcggtggggctctgacagggagtacagctggccgctcctgcagggtgtttctgtcctcaggactccagtccaggcaggagggctgcccgggggcccttcggtaaagacatgattgtgtcctgggcg

SEQ ID NO: 14507 - DNA, 740 bp, Macaca Fascicularis
  misc_feature (1)...(740): n = A,T,C or G
acnnnnngcagtacatagagcgtgacggcaccgagtcctacctcaccgnnnnnnnnnnnnnnnnnnnnnnnnnnnnnnnnatcaccctccnnnnnnnnnnnnnnnnnnnnnnnnnnnnnnnnntgctgaaggcaggtgccaacatcacgccgcgtgaaggnnnnnnnnnnnnnnnnnnnnnnnnnnnnnnnnnctggttccgcacccgcagtgccatcatcctgcacctcannnnnnnnnnnnnnnagatcaacttcttccaggatcacaccaagctcatcttgtgcccnnnnnnnnnnnncgtnnnnnnnnnnnnnnngaagcgggactnnnnnnnnnnnnnnnnnagtctcctggaggagtacggcnnnnnnnaggagctggccagccggctcnnnnnnnnnnnnnnnnnnnnnnnnnnnnnnntgagctcacgctcggccagcaaccgcctcaaggcctcctaatagctgccctcccctccggactggtgccctcctcactcccaccagcatctggggcccatactggttggctcctgcggtgccatgtctgcagtgtgccccccagccccggtggctgggcagannnnnnnnnnnnnnnnnnnnnnnnnnnnnnnnnnnngttatttttgtacatgttcgggtgtgggttctacagcctcgtcccctccccctcaaccccaccatatgaattgtactagaatatttctattgagttcggaactgtcctttccttgg

SEQ ID NO: 14508 - DNA, 747 bp, Macaca Fascicularis
  misc_feature (1)...(747): n = A,T,C or G
gnnnnnnnnnggctgtgaccggctgctgagtgagacccagaggatcacgggactgcgagcnnnnnnnnnnnnnnnnnnnnnnnnntcgggctccgagcactgctannnnatctaccggctctaccgcagctgtgctnnnnnnnnnnnnnnnnnnnnnnnncccgatgccagggcctgggactaccaggcctgcaccgagatcaacctgannnnnnnnnnnnnnnnnnnnnnnnnnnnnnnnnnnnncctgcccttcacggatgagcgccgccagcagtactgcctggacacctggggcgtgtggcccggggcgatctcagagccgccagcaacatcatcttctccaacgggaacctggacccctgggcagggggcgggattcggaggaacctgagcgcatcagtcattgccatcaccatccaggggggcgcgcaccacctcgacctcagagcctcccaccccgaagatcctgtttctgtggttgaggcacgaaagctggaggccaccgtcatcggcgagtgggtaaaggcagccaggcgtgagcagcagccagctctgcgtggggcgtccggactcagcctctgagcacaggactggaagggtctccaggctcctcatggagtgaatggagggaggaggaggctgccccagccctgccctgtgtttgcaccttctgggtccccgaagctcaacccaccgtggccggcccagcgcgnngcttcactcaagaagcagcggaggcacagg

SEQ ID NO: 14509 - DNA, 691 bp, Macaca Fascicularis
  misc_feature (1)...(691): n = A,T,C or G
gaacgagcagggacattacgacncnnnnnnnnnnnnnnnnnnnngccaggtgnnnggggtnnannnnnncgnnntccatgccactgtctaccgggccagnnnnnnnnnnnnnnnnnnnnnnnnnnnnnnnnnnnnnnnnnntttcttccagtttttcgggggttggcccaaaccagcctcgctctcggggggcgccatggtgaggctggagcccgaggaccaagtgtgggtgcaggtgggtgtgggtgactacattggcatctatgccagcatcaagacagacagcaccttatccggatttatggtgtactctgactggcacagctccccagtcttcgcttaatgccactgcaaagtgggctcacgctcactcctaggaggagagtgtgacgctgacaaccaggtcatccaggagggctggcccccctggaatattgtgaatgactagggaggtggggtagcggcctctccgtcctgccgctggcaaggaatggggacagtggctgtctgcaatcaggtatggcagcatggggcagtgactggatttctgcccaagaccagaggagtgtgctgtgctggcaagtgtgagtcctccagttgctctggcccaggagcccatggtggggtgctctcttcctggtcctctgcttctctggatcctcctcaccccctcctgcgcatggggccgccc

SEQ ID NO: 14510 - DNA, 744 bp, Macaca Fascicularis
  misc_feature (1)...(744): n = A,T,C or G
ccactgaggagaggcctggggggacagctgggcacgtgcacttacagggaaacacggggtgagacagcgggaaggggccctgcacgcacggacgccacctccgccagccgcctccgcccgccccacacnnnnnnnnnnnnnnnnnnnnattttttaaattttttttttttaagaaatgtcaaagttgtgcccaacactgtggatcagcaaacacgatagagaccagtcagtacttctnngagggagcagggacagagagaggaaaagggagggtgagaatgaccacacgacacagccttggaccatgagcagaagcgtccgtgggaactccggcggggtggacaggctgcctgcgcaggccccagaagaggccaggcacgccctcagaagagctgcaagcccctggcctggcctgctacgtgccctgcttccacgtggccgccacactgacacacccacattcaccacacccacccgcgccccgatacagccacgccaggaggaggacatggccgccaagagcaaggcacaacctcgagttcttggggcgcagagaacttaggagagaagcgcagaggagcccccgcctgagcacccgccccggggccccagccttccacctgtgctagcggcctggggcctccactctggccggagggaggaaggaccgcaggcagacggcctggtcctcttaacagcttttgtccggagctagactcttgtcctttcagttggtaaatggtt

SEQ ID NO: 14511 - DNA, 714 bp, Macaca Fascicularis
  misc_feature (1)...(714): n = A,T,C or G
cacttgcatgtcccnnnnnnnnnnntggctcctctgtggtgtctgcctgttgcgtgacactctcctcgcagttcttgagttgcggcagacatcgggatgggaactgatggtgggtggggctgcagagtgccccatcggtcacctggtttctcaactacctcgcgtcatcgcagatgctagcgcgttgcctgtcgctttcccctggatgcctagaccgttataaagtgtgccacatggacnnnnnnnnnnnggagagaggattttagctaggatttgaacacttggtgctgggaacctcagggtgttgcttgccactaagccatgaaaccagagacaaaatctctatactgccctgagttggggggattctcagtgccaactgtggctggtcctcgtcatccaaagggacggtcagtttggtgtcacatgaaacaccaagatgtctgtctttgaagcgtgattttaaaatccccatgcctgtggctgcgcttcctgttgctagggctgggaaacactccttgcatcaaggggtcacttnnnnnnnnnnnnnnnnnnnnnnaacttcctctaaaaccctctcatatatagacagctttgactcgagggtacgtttttcttccaggatggtgttactgcagttgaaagnnnnnnnnnnnnnnnntttcttaatgtgacnnnncgataggcacagctatgtgctcctatattctggcc

SEQ ID NO: 14512 - DNA, 746 bp, Macaca Fascicularis
  misc_feature (1)...(746): n = A,T,C or G
tannnnnataagccaccatgcccagcctccataacctcttttctgtggaagagtgcagaagacagagtaagacaagagggcagaaccagctctctagctcctttctgggtctcacctgagaacctgttagaaaggcagcttcctgggccctagcccaaacccactgaatcccaatctgcatttaataagaccccacctgactcctctgcactttcaaatctgagcagctctgctatgaattttgtctaaatcagtcctgagtaggtgactgcaggtgaagtacacatgtatcacactacactagagcaaacgaaacctgcnnnnnnnnnnnnnnnnagcaggtctgtggaaggagacggccccagtgaaaggaannnnnnnnnntgcctccacttgcccaaaaaaggctttgtttgcaactggctttnnnnnnnnnnnnnnnnacatctattatgccatttatttaataacaaatgtcaaaggttgggaaggggctaataaaatggaggacaagatttaagagtcaaaatgcaagtaagtaattttatggtcaggggaggccgaggtagcaaaaggacgtatgctggtgggaggggcattatgaaagtttcattacacctgtgctgggnnnnnnnnnnnnnnnnnnnnnnnnnnnnnnnnnnnnnnnnnnnnnnnnnnnnnnnnacatctctgtaatagcatctaaaatgaagttaaaaagcaaaatttccctcaatctcccttta

SEQ ID NO: 14513 - DNA, 773 bp, Macaca Fascicularis
agatttcaagaaagagatttgcataaaactgaatttgaaaattctagatagacaggcaaaggaagatgaaaaggcacaaaaacaaagaagactggcaaaattaaaagaaaaggttgaaaacaatgttagtagagatccctctaggctttacaaacccacgaaaggttgggaagaacgaaccaaaaagataggaccaacaggctctgggccacttctacatatcccacatagggctattccaacctggagacaaggaatacagagaagagtatgagataatgaaattgctactcagttgataagaatgttaacatactaagttataccagggagaaagtgactaactgtgttctttaaatataaatagcctagtcagattgattattgtgctatattgtgaattgagaggtattaagtttcatgaggctttgtcattagtattcctgcttctaccacgaaggtatttaatatatgtgttggcctattattgatgtaaaagttatttaaataagttaatgttacaaacattatttaaatactcaaaacatttcaaagagattttgtttttgtcatagcatagcaaaataaattggaacaatcatacaatgacattttttaaaccaaaattttgtaacttttgtaacttggagttaagttagcttgagtaacaaaaaggtaaagtggtttttgttcagagttatgaaatgttagtactttttctatgtttaacaaattggcagtttgtcagttatgacatttttgtgtaataaata

SEQ ID NO: 14514 - DNA, 767 bp, Macaca Fascicularis
  misc_feature (1)...(767): n = A,T,C or G
cacacatgancccatacaggaaaaagagctagccaaagcagtgtgctnnnatgcagtattctcttgctaaagaggaaggaaactttgtctcgcataggagcttatataaatataaacatatatacatgcagtctacagagtggccttcatatcatgagaacatttctgttttggatggggatgttacnnnnnnnnnnnnnnnnnnnnnnnnnnnngaactgtaaagtttacaacccaaagtcagaggaccaagttaaagtgaagccagtaaagaacccacctgcggaaaggacacggcggggcgaggcacagccagnnnnnnnnnnnnnnnnnnnnnnnnnnnnnnnnagctttcctgcctctccattgtcttggacccttgctcaaagagctgtgggactgaatttcatggaaaagaatatgattttcgtagtgctcctgcttgcctcttcttgagttctctgttcttctgagttcttggnnnnnnnnnnnnnnntagggtctctgccactcagagttgatacttgaaaactttagttttccttattaatgaatatcactatcggatttgactaannnnnnnnnnnnnnnnnnnnngggggaaagaaaaacatcagtttgatgtctctagggggtcttttgtgtgatttttagctaagtggtgtgccagggtttcagtgacataccaaatgaaaataaagaggatatgatcacggnnnnnnnnnnnngtacctctctgcatatactgaannnnnnnntgtgtaaaa

SEQ ID NO: 14515 - DNA, 735 bp, Macaca Fascicularis
agtactgtaagcaaaagtgattacgggcagggacgacccatcaaagcgcggagtggaccaaacctgcactcgagtaattagcaaagcaactccggccctacccgcggtctccatctcatctagtgctgaagtctgagggctctgctgcatcagacccgcctctaagagaactttctgaatttgcagctaatctcggggaagacaggtttaatttatttgaagttttcatggtgttaatatttttgtttacctcgctaagcttcagaattttgccaatctctgaatttgcacattttgtataatttttttttttcctttgagcagtgttgatcaagccaaggtgagtatttgccatgaaattccagtgaatgtgtagctcaaatgcaaaccctaagtttgctgtcagttattgtatggtcagtaccccagtcccagtacacatattttaaaggttaaagtgaatgtttttgtaacatttaagcatatttcagatgtaaataaaagattgtaaaatatacggtttttaccaaatttaaaagatcctttttagttaatactatgacagtactaaaaatatatgaataacatttcagataccattatattaaaatatttgtgtatgtgtacagaagtgttgataaatactaatctttaaagtttgtggagtttctttatttgtaatatatgtgctcttaaaagcaatgggatgtgaaattatgaaagtattttattgtc

SEQ ID NO: 14516 - DNA, 709 bp, Macaca Fascicularis
  misc_feature (1)...(709): n = A,T,C or G
tcctcaaatcagttttatgtcnnnaaangagaaggaaaccaaggagtagctacatatttatattttgtgtcattttnnnnnnnnnnnnnnnnnnnnnnnnnnnnnnnnnnnnnnnnnnnnnnnnntaatatatgttgagagtgtctcaacacttagtagtgacagtattgacatctnnnnnnnnnnnnnnntactaatacaacagggtaactgggccagatattctttctacaaaataatattggattgattggagttaatgtagtactcatcatttaccacggtgcttggcagagagtggatactcaagtaaggtttgttaaatgaatgaatgaatgaacttagaaccacacaatgccaacatagaattaatttaaagccttaaacaaaatttatctaaagaaataacttctattacttttatagaccaaaggaatctgattctccctagggtcaagnnnnnnnnnnnnntactaaccaataggatggcctggagggttctgcacattcttatttgaagcatgaaaaaagagnnnnnnnnnnnnnnnnnnnnnnnnnnnnnnnnnntctggttcatctagtcctgctccttgtgctataaaataaatgtagactgatttcctgcccaaagtggtctactccagctagcccttatgaatattgaacttaagaattgtgacaaatatgtatctgatacggtcatttgttt

SEQ ID NO: 14517 - DNA, 766 bp, Macaca Fascicularis
  misc_feature (1)...(766): n = A,T,C or G
ggaagnnnnnnnnnnnnnnnnnnnnnnnnnnnnnnnnnnnnnnnnnnnntcatgatcccaccattgaagatgcttataagatcaggatccgtattgatgatgagcctgccaatctggacattttggatacagctggacaggcagagtttacagccatgcgggaccagtatatgagggcgggagaagggtttatcatctgttactctatcacggatcgtcgaagtttccatgaagttcgtgagtttaaacagcttatttatcgagttcgacgtactgatgatacacctgtggttcttgtgggaaacaagtcagacctcaaacagctaagacaggtcaccaaggaagaaggattggccttggcccgagaattcagctgtcccttttttgagacgtctgctgcataccgctactatattgatgatgttttccatgcccttgtacgggagatacgtaggaaagaaaaggaggcagtactggctatggaaaaaaaatctaagcccaaaaacagtgtatggaagaggctaaaatcnnnnnnnnnnnnnnnnnnnnattcagtaacttgaagagaagatgggaagtgtttatctgtgaactgcagtgctgtatcaaagcagtccagtaacctgcagtactgagcatggtgcttgctctttctcctaactgataagagggacatgcctactaggagtttttagtgatgtggtatttgaagtattgtctcttagttaagtatgatttattaaccccagtggagcactgtctgctt

SEQ ID NO: 14518 - DNA, 731 bp, Macaca Fascicularis
  misc_feature (1)...(731): n = A,T,C or G
tcaagcacgtgcatgcaacggtgttaaagttccagaagtgaattnnnctgccttgccacacaagctccggatcaaagctaaagccatgcagatcaaagtagaagcctttgataatgaatttgaggnnnnnnnnnnnnnnnnnnnnnnnnnnnnnnnnnnatctaaaagacattttgaactcgaaannnnnnnnnnnnnnnnnnnnntacattcttctcttactcctttctcagtgcaagtgactaacattcaagattggtctctcnnnnnnnnnnnnnnnnnnnnnnnnnnnnnnnnnnnnnnnnnnnnnnnnnnnnnnnnnnnnnnnnnnnnnnnnnnnnnnnnnnnnnnnnnnnnnnnnnnnnnnccagagaatttgtatttgaagcaggggatagcaaacttatctgcagaggttgtctctctgaagagacttatagccacacaaccaatctctgcttcagactccgggtaaattactactgagtaagagctgggcatttagatgtcatttgcaatagagcagtccgttttgtattatgctgaattttcactggacctgtgatgtcatttcactgtgatgtgcacatgttgtctgtttggtgtctttttgtgcacagatgatgatgaagattagattgtgttatcacgctgcnnnnnnnnnnnnnnntagtccatgcaaaggctgtatatattgaacattatttttgttgttctattataaagtgtgt

SEQ ID NO: 14519 - DNA, 1117 bp, Macaca Fascicularis
  misc_feature (1)...(1117): n = A,T,C or G
gcacagcatgcagctagtggcctggctggggtgcagaagagcannntattctttccagtnccnnntgcagctacacgtgcnnnnntcctgactaccaaatggagtgacggttgaagaatcaagctcataatataataaacccagacagacccagaaatcttttaatttccccagcgagatactttatcactctctcttctctttcccatggttaaaacaggagttgtgttctctgtcgctgctaaattattcttcactcgagtgaagcaaatacttagcttccaaataaaatacgttgtgttctgaactggcagtttaagaggagatactgtagtctagattgtctttgaggtagaacatgcgatggaccacatagtttaagattacaaggtactttccctcttctctcaggccatgcatttgaataaagtgcctccctttagcctgagctcctaaagacctcttgtannnnnnnnnnnnnnnnnnatctctagtctagtctagtctagtcatgtgtgactatgtactgagataccactagcccagtttgctgggtctctcttattttttggaagttgggggtttaataatatttaatgtctttttaggatcataaacataaatagatttgttgatnnnnnnnnnnnnnnnnnnnnnnnnnnnnnnnnnnagcattcagattgtaattggtatgtttttgccatctggtctactcaattgtatatgtttattctgcagaacaacccaagatttactttatgttgctttgttcagtaccttttgaattcctccagaagagttgttttcaaaacaaacattccaaaatgaatgtggctcttcaatggaacgtctctattgtgcttgaagtatttcttctctggttgtaattctaaattacagagtcatttgagcttcctcccctcccgctagtatctttacaggagcggggaagagcagtgactttatcctcaggtagaggatgtgtaattttgggtgaagttaaattacaatttatttgaggttattcctaaacctatttatttggtattttggaggagatcacactaagagaacgttgattgcctcggctattgtgctggctggacactttggtcac

SEQ ID NO: 14520 - DNA, 1068 bp, Macaca Fascicularis
  misc_feature (1)...(1068): n = A,T,C or G
atggcttccaaattgccatggaaaacatacannntgaaatgtatagtcttcttattgacacttacataaaagatcccaaagaaagggannnnnnnnnnnnnnnnnnnnnnnnnnnnnnnnnnnnnnnnnnnaaggcagattgggccttgcgctggattggggacaaagaggctacctatggtgaacgtgtcgtagcctttgccgcagtggaaggcatcttcttttccggttcttttgcatcgatattctggctcaagaaacgnnnnnnnnnnnnnnnnctcacattttccaatgnnnnnnncagcagagatgagggtttacactgtgattttgcttgcctgatgttcaaacannnggtacacaaaccatcagaggagagagtaagagaaataattatcaatgctgttcggatagaacaggagttcctcactgaggccttgcctgtgaagctaattgggatgaattgcactctaatgaagnnnnnnnnnnnnnnnnnnnnnnnnnnnnnnnnnnnggaactgggttttagcaaggtnnnnnnnnnnnnnnnnnnatttgactttatggagaatatttcactggaaggaaagactaacttctttgagaagagagtaggcgagtatcagaggatgggagtgatgtcaagtccaacagagaattcttttaccttggatgctgacttctaaatgaactnnnnnnnnnnnnnnnttttgctgatttttttttccannnnnnnnnnnnnnnnnnnnnnnnnnnnnnnnnnnnnnnnnnnnnnnnnnnnnnnnnnnnnnnnnnnnncagcatctttaaaactgtgtagctacctcacaaccagtcctgtttatttatagtgctggtagtatcaccttttgccagcaggcctggctggctgtgacttaccatagcagtgacaatggcagtcttggctttaaagtgaggggtgaccctttagtgagcttggcacagcaggattaaacagtcnnnnnnnnnnnnnnnnnnnttgaaagatgcagcctcactgcttcaacgcacgttttaatgtttacttaaatataaaactggcactta

SEQ ID NO: 14521 - DNA, 748 bp, Macaca Fascicularis
  misc_feature (1)...(748): n = A,T,C or G
tgnagggcctccaaagaaggctctggggctctgagccaggaggacagagacctcacgggtcaaggctgagctgaccctcacgagaagtaggagatatggaggggaggccactgccatgggaactttctagaagcaacccccaccccgcaaaagggctgcagcattgagtatagacattcagttcttccactgtccagctcaatagcagacaccgggaaatggtcaaagtgcaggagcaattcaggacgtgactatcagcttccaggtgggagctgagcctggctggcactggggggcgtgtccatcagcagctgggcttctgacctgagcacacagggctgcagaagagggacatgcaggaggctgggcggcagcagctggactgnnnnnnnnnnnnnnnnnnncagcaggaggggacgggcacgcagcaggcggtcctgcacatggggcggcagaggagggacacggaggaggagggtctgcagnnnnnnnnnnnnnnnnnnnnnnnnnnnnnnnnnnnnnnnnnnnnnnnnnnnnnnnaagccccagagcaaacaggcacgcagctcacaggcttgcagcagacaggcacgcagcagccctgctggctttgggaggaggtgcagcaagccggctggcagctagactgctgnnnnnnnnnnnnnnnnnnnnnnnnnnnnnngggcacacagcagnnaggcttgcagcacacnnnnntgcagcnnnnnggcacacagcnnnnctgctg

SEQ ID NO: 14522 - DNA, 412 bp, Macaca Fascicularis
acagaggctcagggtggagacataagcgggtataagaccaggtggcctgccccttttatgggccctggcacaggtgggtgacccccacccaacccagctcctgttgctgtcccagtcttgggctggggcctggaaagaggaagaggctgcctggggctgggccagcccgctgtgcactttgaccccagttccttgccagcacggctgctaacagactgccacttgagtgcgccttgcaggcactcccagagcagccatggaaggagctgggcctcacaccatccacctccacactgcctcctggccaggtgcccaccccagtgccaggtgggagagggagcagaacagccagccccttccaggtggcagtcggaagggtttttgtttttgtttctgttgccatttgtgtaaa

SEQ ID NO: 14523 - DNA, 1177 bp, Macaca Fascicularis
  misc_feature (1)...(1177): n = A,T,C or G
acaagcagtgacttttgttctcccactggtaatcatgttaatgaaatcttagaatcacccaagaaggcaaagtcgcgtttaataacgagtggctgtaaggtgaagaagcatgaaactcagtctctcgctttggatnnnnnnnnnnnnnnngaaggagnnnnnnnnnnnnnnnnttcagacatttctaatagggnnnnnnnnnnnaccgatgaggagaaactggcatccacgtcatgtggtcagaaatcagctggggccgaggtgaaaggtgagccagaggaagacctggagtactttgaatgttccaatgttcccgtgtctaccataaatcatgcgttttcatcctcagnnnnnnnnnnagagaaggagacgtgccagaagatggaagaagacgggtccactgtgcttgggctgctggagtcctctgcagagaaggctgttgtgtcagtgtcctgtggaggtgagagccccctggatgggatctgcctcagcgaatcagacannnnnnnnnnnnnnnnnnnnnnnnnnnnnnnnnnnnnnnnnnaagagattgaagcaaatgaatggaagaagaaatatgaagagacccggcaagaagttttggagatgagaaaagagagttatgagccatgaaatgactaaagatgaaatcaaagtagagaagaaaaaaaggcataaataattcacactctcagaaaagnnnnnnnnnnnnnnncatggagaaggaacaggccctggccgaccttaactctgtggaaaggtccctttctgatctcttcaggagatacgagaacctgaaaggtgttctggaagggttcaagaagaatgaagaagccttgaagaaatgtgctcaggattacttagccagagttaaacaagaggagcagcgataccaggccctgaaaatccacgcagaagaaaaactggacaaagccaatgaggagattgcgcaggttcgaacaaaggcaaaggctgagagtgcagctctccatgctggactccggaaagagcagatgaaggtggagtccctggaaagggccctacagcagaagaaccaagaaattgaagaactgacaaaaatctgtgatgagctgattgcaaagctgggaaaggctgactgagactccccctgttagctcaacagatctgcatttggctgcttctcttgtgaccacaa

SEQ ID NO: 14524 - DNA, 953 bp, Macaca Fascicularis
  misc_feature (1)...(953): n = A,T,C or G
tgcaaggtcctgcctgccatcagatccgaggtgcctcctgcagtgaccccttttcctggcatttctcttccatgagatgaggtctgcctagtgagatctgtacgacctcacgttgctttccagagcccgggcctgttttgccatctcagttttcttgggccctgcttcctgtgtaccactgaggggcagctgggccagtagctgcacccggtgcctgcagccttcataagcacacacgtccattccctcgtcaggcccagacctcctggaatctgccctgggctccctcatcccacctccatccagagttgcctaagctgcatgtccagcagaggcaggattgctgggtggtgagaaggttaggtctggctcagactgaataagaagagataaaatttgccttaaaacttgcctggcagtggctttgcnnnnnnnnnnnnnnncacctgttcccaacctcctgaccgaaatttccttgtgacacagagaagggcaaaggtctgagcccagagctgacagagggagtatttcagggttcacttcagaggctcccaaagcgacaagaacgttagggagagaggcccagggtggggactgggaatttaaggagagctgggaacagattccttaggttcaggaagcttctgtgcaagctgcgaggatgactcggcgaaagggttgctccgcccgccgtgctagctgtgagctgagcaaagccaggggctcacagcaccccagaagcctgtggcttcaatcctaggcctgcaccacgcattcaaaaggatagttttgtttggtttttgaagaaagatgagattggcttggttcttcatgagcacatttgatatagctctttttctgtttttccttgctcatttcattttggggaagaaatctgtactgtattgggattgtaaagaacatctctgcgctcagacagttacagaaataaa

SEQ ID NO: 14525 - DNA, 754 bp, Macaca Fascicularis
  misc_feature (1)...(754): n = A,T,C or G
ggctagaggagccaccagtgaaaaggaaaaccttccatnnnctggtgttaacgccttaatgtccctgtcttttactgtaagttacttcagatcatttttggaagtaggcgaggtacagtcctgtaaatgaatgctctgggctagatacagcttggagaacctgctggccttgttagacagcacttgggcctttgccagcagcaagaggtgaagccgagccattctaacctctcctttcccctcccacctgccccctgcataggctcccagacttggagagacccatctgctgttagcacttccatcctcttccttcccaaagagcagacctccagggcgtttactccttggtctgtctcgcttgatctgtcgcccctcccagcactgagagcctccgctggctgtcagcagcactgtgtccaggccctgaacaccgcagcccctcctttgctccttccagagctcagcatgtcatggcaaggacggccccattggtgatggagggccagctgaggggaagttaccggcgagtttccttttcaccatttctagcatatggacacctggcctctgcttgagcacttaggtgacaggaacttccccacctcctgaggccctggatgattctaattgttagaaatccttccttataatgaatgaattctgctttcctataatttctacctattgggccttgttctgttctctggaactaaacagaacaaccatttatcccccctttcaaactagaaga

SEQ ID NO: 14526 - DNA, 775 bp, Macaca Fascicularis
  misc_feature (1)...(775): n = A,T,C or G
gagtacacagtgtgcgcagtatagcacatgccccttgacgtagaggcatccggaccgtgtctttacgtatgaaactctatgacaagatgacccagagaagctntcagtcgattctcattttatgaaagacctgggcttagacagtttggaccaagtggagattatcatggccatggaggacgaattcgggtttgaaattcctgatacagatgctgaaaagttaatgtgtccacaagaaattgtagattacattgccgataagaaggatgtgtatgaataaagtatnnnnnnnnnnnnnnnnnnnnnnnnnnnnnnnnnnnnnnnnnnnnnnnnnnnnnnnnnnnnnnnnnnnnnnnnnnnnnnnnnnnnnnnnnnnnnnnnnnnnnnnnnnnnnnnnnnnnnnnnnnnnnnnnnnnnnnnnnnnnnnnnnnnnnnnnnnnnnnnnnnnnnnnnnnnnnnnnnnnnnnnnnnnnnnnnnnnnnnnnnnnnnnnnctgacctcaggtgatccgcccaccttggtctccccaagggctgggattatgagcatgagccactgcactcagccagatgctgcattgttagcacctgaaagatgtcacttaccattagtaagaacacatcaaaaataacattgaacttactttatcttttctagaccctttggctttggggagagaggactcagatgatagtggcgaatgtctggcagtgaggacacattttcgcattattgctgactctgacagagtgattccgatggacgtgtatttaaa

SEQ ID NO: 14527 - DNA, 781 bp, Macaca Fascicularis
  misc_feature (1)...(781): n = A,T,C or G
cagcaagatggacatnnnnnntccagtaatgggatcgagtatctgctcactttggtattggatgggactaataannnnnnnnnnnnnnnnnnnggatggaagaatatctgtaatccaagccaaggaaggaaatnnnnnnnnnnnnnnnnnnnnnnnnnnnncctttctgtttgcttattgttggttgnnnnnnnnnnnnnnnnnnnnttttcannnnnnnnnnnnnnaaataaatattgtgaactgttttgtaaatgaaatgtattatgttgaaagctgtcagttcaaacataagctttttttnnnnnnnnnnnnnnnnnnnngttnnnnnnnnncaaaaagccaaaaaaagtaatttcatatatagcatctatttgaatataatctttctttaaaatttcttttagcatagcnnnnnnnnnnnnnnnnnnnnnnnnnnnctatattttgttaaaataatggctttctaacaaagcaaatggtaaagtacaaagttggaagatgtcaagttaacnnnnnnnnnnnnnnnnnnnnnnagaacggaggaggctctgcccgctggctgtctctccctccaacctctctacaatcattgcctgctctgnnnnnnnnnnnnnnnnnnagctacaccnnnnnnnnnnnnnnnnnnnnnnnnnnnnnnnnnnnnnnnnnnnnnnnnnnnnnnnagttgatggaaaatggactaaaaactgacgtgtttaaatcagtgctagagggaacagattgtgaattttgttacagcatccaatatttggatttt

SEQ ID NO: 14528 - DNA, 721 bp, Macaca Fascicularis
tcaagaagcggtggaccactgtcccatcaaatctcgtaaaggggatgtcctgcacatgcactacacggggaagctggaagatgggacagagtttgacagcagcctgccccagaaccagccctttgtcttctcccttggcacaggccaggtcatcaagggctgggaccaggggctgctggggatgtgtgagggggagaagcgcaagctggtgatcccgtctgagctgggtaagaggcccctcctgagggtgcagagcaggttgcggtgtgtgactgggaagggtgaaagctgcttcagcctttccttggtcttcaccatatccattcattacaatacacgccttctccaagtttggctgtctagcagtgagtacagggcaagatccttgaagcactcagctctagtggcccaactctgcccttgccaggcctttggcacccccttcccatctccattacccttctccatttctggccttcttgctgagaggggcagaacaccttccctttgccgaagctggaagggagcttggccgtcactgactgtttctttgtgcatcttcaacagggtatggagagcggggagctcccccaaagattccaggtggtgcaaccctggtgttcgaggtggagctgctcaaaatcgagcgacgatccgagctgtaaccagactggggaggggtagggggagaggcccccatcagggaccagactgttccaaa

SEQ ID NO: 14529 - DNA, 717 bp, Macaca Fascicularis
  misc_feature (1)...(717): n = A,T,C or G
tcaaaacagtnnnntacaagaaannngatcaagctacagatatggatacagcaggccaggagcgatttcacaccatcacaacnnnnnnnnnnnnnnnnnnnnnnnnnnnnnnnnnnnnnnnnnnnnnnnnnnntggtaaaagttttgaaaacatcagcaaatggcttagaaacatagatgagcatgccaatgaagatgtggaaagaatgttactaggaaacaagtgtgatatggacgacaaaagagttgtacctaaaggaaaaggagaacagattgcaagggagcatggtattaggttttttgagactagtgcaaaagcaaatataaannnnnnnnnnnnnnnnnnnnnnnnnnnnnnnnnnntccttcgaaagacccctgtaaaagagcccaacagtgaaaatgtagatatcagcagtggaggaggcgtgacaggctggaagagcaaatgctgctgagcattctcctgttccatcagttgccatccaccaccccgttttctcttcttgctgcaaaataaaccacnnnnnnnnnnnnnnnnnnnnaacagatatttttgtttctcatcttaactatccaagccacctattttatttgttctttcatctgtgactgctnnnnnnnnnnnnnnnnattttcttcaaacaaaaaaatgtatagaaaaatcatgtctgtgacttcatttttannnnnnnnnnnnnnnntcagctgcatttc

SEQ ID NO: 14530 - DNA, 573 bp, Macaca Fascicularis
ccaggctgatcttgaacttctggcgtcatgtgatcgtcccacttcaggcccgcaaagtgttgagattacaggtgtgagccaccatgctcagccgtgacatgattatttacagtgatcccggcagagggacaaactcgaggattgccagcacaaggactcaggagcaaaaggtggaaagacgcgagaaagtcggagtcatgcgaaacagggagcttcgagccccccaagtgctgggattacagacgtgagccactgtgcctggcaacctgtattccactcttttgggtatacacctacaagtggaactgtggaggtcatatgctaagtctacatttaacttactgaggaagccaaggacttcttttgatggtttctcccaatgcacaagttttatctaaccagccactttagcataacactgcctttctcacttccatcaactttttgtttcctaatccaagtgatccctatcatcgagttttttcatcacaagcaatcactgtaaataatcatgtcacggctgagcatggtggctcacacctgtaatctcaacactttgcgggcctgaagtgg

SEQ ID NO: 14531 - DNA, 740 bp, Macaca Fascicularis
  misc_feature (1)...(740): n = A,T,C or G
tgataacactggaagtgaaattttaatcaaacataaatgaatttgtagaagaagtcactgaccatgggaatattgttcttgctgctgtgcattcataggagcttaatgaaggcaaacttatcaacacaaataagaaaagtggttgcaataaagacaaatatgtcccagaggaagtgatggttaaaaaaaaaaaaactttacattaaaggatatttaatgtgaatatagaagtatttcacaacattgaaagcacaagcaataaaagggtggaagcggacccaaacttaaaagaagtatgagtttgccttgaacataaaagatgcttactcagtatcataagttacttgccagaaaaaaaggcaagccctattcaaactgctttgtttttacaatgaaataaaacactttagctctatttctaatgttttaaattacagtgtactaaatatttttaaacatttttgcatttttttcctacatttataactgatcttaagaatttttaatattttagcagaatcttaaaggtcatggaacagtcatcgttttccccattgattattaagatttcatggccattttatggtcccacagtaccacgcaaaatgaggatcgcttgtagctgggaacaatgcttgcttcagggaaaactgattttgatagaaccgactagttgagtattaaactgttttggaaataatttatatatctcangtgctgaaatatatnttctcttctcc

SEQ ID NO: 14532 - DNA, 751 bp, Macaca Fascicularis
  misc_feature (1)...(751): n = A,T,C or G
aacaccatagagaagactgaacaccagaaaaatttacttgcatgactatcatgttatctttttagacaataattgcttgtttttcttcccaagtatttatgcgctgccagttgagccgattacagaaagggcatgccacagatgaatggtttctgctcagctcccatataccattaaaaggtattgaaccagggtccctgcgtgttcgagcacgatactctttgtaggccctgtagtaactagcttgtcagtgttgaaataaaatctctcacactttaacttttttaatggggctgggtgggaaaattttcagtgataagtgtggaccttgctctgatgccaaagtttggcgatgtgattacattaagtgcaagctnnnnnnnnnnnnnnngctccaacttctgtttcagaacagcaacttcttcagatctgggtggctcatacttttttactaagtttctcatgcttttcattatatctagtaactgtgacaggcaagttctgttctctctcagcatcagactctctgataaataactttccatagtaattccagccctggaggcactagataaaatggcagtcagggcaatttgggaaggtgtgtataaaaggtaggcatccgtcaatgcaattctattaagaaagtcatcagctgttttcctcaaaatctctggattctccaatatggggtagcgggtctttagtcgatgnnnaagccctnnnntggtctgtnnnnnttgtggacaat

SEQ ID NO: 14533 - DNA, 742 bp, Macaca Fascicularis
gtatatgatgtgtgccagttatgagttgacaatttgggaattaaacaggtcacacgtgacagatgaagaaaccaagggggattctgaggagacctggtgcagggactaatcctggatcattcctgtattaaactttcatatgccaaaagggtttgtgccattttatctgccgtcagtgtttgacctgtttggggcagaggcaataagtcagaagtcttgaagctgaaatagttatatatgtgtcattggactggattataagcagctgtcttggactttccctctcttaacactgactggtcatcagtatcattaatgaaaaagaaacaaactgttatcatctctttagacaagtaagctgaatggtgggctttaaatagtaaaaacatacacatagttgacttgtgtatgagctactcttggattcttgttattatagacttgtatttagttcatattttgtcaaaagcaaaacaagaagatacatcacttttcattgaaaagaaaagtgtagagcatgaccgaattgctcatcattctgggagtttctatgtagtggctatgcagtgtggaaagtgagaaaaacctccattgtggtgaggagaatacttcaatgtcccttgtccttgttctcattaattcagctaaaggtggatttgaccaaaataacactggttaaatttgtagaaatgttgaaattggctatgtttttaattttgcttgaatttttataaaatgttta

SEQ ID NO: 14534 - DNA, 706 bp, Macaca Fascicularis
  misc_feature (1)...(706): n = A,T,C or G
gcaccgtgctggaaagggctgagttgccgcgcttgtggcccttccggtgctnncggcagcactggttgtcatcaaacctttgaatttctgcctttctggtaattggaaaatgacttgtcttgtttaactttgcattttctggatgacttatgggggtcagtgtcttcatatgtttgtcagaccttctttttgctccgtgactgacttgttcatgtgttttgcccattttgaggaggttgtcgggacatttcactctccagtaaatgtggcccttggcgttactgagtcctaagaggggggacaggccccacctcggacacaggctggggctgcatgctgcggtgtggacagatgatctttgcccaagccctggtgtgccggcatctaggccgaggtgagtcacannnnnnnnnnnnnnnnnnggcccggtgttctcaggaagcagaggggactgtggggtcagggctttttagagcaggtcacaggtaaaacacaaagtagaaattgaggttttcttgaataatgagctacttgtttttattgatttaaaaaactgactttaaagaatgctgataaatcagcctgggcaacatggcaagnnnnnnnnnnnnnnnnnnnnnnnnnnnnnnnnnnnnnnnnnnnnnnnnnnnnnnnnnnnncagctactcaggagactgatacggaaaattgctggaacccgggagat

SEQ ID NO: 14535 - DNA, 749 bp, Macaca Fascicularis
  misc_feature (1)...(749): n = A,T,C or G
atcagaaaatatttactatgaacaggaaaatcggacttatatagccctttttgatatgtttattaataatgattcttaatggggctcataataagtttaatatgcacagcatcttagaaaannnnnnnnnnnnnnncctnnnannnnnnnnnnnnnnnntgatttatatctataaaaagaatgtcaggtaattatatttggaaaacatttaatgcactaactttaaagaaattgaaaattcaggtggataaatagtcttacaaaagacaatgtgctttatgttatacctatagctttggtcccatctttaattgagaaacatttatctgtataaaacatatttttggataaatatatatatatatatttgtnnnnnnnnnnnnnnnnnctaaaaagcatttgaggaaaatatttggttcccttttctataattatcctttaagatccgtatagctacatttggtttattcattgtatttgcagtatatatattgttcctttcagtgttcacatcttgttccccatttctcacttgtgtcaccggctgtttgtgccatttttagtgtaaaagttgcagacctattagatctgcagtttaagttgccatgctgctaggaagttgtcctttttctttccagctgtttacctacttcctggaaaaagtagtagctctctgtagcattatggagtttcagtggaaccaaatctttgccattaaaaactggcattatactgaactatacatgaga

SEQ ID NO: 14536 - DNA, 673 bp, Macaca Fascicularis
  misc_feature (1)...(673): n = A,T,C or G
gaagaaagccccccacttttnnagatgcgtcagtcattgcnnnnnnnnnnnnnnnnnnnnnnnnnnnntttgatgaaggctcnnnnnnnnnnnnnnnnntcaggtctgtcatctcctataagacagaagaaannnnnnnnnnttcccttaataccattgcaagtgctgagtctcactgnnnnnnnnnnnnnnnnnnnnnntggcatgatcttggctcactgcaacctccgcctctcgggttcaagcaattgtcctgcctcagcctcccaagtagctgggattacagagagcatgagtatctacgatgatattgatgctgatgtgctacaaaattaccaagaatacaatctggccaacatcatctactactnnnnnnnnnnnnnnnnnnnnnnnnngcagagtgccagnnnnnnnnnnnnnnnnnnnnnnnnnnnnnnnnnnnnnnngatgattgacaaattgacattgacattcaaccgtacccgccaagctgtcatcacaaaagaattgattgaaattatctctggtgctgcggctctggattaatgaaaatcaagctccatcctcagacaagaggtaaagaannnnnnnnnnnnnnnttgattttgtttttagcatactgctgtctttgtnnnnnnnnnnnnnnnctccattatttgaattactgaagaca

SEQ ID NO: 14537 - DNA, 757 bp, Macaca Fascicularis
  misc_feature (1)...(757): n = A,T,C or G
tcatgcttttgaagaatgaaactgcnnntnnnaaaggtgacatnnnattatgtgtatgtgaacatgaatgtctcttttcagtttctgcattaaagtattcagatgtctagcgtgtgcaagatattttatgtagcatactaattttgaatgtttttaaattattgaggttatgtccttaagtaaatatagatgatgactaaaatgttttattctggaaaaaaacaaagttaggcattttagtgaaaagaagtttataattttcctttttgacatcttctgaagaatgcattgcgtaaaatactgtgttcttattttcagaaggatttgagtcaatggaataagttcaccattcccttgaacttactttactttttcctctcgtgtttcaggaaactcttatcactactgttgattctagttccagttggtggaccaactgggtgatccctgccatctctgcagtggccgtcgccctcatgtatcgccnnnnnnnnnnnnnnnnnnnnnnacctcctcagaagccagcacagggaaacctgctttggtcacaggagaaaagaagccattgctaactacttcaacnnnnnnnnnnnnnnnnnnnnnnnnnnnnnnnnnnnnnnnnnnnnnnnnnnnnnnnntgacattagaaacaaaacaaaaagaaccgtcctttctgcgctcacatttttcgagtgtgcctttttattcatctactttattttgatgtttccttaatatgtaatttacttattgtaag

SEQ ID NO: 14538 - DNA, 738 bp, Macaca Fascicularis
  misc_feature (1)...(738): n = A,T,C or G
tgccagtgggacctaaagtnnggaatggtcctggaaagtatcagctctttgccttcattagtcacatgggcacctcgaccatgtgtggtcactacgtctgccacatcaagaaggaaggcagatgggtgatctacaatgaccagaaagtgtgtgcctctgagaagccgcccaaggacctgggctacatctacttctaccagagagtggccagctaagagcctgcctcaccccttaccaatggtggcaggggaagaccacctggcatgagggagaggggctgagggatggactttagcccctctgctctgtaccctttttcctnnnnnnnnnnnnnnnnnnnnnnaagctggaggctgtgggagaatggccgggcagagcagaggggcagcgatagactctggggatggagcaggatggggacgggaggggccggccacctgtctgtaaggagactttgttgcttcccctgccccggaatccacagtgctctgcttctnnnnnnnnnnnnnnnnccccctggtgtggagggaggggtctggtttgtgcgcgcgtgggtgtagctttgtgtgtcctctccccaggcgagtgagcacctgtgcctcccctccccctttgtttgcccctgtgtggttggtcaaggagggatgtgagggaaatagggacccccccccttgccctcctgcctcagtctttcccccaccctgtctcttccttgtccttctctggaaaatgccaaaa

SEQ ID NO: 14539 - DNA, 718 bp, Macaca Fascicularis
  misc_feature (1)...(718): n = A,T,C or G
gcagccannnnnnnnnnnnnnnaggtgccccagcctcgcgagggccggccgcaagcccaggcccagctagaaggcggggcgccgggcctgggcggacactcggcatccgacacgggcnnnnnnnnnnnnnnnnnnnnnnnnnnnnnnntggcccatgccggcaagtacgagtgcgaggcctccaatgctggtggcgctgcccgcgtgcccttccggctcctggtcaacgcgtcccggcagccgctgcagcagcccgcgcaaccgccacctccggccgcccgccacgctggtcgcgagccccggcccgaggcgggaagcatggccttccgcgccctgggcctggccacgcagacggccattgcggcggccatcgcgctgctggcgctcacggcgctgctcctggtcgccatgatctgtcgccggcgccgcaggcgaaaaaaggcgcgggggccaccgggggagggcgcgctgttcgtcaacgactactcggacggcccctgnnnnnnnnnnnnnnnagaggnnnnnnnnnnnnnnnnnnnnnnnnnnnnnttcgtcatcaaccgctccaagccgctcttcgccgagggtccggcggaggcgccggcggactgcggaccagcagagggggcggggccgggactccgcgtgcccccgccagtcgcctacgagatccattgctagggcggcgggcgcgggcagatgacgtgggcgccggggg

SEQ ID NO: 14540 - DNA, 625 bp, Macaca Fascicularis
  misc_feature (1)...(625): n = A,T,C or G
gnnnnnnnnnnnnnnagggagggagatgagatggaaaggtgtttggaagagataagnnnnnngagaaagaaatttaggnnnctgcattctaaccacaggcattctcgggaccgtnnntatcccatttaattaatttccctgacaattcaattattttctgttattaatgttgcccctttctgtttgtatgcattttcttgataaaaatatttgctatcattttactnnnnnnnnnnnnnnnnnnnnngatttacatatgactcttgtcaacatctcatcttttgacccaatcttattcatttaataagaggtctcattcatttgcatggaaaaatgctcattgtatattgcaaagtgaaaatnnnnnnnnnnaaaacagtgtatacatatatgtgtgtatatatgtacactttatttgtacatttctatgtgacataatgcaaaggaaagtgtctgattttattatacaccaaaggttaacagtgaatctgtgtgcgatctcttttttcttttttttctttttgcctgtgtgcatatnctcagttgccaaaaaatgaatatatgtttatgtgtgtatattacttgtgtcacaaaaaaccnnaaagtagacacagtaaaagaactt

SEQ ID NO: 14541 - DNA, 922 bp, Macaca Fascicularis
  misc_feature (1)...(922): n = A,T,C or G
cagagtagaggagcatcgatgcagntnnttgaatcctggggnnagccagtcatctgatgtggtgcttttgaaccactggaaagtgaggaattttgaagtacaccgtggtgacattgtatcattggtgtcacctaaaaacccagaacagaagatcattaagagagtgattgctcttgaaggcgatattgtcagaaccataggacacaaaaaccggtatgtcaaagtcccccgtggtcacatctgggttgaaggtgatcatcatggacacagttttgacagtaattcttttgggccggtttccctaggacttctgcatgcccatgccacacatatcctgtggcccccagagcgctggcagaaattagaatctgttcttcctccagagcgcttaccagtacagagagaagaggaatgactgcatgaatctacctgagttgctggcattgggatgccagttactggagaggaatggaaaaacaaaacctccaaaagggaaaaacttccaacaatatgatgctgtgtgagaaaaatttacagcacattaagacgatctgtattattaaataaataattttcaaacgttaaatagtattaaatggcacctgattttgtgttaaattttagttccctgttgtttaatgcccccaaaatatgtagatctttgagaatgtaaaaatactgcatccacatgtcttaatggggctaaatttcagattatttgttacatatacttattctattgattgttggattttgattttggtgcttgctgctgaaataaattgaaaattaatattcaataaaaannnnnnnnnnnnnnnttactgttaaggtagaacaagaaggaacacatattatacatataatgatgggaattatattgtgatttgtagtatctacaaagtagtaactgccagttagg

SEQ ID NO: 14542 - DNA, 754 bp, Macaca Fascicularis
  misc_feature (1)...(754): n = A,T,C or G
agagaggagagacngagtgtttcctaccccacatgtggtcgtgctctccaaactannnnntgagctgacgtccaggccnnngcaggaggggccatgggggctgtgaatgggatgcagccccatggtgtccctgataaatccagtgtgcagtctgatgaagtctgggtgggtgtggtctacggattggcagctaccatnnnnnnnnnnnnnnnnnnttgggagggcttccagacagctgaaggctgctaccgtaccgtgtggnnnnnnnnnnnnnnnnnnnnnnnnnnnnnnnnnnnnnnnnnnnnnnnnnnnnnnnnccgctcactggcctacatgcggccactgagcatctgggccatgcagctagccctgcaacagcagcagcacaaaaaggcctccaggccaaaagtcgaacagggcacaggactaaggannnnnnnnnnnnnnnnnnnnnnnnnnnnnnnnnnnnnnnnnnnnccagnnnnnnnnnnnnnnnnnntgggaggaaagcactaatagcccagcctccagcctggcctttcctccttcccctctgaaccttnnnnnnnnnnnnnnnnnnnnnnnnnnnntaccccttcccttctccccacccagttgtgccagtaaatgggggttgagggtgacctaggcagcattagaatcacttatttatttctttcctcacccgttccctcactgcatgaaatgttcagggaggtcagttgatttccccaggtacattcatggggtgaga

SEQ ID NO: 14543 - DNA, 718 bp, Macaca Fascicularis
tgcagccatgatggccgaggagctgaagaaggagcaggacacaagcgcacacctggagcggatgaggaagacactggagcagacggtgcgcgagctccaggcccgcctgtaggaggcagaacaggccgccctccgtggcgggaagaagcaggtgcagaagctggaggccaaggtacgggagctggaggccgagctcgacgcagagcagaagaagcacgctgaggcccttaagggcgtgcgtaagcatgagcgccgcgtcaaggagctcgcataccaggccgaggaggacaggaagaacctggctcgcatgcaggacctggtggacaagctgcagagcaaggtcaagagctacaagcgccagtttgaggaggcggagcagcaggccaacaccaacctggccaagtatcgcaaggcccagcacgagctggatgacgcggaggagcgggcagacatggcggaaacccaggccaacaagctgcgggcacggacccgggatgccctgggtcccaagcacaaggagtgaaggcccgagccgctgggctctcaagaggaatgtctgctgttgtgcctctggctgagaccacctgccccaatcctgccatctctgcatcccatctctgcatcccccatgctgccttcagccttccccaggccctgaataaacaccacagccagtttccttctcattctttggggttcaggaggggaaaacacagcc

SEQ ID NO: 14544 - DNA, 831 bp, Macaca Fascicularis
  misc_feature (1)...(831): n = A,T,C or G
catgatgttaattaacacatttagataggccagtnnnnacagcttcataagtttaaattaattgtaaatggaatattcctcatttaaaatgnnngcactgcannnnnnactgtaaaccaaaagaggttactaagcaaaaccgcctacatttaagttagtgatttaaatgaatctcacattaaaagaaagcttgnnnnnnnnnnnnnnnncaccagactcagccagtgtgtccccgtgggtatccccagccatccttgctcaatccatgagttatatactaactacataatgccctgtgcaannnnnnnnnnnnnnnnnnaactgtgaatttacacagaggccattttaaatgggtcaccccatttaggattagtggatctcagattattaaccaaacatcactccatttcaaagtaaaatattccaccagcgatttgatttattggctgttcnnnnnnnnnnnnnnnnnnnntgcccaggaagcaggcacattgccaaggactgggcgcatcttgactnnnnnnnnnnnnnnnnnnntgagcgtgggttagatcgccaaagtaggactttgtcatttacctacctattatcaatatggtgcttgaatatattcgtataactgtagaacagtgtggaatagtgatggtaactttgaagttgttcatgttttattggccttgttttaattgacaccagtagagtcttaatggtctttgtgtaaattttaatggcttttccattgtttttgcttctttaaaaagtttaggaagaatatgacctcattaaatgtgttttatttggaaaaaaaaaaaaaaaaaaaaaaaaaaaagg

SEQ ID NO: 14545 - DNA, 721 bp, Macaca Fascicularis
  misc_feature (1)...(721): n = A,T,C or G
tacctggttctttgctacgctggcggccgtcgccgagtctctgatccctgtcccgggtgctccgcgnnnnntgcacgcagctcgccacgcgggtttcacnnnngtccttctngnnnnncctgatccccctcgccgcctcctgctcttcgacctgatcccannnnnnnnnnnnnnnngctggcccgagggggctcggagccactcatgggctggtcctctggcctctgagtcagcttccttctacctggtgcccggtggcggcaccgagcgaccgtgcgcctccgcctggcagctctgtttcgcccgccaggagctggcgctcaaagcgcgcataccagcgccgctgctacaggcgcacgcggcggcccaggcgctactgcgcccgctggtggccgggacccgggcagcggcgccctacctcctgcgnnnnnnnnnnnnnnnnnnnnnnnnnnngctgcccgcgctctacctggcgcggccagaaaatgcgggcgcctgctgcctcgggctgctagacgagctgggccgagtgctcgaggctgggactttgcctcactattttctgaacggccgagagctccgtaccggggacggctccgctgcgctgctcggagaattggtccggctccgcggggaccctgcccgggccctccgtgccgcggtggaggaggccaaggtggcccgcaaagggggcggtttggccggcgtggggggcgggccc

SEQ ID NO: 14546 - DNA, 709 bp, Macaca Fascicularis
  misc_feature (1)...(709): n = A,T,C or G
accgacttcaagannacgcgaagccgggagcaggtgcttcgcgtctttgaagagtttgtgcaaggannnnnnnnnnnnnnnnnnnnnnnnnnnnnnnnnnnnnnncagatccgggacaccctggaggtctctgagttcttcaggaggcacgaggtgatcggcagctcgctcctctttgtgcacgatcactgccatcgcgccggcgtgtggctcatcgacttcggcaagaccacgcccctccccgatggccagatcctggaccaccggcggccctgggaggagggcaatcgcgaggacggctatttgctggggctggacaatctcattggcatcctggccagcctggctgagagatgaggctggactcctgtccccgtgggccgccgccctgacatgtggacctgcagctttgtccccaccgtgcatgccggcttgagactggagccccgcggtgcagggcagttcaccgggtccggcagggccaggtgccaaccactaagggggggcactgccgatgccaggggtttcgcccaccccgggccccagcgttcccagagccaaatgacactaacttataggaggggagggggcaaagggcttcttcctcaggccagcttttctgannnnnnnnnnnnnnnnnnnnnngggccagaccgcggattttatttagcaagcctagaccttctggtctaacctcttacactaggat

SEQ ID NO: 14547 - DNA, 756 bp, Macaca Fascicularis
  misc_feature (1)...(756): n = A,T,C or G
cagatggcaaaaagacagaaagcgcatgaagaggccaacgctgcccgaaaactcacagcagaacagagaaaggtcaagaaaattaaaaannnnnnnnnnnnnnnnncnnnnnnnnnnnnnnnnnnnnnnnnnngagttcgaaatttgagcaacccagccaagaannnnnnnnnnnnnnnnnnnnnnnnnnnnnnnnnnntgacaggggtggtggtactgcacaaggatgtcaacgtggtagtagtggaagggggccccaaggcccagaagaaatttaagcnnnnnnnnnnnnnnnggataaagtgggatgaacagacatctaacatgaagggagatgatgatgaggaatctgatgaggaagctgtgaagaaaaccaacaaatgtgtactagtctgggagggtacagccaaagaccggagctttggagagatgaagtttaaacagtgtcctacagagaacatggctcgtgagcatttcaaaaagcatggggctgaacactactgggaccttgcgctgagtgaatctgtgttagagtccactgattgagactactgcaagcccttgcctctcccccccttgcctttgtctcttcagtcctctcacttattctatttcccaacccactcccacttgttgtgtgatctcagaactgtgccaagcagacactgggacaaagggagaatatcttgctcccctcccgagtcagcctggtgttgccctttattccccctatgtgcatatgattaaagagttatt

SEQ ID NO: 14548 - DNA, 772 bp, Macaca Fascicularis
  misc_feature (1)...(772): n = A,T,C or G
ctgtatttgactcggtccccacctcccgggagtgcgtgggctttgaggctgtgcaggaagttcccgtggggctggtncagcnnnnnnnnncagccctgtacgactactacaacccggagcgcagatgttctgtgttttacggggcaccaagtaagagcagactcctggccaccttgtgttctgctgaannnnnnnnnnnnnnnnaggggaagtgccctcgccagcgtcgcgccctggagcggggtctgcaggacgaggatggctacaggatgaagtttgcctgctactacccccgtnnnnnnnnnnnnnnnnaggtgaaggttctccgagaagacagcagagcggctttccgcctctttgagaccaagatcacccaagtcctgcacttcaccaaggatgtcaaggccactgttaatcagacacgcaacttcatggttcgagcgtcttgccgccttcgcttggaacctgggagagaatatttgatcatgggnnnggatggggccacctatgacctcgagggacacnnnnnnnnnnnnnnnnnctcgaatannnnnnnnnnnnnnnnnnnnnctgaacgcctgtgccggagcacccgccagcgggcagcctgcgcacagctccacgacttcctccaggagtatggcactcaggggtgccaggtgtgagggctgccctcccgcctcccccgggaggaacctgagcctgggaaccatgaagctggaagcactgctgtctccgctttcctgaacacagcctggaccagggcatataa

SEQ ID NO: 14549 - DNA, 757 bp, Macaca Fascicularis
  misc_feature (1)...(757): n = A,T,C or G
ccttgattcccaggagannnnnnnngacattcacatgtcagccacttgnnnnnnnnnnnnnncagtgtggggnnnnnnnnnnnnnnnnnnnnnnnnnnnnnnnnnnnnnnnnnnnnagacttgacttccttaaaccaagannnnnnnnnnnnnnnnnnnnnnnnnnnnatcaactgtgttagnnnnnnnnnnnnnnnntttctgttgataacatcgagatggtgtcactcaaaagagccaagattcctgttttcagtttgtggatccatcctgctggttttactgtattccctccatgtcgaagcgggcctgtgnnnnnnnnnnnnnnnnnnnnnnnnnnnnnnnnnnnnnnnnngaaaatctttcttgttcaaaacagcaacaacctatgttgttaacttttacagtgacttttagaggaggggagtttggaaattgtaaaatgttatagattgttgcctatttcctgctgaaagtaaatgtttttaaaaagtatcatataaagctgaatacaagttagtttggggggagatcctttcctacccaaagtcgtaaatatattctttactgccttgtagaaattttatacttttgcctttcacatttgtctttagtctgtcctgaactgatttttgtgaaaattatgagttagaaattcaatttaacatttttcatatttcaaagtggttgtctctgcactatttactgaaaagttcatcctttccnnnngtnnnnnnnnnnactgcctctttcataa

SEQ ID NO: 14550 - DNA, 711 bp, Macaca Fascicularis
  misc_feature (1)...(711): n = A,T,C or G
aagcattgccaagaaatgccagggatgatgggtttaccactttcccagggagagctnnnnnnnnnnnnnnnnnnnnnnnnnnnnnnnnnnnnnnnnnnnnnnnnngaagaagattgtgtaggtgaaggctgnnnnnnnnnnnnnnnntaaatatgcagcagcatcagggtctggtggagccctctcttttggccacactgaaggccctgccttatttcaggttttggccagcgaggttggggaagacgtcaatgtccagcagctcctatcctcaccagggacctggaggggtcgggctcaacaaattcttgttttgcagagcaaggtgggtgagtcaccagacttctcctggcctgaacaaaggatttaaaatgccccagaaagacctgccctgacccccatagagacttaagcacacagtacccaaaaaaggcctttaggtctcacagtgcactcgtgcagggctgttgtttnnnnnnnnnnnnnnnnnnnnnnnnnnnnnnnnnnnnnnnnnnnnnnnnnnnnnnnnnnnnnnnnnnnnnnnnnnnnnnnnnnnnnnnnnnacaaatgccaacgcctttggtttgatttatttaactccaggcatcttttttcccctagtttatgtaaatttgcgtgactgttgtaattgtaagctttttccnnnnnnnnnnnnnnnnnnnngtagtcttttgaaagttttaataccca

SEQ ID NO: 14551 - DNA, 724 bp, Macaca Fascicularis
  misc_feature (1)...(724): n = A,T,C or G
gcagccaggaaccattatgaggtgctggtgctgggtgggggcagtggtgggatcaccatggccgcccgcatgaagaggaaagtgggtgcagagaatgtggctgttgttgagcccagtgagagacatttctaccagccaatctggacactggtgggtgctggtgccannnnnnnnnnnnnnnnnngtcgtcccatggcgagtgtgattccatctggtgtggaatggatnnnnnnnnnnnnnnnnnnnnnnnnnccagacaagnnnnnnnnnnnnnnnnnnnnnnnnnnnnnnatctcctaccgatatcttattannnnnnnnnnnnnnnnnnnnnnctatgagaagattaaaggcctacctgaaggttttgctcatcccaaaatagggtcgaattattcagttaagactgtagagaagacatggaaagctctgcaggacttcaaggagnnnnnnnnnnnnnnnaccttcccaaatactnnnnnnnnnnnnnnnnnnnnnnnnnnnnnnnnnnnnnatttatcagaagcctacttcaggaaggtgtgcttcctttccggggacagagatgagcagggaagacggtgctcattcactcattgcaggaattccattttatctctatcgtaatcccttttttatctctacatttttgttacatatgtacaaaattagataactggaagtttataaaatagaaaagaggagaaaatcactcatgacccaa

SEQ ID NO: 14552 - DNA, 667 bp, Macaca Fascicularis
  misc_feature (1)...(667): n = A,T,C or G
tgtggcccgggagaaaccgaggtccttccctcctcctggaatagcttnnnnnnnnnnngcttcactccaggggcgtcagttttacggactgaagaggcagggccaggttttggccttgcctttgcttccaggatggaccaatcctgggcccagtcagctactggccccaacctatcccctagatgggctgggaagggccattctaagctcacctggcatnnnnnnnnnnnnnnnnnnctgtgtcctctgcccctcactgctatgcagatcctcttgccttcggctgcctcnnnnnnnnnnnnnnnnnnnnnnnnnnnnctcaagtgtgcaggcccggccgtgtgtgcctcggcctcactgtatctgtggctccctctccgcccggattctgagctcagtgtggnnnnnnnnnnnnnnacattggtcaggggcaatggccaaggccctgccacgcacacccgtccctcatatccgctgtgagcaccagtctgctgcagtctcccgggcccaagctaacagttatgccaagnnnnnnnnnnnnnnnntcccacatagccgtgcattgttcctctgcctccgggcccccagcttgggagctgtgggcctgccaggtctcacctcctaagtcccccacgccacagcccgggctcctggttacagcagggct

SEQ ID NO: 14553 - DNA, 698 bp, Macaca Fascicularis
  misc_feature (1)...(698): n = A,T,C or G
gacgagatgaactaggccttataaaaagtnnnnnnnnnnnnnnnnnnnnnnnnnnnnnnnnnnnngcactcagtctcttaattacagatcctcacgaagggtggtaagtggagctggaagctcttgtggccgtaggacatgctggtgagccctgagctggccttgtgcagagggctccgttcaaaggcnnnnnnnnnnnnnnnnnnnnnnnnnnnnnnnngggagctcttccaagtctgagaatgtttcgaaccctttttgcaaggttccactactagtataccatcatgtccagaaagcttttaatcttctcaaatatctgatgtaactaccagaaagtcccttacttcctatgaccgatcaggaccaagtcttggaggtgatgtgttacnnnnnnnnnnnnnnnnnagtaccaatcagttaacccaacgctgaagggcttgttttatgaaaggtactattccnnnnnnnnnnnnnnnnnnnnnnnnnnnnnnnnnnnnnnnnnnnnnnnnnnnnnnnnnnnncgactgtattggactgtctcttcttgtagagactgattttggccaacatattaatgcatgttttatgcaaaacacaaatacgatattagttgcttttaaggagttctggcattgtatgtgcatttttgtagaagttgttactggacttataattacatacttaactctaatcag

SEQ ID NO: 14554 - DNA, 302 bp, Macaca Fascicularis
ctgcccagcctttccctcccaccccctcctccttctgcaaatgccctgaaggccagcccttcccccaacacccacttccccaccccgttaggccccagatacttacatgcccacatgcacgcttacatgtttagagccatccttgttcccaaatatgacccttcgcttgagagcaactgcataggtacattaactctggactggcaagcacattgtcatgtacagctttgcatatacacacatgcatacatgtccttcacacaagcactagcacaagaggatacaaaccaagataacatcaa

SEQ ID NO: 14555 - DNA, 1115 bp, Macaca Fascicularis
  misc_feature (1)...(1115): n = A,T,C or G
taagaaaaagcgaaggannttcgcagagctgaagataaagcgcctgagaaagaagtttgcccaaaagatgnnnnnnnaggcaaggaggaagcttatctatgaaaaagcgaagcactatcacaaggaatataggcagatgnnnnnnnnnnnnnnnnnnnnnnnnnnnntggcaagaaaagctggcaacttctatgtnnnnnnnnnnnnnnnnnnnncgtttgtcatcaggatcagaggtatcaatggcgtgagcccaaaggtccgaaaggtattgcagcttttgcgccttcgtcaaatcttcaatggaacctttgtgaagctcaacaaggcttcgattaacatgctgaggattgtagagccatatattgcatgggggtaccccaatctgaagtcagtaaatgagctaatctacaagcgtggttatggcaaaatcaataagaagcgaattgctttgacagataacgctttgattgctcgatctcttggtaaatatggcatcatctgcatggaggatctgattcatgagatctatactgttggaaaacgcttcaaagaggcaaataacttcctgtggcctttcaagttatcttctccacgaggtggaatgaagaaaaagaccacccattttgtagaaggtggagatgctggcaacagggaggaccagatcaacaggcttattagaagaatgaactaaggtgtctaccatgattatttttcgagtctcgtcagtttaataaacagtgcctgctctcaaaatgaaatacattgttgtatttgtgatttttttggtggttagcctgcctctgtgttcccttaactattgtggtaagtctggtgtgtgataaaactaagccaaatcatctgcccgttttgtgcaaaatcagggtcgagtctgtgaaaaacatctcttaggtttttaaaaggcttttctctacaaaagattttgtttttaactgtgctgagtgattcaaaatgggtttattctaagcctgtttcacaagcatttgtacataatttgtaggtacagnnnnnnnnnnnnnnnnnnnnnnnnnnnnngaattcagtttctaaaatttatttcttgggccttcgcttgtttataaactaccatataa

SEQ ID NO: 14556 - DNA, 733 bp, Macaca Fascicularis
  misc_feature (1)...(733): n = A,T,C or G
ggcccagaagcaaagcaagttctggggctcatttttgagtcaacnnnnnnnnnnnnnnnnnnnnnnnnnnannttctaaaaaggatttcctatgcagagattgtcattgtcatcctcaccttcctatgcagagattgtctttgtcatcctcaccaccagaggaccaggcattgattattttgtcctcctttttgcagactgtttcaatcttggagcagcgactgactttgacagaggataagctgaaagactgccttgaaaatcagcaaaagcttttcagtgctgtccaacagaaaagctgaataaaaaattcattttcatttgttgggcagaggcacaataaatgaataagtgtacatacactcgggagggtagtacaagatactccacgcaacatgaccatgtgctatttatcgtggcatttcttaaaagggtgagcaacagaacaaagggcagaaaaggcatatctagggactagtgtaaacacacaaatcagtgtgaaggactaatttaaattactatcatttatgattgcagtaataaagtgataagcattcaagcgactctgtattttccccatattattttaaatgtccattttcatttctaggccaaatcctgccaggaaagtaaccnnnnnnnnnnnnnnnnnnnnnnnnnnnnnnnnnnnnnnnnnnnnnnnnnnnnnnnnnnnntnnnntattcacttacctccaantagcatctatatgca

SEQ ID NO: 14557 - DNA, 708 bp, Macaca Fascicularis
  misc_feature (1)...(708): n = A,T,C or G
tacagannnnnnnnnnnnnnngtgccttcctgcatctnnnannnnnnnnnnagatccacaannnnnnngccannnnnnnnnnnnnnncgggcnnnnnnnnnnnnnnnnnnnggtttacctccgggttggtggtggctnnnnnnnnnnnnnnnnccctggagcatgtgcaggatcctcagaacactgttaaggtccaggtcttatatccagatggccaggctnnnnnnnnncaccccaagcctgcagacttccggaatcctggcccagggcggcaccggcttnnnnnnnnnnnnnacctctcccacactgcttggacagaggcatgccaggtggaagtgaggctgctgctggcctacaactccagcgctcgcattccaaaatgcccctggatggagggtggnnnnnnnnnnnnnnnnnnnnnnnnnnnnnnnnnnnnnnnnnnnnnnnnnnnnnnnnnnntaaaagtttatataatgcccaaacctgcacggcgctgaggcaaaaacagtctttccaaccatggcctagagggtccttcttaggtgtcagaatgagccaagcctgaagcacttcacctggaattgatatgtaggcttaaggagtatgtgacccttacagtctcatctnnnnnnnnnnnnnnnnnnnnnnnnttcttcattaaaaaataaaaaaccttcaagtcgacttcccctccctatctccacaaaa

SEQ ID NO: 14558 - DNA, 703 bp, Macaca Fascicularis
  misc_feature (1)...(703): n = A,T,C or G
tagttttttgaccgatttatagcgtcaaaannnnnnnnnnnnnnnnnnnnnnnnnnccatctattggctggctctcgactnnnnnnnnnnnnnnnnnnnnnnnnnnnnnnnnnnggcacgcgtccgcggctgaaccgcggaagggccggtgaggagctgggcctcgggagatggccccggggnnnnnnnnnnnnnnnnnnnnnnnnnnnnnnnnnccgccccgcaccgttggctgccnnnnnnnnnnnnnnnnnnnnnnnnccacagtggagtgcggcgccctgcggttgcgtgtcgtcccgctgggaatcccgccagggacgcaggtgggcactgtgtggagctgcgggaggacagggtgcccccaaggagaagacccccgcagcggggtaagcgcctcccctttccccggcctgcagacactgttcctgcaggacaacaacatcgcgcgcctggagccaggagccctggcgccgctcgccgctctgcggcggctctacctccacaacaacagcctgcgcgccctggaggccggcgccttccgcgcgcagccgcgcctgctggagctggcgctcaccagcaaccggctgcgcgccttgcgcagcggcgccttcgcaggcctggcccagnnnnnnnnnnnnnnnnnnnnnnnnnnnnnnnnnnnnnggctgctggatnncncttcttgcacctgcggtgagcg

SEQ ID NO: 14559 - DNA, 656 bp, Macaca Fascicularis
  misc_feature (1)...(656): n = A,T,C or G
ccaaagcagtngggccgcgttgttgctcactcnntgcatagcatggtctgcacctggggggacgggtggggggaggggggtgggcggggtgggaagtgcctgctgtttatattgttgaatttctgtaaaataaactgtatttgcaaatccaacattgagcttctggactacgctgactccacnnnnnnnnnnnnnnnggaaagggtcgaccgnnnnnnnttgaaatgacctgaaatgtagcctctgtccttgtaagtcagttgacttgctgcacatctctttgtgtacttgtacggtactggcagaaaagtcatttttcannnnnnnnnnnnnnnnnnttgcccttagctgtaataatgcatccgattttgatttcctccagagctgtgtttctgtccatcacctgtgtattggccctgtgtttaccactctggcccactcctcacccccttgctcccctggtcttttggagtttgtgacattgatttgaaatggatggtgttctcttgagagcaagtgagattgttagaattaagttccagctatacagttttctaacatagctataaggtccttgttgctgtttgtgataactgatagataactcattggaaacatgtgcatacatttatattcagatgaaattatggttgcac

SEQ ID NO: 14560 - DNA, 859 bp, Macaca Fascicularis
  misc_feature (1)...(859): n = A,T,C or G
gccaacatcnnngacctgtcccagatnnngaaaaagatgccgcagtaccagaaggagctgaataagtattctacgcacctgcatctagcagatgattgcatgaagcacttcaagggctcggtggagaagctgtgtagtgtggagcaggacctggccatgggctccgacgcggagggggaaaagatcaaggactccatgaagctgatcgtgccggtgctgctggacgcggcggtgcctgcctacgacaannnnnnnnnnnnnnnnnnnnnnnnnnnnnnnnnnnnnnnnnnnnnnnaggagaacctggccaagctgatccagcatgccaatgtacaggcgcacagcagcctcatccgcaacctggagcagctgggaggcactgtcaccaaccctgggggctcggggacctccagccggctggagccgagagagcgcatggagcccacctatcagctgtcccgctggaccccggtcatcaaggacgtaatggaggatgccgtggaggaccggctggacaggaacgtgtggcccttcnnnnnnnnnnnnnnnnnnnnnnnnnnnnnnnnnnnnnnnnnnnnnnnnnnnnnnnnnnnnnnnnnnnnnnncaaggccggcgtagaggcccgggcgggcccccggctcatcgtgtacgtcatgggtggtgtggccatgtcagagatgagggctgcctacgaggtgaccagggccaccgagggcaagtgggaggtgctcattggctcttcacacatcctcaccccgacccgcttcctggatgacctgaagacgctggaccagaagctggaggacattgccctgccctgacccctggacctgccccctacccctcccttccagagaa

SEQ ID NO: 14561 - DNA, 772 bp, Macaca Fascicularis
taggtattactctctactcctaaagttatttactatttggcttcaagtataaaattttggtgaatgtgtaccaagacaaaaattagtcacctgagtaacttggccactaataattaaccatctacctctgtttttaattttctttccaaaaggcagcttgaaatgttggtcctaatcttaattttttttccttttctatagacttgagaatgtttttctttaaatgagagaaagacttagaatgtacacagatcctaaatagaatcagataatctcttttttttttataaaggagagaaagacttagaacatacacggatcctaagtagaaccaggtaattgtctctttctaataaggaatttgggtaatttttaattttttgttttttaaaaaataacctagactatgcaaaacatcaaagtgaattttccatgaatgtttttaatattctcatctcaacattgtgatatatgctactaaaaaccttttcatatacatcttacctcatttcaagtgaattattttaatcttttcctctctttccaaaaatttacaggaatgtttagtgtaattggatttcgctatcagttcccatccttaagttttgatattcaatatctgatagatacactgcatctttggtaatctaagatttgtttacaaatgtgcaaattatttacagcatagactttataagcattaaaaaaaaactaatggaggtaaaacctatatgcgatgtgaaataattttagtgttgatactgtatgtgta

SEQ ID NO: 14562 - DNA, 749 bp, Macaca Fascicularis
  misc_feature (1)...(749): n = A,T,C or G
ccccagtgccccactccnnnacagcctttcctcaccccagtagatccgacctccagccccatacagggtgaacctcttgataagctctctgcctcctcctccctttctcccttgtggggaatgtttggaggannnnnnnnnnnnngatggggagaaacagaagcccgggctctgagcctcagctgagccctggaagatcctccccatggggcagagtggtcttnnnnnnnnnnnnnnnnnnnnnnnnnnnggtccctatctctggccagagtttggcaggactgccattatctggggtgtggcctctgccagcaagagaagtgtcctgggtgtttttaatcatgtttgagtgttaggggttggattctagagtagatgtctgaggccacatctgaacagacctgtcagccaggcctgttgcccannnnnnnnnnnnnnnnnnnnnnnnnnncaaacacagtacaggtgtcctggcctttcttcctgaggtctctaggggaggggcatgggtaagggtgtttcctcagcaccctcctggggtggggattatgtctgctctcatgtctgggtctttggggtaggacgggctgtggtatgagaggtaggagtctccacagggctctgtgtggcccctcatagggcaggtcctgccctctgagaaggtcccttcatgcttgaggcacacagctttaaggaagtaggttgaagtaggactcctttgtcctctcactggcttggctccctcaata

SEQ ID NO: 14563 - DNA, 685 bp, Macaca Fascicularis
  misc_feature (1)...(685): n = A,T,C or G
atgggcggcnnngccatctggtgcaagaaggccaaggccccgaggccagtgcccaagccccgaagtctcagccgggacatgcagggcctgtctctggatgcagccagccagccgagtaagggcggcctcctggagcggacaccgtcaaggctgggctctcgggcatccactctgcggaggaatgactccatctacgaggcctctagcctctatggcatctcagccatggatggggttcccttcacactccacccacgatttgagggcaagagctgcagccccctggccttctctgcttttggggacctgaccatcaagtctctggcggacattgaggaggagtataactacggcttcgtggtggagaagactgcggctgcccgcctgccccccagcgtctcgtagtccctcacccgtccgcgggaagagcccccttacgccacccccacccccggccagcctggggccaccccgcctcactgcatcctgggaacctccgccctgcaaggctttgctatcttcagccactgggcggagctgcagctctggaggaaggggcgggtcgaggctgcgtggtgatggggtctccacccccaggccctgcggggcagggctggagctggacagaagccagtgcctttaagtcattcgtgtcaaaaccctctggggtccggaggcagcgcgg

SEQ ID NO: 14564 - DNA, 813 bp, Macaca Fascicularis
  misc_feature (1)...(813): n = A,T,C or G
agcaactagtcattcttttgatgtcagagtgctaacgcagttgctcctgaattcagaccacagatccacagccacagtccagatatgtagcggttctgtaaaccttaagggtactgtgaaatgcagagcttatatccacagcagtaaacccaaagnnnnnnnnnnnnnnnnnncagtaaagagggatatattgaacacagttgctgatcgttgtgaannnnnnnnnnnnnnnnnnnnnnnnnnnnnnattccagaaaaaaaagattctgaaaaagagttccacatcctcccttatcgagtctttgttccccttcctggnnnnnnnnnnnnnnnnnnnnnnnnnnnnnnngatgannnnnnnnnnnnnnnnnnnagggaccattttatggagatgttggatcatacaattcaaatagaagatttgaaaattgcagaggaaataaacacannnnnnnnnnnnnnntctatgaatagtcaagcttcattggacaacacagatgatgaacaaccaaaacaaccaattaaaactacaatgttattgaaaattcagcaaaacataggtgtgattgcagcatttacagttgcagtgcttgctgctggtatctcctttcattacttcagtgattagggtgagnnnnnnnnnnnnnnnnnnnnnnnnnnnnaacattgacagataattatgaataaaannatgttaatccatcnnnnnnnnnnnnnnnnnnnnnnnnnnnnnnnnnnnnnnnnncctatttgatgtatttctgattaaaatgaaatcacaagctgccttgtttagtctgctttacattgtag

SEQ ID NO: 14565 - DNA, 680 bp, Macaca Fascicularis
  misc_feature (1)...(680): n = A,T,C or G
tgggacaagagcaagaggctggatnnnaggcccctaggatctgtactcaggacctggagaataccaccccacccccagcccataattgggacccagagccctttcccagcacttaaaacaggagcctagagccccctgcccaaacaaaacaggacatctatgaccaccctacccccacgccagccccaaactaagatatccctcacacccagcccccataacctagggacaagagtcttccccagccctgaacctagaaccaagagccacctacatccagccccaacactggggcttcaggccacagcatccatggccaatttcaaattgtgaacccagagacactcccatccacccttctccatgctcagcccnnnnnnnnnnnnnnnngcaaagcactctcaaatcttgaatcctggaccaaagcttttccagaccctaccctaccttccaacccaggtcaagacattgccaaatcttgaactcaaaacccaagtgttccatgcccctgtgtggatggagttgggtatcctgactgttggacccctggtcccaggtgatcccgaccctcaccagtcccagttgcctccctccagctctgcttagggattttgcccctcaccccaatgttccacatcattgacgaccaaggggtgaggtggggacaggcctcagcaggg

SEQ ID NO: 14566 - DNA, 955 bp, Macaca Fascicularis
  misc_feature (1)...(955): n = A,T,C or G
tgcaccaggnnnngcactanttccccttcaggcccagcaatctcatcgtttgtgcctggacagcaatggagcacatcgaccggaacaatggttgtctggttgtgctcccaggaacacacaagggctccctgaagcctcacgattaccccaagtgggaggggggagttaacaaaatgttccacgggatccaggactacgaggaaaacaacgctcgggtgcacctggtgatggagaagggagacaccgttttcttccatcctttgctcatccatgggtctggtcagaacaaaacccagggattccggaaggcaatttcctgccatttcgccagtgccgattgtcactacatcgatgtgaagggcaccagtcaagaaaacattgagaaggaagttgtaggaatagcaaataaattctggggagatgaaaacagcatggacttgaaggatatttggatgtttcgagctcgacttgtgaaaggagaaagaatcaatctttgaaatagccatctgctataactcaacagaaaaccaaaaccaaacaaaatgtctaaggaaaatgttttcttaatgagatgatgtaagcttttctatcacttgttaaaagcagaaaacatgtatcaggtacttaattgcagagagttagttttgcagcgcaatggtgttgctttaatggaaataaaaaaagtaaaagtgaagtattactgttttaagaaaaactaatttagggttgcagccaataaaggtgattggtgtgtaatttaagtgttaaatcaatttctttcattcaattagctctttacccaagcagaagtgaatcatttggagcttagggtgtgtgtgttttgtatcccctttctggtaaacccattccctaccaattttatgtcataagagattcccccaccaaatctagaacaatgtataatacattcacattaagtgaagggcataggaag

SEQ ID NO: 14567 - DNA, 712 bp, Macaca Fascicularis
cacgaaaatacagcagaagaggtagcaggtgggatcgaggccattgtacaacttatcaacacaaggcagccacaggccaaaatcattgtattgggtttgttacctcgaggtgagaaacccaatcctttgaggcaaaagaacgccaaggtgaaccaactcctcaaggtttcgctgccgaagcttgccaacgtgcagctcctggataccgacgggggttttgtgcactcggacggtgccatctcctgccacgacatgtttgattttctgcatctgacaggagggggctatgcaaagatctgcaaacccctgcatgaactgatcatgcagttgttggaggaaacacctgaggagaaacaaaccaccattgcctgactggctcccatcagtgttactagcatctcagcttcctcagatcagttctatcactggcactacagaatccttctctttcttaaggcactttgcattgtagaatgttcctggatgttcatatctagtgtttgaaggggaggagggatttaaactggtcctgtacatagaaagtttgtttgacagaggagaaaaattagccaaggaagattgttgtttaaattcatttgaaaccagaaggggactttttagttgtatgtgtaacacattcattgaattatcactgttttcctaggacaacatcaagcctaaatactgaacaatatgaagattcttttcttgg

SEQ ID NO: 14568 - DNA, 281 bp, Macaca Fascicularis
tcaacttggatgggaaatacttcctccaaggaccagtcaaagaagagttaatacaggtgatgagtaggtcaaaagaaagaaaaccgtctgtgcacattgtcatgaacttcccagcaaaatctatagagtttactagtgctttcaaatggttttttgatggacagccatgcagcaatgagttccttcccatagtgcattgttacaggttttcgaaagatgctaaccctgctaagcatgttcggcaaagggctggaggtgtgttaggcatttgtatggaggca

SEQ ID NO: 14569 - DNA, 750 bp, Macaca Fascicularis
  misc_feature (1)...(750): n = A,T,C or G
atgctacagatgcattaagatgtgtaaacaactaccaaggaatgcttaaagtggcctgtgctgaagagtggcaagaaagcaggacggagggtgaacactccaaagaggttattaaaccatacgattggacctatacaacagattataagggaaccttacttggagaatctcttaagttaaaggttgtacctacaacagatcatatagatacagaaaaattgaaagccagagaacagattaagttttttgaagaagttctcctttttgaggatgaannnnnnnnnnnnnnngtttcaagcctgagtgtgaagattagagtaatgccttctagctttttcctgctgttgcggtttttcttgagaattgatggggtgcttatcagaatgaatgacacgagactttaccatgaggctgacaagacctacatgttacgagaatatacatcacgagaaagcaaaatttctaatttgatgcatgttccaccttccctcttcacggaacctaatgaaatatcccagtatttaccaataaaggaagcagtctgtgagaagctaatatttccagaaagaatcgatcctaacccagcagactcacagaaaagtacacaagtggaatagaatgtgatacaacatatactccctgtggaatctgactggacaccttggctatttgtaaggggttatttttattatgataattaattgccttgtttatgtacagattttctgtagccttaaaggaaaaaaaaaa

SEQ ID NO: 14570 - DNA, 755 bp, Macaca Fascicularis
  misc_feature (1)...(755): n = A,T,C or G
acttccattcaggaaactggagatcccnngatggctgggacctttgtggtctcctcactctgcaacggnnncatcgccgcccagctgctcttctactggaatgcaaggcctccccacaggcagaaaaaggcagagtnnnnnnnnnnnnnnnagtcattccgtttccactcattcacccaacctcagggttctccnnnnnnnnnnnnnnnnnnnnnnnnnnnnnactcatcctccattcctctgcatttgcagactttctaagccagggttggctgtagtggaaacaaatggttgatggatccagatccttagaaaaggagaggatgggggtagagtctcctaagccaaaattttgacatttgagtgcttttctaagccctgtacatgaactattaactcagtcattcagccaagcctccnnnnnnnnnnnnnnnnnnnnnnnnnnnnnnnnnnnnnnnnnnnnnnnnnntaccctgtcctccagcctccctgcttcnnnnnnnnnnnnnnnnnntggagcctggaaggcagagtggaggggactgggggcctgtggctgcctccccgcctcagcccggctgggactgtctcccagaccccagtgctgaggtgggggaagggggatggagaatgactcaggcagggccccagggtggggtgaggaggttcctgctctggcaggtctaggcggaagggagtggagatggggctggttcctgctgcagtgaggggaacagatgggacaataaagactg

SEQ ID NO: 14571 - DNA, 1573 bp, Macaca Fascicularis
  misc_feature (1)...(1573): n = A,T,C or G
tcactactatggtgtgtgtagctgtaaatggtaaannngtgttaggagttatacataagccnnnnnnnnaatatacagcttgggcaatggtagatggtggttcaaatgtgaaagcccgctcttcctacaatgagaagaccccaaggatcgttgtgtctcgttcccannnnnnnnnnnnnngacaggttgctcttcagacttttggaaaccagactacanntnnnnnnnnnnnnggtgctggttataaagttttagcacttttggatgtgcctgataagagtcaagaaaaagctgatttatatatccatgtgacatacatcaaaaagtgggatatatgtgctggtaatgccatcttaaaagcccttggggggcatatgactaccctgagtggtgaagaaatcagttacactggttcagacggcattgaagggggactccttgctagcatcagaatgaaccaccaggccctggtcagaaaactcccagatctagaaaagacaggacataaataagcataactgattacagggtacagttcttcacagctgaaatggttagcctgaaatgctggaagcttcgaaggattggtggagactatgcatggttaaggccatcccgaactttttaaagtatttatgaagcatcagagacttattttccctgtaataggatgcaagatcagggaaaatgggttgctttgtgtctcaagtattgtctttatttttgagactattttcatacagttgtcatacacaaggcgcgtatatatatttgtgaattaaaatctgtagctgagtctacattgttannnnnnnnnnnnnnnacacaacatcatgaatcttcactgttagtactttcatgtagaattcggttgaaggaaagattgatttttgtgtagatgtttaatataactttannnnnnnnnnnnnnnnnnnnnnnnnnnnnnggggatttttacctctaatttggatggaaagcacaagaagccacacattcattaatatgcaacaaatgttgtatttatgttactgaatatttctatggattaaaatagaaaaagtttaattgattttttctttgaaattttaataacaggttcaccagctggtagaaaatagagacacatgatggtttgcattgtaataatttctgtgtgtatgtgtgtgtgttgttttgtttttataaagatataaatgtgtttgtactcatgagttcagcatttctgctctcttgctgtctattttcattttccctacggaagatgcatggttgcatccttttccttctgaccaacacttagtctttaactttgtgaggtttggtttaaggatgcagggttagcactataattttggttcattttctcataaggatnnnnnnnnnnnnnnnnnnnnnnnnnnntataaatgattctattacaattgaaagttacttgacattacatgaattgaactaggtttcattattttcagacttttagtattgtttttttaatttgccaggtttgtatatagannnnnnnnnnnnnnnnnagaatgagtatggttgcttttgcccatggttgcttttacta

SEQ ID NO: 14572 - DNA, 728 bp, Macaca Fascicularis
  misc_feature (1)...(728): n = A,T,C or G
tcgggggaatcaaagtgttggatatggcccgggcgggattcnnnnnnnnnnnnnnnnnnnnnnnnnnnntcacactggccatcaacagctggagcatcaccatcttcagcctgcactccttcccctcctgggctcattccaacaccacagcccagtgcctgcccaggccggccaacaccaccatgccaagcccctaggctggggcgcagcccatcggccatgcccaggaagacctaccccgttcccactcctctgagccgggaggggacaccccaagctcccagctccaggccaatggcctttttntttgtgtgtcnnnnaggaaggtgtgtatgctcaatttcnnnnnnnnnnnnnnnnnnnnnntgtgcctgcgcgcgtgtgtgtgtgtgtgtgtgcgcgcgcgcgtatgggtgcgccttcatggatgggaggggtgtgtgatgtgaggctatctgaggggggctgtgtgcaatgcacatgatcctaggtgtgtatgctggataatgcacatgtgtgtgttcacagacaatacaacgtgtcctctctggtgccccaggtcttggtctccccagtttagtgaccagacttatttgcactgtatttattggnnnnnnnnnnnnnnnnnnnctgggaggagggcctgccagcagctgccatgggaacagcctctgggactggcccaacatactgagggctccccagccttctggtgttttggtggaggt

SEQ ID NO: 14573 - DNA, 721 bp, Macaca Fascicularis
  misc_feature (1)...(721): n = A,T,C or G
aagaaaggagctgtactggctactcacagggtcnnncatagcttcctagaaagaaaccacttgtcagttttcatgctacagcaacttctttgtggtccatggcctttccttgcttagatactccacatactggtaaaaaggaatttctttttagaaaattgtatatcttccaagcccaccagtaaaaaggaatttgaggaggaaagaaaaagaagctcaacatccccaattacctctggagataatccaagttcccttggacaagcttcagaaaccctttattatgaatttctactattttctaaacttcttcccatttggaatgacttattcaccatctattgcatcaaattgatcttgggtctgattttcaaggccttccaaaacctagcccattcttcccagcggtggtatagcctctgttagagttatgctcattcctgtcttgcttaactctctccattctccaccttaaaatactttccatgtttcagccaggtgcggtggctcatgtgtgtgatctcagaactttgggaggcagagtgggtggatcacttgaggccaggagttcaagaccagcctgtccaacatggggaaaccctgcctctactaaaaatacaaaaaattagccaggcatggtggctcatgcctgtagttccagctactagggaggctgagnnnnnnnnnnnnnnnnnnnncagcagggtgaggttgcagtgag

SEQ ID NO: 14574 - DNA, 767 bp, Macaca Fascicularis
  misc_feature (1)...(767): n = A,T,C or G
cccttcagatgnnnngatgcagagggcacgcccgtagtccctctgcagagcctcacactggggccagggcaggcaccagccccaggcagccagtcgaccacggcctggcgtcttcctcgtagcgtctgttcctcactttgtgttgatgctgacttagaagaatgttccgattttccatgatctaagcaggccacgtttaaaataacatcaaggcaagcgtacgtgtcatcctctgtactgacatcnnnnnnnnnnnnnnnnnnttcnnnnnnnnnnnnnnnttcctagacaagtgcacctggggtttcaggaactttgtctcttttgggagggggttggtggggaggtcaggatgcctgggatcccttcctggagagtcggcttctctctggaaaaagcctccattgcccacccgcnnnnnnnnnnnnnnnnnnnnnnnnnnnnnnnnnnnnnnntttgattttaagagatctaaggaagcgcggcgcgccccctggtgctggtaagccgccaacgcacctggggctgcaaccccactggacgggtggtccggagggaggctggagtggggaggtgaggagggagctgtgagtcctcagaggccgtgggccaccacattnnnngcanntttcccagacacccctctgctaggccatccctggatagcaagtgaattaacttaagggcactgtgatgggaagccttgcccccccctcttttttttttttttttttaatatctgcggaataaacccanntggttaattt

SEQ ID NO: 14575 - DNA, 753 bp, Macaca Fascicularis
  misc_feature (1)...(753): n = A,T,C or G
tgctgccccagcctgtcnnngnnncctagagggctccagcnnnnnctgcttcccccaccacgttcccatcacccacctcattgatccactgaccaaatccttaaccctagcgatggtttgggagatggggggttggatagcatcctctttcttggcccttccttatcctaggaaaagagggttcctctccttgtgtgtgtctcttccccccacccctaattcttctgctctgttcgggaagacggggaggaaaaggtgacttctgcccccaccgctcttacccccactgtagtggcctttggagatgcccccacctccccccaccaactcttggcgtgttggagagaaggggccctnnnnnnnnnnnnnnnnnttcctcccccctaatttattctaatttattaacttcgacccaccctttctgagcctgcagccttcccgtgtggcctgggggctgtagagtgagctgccccagcccctcccagcccttgcccagcctggggcagtggggaaggcttgggcgtggccccgttggaggttgatttgctgttttgtttcttgtctttgtgtttgtgttctgtggtacttgctgagagaaaaatgtgagcaaagcagaaggaggtgggaaaatggannnnnnnnnnnnnnnnnnnnnnnnnnacctttcctttagtggtgggaaacccttatcttgcaaggggaatgtgtccccttccccaccctctagtgtattcacannnaacaaaacctccc

SEQ ID NO: 14576 - DNA, 786 bp, Macaca Fascicularis
  misc_feature (1)...(786): n = A,T,C or G
cacagcaaggaattgntgatcccttgaattccgttttggaaaccagtgctaagaatgcaacgaatgtagaacagtctttcatgacgatggcagctgagattaaaaagcgaatgggtcccggagcaacagcnnnnnnnnnnnagaagtccaatgttaaaattcannnnnnnnnnnnnnnnnnnnnnnnnnnnnnnnnnnnnnnnnnnnnnnnnnnntccttttctcacagcaatgaatttgcaatctgaacccaagtgannnnnnnnnnnnnnnnnnnnnnnnnnnnnntgcactacaacagattcttaccgtctccacaaaggtcagagattgtaaatggtcaatactgactttttttttattcccttgactcaagacagctaacttcattttcagaactgttttaaacctttgtgtgctggtttataaaataatgtgtgtaatccttgttgctttcctgataccagactgtttcccgtggttggttagaatatattttgttttgatgtttatattggcatgtttagatgtcaggtttagtcttctgaagannnnnnnnnnnnnttttgtatcaaacagcacaagcagtgtctgtcactttccatgcataaagtttagtgagatgttatatgtaagatctgatttgctagttcttccttgtagagttataaatggaaagattacactatctgattaatagtttcttcatactctgcnnnnnnnnnnnnnnnncagnnntattgtaatttgttgcacactatgtaacaaaacaactgaagatatgtt

SEQ ID NO: 14577 - DNA, 696 bp, Macaca Fascicularis
  misc_feature (1)...(696): n = A,T,C or G
acagcagnnnnnnnnnnnnnnnnncgnnggnnttgcaccaactccaccctccnnnnnnnnnnnnnnnnnnnnnnnntcgccacagaatagtttcccagcagcacaacagaccgtctttacgatccatccttctcacgttcagccggcgtataccaacccaccccacatggcccacgtacctcaggctcatgtacagtcaggaatggttccttctcatccaactgcccannnnnnnnnnatgctaatgacgacacagccacccggcggtccccaggccgccctcgctcaaagtgcactacagcccattccagtctcgacaactgcgcatttcccctatatgacgcacccttcagtacaagcccaccaccaacagcagttgtaaggctgccctggaggaaacgaaaggccaaattccctcctcccttttactgcttctaccaactggaagcacagaaaactagaatttcatttattttgtttttaaaatatatatgttgatttcttgtaacatccaataggaatgctaacagttcacttgcagtggaagatatttggaccgagtagaggcatttaggaacttgggggctattccataattccatacgctgtttcagagtcccacaggtaccccagctttgcttgccgaaactggaagttatttattttttaataacccttgaaagtcatgaacacatc

SEQ ID NO: 14578 - DNA, 525 bp, Macaca Fascicularis
gggtttttggggactctcggggggtaccaagggagaagggttttcaaaaggtttcttgccaaacccccttgtttaaatgtcttgtggggggcaaggggggagttttcattaagccgcaacaaggtttaaaaaaaaaaaaaaaaaaaaaaaaaaagggcggccgcccctttttttttttttttttttttttttttttaacaatgaacacaacaccatttatatataaatcacaagacaaacatatttgaaagatacatccacaagtatgtaaacattcaaagttctggaaagacgcacattaagccatgacaactggagaagggctaaggaaatttttcatgttgaaatacttctggggccagtcgtggtagctcacgctctgtgatccccagtacgttgggaggccgaggtgggcagattacctgaggtcaaggagttcaagaccagcctggtcaacatgatgaaacctcgtctctactaaaaactcaaaaattagccggccgtggtggcccgcacccgtagtcc

SEQ ID NO: 14579 - DNA, 746 bp, Macaca Fascicularis
  misc_feature (1)...(746): n = A,T,C or G
agagcagagcagggcaaggcaggagagccngcgntnnnnnacgcccaggttccggaaggtggtgaggcaggccagcgtggacgacagcggagaggagggtgaggcctgagccctcacacatgcccacgttcccctagacactaaatagaggatccacaactctttggagaaacaccctcacgtctgtcgctgcacattcttctcagctccgccccacacccctgtcactacagcctcacctcctacagccttaagtcccagacccatgtccacctgtccaagggctcaagactttctactgggatgtggtagagggattgaaggtgcctttngnnnnnnnngcaccctagtttcattctcagctcttgccctgaacactcacctgtgtcacagaataaaaacagagtttccagcacaaaaaggctcatgcctctcccccgctccccctccctgcacctcctatcctctcccagttcattcctggaatcagtcaggccagggaaccagtggccccaaaggcaggcggatcctcaggccccagctgtgggaggctggnnnnnnnnnnnnnnnncttccctcgtccaccnnnnnnnnnnnnngtctttgctgctgtccccagacctcctgtgacaccacgccagattacagggcgccaggccagagagagtctgctgtttgtcctttgtggcctctggctagtcagtttttcatagccttatagtatctgactttgtattgagaaataa

SEQ ID NO: 14580 - DNA, 707 bp, Macaca Fascicularis
  misc_feature (1)...(707): n = A,T,C or G
agcactgtactcctggcaattattacatatgttagaacatggattttgcactgtagacaacatttaacaccagtctatggggtactgcattgctttttataaagttcaaaataaagatttattttcaaacaagtgactttggtttatttcatacattacactttttcttgcagaaaaaaataaaattgtacaactgcataaatataaaattcttccaccatgaaaatggttaaaacattcataaagacacatcaccaccatgtgatgcctccagaaaggaaaaaaagaaagtaaaagaaaatgtataaagcaaattaattagccctgtcactagccaaagtgatgggnnnnnnnnnnnnnnnnnnnnnnnnnnagaacatactggaggacgagggaagagatgtcaagacagcattcaatacaagcacaacacaacccatcacctttttgtgtttttctgtagtgtcacttaaaatttaaagggcagttcccccatgacaaccccccacccagcccacaggaaaaaaaaaaataataaagacctaacaccacaggaaaagactatggagtatgttaaaaatgctcattgatgggccattatctttgaaagagccaaaaaaaaaaaaaaacaaaacaaaaaaaagaaaaaagtaccatgccagttttattcccgttgaatatttacnncttggacagcaaaccttgct

SEQ ID NO: 14581 - DNA, 1013 bp, Macaca Fascicularis
  misc_feature (1)...(1013): n = A,T,C or G
ggaagcttcctgcctttttctttggttgctcctgtggaaaatactgaaaagattactttgttttattttgttgtctttttataaaaggggaggtggagagaccccttcagagcagggattgtgccgggagagtgcctctgactttgggacatttcatccacagaaatttccaagccaatggtttcttttgggttttggtttttatgtttgtttttgggggtttggaaaaacatgcatttttaccgtgcacgtaaattggtcagcagaaaagggagcccagaagaggcagcagatggaccatgcccttgctgggttttccttttctttgggactgaggggaaatggtttttagaggtgagggttggtccatgtggaggaaagaagtgtctctgttgggggacagaggaacctggggagtccatcgcatgtcctacaatctgctcttagacacggccttgccaggagagcctgccctcagactgcaggaccagaacccctgcctccatctttccaagcaccggggcgaaaaaccacaaaggaaaggaagaaaatttatatatatataatataaaatcacttggtgattaaaaaaataactgctccataaataaaactcnnnnnnnnnnnnnnnnnnnnnnnnnnnnnnngtgttttttgtttttcggagaaatactgtaaatatatatttttttgttgctgatttagagtcaatctccaatgttgtgctaaaaagtttaaattaaatgtnnnnnnnnaggggataagtcttatgctatctcagttgacacattgaggttattttgggccagggaaggaggaagctagttggactttgttttgttttctaaannnnnnnnnnnnnnngttttagagagagcaaggacatcttnnnnnnnnnnnnnnnnnnnnnggtgatatttgtgtaataaaatttttaaaagacaaaaaaagaaatagcctccnnntgggaaatannnttaatttaggttttgtttttgtttgggggttttttg

SEQ ID NO: 14582 - DNA, 976 bp, Macaca Fascicularis
  misc_feature (1)...(976): n = A,T,C or G
tagttttactttttctggtcacatatcatcatgacactatacacnnnnnnnnnnnnnnactccannnnnnnnnnnnnnnnnnnnnnnnnnnnnnnnnnnnnnnncctcccctatttgtttgcttggatctgtggtaacctagtaggtcagttatcagacttcttcctgaccaggaatattctcagcgtaattgctgtccggaaactcttcacannnnnnnnnnnnnnnnttcctgcaatctttggtgtatgcctgcctcacctgagttccagcttctacggcattgtcattttcctaatacnnnnnnnnnnnnnnggcagcttttgcttgggtggagtacttataaatggcttggatatcgctcccagatattttggatttattaaagcgtgttcaaccttaagcgnnnnnnnaggaggactaattgcttccactttgactggattgatccttaggcnnnnnnnnnnnnnnnnnnnnnnnnnnnnnnnnnnnnnnnnnnnnnnnnnnnnnnnnnnnnnnnnnnnnnnnnnnnnnnnnnnnnnnnnnnnnnnnnnnnnnnnnnnnnnnnnnnaaagacaacacacacgtctctgaagctctcaccatgtgatgcactgactcccctttnnnnnnnnnnnnnnnnnnnnnnnnnnnnnnnnnnnnnnnnnnnnnnnnnnnnnnnnnnnnnnnnnnnnnnnnnnnnnnnnnaaccatgagccaaaataaacctcttttctttataaattaccctgactcaagtattcctttatagcaacacatattgtctccctaggataagatgcatcgtgattgcctatgtgaagggaatacatatattcagctaacatgtggannnnnnnnnnnnnnnnnnnnnnnnnnnnnnnnnnnnnnnnnnnnnnntttccannnnnnnncccagaaaatgtctatttgtatggatgccatgttttaataacnnnnnaactcaaatacaaaa

SEQ ID NO: 14583 - DNA, 1134 bp, Macaca Fascicularis
  misc_feature (1)...(1134): n = A,T,C or G
acctagatagnnnnnnnnnnnnaaatcagcttcannnattgccggccatgctgatgcctcaccaaaaagcaactacagctgatggttccagcatcttggacagagctgttattgaacacaatttgttgtctgcaagcaaattatataataatattacctttgaagaacttggagctcttttagagatccctgcagctaaggcggaaaagatagcatctcaaatgataacagaaggacgtatgaatggatttattgaccagattgatggaatagttcattttgaaacacgagaagccctgccaacgtgggacaagcagatccaatcactttgtttccaagtgaataaccttttggagaaaattagtcaaacagcaccagaatggacagcacaagccatggaagcccagatggctcaatgaatccttgcagaacttctgtgcacatgacatctttttccatgttgtgcagatcagtttcactatctccaaagcatttgcatcatgaccttatacatttcaatcccttttatgctggattccgtttaaagaagacattattagagcaggaagtacaagcatttaaaaatatgtagttcccgtatatttcaggttctctgtgtattaagctaactcagatgttttgaaagctttttctttaaacagaggtgaaatatctgtggctaaaaagtttgagatttgtgataactttgtagtcatgtaaaacttaagtgcttcatgcctctccaaatgtggttattcaaataaatggagaaatgagccaaataaaagtagtactttgtttttagttagcgaagagtattttgttcccttttccttcaacagacattgatttatgccatatgctagaaatacaaagttgagtcataatgcgtgttctccaggcgtccaaagagtcaaagagccaagagacagtaagtttaatctttgtatttgctccaactactagagcacacagagagtagctcttcatttaggagagagaagtcagggaaggctccacagagggttattttagctgagctttatagaaaaacatggggaaaggacttgaaaaggtatgtaggtgacttttnnnnnnngcttcaacatgtaaagagcttggaagtcatcacat

SEQ ID NO: 14584 - DNA, 712 bp, Macaca Fascicularis
catagcacaacgaacagtcgcgcaaacatcccgctggtgcctcccgggacgaaggacttcccgagcggtgtgggtaccgggctgtgacagccctgcagagaccccgaatccgggaagcaccgtccggcggcgatctctggctttgcaagggcccctccttctgggggcatcgcttccttagccttgctcagtgcgggtgccccgtgggggcgggatgcagcagaatccgagtgagtgtttgccaggcttaaggagaggagaaaactgagaaatgaatgctgagacccccggggcaggggtttgagccacagccgtattcgcccacaaactgatttctcacggcgtgtcaccccaccagggcacaagcctcactattacttgaactttccaaaacctagagaggaaaagtgcaatgtgtgttgtacatatagaggtaactatcaatatttaagtttgttgctgtcaagagtttttttgtaacttcaaatatagagatatttttgtacgttatatattgtattaagggcattttaaaagcaattatattgtcctcctccccctattttaagacgtgaatgtctcagtgaggtgtaaagttgcttgctgcgtggaatgtgagtgtgtttgtgtttgtgtgcatgaaagagaaagactgattacctcctgtttggaagaaggaaacaccaagtctctgtataatctatttacatga

SEQ ID NO: 14585 - DNA, 748 bp, Macaca Fascicularis
  misc_feature (1)...(748): n = A,T,C or G
gctataggaataatgcagtagcannnntgtcatcattnnttatgaattcaggagtctgggaagaagttggttgtgctaaactctggaatgaatggtgtagaacagcagacactacacatctgtcctccacagaggctttttgtgggttttatcatctcaaatccaatccctcggttttcctcnnnnnnnnnnnnnnnnnnnnnnnnnnnnnnnnnnnnnnnnnnnnnnnnnnnaaggtttttggctcttgtccaaggaagaacatgcagataactattctcacatgtcgacacgttaccgattataaaaccttagaatccactggcagccttccnnnnnnnnnnnnnnnnnnnnnnnnnnnnnnnaatttcaaagaccctgcgtgttgcccattgnnnnnnnnnnnnnnnnnagtacacgaccnnnnnnnnnnnnnnntgagttactgtcaagtatggaaannnnnnnnnnnnnnntacttgtgttatactgatgtgatgaaattagacctaatgacagtggaagcttttaagcctatactttctaccagaagcttgaaggnnnnnnnnnnnnnnnnnnnnnnnnnnnnnnnnnnnnnnaagaaattgatgacaacaaatgagattcagagtaacatttatacatgatcttaaccattgttttgtaatgtgtattacttgtccattcctttaaggggagcagcgtgcactcttttgtggattacttttgggggatatatttgagaacg

SEQ ID NO: 14586 - DNA, 698 bp, Macaca Fascicularis
  misc_feature (1)...(698): n = A,T,C or G
accacatgaatgaacttctcagatcagagtggcaagagcaatgggactcgttttgtgaagcagctctgatattagatgcccttaaatgatgtttcaattttatatgttttctaagataattggatcaggttttctttgtgtgtgtgtgttgtatcatgagtgtttgggggataaggttttgttaaaacaaagtctggactatcttcacttactacatcattaattgatgttactctggagtttagaattttggcattgacatttccctctctttcctttatttcaatgaagctgtaattgtgaaaattataactacatagacgctgaaaggctatgcacatnnnnnnnnnnnnnnnnnnnnnnnnnnnnnnnnnnnnnnnnnnnnnnnnnnnnnnnnnnnnnnnnnnnntagcatataagtttggaagattgccgaaatcataattcatcttgaaaagagctttttggccnnnnnnnnnnnnnnnnnnnnnnnnnnnnnnnnnnnnnnnnnnnnnnnnnnnnnnnnnnnnnnnnnnnnnnnnnnnnnnnnnnnnnnnnnnnnnnnnnnnnnnnnnnnnnnnnnnnnnnnnnnnnnnnnnnnnnnnnnnnnnnnnnnnnnnnnnnnnnnnnnnnnnnnnnnnnnnnnnnnnnnnnnnnnnnnnnnnnnnnnnnnnnnnnnnnnnnnnnnnnnnnnnntg

SEQ ID NO: 14587 - DNA, 743 bp, Macaca Fascicularis
  misc_feature (1)...(743): n = A,T,C or G
atggagaaaaaaccnnnnnccagaatcccacagaccagcagaagaaggaccatgaaaaagctgaatttgaggtacatgaagtatatgctgtggatgttctcgtcagctcaggagagggcaaggccaaggatgcaggacagagaaccactatttacaaacgagacccctctaaacagtatggactgaaaatgaaaacttcacgtgccttcttcagtgaggtggaaaggcgttttgatgccatgccgtttactttaagagcatttgaagatgagaagaaggctcggatgggtgtggtggagtgcgccaaacatgaactgctgcaaccatttaatgttctctatgannnnnnnnnnnnnnnnnnnnnnnnntttaaattnnnnnnnnnnnnnnnnnnnnnnnnnnnnnnnnnnnnaaccagtggtcccttnnnnnnnnnnnnctacnnnnnnnnnntggaggtccaggatgcagagctaaaggccctcctccagagttctgcaagtcgaaaaacccagaaaaagaaaaaaaagaaggcctccaagactgcagagaannnnnnnnnnnnnnnnacattagaagaaaatgaagctggggactgaggaccgccagcagagcgggggtctccctgcccccaccccagttccccaacccactcccttccaacaacaaccagctccaactgactctggtcttgggaggcgaggcttcccaaccacggaannnnnnnttaaagaaaaaaagaa

SEQ ID NO: 14588 - DNA, 863 bp, Macaca Fascicularis
  misc_feature (1)...(863): n = A,T,C or G
gaatacnnncacctagttactcaaatatttttcacttaactttttatacccttattttggtaataagcttacaatattaggaagctggggacctttttgtaactgaagccttgcgtcccctataccgggaatgcaactattaatagattcccatattttaaaaggagggaagggacaatttaatataaatttctgtttgtgcatttctgacaggccgttactatctgctnnnnnnnnnnnnnnnnnnnnnnnnnnnnnnnntgaatcttaatgatgttatgaaaccagctttgctcggggctcttgattggagcttccggtatgtgatgacggtatgtcatgtatgcatggatgtactcaactgtgtttaatactctgaattttaattagaaaaaaatacaatagtagcaaggccctggtttctaagctgtatccttttattcatgtgggannnnnnnnnnnnnnnnnnnnnngggcgagtgctttctatgctcgaaactaagcaagtacaaatttttcctcgtattnnnnnnnnnnnnnnnnnnnnnnnnnnnnnnnnnnnnnnnnnnnnnnnnnnnnnnngaattttttaaaaaatatctttaaaaggctgatcacaannnnnnnnnnnnnnnnnnnnnnaagcacacttaagaaagtttttttctgaataacatttttttccaatttcttcattttatgagacatttcctaatttatgaggattttaattgaaaataaacgtgagtctcaatagagctgtttttttctcacttcctagaaaatgcaaatgcaaaataaataactaagcagcttttgtttggttctgaaccgtatgtggcgtattgttattaggttctagc

SEQ ID NO: 14589 - DNA, 734 bp, Macaca Fascicularis
  misc_feature (1)...(734): n = A,T,C or G
cgaggccctacatanctccttggataggggaccatggggggcttgggatgatgcaaaaaaacaagtcacccaagggatgtcagttttttctctctctgcatgggttggattttccaaaatcataatttgcagaaggaaggccagcatttatgatggaatatatatatataaggtggccacactggggtggggtccttccccctcacagctttggcccctttcacagatagaacctgggttagaggattgcagaagatgaggtgggggggggcagggaagatgcctgtcgggtttttagcacagttcatttcactgggattttgaagcatttctgtctgaacacaaagcctgttctagtcctggcaggacacactgggggtgggggcgggggaagatgcggtaatgaaaccggttagtcaatgttgtcttaatattgttgacaattctgtaaaattcctttttatgaatatttctgtttaagctatttcacctttgttttgaaatccttcccttttaaggagaaaatgtgacacttgtgaaaaagcttgtaagaaagcccctccctttttttctttaaacctttaaatgacaaatctaggtaattaaggttgtgaatttttatttttgctttgtttttaatgaacatttgtctttcagaataggattgtgtgataatgtttaaatggcaaaaacaaaacatgattttgtgcaattaacaaagctacacaatccta

SEQ ID NO: 14590 - DNA, 231 bp, Macaca Fascicularis
atggacccccggtgatgcatcctgcctaggctggacttaaccccttcctccctgtccccacgaccaactgtccccagttactctaaccgttatttcatttagcttccatatatattttcttacctaagagaatagtttcctgctttaagcaaaagacctacaataggtggtggaattatgggatggggtggagtattgatataaatatataaatacaaatgtatatttttc

SEQ ID NO: 14591 - DNA, 947 bp, Macaca Fascicularis
  misc_feature (1)...(947): n = A,T,C or G
ctatgaagtacnnnnnnnnnnnnnnnnnnaggcaacgctnnnnnnnnnnnnnnnnnnnnnnnnnnnnnnnnnnnnnnnnnnnnnnnnnnnnnnnatatatccatacatttcattgtcagaatttagactgaaactacacattggcaaatagtgtgggatagatttgtttttaaatgggtgtgaccaatcctgtttttcctgtgctctgggtgaatagagcctgatggtagactactgctttgcggaattgcatacaactgtgcattacaaagttaatatggtaattatggtctggggtaaaattgagtttcagaataaaattaggaacagtaaaatccaaagaactatgtaaacaaaaaagcttttgttttgcttacaaagtatatttaaggattattctgctgaagattcaatttaagagttttccttgggagaactaagtaagaaacacaatgccaacagctggccagtaattagtgttgtgcacttaatgtccttaatcaatttctcaatagttcttgaaattagtgagattaagaaaaaagtctaaacattttgcatgtcatgctatcagaaacagtattttcttcccaaatcaaaaaaaagaaatatgatcagagcttgcacacaggcttgtttttaaaacaaaaacatttttaaaacgggtttccttcttgaaaaatcagtgtattagtcataaaacactatcattaagaataattgaacaataaagtttgctttgagatgcacagttttcaaattataatctcacttcaaatatataaagtcctcggtcctttgttacaatttcctttttcatgtaagtttaattatctgcatttatcttttttcctagtttttctaatactaatgttatttcttacaattcagtgagatatgggataaaataatgcttgagaagaatgtttaatagaaaataaaaatag

SEQ ID NO: 14592 - DNA, 704 bp, Macaca Fascicularis
  misc_feature (1)...(704): n = A,T,C or G
gatggatccccggcancnatnnnnnnnnnnnnnnntggcacagtcaaacccgcagnnnnnnnnnnnnnngggcacnnnnnnnnnnnnnnnnnnggagctggagcgtgtggagcagcagtctcggctggagcagctgagnnnnnnnnnnnnnnngagccggaaccagggccactgggccgactggctgcaggcgtacagagcccggctggacaaggacctggaaggcgccggnnnnnnnnnnnnctgnnnnnnnnnnnnnnnnnnnnnnnnnnnnnnnnnnnnnnnnnnnnnnnnnnnnnnnnnnnncatcgcgcagaacgccatcgaggctgccgagcgcggggacttctcagaggtgcggcgggtgctgaagctactggagaacccttaccactgcgaggcgggggctgccacagatcccgaggccacagaggccgacggggcggacggcaggcagcgctcctacagcagtaagcccccgctctgggcagccgaactgtgtgtgacatgatcttcgtaatggcctcggcacgcactccacacccctggagcctcccgaggcccccgtgtgctgccgagtggccgagacggtgccgggctgccctctgcactgggggatgctgcctgggccctgcacacctgtctttccatgatggcagagacatccagtcaggacctgacccgtctctgtctgaggccagctc

SEQ ID NO: 14593 - DNA, 721 bp, Macaca Fascicularis
  misc_feature (1)...(721): n = A,T,C or G
atgcaggannngcgctccatnnnnnnnnnnnnngcccctgcctaccaggaccccctctacctggaggaccaggtgtcccaccggaggccacccattggttaccaggctaggggcctgcaggacagcgacaccgaggatgagtgttggtcggatactgaggcagtcccccgggcgccagcccggccccgagagaagccgctaatccgtagccagagcctgcgtgtggtcaagaggaagccaccagtgcgggagggcacctcgcgctccctgaaggttcggacgaggaaaaagactgtgccctcagacatggacagctagggtctgccgcatctggccccttcttacctcgtgccctgcagggctccagggctatttggagcgacctttggcagcacatctggcctgcaccaactgcctgggccccgccctcctgactcctactgatggttaagggccaggagcagatgctgccaaggccacatgcacccacaatgtaccaaagcaggctgggcccagggttctatttattgccttgctctgtcctctcccttccccagttgtgggacaagagccgtccctgaacccctgcaaatgaaactaaacgtccacctgggtgtgttcattccttcctgtccttcaaagtacttgatagccttttataaggcctggcgcgtgtgtcctggttgtgtgtgtgtgttggtgagtgaggtcaagttgccaa

SEQ ID NO: 14594 - DNA, 587 bp, Macaca Fascicularis
  misc_feature (1)...(587): n = A,T,C or G
agaggactgaaacttctgaaattcaggtggatcacctgaatnctnncnnnnnnnnnnnnnnnggagaacatctcaagggcccaagtcatcaaataacctctccgtaagggaagggtgagggactgctgcgcagacccaagcaaacccaccctggtgctagaagaggtcatttcactttttcnnnnnnnnnnnnnnnnnnnnnnnnnnnnnnnnntccctggcaccaggctttgtttacanntggagccgccttggtgtgggtcaccaggacagtgtactcctctcctgccagcctccccttccccgaggtgtggtggctgcagtctcaggaagagcttggtacttgtggggacttctgtttgctccctgtggagatcagtgacgactgggaggaaagctgcttcaacctgagttgggctcttcagcaggctgcacaagtggaagcaactaattttggtgctcaggctgggttctccacccaagttaggcctgctctggcctaatggatcttactgtgagcaggatggctgcactggattgtacaactgttttgtgatgcccccggacactgtcatcctgggcccaga

SEQ ID NO: 14595 - DNA, 693 bp, Macaca Fascicularis
  misc_feature (1)...(693): n = A,T,C or G
agtgtgtnnntatgttcataggaatggatcgcttttctcaaggaactgtgcgtatagcaaagggaggagaagaaaggatgactatgcagaagctggcactaagaaggacaactctatcctggaaatcagggaaacttcttttcagatgttaccaataagcaatgaacccatctcgaaggaggagtttgtaatacacaccatatttcctcctaatggaatgaatctgtacaaaaacaatcacagtgaaagcagtagtaaccgaagctacagagacagtggtattccagactcagatcactcacactcatgatgctgaaggacttgcagcagacttgtattttgggttttttaaacctaagggaggtgatggtaggaaccctgttctacttcaaaacactggaaaaagagactgaaaaaagcaatgtactgtacatttgccatataatttatatttaagaactttttattaaaagtttcaaatttcaggttactgctgcgattgatgtagtggagatgcctgaacacaattctatattttagtattttttagtaatttgtactgtattttccttgcaaatattggagttataaaccatttactttgtgttctactgagtaagatgacttgttgactgtgaaagtgaattttcttgctgtgttgaacaatcaggactgcattcacatgagatcctt

SEQ ID NO: 14596 - DNA, 762 bp, Macaca Fascicularis
  misc_feature (1)...(762): n = A,T,C or G
ggagtacttgaagaagccgtgaactacttgnncagtcatcctgaggtaaaaggtccaggagttgggctgcnnnnagtttccaaagggggtgagctctgcctttccatggcctctttcctgaagggcatcacgnntgcngtcatcatcaaaggctctgtggccaatgttgggggaaccttacactacaagggtgagaccctgcccccggtgggcgtcaacagaaatcgcatcaaggtgaccaaagatggctatgcagacattgtggatgtcctgaacagccctttggaaggacctgaccagaagagcttcattcctgtggaaagggcagagagcaccttcctgttcctggtaggtcaggatgaccacaactggaagagtgagttctatgctaatgaggcctgtaaacgcttgcaggcccatgggaggagaaagccccagatcatctgttacgcaggggcgggacactatattgagcctccttacttcccgctgtgccgggcttccctgcatgccttggtgggcagtgctattatcttcggaggggagcccagggctcatgccatggctcaggtggatgcttggaaacaactccagactttcttccacaaacacttgggtggccaagaggggacaatcccagcaaaactgtaatttttatttgatcctctgttgctaatctctcctggaaacatctgccacatttagtgtgtgtatgtgtattcattcttttctttttaataactacttaaagttctccccctc

SEQ ID NO: 14597 - DNA, 702 bp, Macaca Fascicularis
  misc_feature (1)...(702): n = A,T,C or G
gcggggacnnnnnctgtaggcgttttggagcacatccacgtnnngcggagggtgtgccttcaaannnngaagggcctaatttcactattcttgctggctgcccaagggaactttcctgcttttctccnnnnnnnnnnnnnnnnnnnnnnnnnnnnncgggaagtcaagagctacagctgatggtcacggtgttcccagagagtcaggaatatccacggaagctgggcagatgccctctcgctctcccatctcagctctttgactctgagaccatcgtccnnnnnnnnnnnnnnnnnnnnnnnnnnnnnnnnnnnnctgactctgctcccaatccctcgctcctttttcccctatgccctgtgccatccaggagtttcttctatttccaggcctcctggcagaggcaggcgtgcggctgctgtcctaccagacatcnnnnnnnnnnnnnnnggagacctggcacgtcatgggcatctcctccttgctgcccagcctggaagnnnnnnnnnnnnnnntgaccgaggccttccagttccacttctaaccttggggctcactcaccggtccccgcctctggggcttttctgaagaaacctacccactgtgatcaacagggagagaagatccacattcttgggctgaacacaggcctctgacactgcttacactgcactctgaccctgtggtacagcaataactgtc

SEQ ID NO: 14598 - DNA, 734 bp, Macaca Fascicularis
  misc_feature (1)...(734): n = A,T,C or G
aaaaaagcaaagagccattttgtcctgtttcnttggttccatcaatctgtttctaaaacatgcgtatgctgaccctgtctctgtgtgattgggttgggagatgatcagcagataccatagtgaacgaaaaggaaagttcgaagcatgggccccatctttaaagaaagtcattaaaagaaggtaaacttcnnnnnnnnnnnnnnnntctttgaaatgtgctggaagacttaaatttattaatcttaaatcatgtactttttttctgtaatagaactcgaattcttttgcatgatggggtaaagctgagcagagaatcatgggagcaaacctttaccccacctttgacactaccctccaatcttgcaacactatcctgtttctcagaacagtttttaaatgccaatcatagagggtactgtaaagtgtacaagtaactttatatatgtaatgttcacttgagtggaactgctttttacaataaagttaaaattgatcttgtgtttcttcaaccttcaaaactatctcatctgtcagatttttagaacttcacaggttttggcatcttttgtgctgtatcttttaagtgcatgtgaaatttgtaaaatagagnnnnnnnnnnnnnnnnnnnnnnnnnnnnnnnnnnnntttgtaagaaaatatatattgtatttatacatttttactttggatttttgttttgttttgcctttaaaggtctacaacgaagccccact

SEQ ID NO: 14599 - DNA, 378 bp, Macaca Fascicularis
  misc_feature (1)...(378): n = A,T,C or G
caggagcccttcttttctgtggattcatcatcnatgacacacactcactgatgcataaactgtcacctgaagagtatgtattagctgccatcagcctctacttggatatcatcaatctattcctgcacctgttacggtttctggaagcagttaataaaaagtaattaaaagtatctcagctcaactgaagaacaacaacaacaaaaaaattaatgagaaaaaaaagaataaaaaagtgtttttattnnnaaattagccatgcattgctgttggtatgcaattcaaaagtaattttaagagtatatacgattatcagttttcttttgtgtagtgctttgatttaaattttccttgaattattaagtaancnnngatttg

SEQ ID NO: 14600 - DNA, 762 bp, Macaca Fascicularis
ccagaccagactgtcccgacccggagacgcggggccacagcccccagctgaccctaatttattctcagcaccaccccctcccagatcattcgtatctgcttccgaggggcctggactgtagcccccgcccagctggccctctctggccttgggggatcaggagcgaagttgggcgggacttcaaagatccgcctctcttgcccttcccccgcccccagacggtcacaccacccaaactgcaggccctgctctagcaggcaggcaaacctaggcagaagaggattcccagggtcctgggtctgttccctgccccaatgctgcagaacggacttgggagccctcctttgcctgctcccgcgggtcacccagcaagtgctgagaccccattttctgtcgaggcgggccgggtcttcccttagccccagaagcccagcgggcagggttgggctgaatcaaatgggagctctccagacttaaggaggtgagaggctgcaaggagggcgggccgtgaccacccacaccccttctccacagcccggcctgatctggaggacccccggggcactgggcggtgagccacctcctggcaactctcggtgccgtcccctgccctggctcgaggcctccccagcacagctgtggtgtgccgggatcccgagcctcggcctcctgatcttaccacccgcatgatcccttcccgccacacgatgctccgttttgttccgttgtgaatgccgcgtcctgtcctgggacagagaacaa

SEQ ID NO: 14601 - DNA, 668 bp, Macaca Fascicularis
  misc_feature (1)...(668): n = A,T,C or G
tgggcaggataggacnnnccaactccaacagcagtgtnnngcagggcgcaaatcccgcaaaaagaaatccaaggccacacagccgagtcctgaggacagagtggaggtatcgctgcctgctcccgcctcctcttcccctgcactctccagccctggctgcccctcctaggcagctgccttaccctaagagggcggggggaatagtgggccctaaccaacctctaaactgctctctgagcccctcagggacccgtgtctcctccatccaggacccttcgcctccaagcaaggccctttccaggacacgaagggcaaagagagaccttcctgagaggactgcaactcagcggcctgaggggcccagcctccagcaggacccagaagttcccacagtgcccaagaaggggaggagaaaggggcgacaggcggcttctggccaccgcagaccccggaaggtcaaggctgacaccccatccttggacccggaggggacctcagcctcttagcaggagggtctccttgctgcactcaccctttcttgtcttgccctgaatcttggggtctgaattcnnnnnnnnnnnnnnnnnnnnnnnnnnnnnnnnnnnnnnnnnnnnnnnnnnnnnacaactctcatgtttttaattgtaccccaccttccacatctttaa

SEQ ID NO: 14602 - DNA, 837 bp, Macaca Fascicularis
  misc_feature (1)...(837): n = A,T,C or G
tgtgaacacataaatatattttatagaaaaacaaatctacagaaaataaatctactgttctgtgagcagtatgatttgtacatgccattgaaaattattaatcagaagaaaattaagcagggtctttgctatacaaaagtgttttccactaattttgcatgcgtatttataagaaaaatgcgaatttggtggttttattctattggtataaaggcattgatattttagatgcacccacgtttgtaaaaatgtagagcacaatggaattatgctggaagtctcaaataatattttttcctattttatagtcatggaagagataagctaaagagaggaaaataatgagaaatgttggtgtgcttttctaagcatttaaaacgtaattgccaattgaaatcctaaatatgtttacatgccattaagatatgattcttgtaacaatgttaaattgattataatgggattgggtttgttatctgtggtagtatatatatatcctagtgttcctatagtgaaataagtagggtcgagccaaaactttctttgttttgtaccttaaattgtttgattacatcatcaaaagaaatgaaaggtatgtagaatgggttcacctgattacctttttcttttggcttggattaatattcatagtagaactttattaaaacgtgtttgtattgtaggtggtgttcgtattatgcttatgactatgtatggtttgaaaatattttcattatacatgaaattcaactttccaaataaaagttcaacttcatgtaatccaaaaatgtttnnnnnnnnnnnnnnnnagttaagaagaatcagaatttacatatt

SEQ ID NO: 14603 - DNA, 765 bp, Macaca Fascicularis
  misc_feature (1)...(765): n = A,T,C or G
gctngcnnnattgannnnntttcccctgtagtactgactgtggctaaatttgtcaagcacagctgtagtgggaagagttagggccagtgtcttgaaaatcaatcaagtagtgaatgtgatctctttacagagctatagatagaaacagctgtaaaactaaaggaaaaatacaagtgnnnnnnnnnnnnnnntttttttctcggtatgcatctnnnnnnnnnnnnnnnnnnnnnnnattnnnnnnnnnnnnnnnctgtaaatgccccaatccagttcctcttcttcccgggtgtgccaaggaattaatcttggtttcaccacaattaaaattcactcctttccaatcatgtcattnnnnnnnnnnnnnnnnnnagaaatggtcannnnnnnngaattctcttaagaaaccctaagattaaaaaaagactatttggataacttataggaaagcctnnnnnnnnnnnnnnnnnnnnnnnnnnttttcttctttcctttctcttttggacaatagttaaattagcagtattagttatgaatttggttgcagtgttcttatcttgtgggctgatttccaaaaaccacatgctgctgaatttaccagggatcctcatacctcacaatgcaaaccacttactaccaggcctcttcctgtgtccgctggagagcttgagctcacactcaaagatgagaggacctacagagagggctctttggtttgaggacnnntggctcacccttcctgcctcacaccaaccaaattcaaac

SEQ ID NO: 14604 - DNA, 736 bp, Macaca Fascicularis
  misc_feature (1)...(736): n = A,T,C or G
ccatgccaggcatggcntnnncncaaggcacagagacacgggcatccttgactccattgggcgcttctttggcggtgacaggggtgtgcccaagcggggctctggcaaggtgagctctgaggagtagaggagctttagtttaaatggaaaagcaaaggagaaatcagtaggtgaactaagccattagaggaagaactggcacgtagcctcttgctgtctaaggtctcgttccatgctggagaacgcatatgagcccaagagtgtgggcctgagtggctgcttaagacgttttcatttgactcaccccctctcttcctcacaagggatgacggccggggtgtggctcaggaatgtaaggacatgctgaattctggatgtccaagggtgcccggacatgggcatnnnnnnnnnnnnnnnnnnnnnncggggtctctgggggtgtgcgcttgcggacnnnnnnnnnnnnnnnnctctgcggcccacacgctggggttcagcccgggttatgcttgtttttttccaggagtcagtgctgctggcttcatgttgcagcaatcataagattgaggaagacttttgaacaaagtcctcagtttaaatccgccttaagcagactttctctctggtgtgagaagtggaaggggtagagggataaatgagtgtctctgaatcaaagctttattatcttgtgattccattaatttgcatacagagtcttagaggtttctttatttaa

SEQ ID NO: 14605 - DNA, 755 bp, Macaca Fascicularis
  misc_feature (1)...(755): n = A,T,C or G
atgcagactgacctggcagnntctgggctnnnagactgtagcccattgaccccaaagcctcagggcttatgtcgaatggtcccattgggagcaacagtggttgtttatagttttttgtnnnnagaaatgagggcagctgttaattttttcactcatgtgaaacaagatgggaaaaaaaaaatccaaaacagaacaagcccttctatggtatttgctttttatcagaaagaacagcaacatttggcctctccaagttggaaaatagagtccaaatgtaacgttgtggccaagagtattttcaaaaaagtgtaaaggtgtagtttccactgttactgttgagtactgttaagtgctgttaatcttttacatatttgcacttggtacttttgtattgttttaaagagcttgtcctgttaagtcatttctttctttttttgttttttgttttttttttgagatggagtttccctcttattnnnnnnnnnnnnnnnnnnnnnnnnnnnnnnnnnnnnnnnnnnnnnnnnnnnnnnnnnnnnnnnnnnnnnnnnnnnnnnnnnnnnnnnnnnggcaccagccactgtgcccggctagttttttttgtgtgtgtttttttttagtacagatggnnnnnnnnnnnnnnnnnnnngctggtgtcaaactcccgacctcaggtgatccacccannnnnnnnnnnnnnnnnnnnnnnnnnnnnnnnnnnnnnnnncgtgcccagcctaagccaatgctaaaggact

SEQ ID NO: 14606 - DNA, 977 bp, Macaca Fascicularis
  misc_feature (1)...(977): n = A,T,C or G
ggccgaatcaccnatgtcattcccccggaagccatcaacgagctcactgttctggtgctgttaacaccatttacttcaagggcctgtggaagtcaaagtttagccctgagaacacaaggatggaaccgttctacaaggctgatggagagtcgtgttcagcgtctatgatgtaccaggaaggcaagttccgttatcggcgcgtggctgaaggcacccaggtgcttgagttgcccttcaagggtgatgacatcaccatggtgctcatcctgcccaagcctgagaagagcctgaccaaggtggagcaggaactcaccccagaggtgctgcaggagtggctggatgagttggaggagatgatgctggtggttcacatgccccgcttccgcattgaggacggcttcagtttgaaggagcagctgcaagacatgggccttgtcgatctgttcagccctgaaaagtccaaactcccaggtattgttgcagaaggccgggatgacctctatgtctccgatgcattccataaggcatttcttgaggtaaatgaagaaggcagtgaagcagctgcaagtaccgccattgggattgctggccgttcgctaaaccccaacagggtgaccttcaaggccaacaggcctttcctggtttttataagagaagttcctctgaacactattatcttcatgggcagagtagccaacccttgtgtgagctaaactgttcttattctttgtacctcttcctattttggtttgtgaatagaagtaaaaataaatacaactactcccatcttacattataaatggactctgcatcttaaatgaagacaaggaaaggggaaacatgctaatggggcatttggtaaaatgatgccttcannnnnnnnnnnnnnnnnnnnnnnnatctggatcaagaaaatgagggagacagcgatgaaagatggtagacagcnagaaaggaatgggagagtgaattctcag

SEQ ID NO: 14607 - DNA, 735 bp, Macaca Fascicularis
  misc_feature (1)...(735): n = A,T,C or G
ctatggctgccaagaaaaaccggcaatccagtgataaacagaatggccgagtcgccaaggttaaaggtcatcggagccaaaagcacaaggagaggatcaggctactgaggcagaaacgggaggctgctgcaaggaagaaatacaacctgctgcaggacagtagtaccagtgatagtgacctgacttgtgactcaagcacgagctcatcggatgatgatgaagaggtttcagggagcagcaagacaatcactgcagagataccagatggacctccagttgtagctcattatgatatgtctgacaccaactctgagccagaagtggtaaatgtggacaatttattggcggctgcagtagttcaagagcacaataattctgtaggcggccaggacacaggagctacctggaggaccaccgggcttctagaggagctgaatgcagaggcaggtcatttggatccaggattcctagcaagtgacaaannnnnnnnnnnnnnnnnnccactcaatgaagaaattaacattgcctcttcagatagtgaagtagagattgtgggagttcaggaacatgcaaggtgtgttcatcctcgaggtggtgtaattcagagtgtttcttcatggaagcatggctcgggcnnnnnnnnnnnnnnnnnnnnnnnnnnnnnnnnnnggactgctgtgactccccagcagacttgggcttcaccagcagaagttgttgaccttaccttgatga

SEQ ID NO: 14608 - DNA, 754 bp, Macaca Fascicularis
  misc_feature (1)...(754): n = A,T,C or G
acaagctcacgctgtgcatgtgnccagagcgcnnnnncnccgcnnnnngccagcgagatcactggnnngagcagcgagggcctggcgcggtgccggaaggctggctttgatggtgccgtggtgcggatgctacaggcgttcctgagccgccaggcagggcccatctgccttgtggcccacaatggctttgattatgatttccccctgctgtgtgccgagctgcggcgcctgggtgcccgcctacctcgggacactgtctgtctggacacactgccggccctgcggggcctcgaccgcgcccacagccacggcacccgggcccgaggccgccagggttacagccttggcagcctcttccaccgatacttccaggcagagccaagcgcggcccactcagcggagggcgatgtgcacactctgctcctgatcttcctgcaccgcgccgcagagctgctcgcctgggcagatgagcaggcccgcgggtgggcccacatcgagcccatgtacttgccgcccgatgaccccagcctggagtcctgagcaccagggccacctcctgtgccacaggcagcgccagtctccaccgttcagccggcctctaccaaccccggctccccatatctgggcagcctcaggtccatgcacctgccaggccttccctggctgcctgaccagccacagagccctggattcctctccagtccccgcttccagggccgtgctctcccagccagcctnnngcccagcagagttg

SEQ ID NO: 14609 - DNA, 738 bp, Macaca Fascicularis
  misc_feature (1)...(738): n = A,T,C or G
gaaagccaaccagtcctcataatggacaagatccaccagctcctcctgtggactaactttgtgatatgggaagtgaaaatagttaacaccttgcacgaccaaacgaacgaagatgaccagagtactcttaaccccattagannnnnnnnnnnnnnnnnnnnnnnnnnnnnnnnnnnnnnnnnnnnnnnnnnnnnnnnnnnatttcacttgcnnnnnnnnnnnnnnnnnnnnnnnnnnnnnnnnncctatttacagtatatttgagtgaatgattatatttttaaaaagttacatggggcttttttggttgtcctaaacttacaaacattccactcattctgtttgtaactgtgattataatgtttgtgataatttctggcctgattgaaggaaatttgagaggtctgcatttatatattttaaatagatttgatagctttttaaattgctttttttcatgaggtatttataaagttatttgaggttgtctgggattgtatgaaagaaaattannnnnnnnnnnnnnnnacatttaccttggtagttaatttgtggatggcagttttctgtagttttggggactgtggtagctcttggattgttttgcnnnnnnnnnnnnnnnnnnnnnnnnnnnnnnnnnnnnnnnnnnnnnnntagaataggaagagagaaaaaaatgaaatggttgtttactaattttatactctcattaaaaatctctaatgttaagaaaaccta

SEQ ID NO: 14610 - DNA, 664 bp, Macaca Fascicularis
  misc_feature (1)...(664): n = A,T,C or G
atgcaagggagaccnnnnncgagaacagccagtaggtnnngctnnnngcgcagtaaccccaccactcctgaagcctggccagtctccttccttccctgcttggtgaatcgcgcatccccgtggttatcccgctgtctcctctccaagaacaagcagagcccgggccgctggcccttgcccaaggcagggaagaaggatgtgtgtgtccaggaaggaaaaaaaggtgaatcagtgattttacttgaaaacaagctccatcccttttctatatttataagaagagaagatcttgagtgaagcagcacgcgacccaggtgtgtgtgaattgaatggagacgtttctctttttttaatttttgtttttgttctttttttctttaaggaaagttttattttactgttcattttactttcttggtaacaaaaactaaaataaggaatagaaaagctgtttttcaggctgacagtccatttaagggtagccgagaccttgcatggtagagtaggaatcatagtgtcagtgaggtcccgtgagtctttgtgagtccttgtgtcatcgttcgggcactgtttttttatgcaagggcaaaaatctttgtatctggggaaaaaaaaacaacttttttttaaattaaaaggaaaataaaagatattgaggtcttcc

SEQ ID NO: 14611 - DNA, 767 bp, Macaca Fascicularis
  misc_feature (1)...(767): n = A,T,C or G
gatccacatgaaatgaagatcagctctgcctanctgcaggacattgagaatgcctataagaagaccttcctccctgagatgagtcaaaaatgtgagattttacagtattcnnnnnnnnnnnnnnnnnnnnnnacaagggtggtagaggacattgaataccttaagttcgagaaagggccgtggctccagcaggannnnnnnnnnnnnnnnnnnnnnnnnnnnnnnnnnnnngataagtttgagnnnnnnnnntacacaagcattcctgtctannnnnnnnnnnnnnnnnnnnnnnnnnnnnnnnnnnnnnnnnnnnnnnnnnnnnnnnnagcgctgccaggccgcaagtacagccctgggtacaacaccgaggtgggagacaagtggatctggctgaagtgaatgggccgccttctgctccagctgcgtcacagcgacagcgacggccaagctgcaccagccgcactctcctggacgccatatggctttaagatcgggggagggtaaataatgcgaaaattgcacagtggaagaagtggtctcacaaaaagccatccatcctgtagtgtaggtaatggagtcgggggagcagcgtccattctggatgtttggaaccctctggctttgttttggaatggcccaccactctcactggaaaacagnnnnnnnnnnnnnnnggccggctctcggcggcccctgtggtttcagtactgcccctctgtgccattnnggttgtgtacgttgttttcttccgactccagaaaaaa

SEQ ID NO: 14612 - DNA, 771 bp, Macaca Fascicularis
  misc_feature (1)...(771): n = A,T,C or G
cagcttgactgttggcatagccanntgtatgtagtgtagcgacttnnngctatgcaggaatccctcccatgaagtgtatgttttacatgatgtgtgcctcttcacacagtaaatagtttcttgttaatgtatgtttgaggggtttgannnnnnnnnncatttacccataaagttattcaagttgtaaaaggttatacaataatttaacaactacctttttttattnnnnnnnnnnnnnnnnntcactttatgtaaatannnnnnnnnnnnnnnnnnnnnnnnnnnnnnnnnnnnnnnnnnnnnnnnnnttcactagggannnnnnnnnnnnnnnnnnnnnnnnnnnnnnccttcatactttatcaagggnnnnnnnnnnnnnnnnnnnnnnnnnnnnnnnnnnnnnnnnnttcctctcctctaatctgtgtacacatctccaagaaaggaagaaaaaacaaactctgctcagacgcctatgaaacacctgaatgaannnnnnnnnnnnnnnnnnnnnnnnnnnnnnnnnnnnaagtagaactgctcttggacttgttttcctgttgtttgtggaacctacatgtttgaatnnnnnnnnnnnnnnnnnttttaaagttattttttaagatttcttggcatttatcctagttgtccgnnnnnnnnnnnnnnnnnnnaaagtaatagacttttaatctttatgtattttttgttttctctggagtacttggacagatgttatagtggtttcttttaggaaaatctgtcataaaa

SEQ ID NO: 14613 - DNA, 729 bp, Macaca Fascicularis
ccccaagatctacatccaccgagttggccggacggcccgtgcagggcggcagggtcaggccatcacgctggtgacacagtacgacatccacctggtgcacgccattgaggagcagatcaagaagaagctagaggaattatccgtggaagaggccgaggtgctgcagatcctcacgcaggtcaacgtggtgcgaagagagtgtgagatcaaactggaggcggcccactttgatgaaaaaaaggagatcaacaaacggaagcagctgatcctggaggggaaggatcctgacctggaggccaagcgcaaggccgagctggccaagatcaagcagaagaaccggcgtttcaaggagaaggtggaggagacgctgaagcgacagaaggccggcagggttggccacaaggggcatccacccagggccccacctgggtcccactcaggcccagtcccctcccagggccctgcctgagccccacacagccatctgcccggtcctggactcttctatggagctgagggtcggaggaaacttccttggggcctacccagtgccccgcagtggaacccgtgggcgctcgtgttgtgcgggccctgctcctctgccccaaaaccactggctggccccctccctgagccttggccaagattcaggctgcagaggaagaaagaacatggcggaggttgtgaccccgacccaaggtcaccccttaggggtgccgcatacaggag

SEQ ID NO: 14614 - DNA, 740 bp, Macaca Fascicularis
  misc_feature (1)...(740): n = A,T,C or G
gaaacagggaattagaaaacttaaagtgctccatacttgcttgcagtgcctatgtggctctggctttgggtgataaccttatggcnnngaatcatgcagataaacnnnnnnnnnnnnnnnagctgtcaggatctcttaagtttttgggacatttatatgctgcagaagccctcatctctctcgacagaatatctgatgccattactcacttgaacccggagaatgtcactgatgtctnnttagggatctcttcaaatgagcaggaccaaggatcagacaaaggtgaaaatgaagcaatggaatcctctgggaagcgggcccctcagtgctaccccagttccgtcaactctgccaggactgtgatgctgttcaaccttggcagtgcttactgcctgaggagcgaatatgacaaagcccgaaagtgtctccaccaggcggcttcaatgatccatcctaaagaggtgccccctgaggccatcttgctggcagtctaccttgagctgcagaatggtaatactcagctggccttacagatcatcaaaaggaatcagctgctccctgcagtgaaaacacactctgaagtgagaaagaagccagtgtttcagcctgtccacccgatccagcccatccaaatgccggctttcaccactgtgcagagaaagtgatacttcgcttttggaaaactgttacctgagacccaggggagtatttactggccattttacttgtatcacagcaga

SEQ ID NO: 14615 - DNA, 740 bp, Macaca Fascicularis
  misc_feature (1)...(740): n = A,T,C or G
gaaatggtgccagaganncagctacattcaaatgtaaacccattcattcatttagcaagttacttattagtgccagtgctgtgtcaggttctatgttaggtaccagggtacagtgatgagcaaaaccagtccctgcccttctggaacagagaagattggaagaggatggggggtagccattaatcaaacagtcacagaaatgagtgtaaaatgtagctggagtaagggcttccatggtgaggtacttggtgcagggatctctggatctgaccaaatcggaaggtcaggaaaggcttccaggaggaagcgacactgtgctcagagctcagggatggaagaaggacgctctctctgggcagagaggaaggagagaaggttggtgggaaggagggcaggggccagatgctgtgggtgtgatttggatctgtgtccccgcccaaatcacatgttgaattgtaatccccagtgttggaggtggagcctagtgggaggtgattggatcatggggggtagtttttcatgaacggtttagcaccaaccccttggtgctgttctggtgagannnnnnnnnnnnnnnnnnnnnnnnnnnnnntaaaggtgtgtagacccttcccccttgcttctgctcctccaatgtaagacaccttgctttccctttgttttccaccatgactggaagcttcctgaggcctcaccggaagcagatgccagcatcatgcttcctgtacagcctgcagaac

SEQ ID NO: 14616 - DNA, 731 bp, Macaca Fascicularis
  misc_feature (1)...(731): n = A,T,C or G
aggggagaaagaacgtgaaatggtttgtgtattattgaannttaagcaatattttagaagctgtgtgactgctttaataactttttcccagtgttatttgaatcatactaccagttatactaaagctaaatgacaattgtgtgaaagttactgccttcataagatcaagtcaccactgttacacagctgacatatagtgtattacctttgcagctagtaaactataaagtttagatattgaatctcgttacagggttatttatataatgtgacattattcagtactgacagactacgtgaagtagttttaaaatctagtgccatttttattttaaaggttagcaatgaggaggaaatgtgatctggctgtgtttgtcttctgtacaaagcctgaagtgcttatggttttttggctaacagccacagagggcaaagtttaagactatcttgtaaggactaactgttcttttcaagctactgtttgtttttctaaaagcaggatttgcttccgtaggaggcaagttccttgacgtggaatagtgcaacctgtatatgggttattataataggaaagacatttgtacttgcacagtttaaatcattcttaaattttgaacatgtgaattgtcccaaaaaatctttaattttttggtaatttttactctctttgtgcacatgttgatttcttaatggtaaatccttcatttaaagatagtgttctctgttgagaa

SEQ ID NO: 14617 - DNA, 673 bp, Macaca Fascicularis
cacccccagtcaggtcactgtggggacagacgaccaggcaacttctgcctcggggaggccttggctcagaaatgggagagggccaggaggtggcagagtgtgggctggaagggacggtctgtggggttcctgccctcacggttctccatgttctgtcttccttgggcagagaaaccccgacgcccctgcctgcctggccctacagcaccagctgggcccagagagcaccaggaaagtggctgcctggtccgagcgcccccttgtggctattgtccagatgattgtcacatgtgctatgagacagaaacgggtgtgcttggtggagagtgggggaaggggtctcccagggctcccactccagtgcctgagctggccctgcacccctgtgggcccagtaaccaccctctcgaagcctctcccatctgcaaacctgcctgcccaagggctcacccaggaatggcctggatccttagagaatctccctccctatggccctgccctcctgtgcctgggccacagggagtgagatgagaggggtcaagtcggccaagttaccacggagagtgagatggggtggggaggagtgagcccctcaaaacacctggagactgttccgctgaaggatctaagatagatcccctcattttttcaaacagaaccccattcctcccct

SEQ ID NO: 14618 - DNA, 235 bp, Macaca Fascicularis
atggtgaagacaccaaacacttttgctgtgtgcacaaagcaccgtggggtccttttgcaggccatgaatgacaaagacatgaacgactggttgtatgccttcaacccgtttctcgatggcacaatgcggtcaaagctttcccgcagatgcccgagccagccgaaataaaaagtgactctgccgagtgccctcactcacctttgtgagataaaacgttacctctcatttctctttg

SEQ ID NO: 14619 - DNA, 717 bp, Macaca Fascicularis
  misc_feature (1)...(717): n = A,T,C or G
gcaggctctnnnnnnnnntgcctggaaaaagccatnnnatannnnntaaaatttaacaactgaatgtcatccttnnnnnnnnnnnnnnntcttagctccttcttctctactctcttcccattacctggaccacccctcatnnnnnnnnnnnnnnnnnnnnnnnnnnnnnnnnnnnnnnnnnnnnnnnnnnnnnnnnnnttctaaggaatcatagtagacttgggccagaaaaaacagacctcacctgaaaatgctcattttgannnnnnnnnnnnnnnnnnnnnnnnncatggtgggtcagctatttcttttttaaaaacagaaaaacaatttttaaatggattttagagccctaatataaacaaatgtaggtacattccatattggacaaaacttatactttgagtttcatatgaaattgaaaaattgtatttttttcacaatgtttcatttttacacatctctgtgtctctatataagtaatatttacaaccctgaataaataagcaatagataatggcaagttaaatcnnnnnnnnnnnnnnaaaagactgtttttcaatatcacccttagctactattgtatataatttagtttcatttttttcnnnnnnnnnnnnnnnnnnnnnnnnnnnnnnnnnnnnnnnnnnnnnnnctttgtttctgtgatgtaccaactttacagttggttgccatttgaaccttttaaaaaaaaaa

SEQ ID NO: 14620 - DNA, 770 bp, Macaca Fascicularis
  misc_feature (1)...(770): n = A,T,C or G
gnnnnnnnnnnnnnnnnnnnnnnnngagccaactagaggcagggtcatcctggccctggtcctcccctttcatccctatgtggaaaacgtaggtggcaagnnnnnnnnnnnnnnnnnnnnnnnnnnnnnnnagggacagaactgggaagaacaagtgaatnnnnnnnnnnnnnnnnnnngaannnnnnnnnnnnnnnnnnaagctttcaccagactgccatacctgtgtgaaggtgacatgtataatgactactacgttctggatgacgctgtctttgttctcaaaccagtataaacacgtggaggtcaaagtcttcagagtccacatcctctgggatgtgcccttggaagagggtctgtgttcacaattatgtgaagggaggacccttggggaccgccattctaaatatcatgtaggaatttaaaaagccaaaatactaattatttctttgtagtgtgtaaaggaatgtttttaaaagacaaaaacccaactctttgtgaatttttatcaactctttactcagagccactctccaacgcaggtcacactccaattatgatggaagatattttttatactnnaattnnnnnnnnnnncattcccagacaaagcaatagtcatgacttcatggaaccaatcaatggattgttttttgaagactggcaataaagctgtccatccaattccaaatactggttttaaggtatagccgnnnnnnnnnnnnnntgtttagaattctttctgttattattcaagaaaatgtttttaa

SEQ ID NO: 14621 - DNA, 725 bp, Macaca Fascicularis
  misc_feature (1)...(725): n = A,T,C or G
agtagtgtttttcaaactctgtgagccacagggtaagtctcttgacatggcatttagcaaacaatgaattccttccctatagtttaaaaggaagtatcttcattcataagaaagcatggggaatacggcttacatgcccaaacattgtaaccatagcaggaattgccaactaggcaatgtacatccacggtttctcttagagtgaaaaatacttttttttcactcctaagagaaaaatactctaaatatgagaaaagtgcattctattctacttctcaacaagaatatttataatttattataatttattcctgtcatttttcctcatgaaatgtgtttagatgtgcttggctgatgtttgttataaagctcgcttggcactgggactctgagctgtacatgcatatgttgtttacagaatccaaaggcctggaacacgatggtactcaaaaatannnnnnnnnnnnnnnnnnnnnccagtgatcgaacaattaaannnnnnnnnnnnnnnatctggaacgtggaaccttcagatctaaagatttcactatccaatgaatctaacaaagtcaatggaaattgaattctaaaatgtctctagaaaacatagcttcttactgaacttgaacatttttacaacattcactggtttttgttttgttagctaataatctataatagttgagtatctctgggaatggggagggaaattatatgtaatagag

SEQ ID NO: 14622 - DNA, 702 bp, Macaca Fascicularis
  misc_feature (1)...(702): n = A,T,C or G
gctggaccgggcccgggtccagcgacaccttgagctcctcctgcgggatctggaaaganancngggtgctacccttnnnnnnnnnnnnnnnnnnnnnnnnnnnnnngtggagggcgaggtgaggggcctcctagagcagctgggaggctctggaagctgagacactggcggcaggcacctaactatgtgaccactggccctaaacctcttccctctgtggcctcctggcttgcactgctccccctagaaagattccttcaggtctgggggcaaaggaatgggcacagctgtgccagttgccctcctagggcatgttcgatcaggaccgagtctggaatctccaagttaaagatggtgaatcaatgcttcgggcttggagatggaacatgcctcctctccattcatcaagaaggaccaaagcatgtggcatttggatggccagagtgccctgaagcaccaccaccaaccttgcctccccctcctctcaaggagcctctgattgnnnnnnnnaggggctcacatcttatgtctgccatnnnnnnnnnnnnnnnnnnnnnnnnnnnnnnnnncttcccctcatgacttatgctcacctgtggacactgagggtgccctcgcattggtgctttctcctcatcctcatgcccccttnnnnnnnnnnnnnnnatggcttggtggccccgcgaggcagatgcacctgac

SEQ ID NO: 14623 - DNA, 725 bp, Macaca Fascicularis
  misc_feature (1)...(725): n = A,T,C or G
tggactgcagnntnttccaggccnnnntggtgcagtgggacagccaggtgccaagggcgnnnnnnnnnnnnnnnnctcccgtgggctaacaggacttccagggagccccgggagtccaggagccgcaggcctgaaaggaagcaaaggggacacaggacttcaaggacagcaaggagtaaaaggagaaccaggagttccaggccctgcaggtgtgaagggagaacaggggagcccggggctggcaggctccaagggagcccctggacgagctggccagaagggagaccagggagtaaaaggatcttctggggagagaggagtaaagggagaaaaaggtgaaacaggtgaaaacgcagtgtccgtcaggattgttggcagtagtaaccgaggccgggctgaagtttactacggtggtacctgggggaccatttgnnnnnnnnaatggcataattctgatgccaccgtcttctgccgcatgctgggttactccagaggaagggccctgtacaaagtgggagctggcactggnnnnnnnnnnnnnnnnnnnnnnnnnnnnnggggcacggagagtaccctgtggagctgcagcaagaatagttggggctctcacgactgcagccacgaggaggacgcaggcgtggagtgnnnnnnnnnnnnnnnaaaccctttcactgctctgctcctgagtgtcctcgggctcacacatgggaaggcagaagatctct

SEQ ID NO: 14624 - DNA, 716 bp, Macaca Fascicularis
  misc_feature (1)...(716): n = A,T,C or G
tcagtattagttgttcagtaaactacttatactgtttatgattcagataaaaatagttgctgagtaaattttactgtaatctacaattggctttttaaaaataacctgttgatatataattgtcagtcnnnnnnnnnnnnnnnnnnngctggaattgtaccaattttggttttatttaaagctcagtttccttttcgttttattgtatgcgttgggtttgcagcatgaacttgcacannnnnnnnnnnnnnnnnnnnnnnnnnnnnnnnnnnnnnnnnnnnnnnnnnnnnnnnnnnnnnnnnnnnnnnnnnnnnnnnnnnnnnnnnnnnnnnnnnnnnnnnngaataaaaaatgatttgttatctgaagagaataaattttaaattctcagtttatgtctcagatgctaacgtgtgaaaatataaatatatataatatataaagtaaccaatcttcctgtattttatgtgcatcttagtgatttatctgagtttagtgacccccatctnnnnnnnnnnnnnnnnnnngaatgtaaaaaatagttgtggcattttaaaaggtcgcctttgatgcagatgcatctttttcttgcttctaaaacatatttcatgtaaacattgtacatttattattgtaatatatactattatgcaacttattttacctgaaactgttaagccgaccannnnnnnnnnntgcaagacagatgggaatgt

SEQ ID NO: 14625 - DNA, 848 bp, Macaca Fascicularis
  misc_feature (1)...(848): n = A,T,C or G
gctgtgaagacactgannnacaacaagcccaacatggtcgacctcctggatcagtacaagttctgctacgaggtggccctggaatacttgannnnnnnnnnnnnnngtaaacagctctgcaaacaatccctttcataccacaaagccaagacgttccgtggtatttgtgcagaagagatgaagacttctcaatatgcttattttgctttgcataattggctctttttaagagcccaagaaagtgtttctgaaactgcttgcactgcccaatcccagtaatgctgctgcctgacagaaacacacacacagccacagtcgccaaatcccgtactccttgccaccggcttcctagagcagcgtagacatctggtaaactgaagagcacaactatattcttatgaaggaatttgtacctttggggtattattttgtggcccgtgacccttgttattgttacagctgagtgtgtttttgttctgtggagaatgctgtctggcattatgataatatattattttaggtaatatttgtactttaacatgttgcataatatatgcttatgtagctttccaggactaacagataaatgtgtaatgaacaaagacatgttgtatgagtcgtcgtttctatcagatttgtattgtnnnnnnnnnnnnnnnttgggggaggactcagttcacaaaatgcaaaactcgacgatcggattcacggacctagagcttttccatgtgtttatattgtaaatatttttgatttcatcaaattatttattcattaaaagaaatttttgtgaagcaaaaaaaaaaaaaaaaaaaaaaaaaaaaaaaaggnnnnnnnnnnnnnnatga

SEQ ID NO: 14626 - DNA, 776 bp, Macaca Fascicularis
  misc_feature (1)...(776): n = A,T,C or G
catttagaatttanttnnnngattcagtttttgnnnnnnnnnnnnnnntctgatgaacactaaatattaatttcagttagctagattgtacatacttgcagatttaacaaaattttagggaaattgaaaaagacatgtagaatttgttgtcttctgctaagcacgaaaagttaagatatctgcttacagtgattttgtagacacattaaggcaagatttggaatttaagtcattggcaggtatctgtgcattcatagaacttctaaaggtcccaggatcacttttaagggatttttattagtttaaagataaataaagtcagctgaatctacatgtctcttgttttatttctctctaaacttgaaaacagtaaatctgcagatactgtgaggcacaaattatactgtcaacctactgttgctatggttatatactcccacttcatacattaccaagagnnnnnnnnnnnnnnnnnntttttaatttctatagttaagatttactgcataatatagaatataaagttaagttaacatactaacatttctcctttggaggaagttttaatctacttcaggatgcatattattatcaagatactttcatatacaggatagcctaattttatttgtttaaatatgcttaatatgccccagattgcaaatgcatccagtcagtaatatcactgtctgtatgtggaggacatgttcccatggatcatatgtgaagatgtcaataagcttgcattaagccacctgcttgtaagtggatgataa

SEQ ID NO: 14627 - DNA, 737 bp, Macaca Fascicularis
  misc_feature (1)...(737): n = A,T,C or G
cagccctggggagatggaagagtctcatcaggggcacacaggtgcacttgcaacctgtgcgggtcatgaggacaaggcaggctgcccacctcgcccgcaccctcccccggcccctcctgctcggtctcggccctatgcgtgctctgtctgtggaaagaggttttcactcaagcatcaaatggagacgcactaccgagtccacacaggagagaagcccttctcctgtagcctttgtcctcagcgctcccgggacttctcggccatgaccaagcatctgcggactcacggggccgctccgtaccgctgccccctgtgcggggccggctgtcccagcgtggcctccatgcaggcgcacatgcgcggtcactcgcccagccaactcccgccaggatggaccatccgctccaccttcctctactcctcctcgaggccgtctcggccctcgacctctccctgttgtccttcttcctccaccacctgacggggtgtcggtagcgtcttagtcaagagtccaattaaagaacgaaaagcgggccggctaggcttcttacctggcaccgctgctacggcggcctagcaaattccgccccagaaagggcaccnnnnnnnnnnnnnnnnnnnnnnnngggtcgcagaagcccaggccagcgagccctacagggtgaggacactgaagtgtgcagaagcgaaggttaacagtagtggggggggattgtcgatctcatcaccataataaa

SEQ ID NO: 14628 - DNA, 744 bp, Macaca Fascicularis
  misc_feature (1)...(744): n = A,T,C or G
gattttttttttnnnccagaaaaaaatggcagcagagctgcaactccagtttgtggacgnnnnnnnnnnnnnnnnnnnnnnnnnnnnnnaagccctcagcacggtgacccgggagaagctggagctgagcagggccgtgtctaagcttgagaagatgctgaagcaccatctgcagaaaggctgcagcccgagcgtaggtgtctgtgcttaactctcacctgcctcaccctaacccgccatggtccagagcagctccaccccacaagaggccaggctccgtttagggatctggggatgtgggcgtcagcttctccctcaccgccgggctccgttgcctctgtctgaagccttgctaaatgttgtgggatgtttgaccatctcagccgacttccagcttcaccacagacagcgtcctcactgaccctgaccactactggatgtttggtgcatgttcataaaagagtattttgactaaaaatattataatctgattgaatttagagttttatttaaagtgacttataatttttttttttttttgagacggagtcttgctctgttgtcaggctagagtgcagtggcgtgatcttggctcactgcaacctccgcctcccaggttcaggcaattctcctgcgtcagcctccctagtagctgnnnttacaagtgcctgccaccacacatggctaatttttatatttttagtnnnnntggggttttgccatgttgnnnnngctggtctcaaa

SEQ ID NO: 14629 - DNA, 704 bp, Macaca Fascicularis
caggtagaaagatatttctccaattgggactccccagcaggaatacttagggataaggaagaatgctagcatctctgtctctcaaatatagggaggattagaagagtgttcttctgataaagctaaaattctggaccactaaagctaaaagccctattgcaagtatgaaattaagtacttgagctataggacaaaccttgggcatttaaccatttactgtctggctttgcctttaaaataggattgcaattaaaatgtgattcgcttaggtaatcccaagaactaaaaaataacaaaggtgcgtaatatatttatctactttttaggtgctctgagttgaggcaaagtagagtggcaacattaagtgctatgctagtcacttagctgacataatcagcttggttaagcagcttatgaaaccatataaagaattcttttgaggatggaattctgtccacaaaataattttgtgagcccagatgtcattaggatcacacagagttaagtgtagcaaaaggaaaccatcgttgtattctttcatgatttttcttttattataaacaagagattattctttagttctcagaggtagggacaaaccatatcaggttttcagaaggaaaaaacattttaaaacccaccatcacttgagagaatcgcttgaacccaggaggcagaggttgcagtgagccgagatcacatca

SEQ ID NO: 14630 - DNA, 743 bp, Macaca Fascicularis
  misc_feature (1)...(743): n = A,T,C or G
gatgatcccagcagggatctatgcacccatctgtgtgactgtgtggtaccctctgtggggaggcattatgcctgaacgtgagaaaaggaagatgaaaaatagtcatcatcacttcctgtannagccagtgttttaatggagtgcctgtgccgttcaggtcaagtatttctttctgcatcaattcactcttcagaggtcatcagagtcatttatgtcactgtgaacccccaaagggcagttccacaagttaaaaacaaagaaaaactaaaaataaaacttttaaattcatggtaatgagtattaattgatgaggaaataggaattctgtctctttggtcttattatattccnaagtcacaanatccccagatgattgagtaaaannnnnnnnnnnnnnnnnnnnnagcctgaataaaggagaaatatgacggccgaaaaatgaataaaagtgacaaaaatgggtggatggttgtgtgaannnnnnnnnnnnnnnnggcttctttctgaccagtnnnnnnnnnnnnnnnnngatctccctctctcctctttctcctgccttgcccacccctctccacctcccccacctctcttttttacagtatattatttccggatcactcctggcagcaacggagaaaaactccaggaagtgtttggtcaaaggaaaaatgataatgaattcattgagcctctttgctgccatttctggaatgattctttcaatcatggacatactaatataa

SEQ ID NO: 14631 - DNA, 527 bp, Macaca Fascicularis
gaaaatggaaagaacaagtgaaaattgctgaaaatgtaaaattgaactagttgaagtacaggacaattataaacttcaattggcagagaaagacaaagaaataagtggtctgacttcacatttggaaaacctctccagggagaaggaacttaaaaggagtctagaaaatcaagcagaaaggaaaatggaagatggagcagatggtgctttttacccagatgaaatacaaaggccacctgtgagagtccctgcttggggactagaagacaatgttgtctgcagccagcctgctcgaaaccttagtcgacctgatggcttagaggaccctgaggatagcaaagaagatgagaatgtgcctactgctcctgatcctccaagtcaacacttacgtgggcatgggacaggcttttgctttgattccagctttgatgttcacaagaagtgtcccctctgtgagttaatgtttcctcccaacatacgatcagagcaaatttgaagaacatgttgaaagtcactggaaggtgtgc

SEQ ID NO: 14632 - DNA, 853 bp, Macaca Fascicularis
  misc_feature (1)...(853): n = A,T,C or G
aaataatggaaaggatggttaacccttttatnnnngaannnnnnnnnnnnnnnnnntccagatgctgttctctatttttatgttattggaccaatgttctgtataataattaagatgtaaccatttaatagtctgtaacaatcaacctcagtattgtcactacaatattacattctgcaaatgttattcnnnnnnnnnnnnnnncaaattttagtgaggtatctccaaggcacatagtagaaaacaaannnnnnnnnnnnnnnnnnnnnnnnnnnnnnnnnnnnngaaatgatttaatctttatagaacgagacccttttttggactagcttttttattaaaatggctcaatttgtgttgataaggattgcagtcatgtttaatagcgcttgcttttcctctgggcacaccattttgnnnnnnnnnnnnnnnacctctactcttagcaaactctagtttatgacaagtatttaaaatatttaaaacaagcttataagttcttaaggagcaaagtaaatgagaagtaacttaaaaatagtattggaaaaatgttgatatttaacattagtggatttagactagacatggcatagtaggctctgaaacctcttgtcaagtatacataagtgttttgtgcatgaatttttaccagaaagctgtctttctctgaaaaacacaacattcttagaatgaaaagaacagttataaaataattatcttatatgtgcttttcattatttttagtgtcacggcttcaaaaatgaaacattttaattgccctaaagaaactgtatttttgttttgttttttaatatagcactttaaatccggtttgtgttttgtcaacttgagc

SEQ ID NO: 14633 - DNA, 772 bp, Macaca Fascicularis
  misc_feature (1)...(772): n = A,T,C or G
gcagggacccttgcctacnnnnanannngtgacttcctccgcngagccacagtccatagaatcctcggccagcaggtcccctatgccaccaaaggcaaccagtgggtaggatacgacgaccaggaaagcgtcaaaagcaaggtgcagtacctgaaggacaggcagctggcaggcgccatggtatgggccctggacctggatgacttccagggctccttctgnnnnnnnnnnntgcgcttccctcttaccaatgccatcaaggatgctctcgccgcaacttagccctctgttcttctgcacacagcacgggggccaaggatgccccatccccctctggctccagctggcnnnnnnnnnnnnnnnnnnnnctgctgagtcccaggttgagcctcagtctccctgccttggagcctatgcagagggccacaannnnnnnnnnnnnnntcagccctggtgggcagggaggtagggatggggctgcggggatagtgaggcatcacaatgtaagactcaggattagnnnnnnnnnnnnnnnnnnnnnnaatatttacagatccccaagcctggcaagggaatttcttaaactccctgccccccagttcttatcaaaggacaccannnnnnnnnnnnnnnnnnnnnnnnngccaaacatcctacaagacannnnnnnnnnnnnnnntataccctctgcaaagcccagtttgaaatcttcacttaggaacgtaatcgtgtcccctatcctacttccccttcctaatccacagctgctcaa

SEQ ID NO: 14634 - DNA, 729 bp, Macaca Fascicularis
ccatcacactgaagaagcctcctggagctcagttgggatttaacatccgaggaggaaaggcctcccagctaggcatcttcatctccaaggtaattcctgactctgatgcacatagagcaggacttcaggaaggggaccaagttctagctgtgaatgatgtggatttccaagatattgagcacagcaaggctgttgagatcctgaagacagctcgtgaaatcagcatgcgtgtccgcttctttccctataattaccatcgccaaaaagagaggactgtgcactagaaagttgcagcccacagcccttcatgtggactctgccatgacatgctaactagactttaggagagccacttctattttcagcccctccctggaatagtgagttgggaggatggggagacagctaaccaactgaattacccaaaatgtattgcacttttagttccctagttttctaggtgagcttcattccctgaaaggaggatgatatctaggcataacctagcctgtgaggaacctagttaggaaagacagctgacatttattgaataccatgtactagtcccttacatatgtcatattttaattatagaaatcagtagcaaaaagaatcttggattttccatctgacttctctgaccatcttatcccatccttgtactaccagaggattcatacacttttgagactccaaagagaccctgatttcaccccttcctcctcctag

SEQ ID NO: 14635 - DNA, 631 bp, Macaca Fascicularis
aagtagcagcggagagagctgcctctggattctctcaatgactgggaatcatatgggaacatttgtttcttctcaaaataaggcaaatgttacattgaatgattttgggggtgaggtttaattcgaaatggtctgtggggactggaaaacgatgtttttgcagattacctcagggaagggaggtttgttgagtttacagacacattaaaccaaaggccgtgggaaaacccctctccagctccaggggattgaagtcaggatcacccacttaccagtgccttccttcttaacattcacttttagcagcttgtgtttacatgggcagttttgatgggaaattgccatgaccacagcggttgggagctctgttttttttttttttttttttttttctcatccttttagtggggactgggggactcctcccaagatcacattttagcatctttctttcctactccatttagaaaaacaaagggtgcaacgtggtctcagtgtccacatggtaattccgctactggctccttcctgatgattatgaaatacactagctgaacgagctctggctggtcctttctatcctggatgtggctcttctgtgtagcaattgccttgatgtcgcagtttggaa

SEQ ID NO: 14636 - DNA, 671 bp, Macaca Fascicularis
  misc_feature (1)...(671): n = A,T,C or G
ctgcctttgtattaaacctattggtttatcataggtcatattttctcagaaaaaaaaactttactgcaccctactgagagaatgagatgaaaaatggttaatgtttcattattattattgtgaaaatagtgttaacactggggactccttaagagtatatcagagttcgtgctaggaatcccaagaccgcatttggaaactagaatagtggatcnnnnnnnnnnnnnnntgtgctggttaattttagatgtcaacttgactggattatggaatacctagacaactggtacaacattatttctggatgtgtctgtgagtgtgtttccagaagagactggcatgtgagtcagtgggaaattctcccgtccaattggctgggggcccaatagaaccaaaaggcagaggaaagacaaattcttctctcctctggagctgagacactcttcttcttctgcccttggacatcagaactcctagctcttcagcctttgaacttcaggacttgtaccaggaggccctgggttctcaggcctttggctttggactgagagttacacaaccagcttccctggttctgaggctttcggacttcaaatgagccgtgctaccagcatcccagggtctccagcctacagacgggctattgtgtgatttcttagcctctatattca

SEQ ID NO: 14637 - DNA, 722 bp, Macaca Fascicularis
  misc_feature (1)...(722): n = A,T,C or G
ggggtggnnnnnnnnnnngnnnnnnnnnnnnnnntggctcagggcccagcttatgctaacannnntgnnncccccccgggcaggaatcgggcgcctgattgctgagtgtcatctcaaccccatcatcctgcccctgtggcatgttggtgggtggggactgctgaccttcggctacctgtctgccatctgccccatgtctcccactcagcactatggaggccagatacaggaggagctgagtaaaatcactgtgctgatcgggnnnnnnnnnnnngcccttcctgtactcgagcggctccgggcagagaacaagtcagctgtgttctctcccaggggctggcgtcaggaggaagcatagaaggcaggtgagcaaacagttggctgggggctcaccagagctgtggagaggggaccctaagacccctcagcctggctcctaccccccacccnnnnnnnnnnnnnnnctgctcactacctcctcagggatggccgctggccacgtcttccttctgcctgagcttcccccctgccacaggccctttcctcaggcaaggtctggcctcaggtgggaagagcagcccttggccagaagtcaagcccagccacgtggagcctagagcgagggcctgaggtctggctgcnnnnnnnnnnnnnnnggccaccgacttctccatcctttctgcttctcaatatcacttgagtcctggggcctgagttttcat

SEQ ID NO: 14638 - DNA, 667 bp, Macaca Fascicularis
  misc_feature (1)...(667): n = A,T,C or G
agctggccgcgacatgtggccatagctctgatcctgcttgttttggtcaatgtccttgtcatctgtgtgccaaccatccaggatatctttggagttatcgggtccacctcagcccccagcctcatcttcatcctccccagcatcttctacctccgcattgtaccnnnngaggtggagcctttcttatcctggcccaagatccaggccctgtgctttggagtcctgggagtcctcttcatggccgtcagtctaggctttatgtttgccaactgggccacaggccagagccgcctgtctggacactgatcaggccctgctggcccaggtccctgtgcgaatgcacatggaggggtcggggccgctccctagggtccctcctgcccagcatgtggaggcggctggttcccatgaacatggttgtcagaggcgggggacagcagaggctgcagactggcccacttccctcctccccagggatgccaaacttggatcatggccctaatcccatccccaaccccatgggaggaggaggtggaggaggaggaggtgaaggaggagaaggtggcggaggaggaggagggcaggtcctggcggagcctttgcccagcccagtcctctctgcctcctcctggctgaagctgttgtcaggnnnccctcgggctaaaga

SEQ ID NO: 14639 - DNA, 725 bp, Macaca Fascicularis
  misc_feature (1)...(725): n = A,T,C or G
cgctgctgtnnnnnnnnnnnnnnnnnnnnnnnnnnnngctcgtgggtgaaacgcctccaggaagaaccctgtgcatcccagctcaaggtggtcagagctagaccttcttattctgctagggacggcgggccacnnnnnnnnnnnnnnnnnnnnnnnnntcgtggaggaggaacaccagacctggtacttccttgtgaacaccttgtgtctagctctgagccaagaaacctacagaaactgctttctgggagacgacagtgagcctccatgtggcctccgtgtggaacaagggcttgacggggccacagcagcgtggcaggacnnnnnnnnnnnnnnnnnnnnnnnnnnngacaaaggccacagaagcccctctgcctcccaagggctcagaggccacgagaagtggatggcgctggccagtcnnnnnnnnnnnnnnnnnnnnnnnnnnnnnnnnnnntctctaaaccagacaggtgtgcagtgggctcaccggcctgacctcggccactggctcaccaggtgagcgcatgggcctgtggtcacaggccagactttctacagccagttggtcacttgccaagctcttctttttctaaattgagatcatttttcatattaagaatgggatagtattttgagatctgaagaactgggaaaatatactaaaaccagtgtttttactagatactagaattagtgttgagaggtgaatttatttgggggct

SEQ ID NO: 14640 - DNA, 730 bp, Macaca Fascicularis
ctgtacctggaagcaggtggtggccctggtagatgtcccccctcggggcctctcccagcagaatgtctagtggtccccagggactgccacagttggacccttgcagccacccctccatcaaagtcagtttggccttcagcttggctgcctggagaggacaggaagaaaaggtgtatgaggctgctggcatgcaggtcctgcccagacactccccccggcttctaccctgccactctccctgtgggttcccttctccaaatcctcccctgggcctcaacgctaagggtatgccacacccctgagagccaaccgtgcccccatggtagctgtcgcttcccctcccatccccacggcacctgctgacaccactgaccatactgctgtcctaccttgaagggaaagaggaagggatgggaagggatgcctcataaggatttctgtctgtcctgttcgctgtgttcccaggacgccacacggagaaagcacgctatggacactggctgaatgtgctatgaacgtcccctagccccgtcttttcatcagacaaacaataattgcatttacagagcacttccttggagccagtctcagcacgaatgcctgccacgccccagcctgattccccctgtcaccgctctaagtggccggcacaggtcccaggccctgtccgccattcccaagtccaaaatttcgaaaagccacaaggcgttccattcctcactcgacagcg

SEQ ID NO: 14641 - DNA, 769 bp, Macaca Fascicularis
  misc_feature (1)...(769): n = A,T,C or G
atatatgatagaatattcgtatcatattcactgcaagtcagcaatttcccaggtaccatgtaagctataaaacagtcattcttaaagacacaggatagctgtgactcatggaatcatgagatccatggctggttgcaggttccctttctccttcctcaggttttgtctcttcctgtgttgtccccagcaagggagagactgtggggtggattgggagaacaaattaggagtatagcggatgaacccagaatggaacagtggggcgctaactgaacgaggagagtacctgctgcaggacctggaggtcaggtgtgaatgctgtattggcacaaggaataaatatcctggcgtctggagcctttacctctccatcaagtccttcctgtgatactgccatggcacgggatctgagttgcagctctgcaccctaaatcacaccctgggcattgtctgggctgcagggctgccagattctgcacttgtgtctagctgtggccctggatgctggagctgcagggttttctgtgctcagactnnnnnnnnnnnnnnnnnncctgtgtagagccccctcctgtgcccccagtgtctgttgtttgtcannnnnnnnnnnnnnnngggaaaggtcaggcagaatttttctgccctacaaagggtagaagagaaaggacacagtattttcatgaatttaccatatctctttgtttttcttcaaagaaaaagttaattgaggcagtgtcatctgctcaaagttnnnnnnnnnnnnnnntaa

SEQ ID NO: 14642 - DNA, 199 bp, Macaca Fascicularis
ttcccgccaccgcgcgtggtggataccgtgggggctggagacactttaaatgcctctgttattttcagtctctcccaggggaggagcgtgcaggaagcagtgagattgggatgacaggtggccggcaagaagtgtggccagcagggcttagatggcattgtgtcagagccggtgcggtaggaggcgccgtctccccgca

SEQ ID NO: 14643 - DNA, 758 bp, Macaca Fascicularis
  misc_feature (1)...(758): n = A,T,C or G
caccagtcacactaggagaaagggctatgaagcatccaggctggccnnncccaggggaatcctggaggcctggggtgggctcctgctcnntctgccctgccttgnnnnnnnnnnnnnnncttggctcctgtggaaggcaggctgccctctcgccctagtgagggccccatgtgaatccactctgatgcnnnnnnnnnnnnnnnnnnnnatnnnnnngaggattccaggaccccttttttgtcgtgnnnnnnnnnnnnccacaactcaccttagggaagtgacctgctctccnnnnnnnnnnnnnnnnnnnnagggggccttgagtggcaagttgctaacaggaacagatccataggcagcctgcaggctaggaagtgnnnnnnnnnnagatgagctgggaacaagagaggagcgagcaggagctagggcagaggctgagccaggaggcccatgcagtgatgacacagcaggcccaggaccatggctaggaggtaaatgtcagcacctggaagtggagtgcaggctggggcagccagnnnnnnnnnnnnnnnncattcactcagagtggggccacagagccacctacccagtttccacatgtggctcctgccacacccacagggcagcctcctacaaatccctctcctggacaggtcagcccagaagcctccttgaactagtnnnnnnnnnnnnnnntatgctgacccttgtcgctaaaccctcaactgtctcttcttgacttatatgaataaatgaaa

SEQ ID NO: 14644 - DNA, 752 bp, Macaca Fascicularis
  misc_feature (1)...(752): n = A,T,C or G
ggcccagatcagctgggtgacggnnnnnctaacagagtacgcagggccccttttcatctacctgctcttctacnnnnnnnnnnnnnnnnnntatggccacaaatacgacttcacgtccnnnnnnnnnnnnnnncccnncctcgcctgcatctgccactcattccactacgtcactatggatgagacagaatccttcgtgcaccgtttctcccaagcacccatccctaccnnnncatcttcaagaactgcacctactactggggcttcgccgcgtggatggcctattacatcaaccaccctctctacacgccgcctacctacggagctcagcaggtgaaactggcgctcgccatctttgtgatctgccagctcggcaacttctccatccacatggccctgcgggacctgcggcccgctgggtccaagacccggaagatcccgtaccccaccaagaaccccttcacgtggctcttcctgctggtgtcctgccccaactacacctacgaggtggggtcctggatcggtttagccatcatgacgcagtgtctcccagtggccctgttctccctggtgggcttcacccagatgaccatctgggccaagggcaagcaccgcagatannnnaaggagttccgggactatccgcccctgcgcatgcccatcatccccttcctgctctgagcgctcaccgctgctggggctcagcccctcacccgggtggcattctgggggaggagtggggcccgcagctc

SEQ ID NO: 14645 - DNA, 157 bp, Macaca Fascicularis
ccgggccgggcctcaatcatccttttcctccccgtgggtgatcacgtagctcagcgccttgtagtccaggttgcccgcggcatcgatggaggcgaactggaacatctggtccacctgcgggcgggggcgaaaagggcaccgctgcgggctccaggag

SEQ ID NO: 14646 - DNA, 687 bp, Macaca Fascicularis
  misc_feature (1)...(687): n = A,T,C or G
acccnnnnnnnnnnnnnnnnnnnnnnnnnnnnnnnnnnncnnnnnnnnnatactcgaagctgccaaacaagtacgttctgaaaatccagaatggcttgatgtttacatgcatattttacaannnnnnnnnnnnnnnnnnnnnnnnnnnnnnnnnattgtacattgtcctgacactggaaaagacatttggaatttactttttgacctggtctgccatgaattctgccagtctgatgatccacccatcattcttcaagaacagaaaacagtgctagcctctgttttttcagtgttgtctgccatttatgcctcacagactgagcaagagtatctaaagatagaaaaagtagatcttcctctaattgacagcctcattcgggtcttacaaaatatggaacagtgtcagaaaaaaccagagaactcgacagagtctaacacaggagaaactaaaaagactgatttaacccaagatgatttccacttgaaaatcttaaaggatattttatgtgaatttctttctaatattttnnnnnnnnnnnnnnnngagacggtggctcagggagtaaaggaaggccaattgagcaaacagaagtgttcctctgcatttcaaaaccttcttcctttctatagccctgtggtggaagattttattaaaatcctacatgaagttgataaggcgcttgctga

SEQ ID NO: 14647 - DNA, 866 bp, Macaca Fascicularis
  misc_feature (1)...(866): n = A,T,C or G
atggcttgagagtaaaactcctagaaccagttcctgntnncgcaacaaggtgttcctttagagtcaatgagaacacacaaaacctacaaattcatgcaggggacatcctgaagttcttgaaaaagaagaaacctgaagatgccttctgtattgtgggcataacaatgattgatctttacccaagagactcgtggaattttgtctttggacaggcctctctgannnnnnnnnnnnngatattcagcnnnnnnnnnnnnnnnnnnnnnnnnnnnnnnnnnnnnnnnnnnnnnnaagtgaagaaactcaaaaaaacatcttcaagtgactattcaattttcaacaactattatattccagaaataactagtgttttactacttcgatcctgtaagactttaacccatgagatcggacacatatttggactgnnnnnnnnnnnnnnnnnnnnnnnnnnnnnncaaggctccaaccacttggaagaagctgaccggcgccctctaaacctttgccctatctgtttgcgcaagttgcagtgtgctgttggcttcagcattgtagaaagatacaaagcactggtgaggtggattgatgacgaatcttctggcacacctggagcaactcccgaacacagtcgtgagggtaatgggaatttaccgaaacccgtggaagcctttaaggaatggaaagagtggataataaaatgcctggctgttctccaaaaataaggaccttcaaataggagtgattgaaatnnnnnnnnnnnnnnnnnnnntgctttcatttgggtgggatactttatcggaataaactactgatcttgtgnnnnnnnnnnnnaacagactagaaccttctttcaggtacctgaa

SEQ ID NO: 14648 - DNA, 698 bp, Macaca Fascicularis
  misc_feature (1)...(698): n = A,T,C or G
agctacgaacaagacnnnnnnnnnnnnnnnnnnnnnnnnnnnnnnnnnnnnnnnnnnnnnnnnnnnnnnnnnngaaaccggggcaagacagaccgggtagcccggtattttgagtacaannnnnnnnnnnnnnnnnnnnnnnnnnnnnnnnnnnnncataggaaggaattacgctggggtgtccgagagcagatgctttgtcgagcagaaccccaatccaaacctcagcacatatatgtcccaaacaattatctagtaccaacagagaagaaaaggtctgcactccgttggggtgttcgttgtgaccttgcaaatggtgtcatacccaggaagcttcccttccctctttctccttcttaaatctttttaaacttcttnnnnnnnnttgtttgagataacccagctctttatatcgttccttttaaatagaaacaattgtcttgaaaagctcttagaaacatctnnnnnnnnnnnnnnnnnnnnnnattggtctttcctagctatatatcacattggtatcagatacttccaaattgccactcaaatcnnnnnnnnnnnngataaatcatcagaaagaacaacagacctggtctattttttcaaattagtaagggccctttgtgtcctgtaaccttttttacctatcattgtgagttgctgtgctttaatgtgtgtttttaaagttgctgggcatacac

SEQ ID NO: 14649 - DNA, 707 bp, Macaca Fascicularis
  misc_feature (1)...(707): n = A,T,C or G
aaattatcacttatnnttnaaaattagcagnnnnnnagtgnnnaaggtaagagtgttattttactggtttgtggtaaataatctatgagagagnnnnnnntattatgataatgattattaacaataacatttaaatgtaataagattatttatggaggtttagggtttataatgtctcacttagttaactcttatgtagagaaagttaagagtatctcttatctagatcaaagtataatgaagattttctacctgcagatgaggtagtatagcacaagggttaagtggatgcactgggtccattctgtgcagtctcacatatgattctgttccctattagctatgttccctttgtcacatttcctaaactctctgtttctatgtcctnnnnnnnaaattgaggataatnnnnnnnnnnnnnnnggttgttgtaaagattaaatcttatacacacacacacacacacaaacacacgnnnnnnnnnnnnnnnaggtgttacataactgctatatagcactgttactttgttttttgtttttgttataatcccctactgttcttgacataaaagctacatgtattatagagataaaattaaagaactgttttcaaaattaatgtacccatctatattaaacatataaaaaaannnnnnnnnnnnnnnacacacaaatctaaatctgtacatcatctgtcaaatgttccac

SEQ ID NO: 14650 - DNA, 727 bp, Macaca Fascicularis
  misc_feature (1)...(727): n = A,T,C or G
gcatgctattcatgctacaggtacaccaataatgtggacgactcaggggctcagaagaatcaaccacaaagtagtcnnnncagatgaccttgactaatacactcagcatctttatcactctttccttggcacctaaaagaggattctcctctgaagcaggttggaaatattttttttctatcagagaagtcatttgcaaagaattttggctgctctgcttttaatttaataccaattttcaggaacccgtgaagttttaagttcatcattctttataacgtttgagagaataagatgcagtgatatgacagggctggggcaagaacagggacactagctgccttattagctaatttagtgccctctgtgttcagcttagcctttgatcctttccttttgatccacaaatatgttaaaactctgaattcacatacaatactattttaaaatcaatagattttagctgcaatgtgcttgaccagtaatgtttttgtaattttgtctatgttcccccacatcgcccccaacttcggatgtggggtcaggaggttgaggtttgctattaacaaatgtcataaatatttcatagagatacagtaccaatagatactcaaatgttgcatgttgaccagagggattttatatctgaagaacacacactactaataaataccttagagaaaaattttgacttggctttagataaaactatggcaagaaaaatgta

SEQ ID NO: 14651 - DNA, 733 bp, Macaca Fascicularis
  misc_feature (1)...(733): n = A,T,C or G
tcctnnnnnnnnnacttcaggggcatcnnnncagtccctcttcagctcccggccgaccctctgtacgacagcattgaggagccccctcctcctcgacacgaccacatatacgatgagcccgaaggagtggccgccctgtccctgtatgacagcctgcaggagccccggggtgaggcatggaggaggcaggcaacaggtgacagggaccctgctgnnnnnnnnnnnnnnnnnnnnnnnnggcaggatttctctgccnnnnnnnnnnnnnnnnnnnntgagtatgacaatgttgtacttaagaaaggcccgaagtaacaggcagcagagggatggtccaccgccccctggcttctgctggtgactcctcctgaccactgcatcagaagaacctcctctgccccttctggagcccgaggcctggcctgccttcgttgggactgataaattgcctctcccagggcctgctgggtnnnnnnnnntcccaaagcaggaagggtgccctggagagaaccaccctcctcctactctttttccacttcctcctctttctttccccagctgagggggaacctggggcatttagggcagagggcaaaggatgtcagcaattgcctgggctgcttggctatgcaagcctcctgcctgctcatggccacttcagggacagcccgggcccaggcacccaggtggatggtggcagcgtcctgtaccttcagattctcggggcataaag

SEQ ID NO: 14652 - DNA, 665 bp, Macaca Fascicularis
  misc_feature (1)...(665): n = A,T,C or G
tggacctgggggtgtggacagtgaccnnnccctgaatatgaacttgagtcttctgagcagaactagggcctctcccctggtgaagacccagggaacagagttcccaggagggcccttctggggcagtggctctgcagggtcactcacggaggcctgcgggaacagcgagacgccccaccacctcctggcgggtccttcctgttcagctccccgagcgaccctccagggatgcaggggatccaggattctctgccctgtcacaaggcaagtcagaagggaggggtcttcccctcggacccacggccccaggcnnnnnnnnnnnnnnnnnnnnnnnnnnngagggtcttcaaggctctcccaggagtccccctctgccggcccccaatgccccagccccctcttgggtcctgtgccaagtccaccccagggcctggggctgttgggagccaagggccccctggtactcaattcccttacgattccctatcagggggacacctgccccctggttatttgtaaatatttctattggatccaattccccttggaattggctcgcacttctggctgccgctcagtgatgatgtgggggaggtgggagaggccgagggctttgcctaggggtggagtgccctgtatacatgatccagtccgtgataccagcc

SEQ ID NO: 14653 - DNA, 737 bp, Macaca Fascicularis
  misc_feature (1)...(737): n = A,T,C or G
tgcactgcaccacgatnnnnacggcgtnnnnnnnnnntgtgacgggnctaggctggcgggacgtgctnnnagccatcaaggccacccggcccatcgccaaccccaaccnnnnnnnnnnnnnnnnnnnnnnnnnnnnnnnnnngggcagttcccagaagcttcgccggcaactggaggagcgcttcggcgagagccccttccgcgacgaggaggagttgcgcgcgctgctgccgctatgcaagcgctgccggcagggctctgcgacctcggcctcctccactgggccgcactccgcagcttccgagggaaccctgcagcgcctggtgccgcgcacgccccgggaagcccaccggccgctgccgctactgnnnnnnnnnnnnnnnnnnnnnnnnnncctccctcggtgtctgtcccgcaagggcggcaagtgaggatgcagtcccgccgtggctccccacttcctcccaactggccgccttcgggggctgtcggcgccttccacgccccccaggatgggcccagaggctgggggagccccgcggcggcctgaaccctgcctccctcgcccgccctgctcatccgcgtctgcagtcagcatccccaacctgtgcgtctctgtgtccgggccggccggctgcagccacctggtgccttagtccgtgggctgggggagggggcccacccttaaaggcggcgggaggggagggagggggagtggagggttggacgggcctgga

SEQ ID NO: 14654 - DNA, 716 bp, Macaca Fascicularis
  misc_feature (1)...(716): n = A,T,C or G
gaaggttcacgagtgttgccgacacaccctcccagctgcagacatcctccctggaggacctgctgtgctcacatgcccccctgtccagcgaggacgacacctccccgggctgcgcagccccctcccagtcacccttcaaggccttcctcagtcccccggagctgcacagccaccgaggcaccgacaggaagctgtccccgctcctgagccccttgcaagagtcactggtggacaagaccctgctggagcccagggagatggtccggcctaagaaggtgtgcttctcggagagcagcctgcccaccggggacaggaccaggaggagctactacctcaatgagatgggattttgctctgatgcctaggctnnnnnnnnnnnnnnnnnnnnnnnnnnnnnnnnnnnnnnnnnnnnnnnnnnnnnnnnnnnnnnnnnnnnnnnnnntcatgcctggcctgtcaattttatttatcttttcaaataaccaattttttgttacattgatcttttgtattgttttcttcatttaaatttcatttatttctgctctgatcttaattatttttcttctaattttggatttggtttgctcatacttttctagctctgtgagatgaatcattaacttgtttatttgaagtttttctactttttgatgtaggcactactagctgtaaactcttaatacttatcgctatagctcttagtatggctttgc

SEQ ID NO: 14655 - DNA, 752 bp, Macaca Fascicularis
  misc_feature (1)...(752): n = A,T,C or G
tgcgggcactgctgagccaactgaggatccgggctgaggtgcaggaggtggtgtgnnncgagggggctggggctggggaacccgaggtggaggaggaaggggactttgtgaacagtgggcggggagatgtggaggcagaggccctggcacgcagcgccaacgccctggttcgggcccagcaggggcgtggcacaggaggagggccgggtgggccggagggtggggataccgagggccccaccacagccctcaccttcctgtacttgcctcggccacccgccgatcctgcccgctacccccgatacctggcgctactggagattctaacccgagacctgggcccnnnnnnnnnnnnnnnnngggtcaccccagtcacctgcactgatctctgatgcccctgcctccagggctgggtagagagggcccaggcaggtggcccatcccgatcctgaggaggaggaggaggaaagcactgtgtcccgtggccctgcccttgggacgtggagcccaggggaggtttgaaggggatcatgccacctcctttggcagagggactccagcacactaactctgggcgcctgtccccaccatgcaggggagggagtccgcagcctcccttcactggtgccttgatgctaggggccaggcctccgtgactctgggctacctcagtttccccattttggccagactcaccggcccactggggtggtgatgttttcgttctgttttattttctaactctgctgacc

SEQ ID NO: 14656 - DNA, 720 bp, Macaca Fascicularis
  misc_feature (1)...(720): n = A,T,C or G
gctgaaggagcacagagaacatttgtgaaagtatagttttgcaattcatatactgttttctaaaactaaggtttgttcaggttgctgcaagctcagctgaatctgtgagcctgaggtctgtttcaaatttcccccaataggcatctttatttctgaggttgttctaattcgctaggcaggcctgagcgaatacaagtttagcttgtccctgttgagtaagtagggcatgctacaatggataattaaaaagcttgatagctgggactgaatagaagaaaacgggaaagttagaccaagttctcccctgcaaaatcttattaaacacattaaatagtcaaaatagtaatctttatcatatctgccttattaacccctttgtgtataatgaccacacagtgttaagctgagtttttaatttggctctcctttcaactgttcacataaagcacctggcaaagtgttttacctgttagggggagaaaaatgcaataatatgttaaatatattattattcagaaatgctaaacaaatagtttgcaagcagatttctatattgtattacagttttgaaaatagatttggtatcattctgaagtttagctatcaagcatnnnnnnnnnnnnnnnatagttgattgactctgcttttactaacagatttaacttattcaggtttgaaattctgtttatttttaagggtaaacagggcatatttctttaa

SEQ ID NO: 14657 - DNA, 738 bp, Macaca Fascicularis
  misc_feature (1)...(738): n = A,T,C or G
gtgtcaagacccnnncagcagggctcaaggagcagataccctcacctacacattggggctcccagatgggcagctgcccctggnnnnnnnnnnnnnnnnnnnnnnnnnnnctgcctgtccccctggcctcctgagagcctcgggctctgggccctcctattccaacaacttggccaaggcagggctcaatggggcctcatgccaccttgaatacagccctgagcggggcaaggctgagggcagagagagcttctatagcacaggcagccagctgacccctgaccgatgtggacttcgttttgaggaacacaggcatcctgggcttggggaactgggacagggcccagacagctacggcagccccagttttcgcagcacaccggaggcaccctatgcctccctgacggagatagagnnnnnnnnnnnnnnnnnnnnnnnnnnnnnnnnngagacgtgccagctgcggctggaggacctgctgcggcagcgctccaacatcttctcccgggaggaagtgactggctaccagaggaaggtgaggccaggagaactgcaggaagggaacgcagcccacccccaccgggagagctcagagatggctacctgcacacacttgggtactggggcagggtggcacatcacagacacaggctggccaacaagcatgtgcacaccctctagtacatttgtgaatgtgtatatctgtttacaccccagcagatnnnnnnnnnnnnntcc

SEQ ID NO: 14658 - DNA, 765 bp, Macaca Fascicularis
  misc_feature (1)...(765): n = A,T,C or G
ccatcgnnnnnnnnnnnnnnnnnnnnnnnntgtgactgtgantnnnnctgcannnactgnntctgccctggtatctcaggatggtgtgccagtggacccagacccggcgcagggccaggaatgtacccttagaagaactccaaagaaatctccagtttcatgcatttatttcatatagtgggcacgattctttctgggtgaagaatgaattattaccaaacctagagaaagaaggtatgcagatttgccttcatgagagaaactttgttcctggcaagagcattgtggaaaatatcatcaactgcattgagaagagttacaagtccatctttgttttgtctcccaactttgtccagagtgagtggtgccattatgaactctactttgcccatcacaatctctttcatgaaggatctaataacttaatcctgatcttgctggaacccattccgcagtactccattcctagcagctatcacaagctcaaaaatctcatggccaggaggacttatttggaatggcccaaggaaaagagcaaacatgggcttttttgggctaacctaagggcagccattaatattaagctgacagagcaagcaaaaaaatagattacacatcaagcgaaaaatattcctcctgttgatgttgctgcttttggaagttccaacaatgactttattttgcatcaacacaaatgcaaacacaattgtgagtgtatgatgtaggtaaaaatatgtactttcgggccccagttcaccatttata

SEQ ID NO: 14659 - DNA, 403 bp, Macaca Fascicularis
tgtttctctgaccctggcgtggcggacaaggctctgaaatacctggaggacagccggatcctgacttaccagtatggaatcccgacctctctccagaagacaggacagcagtgggattcccccaatgcctgggcccccctgcaggacctggtcatcagaggcctggccaaggcacctttacctcgggcccaggaagtggctttccagctggctcagaattggatccgaaccaactttgatgtctactcgcaaaagtcagccatgtatgagaagtatgacatcagcaacggtggacagcctggtgggggaggagagtatgaagttcaggagggctttggctggacgaatggcgtggttctgatgctgctggaccgctatggtgaccggctgacctcagggtccc

SEQ ID NO: 14660 - DNA, 486 bp, Macaca Fascicularis
  misc_feature (1)...(486): n = A,T,C or G
atttgattttcatgattacctgtcagagaagcacagcanataattagcccaatgttatgagtggctcacagctnntaagtgtatgtccaaagctttacaacaaattattagtagagtcagttgggtttcagatcagagtgtttccaccctnnnnnnnnnnnnnnnnnnnnnnnnnnnnnnnnnnnnnnnnnnnnnnnnnttgatgcttggagatatctcagggattactgtaagaactgggtgtgatactaatgggtagggctaagtgttgatatggtggctctatttttatatgttggaagttcaacccatgctttaataaccactgccctgcaacagcctgcaccttgttaaaggtaaagaagaatatttgggaaaaaaattagttaaaaaaatggttgaggccaggcgtggtggctcacgcccgtaatcccagcacnnnnnnnnnnnnnggcggggggatcatgaggtcaggagatcgagacc

SEQ ID NO: 14661 - DNA, 744 bp, Macaca Fascicularis
  misc_feature (1)...(744): n = A,T,C or G
aaatggtaacattcgtgatagataccagtnnnnncccatggaatcaatcaaattaagtcatcatgactacattgattccccatcgctgaaggacagaattcattgtgtggcatttgtatttgatgtcaactctattgaacacttctcctctcaaatgatagaaaagatcagaagacttcgaagggagttgataaacgctggtgtggtacacgtggctttgctcactcatgtggatagcatggatctgattacaaaaggtgaccttatagaaatagacagatgtgtgcctctgaggtccaagctagaggaagtccaaagaaaacttggatttgctctttctgacatctcggtggttagcaattattcctctgagtgggagctggaccctgtaaaggatgttctaattctttctgctctgagacgaatgctatgggctgcagatgacttcttagaggatttgcctcttgagaaacagggaatcaaagaaaggtaattatcaagtgtgcacagggaagaaaattgatatgtgaaaggttcacataaatttcttcatatcacagaagattaaaattccgaaaggagaaaacagaccaaagagaagtaactaagaccgaagggatgtgttttattaatgtctaggatgaagaaatgcatagaacattgtagtacttgtgaataactagagatagcatgatttaaagtcataattgtgaaaaataataataatttttcttggatttatgt

SEQ ID NO: 14662 - DNA, 713 bp, Macaca Fascicularis
  misc_feature (1)...(713): n = A,T,C or G
ggatgggaaacagccatggccaaggacatnnnnnnnnnnnnnnnnnnnnnnnnnnnnnnnnnnnnnnnnnnnnnggtgttggacccagaggttacccagcagaccatagagctgaaggaagagtgcaaagactttgtggacaaaattggccagtttcagaaaatagttggtggtttaattgagcttgttgatcaacttgcaaaagaagcagaaaatgaaaagatgaaggccatcggtgntcggaacttgctcaaatctatagcaaagcagagagaagctcaacagcagcaacttcaagcactaatagcagaaaagaaaatgcagctagaaaggtatcgggttgaatatgaagctttgtgtaaagtagaagcagaacaaaatgaatttattgaccaatttatttttcagaaatgaactgaaaatttcacttttatagtaggaaggcaaaacaaaaaaagcccctcaaaaccaaaaaaacctctgtagcattccagnnnnnnnnnnnnnnncctgtcacaagaggtggcgtgtaaggaacgcagccnnnnnnnnnnnnnactacaagtctgggggagccagttttaaacatcagtgcacagctgctgctggtggccctacagtgtacgttctcacttcttatgcttaattggaactaagcagtttgtaaactttcatcctttttttgtaaattcacaaagcttggaaggagaata

SEQ ID NO: 14663 - DNA, 712 bp, Macaca Fascicularis
  misc_feature (1)...(712): n = A,T,C or G
gacgccaaccgccatgtgatgtaacctccatacgaannnnnnnnnnnnnnnagaagaagaggtggttgctgctcgtgtagatctataaatatgtgttgtatgtcttttttgcctttttttttttttaaagaataacttttttgcctctttagattgcatagaagcattgtagtcttggtagaaccagtatttttgtcgtttatttataaggtaattgtgtgtggggaaaagtgcagtatttacctgttgaatnnnnnnnnnnnnnnncacaagggaaaaaataagaacttaagaatatttttgaggcagataatgatctagtttgactttctagttagtggtgttttgaagagggtattttattgtttttttaaaaaaggttcttaaacattatttgaaatagttaatataaatacataattgcatttgctctgtttattgtaatgtattctaaattaatgcagaaccatttggaaaatttcattaaaatctatccccaaatgtgctttctgtatccttccttctacctatgtattctgattttttaaaaatgcagtcaacgtaccatttatttgcttgatgaagggagctctattttctttaccagaaatgttgctaagtaattaccaatagaaagctgcttattttcattaatgaaaaataaccatggtttgtatactagaagtcttctccagaaactggtgagcctttc

SEQ ID NO: 14664 - DNA, 733 bp, Macaca Fascicularis
  misc_feature (1)...(733): n = A,T,C or G
gacaggtgtacgcatgatcagcctctcctattcccgaatctccttgnnngannnnnnnnngnagctgcagttggatagccccgaagatgcagagnnnnnnnnnnnnnnnnnnnnnnnnnnnnnnnnnnntgaggccagcatcaaccatgagaagggctatgtccaatccaaggagatgattgacatctattccacccgagagccccagctggccttccaccagcgcatctccttctgcctagatatccacaacatgtctgtcaaggccatgaggtttcctcccaaatcatacaacaaggacttggagtctgcagaggaacggcgtgagcgagaacagcaggacttnnnnnnnnnnnnnnnnnnngcnnnnnnnnnnnnnnnnagcttcccttgagctggggggctggggaggggtaggggaaatggggacaggcattttcccccttgggggtcccctgcccagagcactgtccccattttcccacacacagctcataggctgcactcgtgcagggggtgggggtgctgggagccagccaccctgacctcccccagggctcctccccagccggtgacttaccgtacagcgggcaggagggcgggcaggtggcctccccgggcagggtcctggccagtggtgtgggagcaggaggggaaggatagttctgtgtgctcctcttgggagtaggggactgaactgggatgtcttggcttgtatgtttttgaagcttcg

SEQ ID NO: 14665 - DNA, 1736 bp, Macaca Fascicularis
  misc_feature (1)...(1736): n = A,T,C or G
caaggtgcccatnnnnnngaagcgtggcagtcgcaagggcaagaaggagaagcttcgggacctgctgtnnncggacatgatcagcccgccgctgggggacttccgccacaccattcatattggcagtggtggcggcagcgacatgtttggtgacatctccttcctgcagggcaagttccacctcctgccagggactgtggtggaggggcctgaggaggatggcaccttcgacctccccttccagtttacccgcaccgcaactgtgtgtgggcgggagctcccggacggcccatcacctctgcttaagaacgccatctccctcccggttattggtggaccccaggctctcaccctgcccacagcccaggctccacccaagccccctcgcctgcacctggagacccctcagccttccccacaggagggagggagtgtggacatctggaggattccagagactggctccccccacagtgggttgactccggagtcaggggctgaggagcccttcctgtcccatgccagctccctactgtccctgcacgtggacctggggccttccatcctggacgatgtcctgcagatcatggatcaggacctggatagtatgcagatccccacataggatccaaggctgactaggctgggggcccaggtggggctgagccaggaggtggggtnnnnnnnnnnnnnnngcggtggagtcagggtcccaagatcccacctcaatggtcgctggccagtgattctccttttgagccgtgtttctcctctccctccctctccccgtgggcagggcaggccccatcgttttcctctagtaaccacatggacacgtcctgaagtcagcccagggcgccctgagcgtcttggggcacctggaccccaccacaatactccttcttccctcaggtccnnnnnnnnnnnnnnnnnnnnnnnnnnnnnnnnttttcacgtcccttttgcctcagccccgttggatgccctgactgggggcaggggaagagacagggcacagctggccgcagggctcggccactgggcgagctgttccgggcctttggctttgcatcctggacagggactgccctgtcagggaccagatgcgtcctgcctcatccccagttccatcccttccccacgtgaccggggattctggttgcaataaaacatgctgctgctggtggctgagctccctgtccccttgcccnnnnnnnnnnnnnnnnnntagacagtctcccagagctgagggctcgcctctggagaccccagccccagagggctttgtggaggacaggccttgccctcaggaaggttgtacctgacgctgagcctgttgtgagaatgcaacaggagcaaaccaagtgttgctgtggatattccaacattgattcagatgtttgggaagaggtggctgagcactcggataggctcagcactgtgccaagcctggggccaatccctgcccagtcagctggggtctggtgggggacacccaagaataaaagaataaccacaaagtgtgcaagggaccaacagcttctccagcttcagagcatcgagggagcatgcaggagggatgcttggagctgggagggtctcacggtgctgcttcaagattcatcccatccacagctgtttnnnnnnnnnnnnnnntacacaaggcatggctccgggtgctggggatacaaggcagatgtcatccctgctctctgggagtttaaattctagtgaag

SEQ ID NO: 14666 - DNA, 750 bp, Macaca Fascicularis
  misc_feature (1)...(750): n = A,T,C or G
tgggaagcattcatggtcnnaancatagtgnnnnnnnnnnnnnnnnnnnnnnnnagctagtcattaacccccaccagcagcacatggatgcattctattgggtgatcgactgggaagggatgatctctgtctctagtctggtgggacttcttgaaaagcacttcttccccaagtggcttcaggtgctgtgctcttggctcagtaacagcccaaattatgaggagatcaccaagtggtacctgggttggaagtctatgttctcagaccaagtgctggcacatccatctgtcaaggacaaatttaacgaggcacttgatatcatgaaccgggcggtgtcctccaatgttggtgcctacatgcagccaggcgcgcgggagaacattgcctatctcacccacacggagcggaggaaggacttccagtacgaggccatgcaggagaggcgggaggctgagaacatggcccagaggggcattggcgtggccgccagctctgtgcccatgaactttaaggacctcattgagaccaaggctgaggagcacaacattgtcttcatgcccgtcattgggaagcgacacgaagggaagcagctctacacctttggccgcattgtgatctacatcgaccggggagtggtctttgtccagggcgagaagacatgggtgcccacctcactgnnnnnnnnnnnnnnnnnnnncaagtgaactgtggcaggcccagagccagccagagacttgcccctgagaggga

SEQ ID NO: 14667 - DNA, 710 bp, Macaca Fascicularis
agaagcccagatctatgaatatgtagagattcttggggaacagcgacatctcactcatgaaaatgtacagcgcaagcaagccaggacaggagaagagcgagaagaggaggaagaagagcagatcagtgagagtgagagtgaagatgaagagaacgagatcatttacaaccccaaaaacctgccacttggctgggatggcaaacctattccctactggctgtataaacttcatggcctaaatatcaactacaactgtgagatttgtggaaactacacctaccgaggacccaaagccttccagcgacactttgctgaatggcgtcacgctcatggcatgaggtgtttgggcatcccaaacactgctcactttgctaatgtgacacagattgaagatgctgtctccttgtgggccaaactgaaattgcagaaggcttcagagcgatggcagcctgacactgaggaagaatatgaagattcaagtgggaatgttgtgaataagaagacctatgaggatctgaaaagacaaggactgctctagtgttcagggatgtagctcagcttttgggctagcccaggcttccctgagatctgctttttctatttctcccaaccaaatcctcttaaagaccctttgctatgtagtctcatggtctagcatgcatcttgtagaaacaagacatgctggcagattgcagggttgagatgtgttt

SEQ ID NO: 14668 - DNA, 726 bp, Macaca Fascicularis
  misc_feature (1)...(726): n = A,T,C or G
ataccagaaacatgactnntaaagatggtaaaaacaatgtagccatagctgtaacgtataaccatgatgggtcttatagcatgcagattgaagataaaactttccaggtccttggcgatctttacagcgaggaagactgcacttacctgaaatgttctgttaatggagttgctagtaaagnnnnnnnnnnnatcctggaaaacactatttacctattttccaaggaaggaagtattgagannnnnnnnnnnntccccaaatacttatcttctgtgagctcagaaggaactcagggaggccccctagctcctatgactggaaccattgaaaaggtgtttgtcaaagctggagacaaagtgaaagcgggagattcccnnnnnnnnnnnnnnnnnnnnnnnnnnnnnnnnnnnnnnnnnnnnnnnnnnnnnngcacaataaagaaagtgttctacagagaaggtgctcaggccaacagacacactcctttagtggagtttgaggaggaagagtcagacaaaagggaatcannnnnnnnnnnnnnnnnnnnnnnnnnnnnnnnnnnnnntcttctctctccaccaaaaagannnnnnnnnnnnnncttttctcggggtctcataaaannnnnnnnnnnnnnnnnnnnnnnngcttgtgctgaatgcctttcatatnnnnnnnnnnnnnnnnnnnnnnnnaaatataataaattatctcnnnatattcata

SEQ ID NO: 14669 - DNA, 1134 bp, Macaca Fascicularis
  misc_feature (1)...(1134): n = A,T,C or G
ggagaggaatagttacacccagaaaagaacctctcagtgagggaaacagactaagaatagtatcgcactacagccttctaccaacagatgatactttaaaatacaaaacaaaattagctcagccagttagttgttttattttgagttttgttaaaaaaaaaaaaaaagctttgagaaaatgtgttaaatatcagtaaagggcaggaacacacatggctagctttacaataacaatctaaacatacacaaaggcaaacattgagtaaaatgctagggaaagacagcactttgggggcctactgcagttttccttattgcacataaaggttgtggataactccaagtctttaatttttcacagttatactttaatgtcattttatataacatttatttatataacatactataatgttaattttataaaaccaccagtttgctactgttcaatggaaatagaagacaaaattctccccannnnnnnnnnnnnnnnnnnnnnnnnaaagttccctannnnnnnnnnnnnnnnnnnnnnntcgtcctattctattttaaaaattgcttttcagctattaaatgaatcttgatggccttctcatttaactattttcatggacatagtacaacttcacaagtaaaaagtaccagatgtattttatgtgaaaaacaaaaggacaacttaggaggagctggccctactatgaagtcacactttgaacgatcaatttcagtggtaaattcccaatccatagacttaacacccgcacaactgaaaaccatccctctgcttctccaaagcccacnnnnnnnnnnnnnnnaagtcagcccccaaatgtccgtgcagttaagtcatccagtaacacctgaattgtagcctcattcaagtgcttgagacagcagatgttgnnnnnnnnnnnnnnnnnnnnnnnnnnnnnnnntctgagttcctccaacatatacaggcccagacaattttccnnnnnnnnnnnnnnnnccgtgacatttggtgattctgttaagccttttgaaaggcgannnnnnnnnnnnnnnnnnnnnnnnnnnnnnnnnnnntcatgtctgctttggaccttttcaagggcagcacagcnnnnngcccttccttttcatcttctc

SEQ ID NO: 14670 - DNA, 722 bp, Macaca Fascicularis
  misc_feature (1)...(722): n = A,T,C or G
ttcaccatgatcctcgcgctggagnnnnnnnnnnnnnnnnnnnnnnnngggatnnncagcgacnnnnnnnnnnnnnnnnnnnnnnnnnnnncagtgccttannnnnnnnnnnnnnnnnnnnnnnnnnnnnnntgtcagatgtacctggcacacgagcaggcgccccgaagcgcccaccgcttcatcactgagaaggcagtcttctcccgctgggccaagaagaggcccatcgtgttcgcccatccgtcctggaggactgagtagcctccgtcgccctgccagccgccatgctgttgggnnnnnnnnnnnnnnnnnnatcccaggccatcacactccacaaaaacatttaatttnnnnnnnnnnnnnnnnnnnnnnngctgggtggagtgcccnnnnnnnnnnnnnnntggagccatctcaggcctcatgacttgaaggggagtggaatgaggagccctgtctccacctctactccctgagtaattcatggcatttgggggctcaccccacctccaggtctgtcaagtggcctttgtccctcgggctgatggcccccnnnnnnnnnnnnnnnnnnnnnnnnnnnnnnnnnnnnnnnnnnnnnnnnccagccacccctactaccnnnnnnnnnnnnnnnnnnnnnnnnnnnnnncctggttggggcagccaggaccctggggttcgttgggtgaaggggccttggagttgtgactgccggggcc

SEQ ID NO: 14671 - DNA, 739 bp, Macaca Fascicularis
  misc_feature (1)...(739): n = A,T,C or G
gagacttagtctgacgccacgcgcatctcttgttctgtgttcaatcagtagtccaggggannnnnnnnnnccacttcagagctttgctaaactaacccaatttgtccaaatcaccccagaaccaccatctctgactcaagcttccatgcgacagcctgatccgtttccctggacaggtctctttcctggaacgcagcccaggcacctgtgctcctggcacctttgaggtctctcctttgagtcgtggctaccgagagggttgaggacgcagcacccgaggtcccagcctttgtaggagccgccctgggcggagctggacttagatcttcggtggcctcctataaagccggcagccagcctcttctagaactagcccagggactggcgcaggaaaggaccttcgaagcgaagactgccttgtcccgcacttcnnnnnnnnnnnnnnnnaaaatgggcttcctaatgggttaaatcctttaaaacaaggagttgggggggaagggtgtcgtgcactcctagagaaaggtacacagttgcccggctgggaacgtgcttggcgctgaccctgcgggcatctgactagtcttccagctcaggaaaaagaatttgaaagaggcttagcatgaaggggaatcaaagaggaggttgtgatttggtcgaaggtgcctggtttagtgctgtaattgtcttattatttttttttatatatatatttcttggagtaaacatttaaaaaacg

SEQ ID NO: 14672 - DNA, 1196 bp, Macaca Fascicularis
  misc_feature (1)...(1196): n = A,T,C or G
gaacaacagtagtgaggacttcagcgccattgattacctcctcttctctnnnnnnnnnnnnnnnnnnnnnnnnccaaacagggtaggcttcatgcaggcctgtgagagtgcctattccagctggaagttctctgggggcttccgcacctgggtcaagatgtcactggtgaagaccaaggaggaggatgggcgggaagcagtggagttccggcaggagacaagtgtggttaactacattgaccagaggccnnnnnnnnnnnnnnnnnctcagttgttttttgtggtctttnnnnnnnnnnnnnnnnnnnnnnnnnnnnnccaagatataatcactgccaatccttggaacacaattgctcttctctgtggcgccttcttggcattatttaaagcagnnnnnnnnnccaaactgagtataaaatggatgatcaaaattagaaagagataccttaaaagaagaggtcaggcaacgagccacataagctgaagtcacctcgcgttgtttatagaactgtccacatcaatgggagttgtcatcacttccactttgtaaactgagctatcaacaatcctgtactcacttgaagaaatggggccttnnnnnnnnnnnnnnnnnnnnnnnnnnnnnnttctaacctcgccccaaaagaggccgtgtagagcctaatagaagagagctaatagataacctnnnnnnnntttaaatatttaaattattaataaactttctaaagagctggccaatgactttttgaatagggttnnnnnnnnnnnnnnttcttcctgtttggttcattgtattgtattaggttaagctctactagggtaatgaaggctctacttttcacttgttaaaagtagacaaaagagtgtgattttctttttctaaaaatcctatcaagacgtgcaagtcatgcttcggagcctatgcactggacacagaggcaaaaccctatgactttggcgtcatctgctgttgatgtctagcttcnnnnnnnnnnnnnnnnnnnnnnnnngttaaatgagactttaaagctactagaaactagtaattaagtttcttaatggnnnnnnnnnnnnnnnnnnnnnnnnnntagaatgtttgttgatgtatgagtttagattaacactcaaaagcactaaggacagatgtacatactaggtgcctactcagtgtattttgatgattcataaca

SEQ ID NO: 14673 - DNA, 722 bp, Macaca Fascicularis
  misc_feature (1)...(722): n = A,T,C or G
ctgccgtggtggattctgtttggtgtgtgttctctagaaggcctgggtctgacccagtgactcctctcaccaaagaacttggtttaaccagggctctgtgagaccacgcccacccagagacttgtgtggcctggtggggcctgtgtgtcgatggattccttcctgtcagctgtcacccatttgacctgtgccccagaacccagtgttttgtttgtttgnnnnnnnnnnnnnnnnnnnnnnnnnnnnnnnnnnnnnnnnnnnnnnnnnnnnnnnnnnnnnnnnnnnnnnnnnnnnnnnnnnnnnnnnnnnnnnnnnnnnnnnnnnnnnnnnnnnnnnnnnnnnnnnnnnnnnnnnnnnnnnnnnnnnnnnnnnnnnnnnnnnnnnnnnnnnnnnnnnnnnnnnnnnnnnnnnnnnnnnncaaactcttgatctcaagtgatctgcccgccccggcctcccagagtgctgggattacaggcgtgagccaccgcgcccggctcagggccccgttttgactgctggttcccagcagggaactcgggggatatacaatggctgcatggaatttgaggtgtgggttcttccaacacaattggcttctgccccttgtcttcctgccagctgggtttgaccaggatttccccatgtgggggctacatgcgaccccctcctctcctccctgacctagaagctggtgctgtgtcgggaggaaggtcagagct

SEQ ID NO: 14674 - DNA, 754 bp, Macaca Fascicularis
  misc_feature (1)...(754): n = A,T,C or G
tgtatgtaatcaagtatggtgcaaccaaaatctgttaagagaattccacagtatctatagaaaagtacacaaaccctgcaaatagacaccatatacatgcacaatcaagagtatgaaaggaagatttgttctttcaactggtaggaaaataattttccccaattatatcttttctagctgaaaatacttttagcttctcccaaagttgtatgtgtgtcttattttctatcagtgcttccattctgttgcctatgtaagtatacatgtatatttatcaatttnnnnnnnnnnnnnnnacatctgtgactgaaaacttctcatttattgttactcatactgttgtgaatacacaccatnnnnnnnnnnnnnnnnatagtatgaggtaagtgtttaccactgccactcccagcccaactctattggccactatgaaggggaagtagctgtgctgacattttaatgatgcaaannnnnnnnnnnnnnnnnnnnnnnnntttggctgttccccacccaaatctcatcttgaagcctcacatgttgtggaagggacccggtgggaggcaactgaatcatgggggcaggtccttcctgcactgctcttgnnnnnnnnnnnnnnnnnnnnnnnnnnnnntgattttaaaactggaaatttccttgcccaagctctcttctcttgtctgccgccatgtgaggcatgcctttcaccttctgccatgattgtgaggcctccccagccaggggaactgcaagtgca

SEQ ID NO: 14675 - DNA, 738 bp, Macaca Fascicularis
  misc_feature (1)...(738): n = A,T,C or G
gttaagcaggcaccatcctggaagtctacacctgggtgatcaagagacctnnnnnnnnnnnnnnnnnagaagcccnnnnnnnnnnnnnnnnnnnnnncaggagcagggagcactgatgaggtgctggggataaaaggaaggagggaacactgggcagaaccagagagatgggacannnnnnnnnnnnnnnnngaccccagagcagagaaacttgctcccatgactcttcccaaatctgctccagcccgagtaaggtagcttccccacctcctggcccacagccccagggaggctgtctgtgcatcctgaaccactctgtgctgggcctccccgaggacctctcttgggtgtgtgccctttttcaagcctgtttagatgggggagtgcccatgccctctgtgaaatgcccagatgccaaagaataacaccttttcttgcattttgagctaagccagacagcctttctactagattctatcaaaatcttgcaaaggagaacaaaacgaacaacttctattcttaaacacatcctttctcccctgggcttgtaagatgatgcggnnnnnnnnnnnnnnnnnaacaccaggtcccctgggaactgggggtgcaggggttctccctctgggggacagaaaatctgactactaggaagacttctaggctgtgaaactgacttctaggatatgaaactgacttctaggctatgaaacttacagggtatgggtgggcacattatcc

SEQ ID NO: 14676 - DNA, 710 bp, Macaca Fascicularis
  misc_feature (1)...(710): n = A,T,C or G
agatgaagaaacaagtaaagaaatggaagtgaaacccaattcggtgactgcagccgcaagtcctgtgtaccagatttcagaacttatatttccacctcttccaatgtggcatcctttgcccagaaaaaagccaggaatgtatcgagggaatggccatcagaatcactatcctcctcctgttccatttggttatccaaatcagggaaggaaaaataaaccatatcgcccaattccagtgacatgggtacctcctcctggaatgcattgtgaccggaatcactggattaatcctcacatgttagcacctcactaacttcttttttgattgtgttggtgtcatgttgagaaaaaggtagaataaaccttactacacattaaaagttaaaagttcttactaatagtagtgaagttagatgggccaaaccatcaaacttatttttatagaagttattgagaataatctttcttaaaaaatatatgcactttagatatattgatatagtttgagaaactttattaaagttagtcaagtgcctaagtttttaatattggacttgagtatttatatattgtgcatcaactctgttggatacgagaacactgtagaagtggacgatctgttctagcacctttgagcatttactttatggagcgtatgtaagttatttatacacaaggaaatctattttatgtcgttgtttaaaannnnt

SEQ ID NO: 14677 - DNA, 706 bp, Macaca Fascicularis
  misc_feature (1)...(706): n = A,T,C or G
gacggattgttttncaggattcattcggaagcacatcttttaaattaagccactgtgatgccttagttttccatgggtcatgagccatgagtcctgggacatctgaggattgggattctttgttcaccccccagacagttaatgccctgccctgggcaagatcggggtcgggggctgggggaatatgcatgttgaaaaagcctgcgtttttattagcggtcctgagtaattttccttggcaaaattccccgttttgccacttgttggaggcagattctgggagctgtcagcaaggagcagctaagtgagcagttaaggacggcactttccatgtggcacttctgacccggctgtcagattgaaatgtaaaatcagggctctgtacagttttgccatttcactgttctgctttgagcttaggttattagaacgcttggtggcgggtgtgtacacacattccagaaaggcttcactcgctgggaacgtcagcccagtgagaaaagaggggaagccccttctccagggaccttatctgtggactcagggatgacggtgtttattgcaaatgcacaatctttttcccattgaaatgtcatcacactggaaattgtactatatgtaaaaaaaaaaagtatagttttatatttgaaatgtatacaaattatggccatatggctgattggaatgtactgctgtaatacaaaaa

SEQ ID NO: 14678 - DNA, 714 bp, Macaca Fascicularis
  misc_feature (1)...(714): n = A,T,C or G
gcatttggaagcgggaagttccagtgtcctggaaggtggtttgctctgttagaggttcagatgtgtgttattttaatactttatnnnnnnnnnnnnnnnnntctggacccattacccaaacagagttctctccatttggtgggtgtcccccagnnnnnnnnnnnnnnnnnnnnnnnnnnnaaacaaagaatatgacatctgttgggcctcacaagggccagggccttctgcgggagtggcaccaccccacctggcagcacctagacctgagctctacaaaaaaacactgcttcactttgttttgggacttagttcaagaacacnnnnnnnnnnnnnnngtcttnnnnnnnnnnnnnnnnnnnnnnnnnnnnnnnnntcgctctcagtaatatagagaccggaatacatggtttagaggaaatgatcaaatgatccaaaaaaaccccacatttttaaagaagttggaatnnnnnnnnnnnnnnaactgtattaaaacattaaatagatataatgtcatttgaatgaaaatcttatcacattaaattcactgtgaaggtagcatacttaaatctctattttgaaaagactataaggcttagattttttaaatttaataattatttctacaaatttctatttttcttaatgtgattctcaactagcaattggaactcctaggctccattaacgtaattctttattgtaaacatatct

SEQ ID NO: 14679 - DNA, 870 bp, Macaca Fascicularis
  misc_feature (1)...(870): n = A,T,C or G
tgactacaactccctaatagagataaagacaaaaaagtttatcttattagaaacaagatacaccaccacttattgtcttcaaacattattgcactttaactttcttaatttgacaaagcattcaagaaacaatctgcagactagttttaacagacaaataacacctgtaagcagacatgactgtcctaaattgtttattaggtatgaattttacaaacnnnnnnnnnnnnnnnnnnnnnnnnngagctggagagtattgcgccttctccaagctgcccggcgagaacctccaatagtgtggtggaacttatggccctttccaaggccacggctctttcggcccgcagatgtcagcccacgcatctccctgtgcttgtggactggtttggtgatccattgggtgtcaggatttcttctgatagctttatggaatggatcaatgaggataacctcaaaaaatttgtatgtggaatcttctccaacnnnnnnnnnnnnnnnnnnnnnnnnnnnnnnnnnnnnnnnnnnnnnnngctcctnnnnnnnnnnnnnnnnnnnnnnnnnnnnnnnnnnnngnnnnnnnnnnnnnnnnnnnnnnnnnnnnnnnnnnnnncccttagnnnnnnnnnnnnnnnnnnnnccacggcgaacacgaatcctatatataacnnnnnnnnnnnnnnncttgtagcccagtcggcgcgctttatcaggccgggtggggcggggagccctgtggagannnnnnnnnnnnnnnnnnnnnnnnnnnnngaccctnnnnnnnnnnnnnnnnnnnnnnnnnnnnnnntttctccatagctcctgaatgtacttgtatgcacccatcttggcttacctgatggctgccgccag

SEQ ID NO: 14680 - DNA, 823 bp, Macaca Fascicularis
  misc_feature (1)...(823): n = A,T,C or G
atgaatgtaacatgaaatgtgncnnnncnnncatcagagttagtgttctggaaggaatgcagcaggggagggaatattgaggaatcatctagaacaattaagccgaccaggaaacctcattcctacctacactggaaggagcgctctcactgtggaagagttctgctaacacaagctgatctgcatgtttgtggatccagcagagagcggcagactttcttctctttttccctctcacctaaatgtcaatttgtcattgaatgtaaaaatgaaaccttctgacacaaaacttgagccacttggaggtttactcctcgcacttaagtatttgagtcttttcccatttcctcccactttactcaccttagtggtgaaagaagactagtagcatcttttctacaatgttaaaattgcagaaatagcttatcattaaacaacaacaacaaattctaagtgtaaatcagtaattctaccccctagcaagggggtagcctgctttttccctttttccttctgggaataattgtgggcttcttcgcaaatttctacaacccctttcctcttctcatgcttgggtttccctgtttgcacatatgggtnnnnnnnnnnnnnnnnnnnnnnnnnnnnnnnnnnnnnnnnnnnnnnnnnnnnncttgttactgttggagaaactcaaaccttcaagccctacgtgtagccattttgtcaagtcatcaactgtatttttgtactggcattaacaaaaaaagagataaaatattgtcccattaaactttaataaaactttaaaaggaaaaaaaaaaaaaaaaaaaaaaaaaaaagg

SEQ ID NO: 14681 - DNA, 686 bp, Macaca Fascicularis
  misc_feature (1)...(686): n = A,T,C or G
caggcgtgagccaccgtgcctggcctcttgcaatttttaataagctaaaaaaaaattcttatacacaggtagannnnnnnnnnnnnnnggaagggcccctgaaggtctttctnnnnnnnnnnnnnnnnnnnncctagccgtcactgcaccttctgccctccctgctgtcctctgtcagttacagttaaaaggtggtgggtgaggacgctgnnnnnnnnnnnnnnnnnnnnnnnnnnnctcccaagcccggcctgcctgcnnnnnnnnnnnngcgtgccgcagtggagagtgtggtgctgggagccatcctggtggcagacgtgggctcactgtgagtcgatgtaagtcccgggggaccgtcagcagcacctcctgctgcccctgtctctgcagannnnnnnnnnnnnnnnnnnnnnagaaacctccctgaggatttctgaggaactgtcagtaggctgtgtcctcgtccaccccgtgtggagcacagctccaatgtggctctgctcccgtcgtgggctgaggagnnnnnnnnnnnnnnnnnnnnnnctcggaaaggaggctnnnnnnnnnnnccctttgtgcgagctcccggtccatgctgtctccactcctgagccttacggcgatgggtgaccacagagccctttgcaagagtctggtttagggctgggtcttcccgtcgccct

SEQ ID NO: 14682 - DNA, 776 bp, Macaca Fascicularis
  misc_feature (1)...(776): n = A,T,C or G
ctgcgcagcgggagcgtggcagcnnngcgnnnnnngcgnnnnntggatggggacagccgagatggcggcggcggcaaggacgccaccgggtcggaggactacgagaacctgccgaccagcgcctccgtgtccacccacatgacagccggagcgatggccgggatcctggagcactcggtcatgtacccggtggactcggtgaagacacgaatgcagagtttgagtccagatcccaaagcccggtacacaagtatctacggagccctccagaaaatcatgcggactgaaggcttctggaggcccttgcggggcgtcaacgtcatggtcatgggtgcagggccggcccacgccatgtattttgcctgctatgaaaacatgaaaaggactttaaatnnnnnnnnnnnnnnnnnnnnnnnnnnnnnnnnnnncaacggtattttgaaagcgtttgtctggagttagaaagttctcttcttcaacacgtccctccccagggtgttcctccttgtgacccagccgcctcgacttcggcccgcttgctcatgaataaagaactcagagttgtgtgtgcaacgcacacccagacacacgcacacacacgcgcgcgcgcacacacatgcttttttctgttcccctccgctttctgaannnnnnnnnnnnnnnnnnnnnnnnnnnnnnnnnngttttattgttatgtgggttttctttttttgttatttttttgttttgttttgtttttaaacattcaaaagcaattaatgatcagacataggaga

SEQ ID NO: 14683 - DNA, 720 bp, Macaca Fascicularis
  misc_feature (1)...(720): n = A,T,C or G
agagctgcagcnnnnnnntcagggtgcacagtggaaattaaaagtggagcacatgattattacaatgtccntnnnaataagagcctgtggaaagcctatatggaaaatggaagaaaactaggaatagaattcatttcagaagataaaatgttgaatggcccttcaggatctacagattttggaaatgttacttttgtggttcctggaattcatccatattttcacattggatctaatgccttgaatcacactgaacagtacactgaagctgctgggtcacaggaagctcagttctacactttgcggacggccaaagccctggcaatgannnnnnnnnnnnnnntttttaaaccagagttactggaaagaatcagagaggactttaaactgaaacttcaagaagaacagtttgtaaatgcagtagaatagaaggaagacttagggaccgcttataaatcaagaagatgtgatgatttttttcttttaatctcttttaatgaaggcatgcttgttttttaatcttaannnnnnnnnnnnnnnnnnnnnnnnnnnngtgaagacagggtgtggagaaaacatattacctcatatctgaagtgaaaatttttgcaaatctactcgatgggattatgatattacaggagctgatatgtgatgccatttcttttctttccccccacaaccactcaccttcacagtagtgataccatttcttaaact

SEQ ID NO: 14684 - DNA, 739 bp, Macaca Fascicularis
cagtccagcaccatgggctacatggggagccagtcggtctccatgggctaccagccttacaacatgcagaatctcatgaccaccctcccgagccaggacgcgtctctgccaccccagcagccctacatcgcggggcagcagcccatgtaccagcagatggcatcctctggcggtcccccccagcagcagccccctgtggcccagcagccgcaggcgcaggggccgccggcacagggcagcgaggcccagctcatctcattcgactgacccaggccgtgctcacgtccggagtaacactacagttcacccgaaacgcctcgtctcttaactgccatcatcccgcctccctgtcctctactgctggtagtgtcccttctctgcgagtgagggggggctttcaccccaagcccaccttccttcttgtcctcagcccgctgcagttcctgagttggtctctgctttctttccccaaggctgggccacggggagggaaggtgggagggaaggaccttctcccaggggaagcccccagccctgtgggttatggtctgtgagaagtggcaggaatggggaccctcacccccccgagcagcctgtgccctctggccccactgtgagctggctgtggtgtctgggtgtggcctggggctccctctccaggggcctctcggcagccacagccaagggtggaggcttcaggtctccagcttctctgcttctcagctgtcatctccagtgc

SEQ ID NO: 14685 - DNA, 734 bp, Macaca Fascicularis
  misc_feature (1)...(734): n = A,T,C or G
atggcattgggtgggtcagtatggccaatgctgnnnnngacaccaatggctctcagttctttatcaccttgaccaagccnnnnnnnntggacggcaaacatgtggtannnnnaannntcancgatgggnnnacagtggtgcactccatagagctccaagcaaatgatgggcacgaccgtccactcaccaactgctcaattgtcaacagtggcaagatagatgtgaaaacgccttttgtggttgaggtcgctgactggtgacacaactggcagaaaacaaggatacgctttggcggggtgtgtgtgtgtgtgtgtgtgtgtgtgtgtatgtgtgtgtgtgtggtgtctttcaattatttgctttgttttttttccttttttactttctattttctatacccagatcacaggaaagttataaaaatcaaaccatcagcctttagtttgcttgaactttagtaaaccaactgcttagggactttcaacttaaatatatacacttcatcaagtggtactatttttaaagtaaaaaaactatgaattggctatttttttaatgcaataatgtttttttctgaattcattatgatccccatattgggtaatnnnnaagatttgtctgaaaacaagatgacggatanngtttattattttgtatccaaacagaaattcaggtaaagggaaatttgactagtgtaatctgagatatgtcatagggatttcttcctaacaaaa

SEQ ID NO: 14686 - DNA, 736 bp, Macaca Fascicularis
  misc_feature (1)...(736): n = A,T,C or G
ggcgagcagcgggagcgcnnnnngacgttccagaagcggcagaagctcacctccgagggcgccgccaagctcctgctggacacctttgaataccagggcctggtgaagcacacaggaggctgccactgtggagcagttcgttttgaagtttgggcctcagcagacttgcatatatttgactgcaactgcagcatttgcaagaagaagcagaatagacacttcattgttccagcttctcgcttcaagctcctgaagggagctgagcacataacgacttacacattcaatactcacaaagcccagcacaccttctgtaagagatgtggcgttcagagcttctatactccacgctcaaaccctggaggcttcggaatcgccccccactgcctggatgagggcactgtgcggagtatggtcactgaggaattcaatggcagtgattgggagaaggccatgaaagagcacaagaccctcaagaacatgtctaaagagtgagcttctgcctctcctgccctgaaaaggaggagtgattggggccagcaactttgctttccttgccgtgcctcggtggtgctcctgaatgtggctgacctgggctgctggttccgttgactagggccatcttgatctctgcagtttgctccagctaccagtttctttaggcagctctttgtcctccctctgcccagattttgatgtagtctagttgacatccttctcttcccaacttttgtgt

SEQ ID NO: 14687 - DNA, 646 bp, Macaca Fascicularis
  misc_feature (1)...(646): n = A,T,C or G
gcnnnnnnnnnnnnnnnnnnnnnnnnnnnnnnnnnnnnnnnnnnnnnnnnnncatggaccgcgaaggcttcctctacttccgcgaccgcctcggggacaccctctgatggaaaggcgagannnnnnnnnnnnnnnaggtggagagcgtgttgtcgcaggtggnnnnnnnnnnnnnnnnnnnnnnnnnnnnnntgtgtgtgccagantgtgagggtaaagtgggcatggctgccgtgcagctagcccccggnnnnnnatttgacaggcagaagttgtaccggcacgttcgcgcttggctccctgcctacgctaccccccatttcatctgcatccaggacgccgtggaggtcacgagcacgttcaaattgatgaagacccggctggtgnnngaagggttcaacgtggggatagtgnnnnnnnccctgtttgtactcgacaaccaggccgagtctctccggcccccgacggcagaaacgtaccaggctgtgtgtgagggaacctggaggctctgactatctggccaacccactggggcagggatcaaagccagacacccccaccccaacacattctttcaacatgggcctgcgtgaatcccagtctggccataccctcaacctcagtgggctggannnnnnnnnnnnnc

SEQ ID NO: 14688 - DNA, 740 bp, Macaca Fascicularis
  misc_feature (1)...(740): n = A,T,C or G
tgtcaatcagacatgagacatnnnntgaataagaatggaggagtgatggctgaaggagctcgtcactcttttgacaaaaagggggtgatcgtggttggagtggaggacagagannnnnnnnnnnnnnnnnnnnnnnnnnnnnnnnnnnnnnnnnnnnnnnnnnnngctgaggatgtcaaggaaactgaagacgaagaagaaaggaacgtttttaaatttatttgtgatgcctcttcactgcaccaagtgagnnnnnnnnnnnnnnnnnnnggcctgtgttctgtgtcctgtgcactagagttcatccccaactcaaaggtgcagctggccgagcccgannnnnnnnnnnnnnnnnnnnnnnnnnnnnnnntcggcaaccacgaggatgtgattcacgtctatgacaacatnnnnnnnnnnnnnnnnnnnnnnnnnnnnnnnnnnnnnnnnnnnnnnnnnngcccattccagcacacaggcttctgcagcaatctctgagagtaaagccggtgggaggctcagcagaccaggaggcccaaagccaggacttgtgaccttgnnnnnnnnnnnnnnnnnnnnnnnnnnnnnnnnnnnnnnnnttgctactgtctcagagccacctggatgagtgtcccgacaccctcttggatgcagggcaggaccccccagnnnnnnnnnnnnnnntgttgggtagctggcctctgtgggaattgtaagtgccctgaggcactatgtactag

SEQ ID NO: 14689 - DNA, 753 bp, Macaca Fascicularis
  misc_feature (1)...(753): n = A,T,C or G
tgcagctgatccagtcataccagcggatgccaggcaatgccatggtgaggggcttccgtgtggcctataagcggcatgtgctgaccatggatgacttggggaccttgtatggacagaactggctcaatgaccaggtgatgaacatgtatggagacctggtcatggacacagtccctgaaaaggtgcatttcttcaatagtttcttctatgataaactccgtaccaagggttatgatggggtgaaaaggtggaccaaaaacgtgagttttgaattgacatctacttgtgtaatgcctttgcctctacagaatgagagtcttgttttctatgagccctttccctgactgtgttcattcagtctgtcaaagattaaacgtctcctgtgtgtgtaggcactaaagatacagtattaaataaggaaaacttgcccttgtggagtgagaatacagttaaattgcagctagcgataagtgctgtgggcagatcaaaacagagtaatgtgaggccnnnnnnnnnnnnnnnnnnnnnnnnnnnnnnnnnnnnnnnnnnnnnnnnnnnnnnnnnnnnnnnnnnnnnnnnnnnnnnnnnnnnnnnnnnnnnnnnnnnnnnnnnnnnnnnnnnnnnnnnnnnnnnnnnnnnnnnnnnnnnnnnnncagatggcctgttaataannnnnnnnnnnnnnnnnnnnnnnnnnnnnnnnnnnnnnnnnnnnnnnnnnnnnnnnnnnnnnnnnnnnnnnnnnccccccac

SEQ ID NO: 14690 - DNA, 689 bp, Macaca Fascicularis
gccctcaatgggccggcggcaggcaccgcagatggggacgcccatcttgtcatggcagggcaggcagtagagctcgcccttcagctcacgggcctcagccgtcagctccttcccacagtgcgtgcagttgaagtggtcagggtggtaggcgtcgctcctgaacatgaggggctgctcgtcgatgaccaggtggcaccgctggcagatgtacttgcccaggcccttggccttctcacggttgtggcaaggccggcagagatgcctgccggcattcttcacgaagcccaggtcagccagctccacatcgcacagctcgcagcggaagcagcccgggtgccagttgttgttcatagccttgatgacgcggccaatgatgaactcgccgcaggatccgcagcacggagcaaacagcatttggaagtcgtgttcacagtatttccggccttcaaactcatagaagagcccctcggggaagggccggaagcactgggcacacacgaagcagtgctcatggtacagctccccattgctgttgacaatgcgttcagcgggggcgaagcgggcctggcaacgctggcacacggcattggccaaggcgtccgacatgttgcttcccgtcatggtggcagcgacgccgagcgcggggtagccgcgggtctccctctgccgccagccgagcacccgcccgc

SEQ ID NO: 14691 - DNA, 707 bp, Macaca Fascicularis
  misc_feature (1)...(707): n = A,T,C or G
cccacccccaaccccggcggcnnnccggtgagtcaccgccgacccccgccgccggagggagaggggagctgcgggccagagccccggagtgtttctgggagcagagggtcccttagtgggcttctgtcctgatgtcgctacgggcgcgaaacggacactgaacacagtctgactgaatggaggcaggtggggagggatcccttgggagaacttggcggaccgagagcagaccccagggcaaggaggagcccccgaggaggaaaggggaaaccggcagatggcgaggcccagaaagggcaggggagccgggttgattggggtgacagaggaaggaaacacgccaagttaggcctgggagaactgagggacctgaggagggaggagggagaccaacatcaggtgggaaggtggaaatggctaaaccccaggcatcaggtctgtccagaggctggcgtagacagtgaagggtaggttttagggggtagggggagttatgattatttgggtacattttgggattatttggtctcataggtagaagggagcctgctggtctcgtgtaacggatggtttaaaaacaaggttgtctgcgtcttggattactgtctgccattcagcctttgccaaaaaacttggcactgatctgcacatttttatagtcatttaaaattgtatgactctatttgtcaaacgatttaggtaatttt

SEQ ID NO: 14692 - DNA, 1189 bp, Macaca Fascicularis
  misc_feature (1)...(1189): n = A,T,C or G
cgcggacgaggcatcatatgcatggaccacctgnnnnnnnnnnnnnnnnnnntgaatggcaaccccatggtgatgaaggacggcaaatgggtggtgcagaagtatattgagcggcccctgctcatctttggcacnnnnnnnnnnnnnnnncagtggttcctggtaactgactggaacccacttactgtgtggttctaccgcgacagctatatccgcttttccacacagccctnnnnnnnnnnnnnnnnnnnnnnctcagtgcacctgtgtaacaactccatccagaagcacctggagaactcatgccatcggcatccactgcttcccccagacaacatgtggtccagccagaggttccaggcccacctgcaggagatgggggccccaannnnnnnnnnnnnnnnnnnnnnnnnnnnnnnnaaggatgctgtaatccacgcacttcagacctcccaggacactgtgcagtgtcggaaggccagctttgagctctatggtgctgactttgtgttcggggaggacttccagccctggctgattgagatcaacgccagccccaccatggcgccctccacggcagtcacagcccggctctgtgctggcgtgcaagctgnnntcctccacgtggtcattgaagggcagctagaccacaactgtgaccccctaggccctcacagcttctcttgctcccacagcccctcaccacttccccagcctccacaccaaggcccagctgccttctccccatgtactccgacaccagggccagatcctcagacnnnnnnnnnnnnnnnnnntgggcactaaggccctgtcgaccacaggcaaggccttgatgactctacccacggccaaggtcttcatttccctcccacctaaccttgatttcaaggtggcacccagcatcctgaagccaagaaaggctcctgctctcttctgcctccgaggcccccagctggaagtgccttgttgcctctgcccttnnnnnnnnnnnnnattcctagcacccgtaggaaggtcaaggacaaagnnnnnnnnnnnnnnnnnnnnnnnnnnnnnnnnnnnnnnnnnnnnnnnnnnnnnnnnnnnnnnnnnnctgaaacccctgccccttgttggtacattccagaggcacaggggcctgggggtatgaagctagggaagcccctgcttcgattccccactgccc

SEQ ID NO: 14693 - DNA, 732 bp, Macaca Fascicularis
  misc_feature (1)...(732): n = A,T,C or G
cagaatccactgatttctgngggctccaatgagaacaaggctttgaaactgaacaagataccttctagaaatgaactgtgctaatccctttccccagattgtatcatgagtaggaccaggttcacgtggtgcttcaaagccctgagaagaatatttctttggaccccaggcactaggggccacctgcctgggagtctccctgcctcactcgtctaggcaggggagtgatgcttgaggacgtgacaggctgttctaacatgtatctacctgaggggtagttgaaggatccaggagtattttcttcttgggtaggccctgaacaaagccaaatagaaaccagtctagaaaaagtcctgctcatctgtgtccactgccttctagccatcctccaccttgcagagagaatctagactttggtctcagtctctccctttcatctgggtcatttgctattcccctcagatattcaaccctgtagaaggagcctggactctgatccctctgtacaggctggatggagggggccctcaacattccctgggaggtcagagacaaactttcagagagtcagatggacttcccaagacttgctcagagatatgacatggctcttggatttcctctgtagcagcctcctggacttcctgaggactcgacattgtccacagatgtactggccattacatgaaacaagaaaccaagcatctttgctgttgttaattattatatgtg

SEQ ID NO: 14694 - DNA, 748 bp, Macaca Fascicularis
  misc_feature (1)...(748): n = A,T,C or G
cagatacacgaatggccctcctccacnctgaactaagcagatgccatctgcagaagtgctggtagcatgcggaggatcgggtcataagcaatcccaagctatcaacaagaggaccttggtcttggcaaaagccctnnnnnnnnnnnnnnnnnnnnnnnnnnnnnnnnnnnnnnnnnnnnnnnnnnctttggaggtggaggataaacagtgacaggagaacaaacagacgacaagaaggtttggaagaaacctggtttgagactctgaaccttagcactaaagagattgagtaaggacccccaaagttccctggactcatgaattctgggcccttggcccattctatgcatagccaaggacttcagtagaccatctgggcagctttcccatggtgctgctccaannnnnnnnnnnnnnaccctcccaagcaccatgtcagtgtcgtacaatctaccaaccaaccagtgcnnnnnnnnnnnnnnnnnnntgtaacatacaatttttaagagcttatatggcagcttcctttttaccttgttttcctttggggcatgatgttttaacctttgctttagaagcacaagctgtaaatctaaaaggcactttttttagaggtataaagaaaaactagatgtaataaataagatcatggaaggctttatgtgaaaaaagttgaatgttatagttaaaaaaaagatatttatgtatgtacagtttgctaaagccgnagttttgtttgtattgattt

SEQ ID NO: 14695 - DNA, 770 bp, Macaca Fascicularis
  misc_feature (1)...(770): n = A,T,C or G
ataggaccagtaaagggaaatacattcatttccatttcagtgaacacaggtgagtgcctaccccatgtaaacactgtcctgggccagttgtgtgttgaacattaccttagaaacatataactaagtcagtattttgtgctaaaataataatcactgggtttatctgccttcttatagggcagaaagtcagaaaaatggttagtgaatcctgttgatgannnnnnnnnnnnnnnnnnnnncattttgctgatagtggagaaggaggtgcaattaactttcctttcaatatcgtagggtgcttttgagaggaagtnnnnnnnnnnnnnnnnnnngttcaatactctgtatctccgtgtacgtggggatggtcggccttggatggtgaatatcaaggaggatacagatttcctccagaggacgaatcagatgtatagttacttcatgttcacccgtggtggaccctactggcaggaggtcaagattcctttttccaaatttttcttctctaatcgaggaagaatccggnnnnnnnnnnnnnnnnntctgcttgacaagatctcttctataggattcaccttggctgataaagtggatggtccattctttctggagatagattttattggagtgtttactgatccagcccatacagaagaatttgcctatgaaaattctccagagcttaacccaaggctttttaaataaagattatgtggtagttttgttttactactctaagggtactagcatctataatgatgtagacaaaa

SEQ ID NO: 14696 - DNA, 665 bp, Macaca Fascicularis
  misc_feature (1)...(665): n = A,T,C or G
caggtggctcaccagaagccgcatgcctccatggacaagcatccttccccaagaacccagcacatccagcagccacgcaagtgagcctggaccccaccagcctcccccgcggccccggctcttctgtacttggtatttccctgacagagaaaaccagcactttctcccaaatcctgtctctgctgggaaatctaaggcaaaaccaagtgctctgtcctttgcctttacatttccatattaaaaactagaaaccgctccagcccaaaccttgtttatggggagtcgcggttggatgtcgtttgaggatgattgcgcccctagaggtgccattagcagaatttgccaagatctgagaaaaacttttagctttagttctatttcagcagtcgcctgacatccttgtctgtggtcttaaaaacaagaaagcacacatttgagaggatgagattaaggttaggggaaaagctcagccattgcatgctttttagtattgggacagtaaaatcttaacacctgcgggaaagtaagaactaagggaatgagtttgggcagcccctcagaaagaccgttagaggcagggaagnnnnnnnnnnnnnnnccctcccttgtgagatgggggatcctgtgcaggctgaggaggcacccatgagaaagccaaaaaagca

SEQ ID NO: 14697 - DNA, 736 bp, Macaca Fascicularis
  misc_feature (1)...(736): n = A,T,C or G
cnnnnnnnnnnnnnnnnnnnnnnnnnnnnnnnnnnnnnnnnnctgagtgaggtgattacctccatgggtggtctggatggtgagctgggtgaggggggccggagcttatctcttgggcagaggcagctgttgtgtctggccagggctctcctcacagatgccaagatcctgtgtattgatgaggccacagcaagtgtggaccagaagacagaccagctgctccagcagaccatctgcaaacgnnnnnnnnnnnnnacagtgctgaccattgcccataggcttaacacgatcctgaactcagaccgggtgctggtgctacaagcgggaagagtggtagagctggactccccggccaccctgcgcaaccagccccactcgctatnnnnnnnnnnnnnnnnnnnnngccagcagggagtccccgcctcactcggaggtcgctgagctccatcccacaccctgcagtgttctcccctctctctgatccaggccgggcctgtatagaggtgctggctgcttgtttacattctcctctggggctctacctctccacacttccccagaagggaaaagggcaccctgggttactctttggaaatcactcctnnnnnnnnnnnnnnnnnaggcttccccagaaccaggcctctgctctggccctcttgcatctggaacgccaggtgggtttttctggcataggagcccacttgcattttcatagttttatttgataaaatcccat

SEQ ID NO: 14698 - DNA, 769 bp, Macaca Fascicularis
  misc_feature (1)...(769): n = A,T,C or G
aggtcnnnnntcaatgnnnnnnctnnannnnagccatggatgtagctttggggtccggtgccactggggtctttactaattngttcctnnnnnnnnncaaannnntnnnnnnnnnnnnnnnnnnnnnnnnccgtgtctggaggatgcctctcttcgaacattatacaagacaggttgtagannnnnnnnnnnnnnnnnnnnnnnnnnnnngaaaatatagatctgcgggnnnnnnnnnnnnnnnnnnnnnnctgaaagaattcgtgactcatcctaagtgggcacatttagacatagcannnnnnnnnnnnnnnaaagatgaggttccctatctccggaaaggcatgaccgggaggcccacaaggactctcatcgagttcttacttcgtttcagtcaagacaatgcttagttcagatactcaaaaatgtcttcggtctgtcttaaattggacagttgaacttaaaaggtttttgaataaatggatgaaaatcttttaacggagacagaggatggtatttaaaaatgtagaacacaatgaaatttgtatgccttgagttttttttcattttacacaaagatttataaaggtaaagttaatatcttacttgacaaggatttttaagatactctataaatgattaaaatttttagaacttcctaatcacttttcagagtatatgtttttaattgataagcaaaattgtacctcagatttgtgatgctaggaacatgagcaaactgaanattactatgcactgtcagaaacaa

SEQ ID NO: 14699 - DNA, 747 bp, Macaca Fascicularis
  misc_feature (1)...(747): n = A,T,C or G
catcaagaaagactatggttcccagaaagacttcactcaagtgtggaacaccaccatgacagagctcaagtgctgtggcttcaccaactacacggattttgaggactcgccctacgtcagagagaacaatgcctttcccccattctgttgcaataacgtcaccaacacagtcaatgaaacctgcaccaaggaaaaggctgacaaccaaaaagtagagggttgtttccaacagcttttgtatgacatccgaactaatgcagtcactgtgggtggtgtggcagctggaattgggggcctcgagctggctgccatgattgtgtccatgtatctgtactgcaatctacaataagtacacnnnnnnnnnnnnnnnnnnnnnnnnnnnnnnnnaactgtgaagaggcaccctggcaagaagcagtgatgggggaagtgtcaggatctaacaatgtcacttgggccagagtggacctgcccttcctgctccagacttggggctagatagggaccactccttttaggcagtgcctgactttcctttcattggcgggtgggtgggtggggggcattccagagcctctaaggtagccagttctgttgcccattcccccagtctattaaacccttgaaacgcccctaggcctagtggtgatcccagtgctctactgggggatgagaggaaagcannnnnnnnnnnnnnnntaagtgaaatcagcagagcctctgggcggatatgtagaagcactcaaa

SEQ ID NO: 14700 - DNA, 678 bp, Macaca Fascicularis
agacaagaaaacgccgaccagcatcgagtactggttccgctgcatggacctggacggggacggcgccctgtccatgttcgagctcgagtacttctacgaggagcagtgccggaggctggacagcatggccatcgaggccctgcccttccaggactgcctctgccagatgctggacctggtcaagccgaggagcgaagggaggatcacgctgcgggacccgaagcgctgcaagctggccggcgtgttcttcgacaccttcttcaacatcgagaagtacctggaccacgagcagaaggagcagatctcgctgctcagggacagtgatggcagcggccccgagctctcggactgggagaagtacgcggccgaggagtacgacatcttggtggccgaggagacggcgggggagccctgggaggacgggttcgaggccgagctcagccctgtggagcagaagctgagtgccctgcggtccccgctggcccagaggccgttcttcgaggcgccctcgcccctgggcgccgtggacctgtacgagtacgcgtgcggggacgaggacctggagccgctgtgaggccgcccggggaccccaccgcgggccccgctgcacgggccgcggccaccgcggcttgtgtaaaaactcttgtctgttgtggaaagcgagtgcgtttgtacgga

SEQ ID NO: 14701 - DNA, 751 bp, Macaca Fascicularis
ggagagattgaaaatattgaacttcccatggatacaaaaacaaatgagagaagaggattttgttttatcacatacaccgatgaagagccagtaaaaaaattgttagaaagcagataccatcaaattggttctgggaagtgtgaaatcaaagttgcacaacccaaagaggtatataggcagcaacagcaacaacaaaaaggtggaagaggtgctgcggctggtggccgaggtggtacgaggggtcgtggccgaggtcagggccaaaactggaaccaaggatttaataactattatgatcaaggatatggaaattacaatagtgcctatggtggtgatcaaaactatagtggctatggcggatatgattatactgggtataactatgggaactatggatatggacagggatatgcagactacagtggtcaacagagcacttatggcaaggcatctcgagggggtggcaatcaccaaaacaattaccagccatactaaaggagaacattggagaaaacaggaggagatgttaaagtaacccatcttgcaggacgacattgaagattggtcttctgttgatctaagatgattattttgtaaaagactttctagtgtacaagacacgattgtgtccaactgtatatagctgccaattagttttctttgtttttactttgtcctttgctatctgtgttatgactcaatgtggatttgtttatacacattttatttgtatcatttcatgtaaactcaa

SEQ ID NO: 14702 - DNA, 778 bp, Macaca Fascicularis
  misc_feature (1)...(778): n = A,T,C or G
aattaagtatttggagaacagaatatggcaaagagannnnnnnnnnnnnnnnnnnnnnnnnnnnnnnnnnnnnnnntacaatgacctggtcccacctataggaatgttgaataatcctatgaatgcagtaacaacaaaatttgttcggacatcaacaaataaagtnnnnnnnnnnnnnnntgttgttaggtggactccagaaggaagacgcttggtcactggagcttctagtggggagtttaccttgtggaatggactcactttcaattttgaaacaatattacaggctcacgacagcccagtgagggccatgacgtggtcacataatgacatgtggatgttgacagcagaccacggaggatatgtgaaatattggcagtcgaacannnnnnnnnnnaagnnnnnnnnnnnnnnnaaggaggcgattagagaggccaggtttatacacaatataccattttctgtagtccctattgtcatggttaaattattnnnnnnnnnnnnnnnnnnngcagagatgcatgggctctgtcagattctgggaaactttctgcaccctataaacacaatatttttcttnnnnnnnnnnnnnnnnnnnnnnnnnnnnnnnctttctgaagtagtgttgtcccggtatcagcctttgcaatatgttagagatgtactgtctgccgcattttgcactggttttctcttttcatttatgattaataatgtgtatacgttattcctttttattatctactngtaagacaagaatatttcatccaaataaaga

SEQ ID NO: 14703 - DNA, 750 bp, Macaca Fascicularis
  misc_feature (1)...(750): n = A,T,C or G
tttaatatcagtctgttatcttacctgttattcatttcagaaagatatcnaannnngagctcaaaaatcnnnnngatgtatcttggggtctttgtataatggatcctagatcatgttttcttatacataataaaaatgaaactgtcctgcacagggtaagctttaaattaaacttcctttcctctccttttcagattgttaaaggaaatgggctggcaggaagacagtgaaaatgatgaaacatgtgctcccttaactgaggatgaaatgagagaattccaagttattagtgaacagttacagaagaatggtctgagaaannnnnnnnnnnnnnnnnnnnnnnnnnntctgtgacttcaagtttggaccttggaagaacagcactttcaaacccacaactgagaatgatgacacagagacaagtagcagtgacacatcagatgatgacgatgtgtgaaggatttcctaacagctttagaaatcttagtgtgatacatctctcatacagtttggggtgaattgtaaaaatgaagaactataatttatgtagtgaaataccccatttagaagaggattttttgggggacttcaatacgaagaaaaccaagaatgttttgttgggctgtgtnnnnnnnnnnnnnnnnnnnnnnnnnnnnnnnnnnnnnnnagacttgggttggtccannnnttgactttcttcatcactgcaacatttctctgactagcaatgtgacgatgtaacaaatgaga

SEQ ID NO: 14704 - DNA, 712 bp, Macaca Fascicularis
cgtggatgcctttgactatgacctgcagacaggacagatctccaaccgcagaagtgtttacaagctcgaaaaagaagaacaaatcccagatggaatgtgtattgatgctgaggggaagctctgggtggcctgttacaacggaggaagagtgattcgtttagatcctgtgacagggaaaagacttcaaactgtgaagctgcctgttgataaaacaacttcatgctgctttggagggaagaattactctgaaatgtacgtgacctgcgcccgggatgggatggaccccgagggccttttgaggcagcctgaagctggtggaattttcaagataactggtctgggggtcaaaggaattgctccctactcctatgcaggatgaggataggtcttctttcctgccagagggagctctgaagacaactagacaattctggggctgaaatttcaatctagttagaaagaaaaatgaggcaatgatatttttaacggggttaagttttaatgtacaacttttaaaaggcagagcgtttttaacaaggagtgacaggtggctttgataacacacttataaggctttctgtaaaaggtactatagaagagcaaagaatcgttcaactgtcaatcagcctcttgattctttgtaaattgccagggtgggtgggtacatatctcttcttgattctgcatttcatacttaactatattaaagctc

SEQ ID NO: 14705 - DNA, 727 bp, Macaca Fascicularis
  misc_feature (1)...(727): n = A,T,C or G
agattagctctacagacacacggggcacccggcccaaccaggaaaggcattnaagacattcaccaacaacagtcagccagcttggtggtgatgtcccatgaccttgatgtgtgtggnnnnnnnnnnnnnnnnnnnnnnnnnnnnnnnnnnnnnnnnnnnnnnnnnnnnnnnnnnnnnnnnnnnnnnnnggtgcctacccagcaaggggtacctggcatcagagaggaaagagctgcttccctgtagtcacaagagcttccttctgaagtcatcgtttgctataagtttagtggccttattgnnnnnnnnnnnnnnnnnnttattcttccctgtgaaaccaggattaatcgtggactcctggcagcttaacctagctcagttgcagtnnnnnnnnnnncctgcccccattcagtgatacctgtttgggaagtgtatacttccctaaaagtactcttggccctaagttttgggaactttccctatcctggatcccttgtcatacccgtgttactgtttaaagcacacccacccaacttacaagatcttaggctgctgtggtggtgaatcaccttgnnnnnnnnnnnnnnnnnnnnaacaaggatctgcagtttccccttttnnnnnnnnnnnnnngtggttcttatgtgcaatctgcagtaaccttgaactccagagctgcactatagaggagaatgcatgccactatgacagcagtatgccaagcttt

SEQ ID NO: 14706 - DNA, 559 bp, Macaca Fascicularis
  misc_feature (1)...(559): n = A,T,C or G
ctttgctgtgcccaacccgaagcaggaccccannnnnnnnnnnnnnnnnnnnnnnnnnnnnnnnnnnnnnnnnnnnnnnnnnnnnnnnnnnnnnnnnnnnnnnnnnnnnnnnnnnnnnnnnnnnnnnnnnnnnaagtccaatnctaagcnnnnnnnnnnnnnnnnnnnnnnnnnnnccggcatgggagaatgggannnnnnnnnnnnttcacaannnnnnnnngctgtgnnnnnnnnnnnnnnnnnnnnnnnnnnnnnnnnnnnncactctnnnnnnnnnnnnnnnnnnnnnnngggggacctcttggctactgggaccatcagtgggcnnnnnnnnnnnnnnnnnnnnnnnnnnnnnnnnnnnnnncgtggaagggaacgaagcccatcagcctggggaatggtcagaccaggaagtttctgctggacggggatgaagtcatcataacagggtactgccagggggatggttaccgcatcggctttgnnnnnnnnnnnnnnnnnnnnnnnnnnnntctcttgccatcatgagattttctctnnnnnnnnnnnnnnnaag

SEQ ID NO: 14707 - DNA, 732 bp, Macaca Fascicularis
  misc_feature (1)...(732): n = A,T,C or G
tacacagcgacttcatgtacatccgcgagaaggccagcgccggcagccaggccnaggacaaggagcgctgcgtcatcagctaggagccccgccgcgccagcgacacaacctaaggaggacctttttgtttaaaagtcaaatccaacggcccggcacgccccgtgcgccccgggccgcgagcgcgcggactggcgtctcccctccccgcgattcgcccccagcactggggaggcgccactgaatcgagaagggacggtcatctgctccggaaggaaagagaactggccaagactaggactattcccccacccccgttcccccattggcgccagccacccccacaacttggggggcgagggcccagctgagggtggatttgtcttctcaaagacctaagagtgagcgcagggtgggggggatgtgaagttatccagcctctgttaggcttcaagaaacagtcctgcccgcttgcgggtcaggacccaggggcattatcttgtctgtgaatccgggttgctgtgacagccggcagagcctctgccctcccgaaactaaggggggcgtgggtcaaatcatagccaagtgacccgtttacatgtgagtgaaactgcacaaagcaacacaaaacaaaacttgcactttaacggtagttccggtgtcaacaaggacacgaacaaaaccttacccaggtgtttatactgtgtgtgtgtgaggtctttaaagttattgctg

SEQ ID NO: 14708 - DNA, 792 bp, Macaca Fascicularis
  misc_feature (1)...(792): n = A,T,C or G
ttgccnnnnnnnnnnnnnnnnnnnnnnnntgcantttnntcattcnccctgggaggcnnnnnnnnnnnnnnncacagctgagttgttgagtctgttttgtaaagtccccagagaaagcgcagatgctagcacatgccctaatgtctgtatcattctgtcagtgtctgagtggcttcactcctgctgtaaatttggcttctgttgtcaccttcacctcctttcaaggtaactgtactgggccatgttgcgcctccctggtgagagggccgggcagaggggcagatagaaaggagcctaggccaggtgcacccagggagctgcatgggcatgggaaggtgggcgggcagggcagggtccgccagggcctgcgagggtagcgggagcctccctgccttgggcctctgtgccgcatcattgaactgtaccacgtgctacgggggtcagaagatgaacagactgaccttgatgagctgtgcacaaagtggcataaaannnnnnnnnnnnnnncgtgtgaataaannnnnnnnnnnnaagaggaggcccttgattcacctcacacttccagtgaatgacaaaatcatcattgtgaaggcctcgcaggaagacccaacacatgggacctgtaactgcccagcggacagtggcaggacaggaaaaaccccagtcaatgtacgaggacactgctgtgtcattacaggccacaggccatggatggaaagcgcnntctgctctgctttttttctactgttttaatttatactggcatgctaaagccttcctatttgcataata

SEQ ID NO: 14709 - DNA, 741 bp, Macaca Fascicularis
  misc_feature (1)...(741): n = A,T,C or G
aggggccgccccgagggaaccacnnnnnnnnnnnnnnnnnnnnnnnnnnnnnnnnnnnnnnnnnnnnnnnnnnnnnnnnnnnnnnnnnnnncctttctcgcccaccatctgtcgttgtgtcctgtgcnnnnnnnnnnnnnnnnnnnnnnnnnnnnnnnnnnnnnnnnnnnnnctgggacnnnnnnnnnnnnnncaacctcaagggtaccttcctagtcactcaggcnnnnnnnnnnnnnnnnnnnnnnnnnnnnnnnnnnnnnnnnnnnnnnnnnattnnnnnnnnnnnaggaaaggtggggaacatggggcagacaaactatgtagcatccaaggctggagtgattgggctgacccagactgcagcnnnnnnnnnnnnnnnnnnnnnnnnnnnnnnnnnnnnnnnnnnnnnnnnnnnnnnnnnaacacccatgacannnnnnnnnnnnnnnnnnnnnnnnnnnnnnnnnnnnnnnnnnnnnnnnnnnnnatacttgggggaccctgaggannnnnnnnnnnnnnnnnnnnnnnnnnnnnnnnnnnacagtggatacatcacaggggcctcagtggaagtcactggaggtcttttcatgtaaccgcctcaaggaccctggactctgctcacccccccatcactctgcctggcctcctgctgatgaggactctaagttcccaggctacaaaaggggtggnnnnnnnnnnnncaggaatgctgaatatgggaagcaggggtgc

SEQ ID NO: 14710 - DNA, 624 bp, Macaca Fascicularis
  misc_feature (1)...(624): n = A,T,C or G
acaaaacnnnnccaagaatttgannnnnnnntgtttgcagattnnnnnnnnnnnnnnnnnnnnnnnnngcttgttgcctctgcnntccctcccntcacacagaggtgccctgggttanncaggggactccttagtccacactgtgtcacctgcatgccttaatctttcattgctggggtgtggccttgggagatcctgggccagcccctccacacatctccctaagtcagagtggctgctggccctggtagatttgagtgcttttgcctcactcgaccttcagagtgggactgaagacagtggccaagagacttgagtttgggacagtgagccaggggttaaggttctttcctttttttgaaagccaaagacccagtttgaattgtgctgctgcattcatggttagaagctttccatgcctatgttctagggaatttatttttctatgtgtgtatatttttaaactttgtttcctgggtactgggcatgtgcctgtctgagccccaggtctgtctacaccccaccattcattctgtctgtccgtcccctggacactgcctaaaagggtctcaagccagtgccctatgcgttcctaggactagggcccgttactgttctcttctg

SEQ ID NO: 14711 - DNA, 705 bp, Macaca Fascicularis
  misc_feature (1)...(705): n = A,T,C or G
ggcaaagctagacaagttggatggcttgaggactggtactannnggaaacgtgactgnnnnnnnnnngccagcagaatggaggattatcttcagctcnnnnnnnnnnntgatactcgtgcttctgagcctgggaagaagagggtcagatgggcagacctggaagagaagaaggatgcagataggaaaagggccataggttttgtggtcggacagannnnnnnnnnnnnnnnnnnnnnnnnnnnnnnnnnnnnnnnnnnnnnnnnnctcaatcgaaccaaatatatatgagacttagtttttgaacggagtcattattcctctaaggtggttcgctttgaggtgatctgaagccaaggcctcacggagcttctttgtgtgtcaccttgcttccacgtttcagttattgttttgtttctactgctttagtttttttaaagttctccagtgtccccaagaggtattagaatcttgctgtgcccaagcaagacgttaatttttcttttaactgttttggggagggagggagtgatagcttaactgcnnnnnnnnnnnnnnnnnnnnnnnnnnnattccaacagagaatatttcctccactgtacattgtcacagactatctctatcatcattgctttgtggctgtttctgttttttactgtatgtaactggtagctgattgtactaggattaaaanncaataaactttc

SEQ ID NO: 14712 - DNA, 763 bp, Macaca Fascicularis
  misc_feature (1)...(763): n = A,T,C or G
ggctgcaggntnnnnnnnnnnnnnnnnnnctcatnnnnnnnnnnnnnnnnnnctgtctgccttgggctccctgatattgatgatttnnnnnnnnnnnnnnnnnnnnnnnnnnnnnnnnnnnnnnnaaagactgggacttcttgctggatttgctttccttacaggagttggcctgggccctgccctggaattttgtattgctgtcaaccccagcatccttcccaccgctttcatgggcacagcaatgatcttcacctgcttcaccctcagtgcactctnnnnnnngcgccgtagctacctctttctgggaggnnnnnnnnnnnnnnncctgagcctgttgcttttgtcttccgtggggaatgttttctttggatccatttggcttttccaggcaaacctgtatgtgggactggtggtcatgtgtggctttgtcctttttgatactcaactcattattgaaaaggccgaaaatggagatcaagattatatctggcactgcattgatctcttcttagattttgttactnnnnnnnnnnnnnnnnnnnnnnnnnnggccatgaatgaaaaggataagaagaaagagaagaaatgaagtgaccatccagcctttcccaatttgacttcctctccttccacccctcatttcctttttgcacacattacaggtggtgtgttctgtgataatgaaaagcatcagaaaagcttttgtactttgtggtttcctcnnnttttgaattttttgatcaaaannnntgattagcag

SEQ ID NO: 14713 - DNA, 653 bp, Macaca Fascicularis
  misc_feature (1)...(653): n = A,T,C or G
gagaacgttagcgcgccccctgccaccgnnnnnnnnnnnnnnnnnnnnnnnnnnnnnctgctcaggctgggaaggcagacggtgtatcagaccttgcgtgctgggactcactttcnnnnnnnnnnnnnngcgccggggacaggccccaccaggacacggagccgaagcccctgccggagccggcaggtgtggtcatcaccctgcggaaaagacattctgagaatcccacatattgcccgccccgctcatcctcccaccgccccgcacttctcgcccctttgcctccacatgataccctgcccacacctttatcctccaaatatcccgggacgccccttcctctctgctcggtgcagcactgtggacccgcggcactccgcaactgctgcccagagtccccgcccttttcgatcaatcaaccaatgggagcatgggggatgggaccacagcgagcaactgaccaatgaaagtgagcgaggcccgccccctacaaacttttggccaatgggagcactgagggccaggcttcccccaccccaggggaagaggacgtnnnnnnnnnnnnnnnnnnnngacggcgctgacggggaaggggcggggctgaaacaggttggggcggagtcagggtcggtcctaaatttctggaatggagg

SEQ ID NO: 14714 - DNA, 1205 bp, Macaca Fascicularis
  misc_feature (1)...(1205): n = A,T,C or G
ttcccagccagttgtcagttggggtgaagatgtctgcaagtatgaggtctggacgctgctgctcatgttgggctttccttttgggaaatatttctcttatttatagtgttgggcttctggggaaagcagtcattggtgtgtatgtgtatgtgcacgcacacacatacatatacacgtttgtgtatgtggaaatgcactgggcaagtcaaaactgtagaagagttgcctcctgtctcgaatcttccagagataccacttaactgttaacaacttttgtgttaatccccgtcagcccccagctcttttattctaccacggctggagagttgatacctgcagtcagcctgccagtaactcttagtgtctgtttctgaattattcttcctgtctctgtcttccaacccccaataatatttccacctgggatgcatcatttgtactcccgatactctgtagagaaggagtcaggatgctgtcttcccacgaatagtactcagtaacaaaccaactgcattttagttgggcagtgctcccacccaccctccagatcccttccagctaaaacccttcccccttccctccatgtgtttctcagttccccgttctgtttgttggattgttccactgcccctcctcctcaccctaccacccttggatcgtaatgtaaaattcttttaccatgtcaagaaattattaaaaatacaggtactttgacctctnnnnnnnnnnnnnnnccctggtgnnnnnnnnnnnnnnnnnnggacgtacccatgcttgcatttgtgcacactcggacacccacctccatggacacctagccaccctgttgtgtgtccttatgccagttgagctgaatcttttccccagtatagtggaaagactgaggcttctgcctactgagctagggtgggtgctttatttgtgttcagtctgaattatgggaaagttagctcttcnnnnnnnnaagctgccttctttccctactttcagaagatcctagttccttctnnnnnnnnnnnnnnntgagctgccagtagaggctgctatcgctccatgtgtaaggaatgannnnnnnnnnnnnnnnnnnnnnccaatcattttctttaccttatactaattctccctgaataatgtcttcagtttcttgaggagactcatagttttggttttcagattacttggagggctgcctaggaatcgatctc

SEQ ID NO: 14715 - DNA, 749 bp, Macaca Fascicularis
  misc_feature (1)...(749): n = A,T,C or G
catcagtcacggggaagtgggagtggcaannnnnnnnnnnggagaannnnnnnnnnnnnnnnngtgtgcgggagtcgctctcagaggaagaggcccagaagatggggcgcaaagacccggagcaggaagtggagaagtttgtcacctccaacacgcaggaactgggcaaggataagtggctgtgtcctctcagtggcaagaaattcaagggtcctgagtttgtgcgcaaacatatcttcaacaagcacgcagagaaaattgaggaagtgaaaaaggaggtggcgttttttaacaacttcctcactgatgccaagcgcccagctctgcctgagatcaagccagcccaaccacctggccctgcccagatactcttgaccccgggactcccctacccacaccagactccccagggccttatgccctacggtcagccccggcccccgatcttgggctacggagctggtgctgtccgccctgcagtccccacaggaggccctccatacccccacgccccatatggtgctggtcgagggaactacgatgccttccgaggccagggaggttatcctgggaaacctcgcaacaggatggttcgtggagacccaagggccattgtggaatatcgggacctggatgccccagacgatgttgatttcttttgagccgtccaccgttcctcactcctgtatccatactcgtgactaccttgtcccatccagctctgagaattttttgtacgatcagcctac

SEQ ID NO: 14716 - DNA, 750 bp, Macaca Fascicularis
  misc_feature (1)...(750): n = A,T,C or G
gtcnagggctnnnnntccatcnnctggaaccatggggaggcctggaaggagttcactgtagacccgtcccctggggaaagaggctgcggacttgctgctgctgctgccagtggcctcttctgggtgccaggagagggcgaaggagggaaaggcccttttgggcattaccaaggacaggaaactacctggtacctaaaggtttcattcaggatcagacgggagacccacgggttctccgtctcaccacccctttgtacagtaagcacgtggaagattgtctcagggcccctctgtgccatctctgtggaccgcaggaccttctgccacattctctgtcccttcatccccgggttggtggccatggagggtcttgtctgctgtggtttgactctggaggnnnnnnnnnnnnnnnnngccagggaagcagaggatgtgaggggcagaggcaggctcttggggctgagctccttcctctgcatcattctgggcttgggggcctggacagcacccnnnnnnnnnnnnnnngggcctcaccctctggcatctgagccaagcactgtgtcattcttggtgccatcttccccgccgcaccagcagtctcagcccagcccctacctttgggttgtaggttgggctcccaagcaacacagaccactcttccccttgccccttccccagagggacatgactttctttctggactgtttgtatgaaacaaagtggtgtcaaaataaagcccccgcagggcct

SEQ ID NO: 14717 - DNA, 662 bp, Macaca Fascicularis
  misc_feature (1)...(662): n = A,T,C or G
cgggccgcccccggcgccaaccgcacgatgttcaactttgacgccttctaccaggccnnnnnnnnnnnnnnnnnggagcgggaacggcgcctgagggcccggcgagaggcccttcgcaaaaggcaggagaatgcgtccctgaaaggcctccgctgggaggagacccgagacgtggctgccattttcctcgtcttctcaatcttnnnnnnnnnnnnnnnttatatttaatcggagagaggagggaaggggagtgtccccagccaaccccccaaaaacggccttttttcctgcctctgannnnnnnnnnnnnnnnnnnnnnnnntctgctgagatccgaaggaactgtactccccctgccctccccgacccgcccagcttagcnnnnnnnnnnnnnnncccttcactatggtccagaaaaggaggtctctcgacgtttaagaaaaagaccccannnnnnngagtcccgaaagcccaggagttaaggggttcctggagtctctagggtacttcttccagagtttgtcttcctgcttccagatgtagtcaacttctggaacactcgctgtagctttattgtaaagctccgagcaagatttatctgctcctgccccgcgtgtgtacggtgggcctcctctgtaaccttgaaatatgcaatgtgacca

SEQ ID NO: 14718 - DNA, 725 bp, Macaca Fascicularis
acagaagaggctgctgggcctcttgtcttcacaaacaaccaagagatcatcctcttggagagaagcagtgcagggaacggatatgatctcatccctcctgacctgtgaggggccctgctgtagagcaccacaggtgcctgattaggagcccctggtcccaaggcttgagaaagggttaaaacagaacctccaggtagttttcttcctctacctccgtgtccccccgagactgaaaagagtcactagctctcttttcccaagccttttataaaactgcaggaacactgtggagatgggtcctatctggagtccttttggggacatatgcctcagtcagtcattctgtgattgatccaaaattatttactgagtgcctgcctactctgcgtcaggctctctagcctctcactaccgagttagggtgcaggccgaggctggggcagaatgtctgcagccagtgccagcacagggtagtaatctagtggcagagaacagggtgttacggggagcatatgaaaggccatccagcccagcctgggtgaccctggagagtttcctagggttgtgatatgtggcaggcctactcatggatgggaagagaggagggccacttggctggaccttgtatccccaagggaccacacgtgtattttttgatattccaaaatcaggttttatacatagctgttgtatatttgtagtgtgaaaaaccattaatatattat

SEQ ID NO: 14719 - DNA, 1034 bp, Macaca Fascicularis
  misc_feature (1)...(1034): n = A,T,C or G
gttgatgatggtccatgggaaaaacagaagagttcagggctcaatttgtgtactggaacaggatcaaaagcctggtcattcaatattnnnnnnnnnnnnnnnnnnnnnnnnnnnnnnnnnnnnnnnnnngcaaaacgacaaggaaatttgnnnnnnnnnnnnnnnagagaattggtagagaaagtaacaaatgaatataatgaatcactgctctacagtccagaagaaccaaaaatacttttcagtattcgagaaccaatagcaaatagagttttctcaagcagnnnnnnnnnttgtttctcctcaaaggtttgtgttcgttctcgttgttgggatgcctgtatggttgtggatggaggaacttcttttgaatttaatgatggtgcaattgcttcgatgatgatcaataaagaannnnnnnnnnnnnnnnnnnnnnnnnnnnagtgaaggatttcctcatgacaaattttgattactggagaaaatacttttacttcagaaacggactaccagtcgtaaagtgacatttttttggttattgttgagactacttgcctgtgnnnnnnnnnnnnnnnnnnnnnnnnnnnnnntgttgaattctgatataaaaaaagacattcactgtataagaaaatggatggactgaactaattagaattgatagcagtgaaatttttatattgcttacaattggtaaccaagagtgctgatatctttttaaatttataggggcaggcttaaataaaggactaaatatttaggatttgaaacttaactgtataagtgttttttccttccctttcctcctaattgtgggattgtcagaactgaacacatatcatttgattagtgcatattttttatagtacccgaaaatcaagattttgaaaaaattttcatgacagagaattttggtaaatcctgacattgacctaattgacataggtaaatatgtttgtatatgtgctaagaattttctaatttcagaacacaaggatgatgttatgactattgatttaaaaattcaaataatc

SEQ ID NO: 14720 - DNA, 710 bp, Macaca Fascicularis
  misc_feature (1)...(710): n = A,T,C or G
tgtgcagatggattggctgaacttaatggttctgggttgcaggtgggtactgtatgtctgggtatggagcggactgcccccaggagtcagagnnncagcctggctgccctggtggaaggtgtgggtgttcagcaccttcagagaacggcataaagtggtgggggacaattctcagtccaggaaaatgcattgaccattgctggctatttgcttgcctagtaagaattggattcatttttgaccagattattcttctatgcttttttgcaataaatcaaatcccacatatctacaagtggtatgaagtcctgcaccccccaggaggcctgtccaggcatctcttcagaggcagggtgggttacactcatttacctcccctctccccaccaaattatgacacaaatgagtatgtttcctctctagaaccctgtaatgcctcctccccggtccccagagctcctcactgtcggtctcaccctggacaaggattttttagtcagagccacagaacatgggcactctgacattcccacagcccctcgcacatgcgaggctaccaaggcaggagagtataaatgatggctattgaccaagacctgcctggacggggactgccatattatctgttctcttcgttcacaaaacagccttcatttgtctcagaattcaatggacgcataccgtgatgagcaggagcctcagatgcactc

SEQ ID NO: 14721 - DNA, 686 bp, Macaca Fascicularis
gcccagcatagggtactcagctgtggactggatgtgtaaactctgtgcatgtgtctcataagacaaccgctaagtttactgatgtctggtgggcataaccaagtccaccttgaagacttaccacattctttaaggtttcccaagaacgctgcaaatctcccagtttggcagtagcggatggctccaatcctggttcatacagctcctgggacgctgatgtgctggggtgaatctttgcggcatctgtctgcaacctctcagcagacaaggcttggtaatatgcaatgtcctgtgagtgcaaagcacagtgctgaattaaacaagaagaaaagtctcgattaatatgctgtgggtactgttggtcatgtcaaggaaagatttcagatctacaccttttatggagcactacaaactagtaaattagtaaacgcttgtgactagaaaatgtttaaagaactgtttcgaagcacactataattgtttcagaatttttgtttatatacatcaaaaaacaactttaccaatatttcaagctgccaaaactcattcttattctatgtttgttaaatggaaatacaaaggatttaagcagtacacagtgtatttaaagattgattacaatagcaaaaaaagggaatcctaatgatctagttcctaaaatgttgccaaatgtattcattaaagtt

SEQ ID NO: 14722 - DNA, 729 bp, Macaca Fascicularis
tacatgctttaaaaaaggttagctttgtgaaaataccttgtttggtcagtgactttactgggtaatagaaccacattgaaccttgatggcaaggaataaaataaggcaggccagctcgtttttctctgaatctggctgatttaggaggagcctgggtttatcgacgatctggagtatcttcttttccactgcttgcagtctccaatgtaggcagtgtaaaggtatagtaaaatgattttaggagtcagaaccaaattgccaatatgctccatggctcctaaaggaaaataaaatggaagctttttatttcacggcttcatttcttactgtgtaagaaatgaagattacaattacagattttcaggagttgtttgctagtctctttcagtcaggtactaaaaaaacaaaaaaaaccctcaaggggccactcttctatctttactccttttcccttctctattctttcaccagaagccctcatttgaccaatgaactcctaggccctcttgacccgcacattagcagggcgatttccttgttctgctaattcctaattctgcttaaaatgtatttggatttctctttttcaacacttacgatgccaggcactgtaatgcttgaaacccgatctttccctagagaatgtaacgtaagttttttcatttaatcacttcatcatgcttccttatgccggggttaattatgtttattttattaattggtaataaa

SEQ ID NO: 14723 - DNA, 722 bp, Macaca Fascicularis
  misc_feature (1)...(722): n = A,T,C or G
acccacctgtccacaaggccaggagaagctgagcaccaggggatgagtggaggttaaggctgaggaaaggccagctggcagcagagtgtggccttcagacaactcagttcctaaaaacatagacattccaccaagcccccaagcctgcagccattttgaccaagcaggaagcttggactggttgaattcaggtagctgccactggcttggactgaaacagcacttggtcctccccatgtcactgggtcctgggtggtttgcaggcagggccgtctctaggtgcccttggagagcagccagtgacctgaggaagtgcaaagaccaagaagcaagagagaaacccgacagaggaaagaaaacagctttcttccccaaccccaaggagggacatggatcagtgaaactcggtggtcccctccactaggcacannnnnnnnnnnnnnnnnnnnnnnnnnnnnnnnnnnnnnnnnnnnnnnnnnnnnnnnnnnnnnnnnnnnnnnnnnnnnnnnnnnnnnnnnnnnnnnnnnnnnnnnnnnnnnnnnnnnnnnnnnnnnnnnnnnnatacatgtgtgatacatgcctgagccccaactacttgggagtctgaggtgggaggatcacttgagctcaggagtttgaggttgcagtgagctgtgatcacacnnnctgcactnnnagcnnngggtgtcagagagagaccctgtctctaaacaataaataaa

SEQ ID NO: 14724 - DNA, 757 bp, Macaca Fascicularis
  misc_feature (1)...(757): n = A,T,C or G
tagcaactgacggcctcacacggaactgccatcctgtgaggcagcgtggcgctcgcaaagtggagccctgcggtaccagaaagcagcgggagcgagacctgggagccagggcaggggtggctgaccccatgctcagcctctaggggacggcaggnnnnnnnnnngggggctgtgctatgtgggatggatgtgtnnnnnnnnnnnnnnnnnnnnnnnaactaaatacaacatcttttgcacccctagaatgtcatattgccctcaaccttggtatttctcctggggcccttttagtcttgtgctgactttctcctgtccttttccagtttagagtaagacaggggagaaaaaggcttttcaagtgtgtgacaaggnnngatgtcagtgaactgaactgaagagacagacgtggagcctggctggggctaagcagcccctcctccggatggcacaggctctgataggtnnnnnnnnnnnnnnnntgggggaagggtctcccttggccatcacgggaaaggagtccatgctagaaagtgctcagtgttgggaagggtttgccaatagaacactgtgttcagtcaccccagatnnnnnnnnnnnnnnnagcacctctttcccgtggctcctnnttcagaaatgtggtattggctctggcccagccttnnncccctgttacnncataattcttgcctctttccatannnnnnnntttcagtttgactttgtatataannnttgggtttttttttttttttgg

SEQ ID NO: 14725 - DNA, 735 bp, Macaca Fascicularis
  misc_feature (1)...(735): n = A,T,C or G
catgagtnnnnnnnnnnnnnnnnnnnnnnnnnnnnnnnnnnnnnnnactgaactagactcccctaccttagactggtacctgcaaagacaggactgaagcttaattgggaatttggctttatggagaaaagaatctttttnnnnnnnnnnnnnnnnnnnnnnnnnnnnnnnnnnnnnnnnnnntctgcaggaaggctccagcttaatctaggaagtagattccagttgcacgatgaggaacacgttagcttnngggatcaaaccaggaatatcaatctgtaattattaagctcattgccaacccataggataattgatgtttctgaaaacctgtcgtttcttaatctaagtctatccccttcattaactctacagttgtgattcacactgatcccaaacttttgagtgctaaatattaacatttagcattaactgtcttgtcaagcaaaaggccttctctacaacatagtccatctcacttctggtgctctctgagttggacggaattctagctcatggttgctaggaaagctaggcctctgatcacagaagcaggcagcttcagccccagtctaggcctagataaatgagtcttctcaccacaactcttactattttccaatttcctttctcacatactgtacacaggtagtattttcaatgtgaatccaaagcttgtctggttctctgaaaataattttctcccctttaggttctttacattgtgataatgct

SEQ ID NO: 14726 - DNA, 770 bp, Macaca Fascicularis
gacaaagaagatgcttacttcacagaaattcgaaatttcattgggaacagcaaccacagcagtcagtctcccaggaatgtggaggagagaatgaatggcagtcattttaaagatgaaaaggctttggtgaccagtcaaaattcagacttactggatgatgaagaagttgaagatgaggtgttgttagatgaggaggatgaagacaatgatattactggaaaaacaggaaaggaaccagtgacaagtaatttacatgaaggaaaccctgaggatgactatgaagaaaccagtgctctagagatgagttgcaagacatccccagtgaggtataaagaggaagaatataaaagtggactttctgctctagatcatataaggcacttcacagatagcctcaaaatgaggaaaatggaagataatcaatattctgaagctgagttgtcttcttttagtacttcccatgtgccagaggaactgaagcagccgttacacagaaagtccaaatcgcaggcatatgctatgatgttgtcattgtctgacaaggagtccctccattctacatcccacagttcttccaacgtgtggcacagtatggccagggctgcggcggaatccagtgctatccagtccataagccacgtatgacgttatcaaggttgaccagagtgggaccaagtccaacagtagcatggctctttcatataggactatttacaagactgctgagcagaatgccttataaacctgcagggtcactcatctaaagtcta

SEQ ID NO: 14727 - DNA, 754 bp, Macaca Fascicularis
ttttttttttttttacctgttaaattttattatagtaacaaagtgattatttataataataaaagcagagtgcctgtaggcaagaggatggccctatctcaggcgaagtccccttagtgtttcagacctaggctggccagaatagtcttctagaatgtaacatttatccaccaggtgtcactatttaccaatctgacaagccactgagctgtctccgtgctttccgtggttggaatccaggctagagaccagattaggagatgaatgaaaatagatttagaaaagggcatgtggctggaatgcagcttgcagtgtggagggcgggggtgggagggtaaagagggctctttgaaagaccagtgacactttcctgatcaagtttcccaagctgatacttccctggaaggagtcagaacttgggtttgtaggagtagccctggcttccagctgtatcgtgctagactcaggccccagccccctcccacccccgtccctccacaatgcaagctgcattccagccacatgcccttttttaaatctattttcattcatctcctaatgtggtctgtagcctggtttccaaccacggaaagcacggagacagctcagtggcttgtcagattggtaaatagtgacacatggtggataaatgttacattgtagaagagtattctggcctgcctaggtctggagcggtaaggggacttcgcactgagatagggccatcgtcttgcgtacaggcactctgctttta

SEQ ID NO: 14728 - DNA, 106 bp, Macaca Fascicularis
  misc_feature (1)...(106): n = A,T,C or G
cgtttacacatggcttcccttggaagccctcgtcgacagtagctggtgtgaaagacgaggtcagtagagttggaaaagctttataacnnngtgtgtcnnnatgctt

SEQ ID NO: 14729 - DNA, 723 bp, Macaca Fascicularis
  misc_feature (1)...(723): n = A,T,C or G
ggtatatgacnnnnngtttagccaacttaaatttgaagtactgaacacccttggtgtgactgttctcagtgagaatgaggaannnnnnnnnnnnnnnnnnnnnnnnnnnnnnnnnnnnnnnnnnnnnnattgtggnnnnnnnnnnnnnnnnnnnnnnttatggagtaatnnnnnnnnnnnnnncctttctaagatggtcatcattgggaacagtttcaaaggacttgaggagaggctgttggcaaggattctgcagaaaaattatccctacattgcaaagattttaaaaggactggnnnnnnnnnnnnnnnnnnnnncttcacaatacatggacatatttaatgacacctctgtccactggttccccatgcaaaagctagaacagctctccacagatatttgggagtttcaggaagaaccagattatcaggactgtgaggaccttgaaatcatcaggaacaagacagaagatccttccactactgactgaactcactgtgaggtactcagtgttggctgaggtagaagctgccacgggagactaaagggaaggctgccatggaggaactacagagaactcctttgcnnnnnnnnnnnnnnnnnnnnnntgtcttgttttgaggacgataccccccatgaggacttggtataaagattcctgcactgctaagtggcattgtcccgctttacatgcttccctcgtgacctggcccaatgtggagt

SEQ ID NO: 14730 - DNA, 714 bp, Macaca Fascicularis
  misc_feature (1)...(714): n = A,T,C or G
gattctccccacctnnnnnnnnnnnnnnnnngtcctacctgcccatctgggcctggactcnngntctgcctctggacacctgcctgggctcccaaggctctccaacatccctggggagctaatgccagctctgccaaatgacctctgtcctgctgcagcccacgctctggcatggcaccaaggcatgtggggccctacctttccagcatgtgggagagttacacagacaccacacggatgccaggacagcctgtggcagactcccagagccctgcaacagccaacacaataatgacagccagttcccaggctctcgttgggtctcagggagctcaccccactctcttctccagcagtccctgtctgctcaaggtagtgagcttggcatctaacccatacctccctggaaacttagattaaatcacagccatagagtcaccaattcaacaaatgtaacatctgataagggctgtttacacatagacaaaagaatgaatttgggagctgggggnnnnnnnnnnnnnnnataggaagatatgtccactataaccactcatcgaatgaatcaagaaagatttcttggaaaaaatgggattccagatccatttgagtaatgtgtccccatgcctatcactcctggaaattaaatgatttaatttaactctggtacacttgtctccaaaaacccagaaaaactgacagaattcagataga

SEQ ID NO: 14731 - DNA, 712 bp, Macaca Fascicularis
  misc_feature (1)...(712): n = A,T,C or G
agagcctggaggacacggacttgagccggctctacacagcaacannnnnnnnnnnnnnnnnnnnnnnnnnnntgaggaagtttcatgnnnnnnnntccctgaaggaatactatgaggaagnnnnnnnnnnnnnnnnnnnnnnnnnnnnnnnnnnnnnnnnnnnnnnnnnnnnnnnnnnnnnnnnnnnnnnnnnnnnnnaaagtcttctaaccattccaaaatctctttcagagaaacgagagaacgtcatgtttgtgctgcctctgcatgggggccacttgggcttctttgagggctctgtgctgnnnnnnnnnnnnnnnnnnnnnnnggataagctggtggtggagtannnnnnnnnnnnnnnnnnnnnngagcgtaacaagtcacagtgctctgacacggagcaggtggaggctgacctggagtgaggcctccggactctggcatgctccagcagccctcctnnnnnnnnnnngtcccctcaccccctgtttcaggtctcccatctccctcagtgacctggatctgacctcacaccatcagcagggggcacccaccatgcacacctgtctcggagtaggcagctcttcctgggagctccagcttatttttgtgattagttactggttttctnnnnnnnnnnnnnnnnnnnnnnnnnaagtgacagagttcannnnnnnnnnnnnnnnnnnnnnnnnngttgcttttaagc

SEQ ID NO: 14732 - DNA, 738 bp, Macaca Fascicularis
  misc_feature (1)...(738): n = A,T,C or G
gggagtgatgatgatgatgatttaacaaacttcctaaaaaagctaaagggaaagctcaaaaatcaaataagaagtgggatgggtcagaagaggatgaggataacagtaaaaaagttaaagagcgttcaannnnnnnnnnnnnnngtgaaagtggtgatgaatcagatgagtttttgcaatctagaaaaggacagaaaaaaaatcaaaaaaacaagccaggtcctaacatagagagtgggaatgaagatgatgactcctccttcaaaattaagacagtggcccaaaagaaggcagaaaagaaggagcgcgagagaaaaaagcgagatgaagaaaaagcgaaactgcggaagctgaaagaaaaagaagagttagaaacaggtaaaaaggatctgagtaaacaaaaggaatctcaaaggaaatctgaagaagaaactgtcaaatccaaagtgactcttgatactggagtaatccctgcctctgaagagaaagcagagactcccacnnnnnnnnnnnnnnnnaatgaaggagacaaaaagaagaaagataagaagaaaaagaaaggagaaaaggaagacaaagagaaagagaagaaaaaaggacctagcaaagccactgttaaagctatgcaagaagctctggctaagcttaaagaggaagaagaaagacagaagagagaagaggaagaacgtataaaacggcttgaagaattagaagccaagcggaaagaagaggaacgat

SEQ ID NO: 14733 - DNA, 781 bp, Macaca Fascicularis
  misc_feature (1)...(781): n = A,T,C or G
tccagcccatgtgtcaaggtgtagnnnntgccttcaaagctcactannngagganntntgagcacatcctagaagcaacggatggtgaggatacagctgtgattagggaattttggagaaactacagcatcatggatgctgtggacaacaccgcgtacttgggaggagctcaaaccagcgataatgaacagcgtgtgggagaagatttggcctgagtgtgttcaggcccagcatttttcccgggcagataacattgcacagcttaaaannnnnnnnnnnnnnnnnnnnnnnnnnnnnnnnnntgaggagattgctgaggctgctgtggaccagttgctgcagtcccatgaagatctctcaaatgaggaactaatgcagctggaacaggagccggcagtgggggaggaggagagggaagnnnnnnnnnnnnnnnnnnnnnngttaaccacaggaagactgttggcagccctctcgcatttcgaggttggcttgcaggtccttgctagtaacagccctaatgatgaaaacttagagtttccagagctatcaatgatgcaataaactgttaccagacgctgtacaatgagaaaaagcactgttcaaaacaactctcttaggtcatttttccatgtgtgtaaccaaacgttaatcagaacaaagcagaagcaccatgacgaactcaacagtggagacccagccaggcctctctgctctgcggtgttcgacatccctggaaaccttgctgttggtatttcctattttgatgcttgagagtatcaaa

SEQ ID NO: 14734 - DNA, 729 bp, Macaca Fascicularis
  misc_feature (1)...(729): n = A,T,C or G
tccacgatcatttcccaaagtcctgcatcgatgctgtggagatcgacccctccatgctggaagtggccacnnnnnnnnttggcttctcccagagtgaccgaatgaaggtccacattgcagnnnnnnnnnnnnnnnnnnnnnnnctggcagaaggaggagaagcacggccttgctacgatgtcataatgtttgatgttgacagtaaggacccaacactgggaatgagttgtccacccccagcatttgtggagcaatcttttctacagaacgttannnnnnnnnnnnnnnnnnnnnnnnnnnttattctcaacctcgtgtgccgagacttggggctaaaggactcagtgctggctgggctcaaggcagtgttccccctcctatnnnnnnnnnnnnnnnnnnnngaagtgaatgagatcctgttctgtcagctgcaccctgagcaaaaacttgccacaccagagctcctagaaacagcccaggctttggagcagagcctgaggaagcctgggaggggttgggatgacacgtatgtcttgtcagatatgctcaagacggtgaagattgtatgattgcttaggccaagcagccctcctgcctagactgaccttggactccnnnnnnnnnnnnnnntgaagaaatacaacgcacagtactttttaagcttcatatttttctcggtttcacannnnnnnnnnnnnnnnnnnnnnnnnggtgaggnnnctgaagata

SEQ ID NO: 14735 - DNA, 831 bp, Macaca Fascicularis
  misc_feature (1)...(831): n = A,T,C or G
agcnnnnngagtnncatgcaaaagattggcccccattatggtgcgcctgaatacnncntgcctagatagacaaacaatgatgaaactcaaatggagcttcctattcacgttgatttatgtctcacaatcctgggtattgttaatccaacatagagtgaaactatttctgataaagaactttttgaaaaactttttacactctaaagtgatactcagaacaaaagaaagtcatgagactcctgaatttaatttccccacataagttgagactgtattatcaaaacacatgtgcacacagattactttttggccccaaaaatggattacaaaagaaagaggagaagaatattttgtgtgttactggtattcttttataagtaaagtttacccagcatggaccagcttcaaccagggacaaaatcccctccaaaaccactctccacagctttttaaaaatactgctactcttaacaattacctaaaccttcctcaactgctccaaatctcttaatagcgtctagtgctactacgatctaaggtcaccagagggaagagaacatggcattaaaagaatcacatcttcagaagagaagacactaatattactacccatatacatgatttcagaagatgacataagattcctcttaaagaggaaatgtcaggaatcaagccactgaatccttaaatggcaaagagaaaagttgaatatgagtcattgtgtctgaaaactacaaagtgaacttaactgagatccagcaaanngnnnctgtttaagaaaaaataatttatactaacttcagtaaaatggacttcttattcaaagcatca

SEQ ID NO: 14736 - DNA, 689 bp, Macaca Fascicularis
  misc_feature (1)...(689): n = A,T,C or G
gcatcacactccgcccacaccaagttgnnctgcccatccagggcggtggggcctaactccactcnnnnnnnnnnnnnnnnnnnnnnnnnnnnnnnnnnnnnnnnnnnnnnnnnnnnnnnnnnngatgnnnnnnnnnnagccgctctggtcgtaggggatgaggcccatgaagatcttcttcttggatgagtacaggagcatgagcacgcgcacctcacagggcgagatgtgggggaacagcatgcaacccgcctgtgggggccgcaggtcaggaccccgtgggcactgcccggggccgccatgcccccaccaccctcgactgccccacctgtaggggacgaagggaggttattggtggacagaggcccccacagtcaaggccacggtcataggtgaggggcctctgagagcccgtgcagcacccattgnnnnnnnnnnnnnnnnnnnnnnnnnnggttggagtgtggcgcccggcacccaggctgtggtgagaacgccgagaaggcatcacctcccgcccacatcgtcccctgccgccagccttcctgcctgcctgatggggtgacctggcctgggggttaagagcacaggcagtgccccaccactctgctgcctcctagctgtgtgacctaacaccagccacctcctgtttctgggcctccatttcatcatctgtaaaacggggtaat

SEQ ID NO: 14737 - DNA, 729 bp, Macaca Fascicularis
tgtatactgtagccatggcttattgtggctctgtaacaacaaagcaattcgacgcctgctacatgttgctgtaagtgatgttaatgatgatgtcaggagggcagcagtagaatcacttgggttcattctattcaggacccctgaacaatgcccaagtgttgtctctttgttgtcagagagttacaaccctcatgtgcgctatggagctgcaatggccttggggatctgctgtgctggtacaggaaacaaggaagccattaatttgctagaaccaatgacaaacgaccccgtgaactacgtgaggcaaggggcactcatagcttcagctctcatcatgatccagcagactgaaatcacttgtccaaaggtgaatcagttcagacagctgtattccaaagtcatcaatgataagcatgatgatgtcatggccaagtttggtgctattctggcccagggcatactggatgcaggtggtcataatgtcacaatctccttacagtccagaactggtcacactcatatgccttctgtggttggcgtccttgtatttacccagttctggttctggtttcctctttcacacttcctgtcattggcttatacccctacctgtgtcattggccttaacaaggacttaaagatgccgaaagttcagtataaatcgaactgtaaaccatccacatttgcatatcctgcccctctggaagtaccaaaagaaaaagaaaagga

SEQ ID NO: 14738 - DNA, 785 bp, Macaca Fascicularis
  misc_feature (1)...(785): n = A,T,C or G
cagcaattccataaccacannnngnngtcatcacagccaaggttttagggttgctataccaatggcttattaaatgaaaatggcactaaaagtttcttgggattctttactctctgccttcaccagcaaccaattccattcatacatcaacactctactggttctgtttgaaatatgttctgtatttaaaactcaaatcttgttggatctctgcagggcttgtgaccaatgaggtcatattggttgatggttgagnnnnnnnnnnnnnnnctgcatcagagaatgactatcattttttttaactatcctatcacgtcctctcttctgtcacccattttgaagagtggcagaacttgaggttcagcttcctctgtaaatatccaagtataaaacccannnnnnnntagaataacccagatgtgctttaatattcttttaatatgttttgatcacaactcggggaaaaaagctttttaattctgtacctttctagtagataagtgaagagcaggggaagagacctttaaatattttgctataaaaatgtgtgataagtttctatcaaaatggggagattgcagaaaaggcttcccttggcttccaaggatgtgtagcaggtgtgaggaatgctagtgccatgtgcctttcacaaagagtttgcatttatcagtctgctttccgatgatatgtacatgaaagagtacaccatgtgaagagaagagagaatggttgaaaatgttttattatagaactcttgcagtgagttgctattttctagattttac

SEQ ID NO: 14739 - DNA, 738 bp, Macaca Fascicularis
  misc_feature (1)...(738): n = A,T,C or G
acctggaggagctggtgcgnnngcnnnnnnnncagttgaaggacctggaggcggagaaccggcggctgcagctgcagctggaggaggcggcggcgcagaaccagcgcgagaagagggagctggaaggcgtgatcctggagctgcaggagcagctgacaggtctgatccccagtgaccacgcccctctggcccagggttccaaggagctcactacacccctggtcaaccaatggccctcactgggaacgcttaatggggccgagggcaccagcaactccaagctttaccggagacacagcttcatgagcacggagcccctgtcagctgaagccagtctgagctcggactcccagcgcctgggagagggcacacgggacgaggagccctggggtcccattggaagctcagagccaaattagtggctcccttcgagcgaatgcccaggacttcaacgcatgcactttgtgttgacctcatccctggcttcaccttggtttttcccatcctagttctccctatgcctggataacccgtcttttcttttttataagcaaccacactgtattggatgaccctagaccttctttgagacaaggcaggctgtggccatgtagccccatcacactgtttgtgattgtctgtgtgtctgtctcccccaccagactgtgagctccgtgagggcagggaccgtgtcttgtccgttctctgtatccccagtgcttggaacagagcgagtgc

SEQ ID NO: 14740 - DNA, 907 bp, Macaca Fascicularis
  misc_feature (1)...(907): n = A,T,C or G
tcaccaggtttcggtcgnnnnnnnnagtatccattgcaatttccagaatgaaatttttggttcgacggtggcatcgagtcacaggttnnnnnnnnnnnnnnnnnnnnnnnnnnnnnnnnnnnnnnnnnnnnnnnnnnnnnnngactgactcatttnnncattnttctggtgggctggagctatatggagaaccannnnnnnnnnnnnnnnnnnnnnnnnnnnnnnnnnnnnnnnnnnggtcccctttaccatttcagaataggtacccaggcactccagctgatttcattcctggttctttagcatgttctcagcttcagaattacgatcctgacagagccctaacagattatatcactcggctggaggcactgnnnnnnnnnnnnnnnnnnnnnnnnnnnnnnnnaactactcaatttcatgctggcatgagaagataatcctttgaaacatcattagttgaagtgattttannnnnnnnnnnnnnnnnnaatcattggttcttttgtgcttttgtattgtgaatannnnnnnnnnnnnnnnnnnnnnnnnnnnnnnnnnnnnnnnnnnnnnnnnnnnnnnnnnnnnnnnnnnnnnnnnnnnngtatatataagcattgtgtatgtattcnnnnnnnnnnnnnnntgaattacctgtatatttgtggaatgctaatttaaaacattaaattatgaaccttgtgnnnnnnnnnnnnnnnnnnnnagattaaacttttacgcattacaatactgctgaatgtgtagctcgaggtgnnnnnnnnnnnnnnnnnnnnnnnnnnnnnnntacatgttttgcctaatatattctactggtgatgaaaacagatatcacttgtagagacctatttttgtataatggtagaagtttcgaattttatggggtatt

SEQ ID NO: 14741 - DNA, 747 bp, Macaca Fascicularis
  misc_feature (1)...(747): n = A,T,C or G
aagnnnatgcatatgaatatannnagcgttnnnnntagaccatgagaagagnnnnnnnnnnnnnnnnnnnnnnnnnnnnnnnnnnnnnnnnnnnnnnnnnnnnnaaaaaacagcagaagaagaaaatccagagcatgtagaaattcagaagatgatggattccctcttcttaaaattggatgccctctcaaacttccactttatccctaaaccgcctgtaccagagannnnnnnnnnnnnnnnnnnnnnnnnnnnnnntnnnnnnnnnnnnnnnnnngtgagtgttagcgatgcagctctcctggccccagaggagatcaaggagaaaaataaagctggagatataaaaacannnnnnnnnnnnnnnnctacagacaagaaacgagagcgaaggaaaaagaaatatcaaaagcgtatgaaaataaaagaaaaggagaagcggagaaaactgcttgaaaagagcagtgtagnnnnnnnnnnnnnnnnnnnnnnnnnnnnnnnnnnggagaagttaaaacagctgaccaaaactggcaaagcctccttcataaaggatgaaggtaaagacaaagccttaaagtcctctcaagcattcttttctaaattacaagatcaagtaaaaatgcaaatcaatgatgcaaagaaagcagaaaagaaaaagaagaaaagacaggatatttnnnnnnnnaaattaaaactgtaatatattttgaatataatgtaaatatgaatatgtaagcttatgtt

SEQ ID NO: 14742 - DNA, 483 bp, Macaca Fascicularis
  misc_feature (1)...(483): n = A,T,C or G
agtttgagtataatgccactgaccacgctgggaagagtgccaatgagaaagcggacactgcaggtgtctgtcttggggcacaggcgtacatcttcactgcnnnttgcatattgtttttggttatgcagagagagaggagataattttcaaactctgagaaaaagtgttcatcatcaaaaagttaaaaggcaccagttatcacttttttaccatcttagagagtttgctttttaaaagaatggacaacaatgtacagtttttattatgtggccactggtttaagaaaagctgactttgttttttcattcagttttgggaggaaaagggactgtgcacagagatggttcttgctctcccannnnnnnnnnnnnnnnngtaacagtgtaggtacaagaaatatagttagttgtgcacttgtgatattatcactctattatttgtttgtatgtttttttctcacatcgtttgtggggttttttttcc

SEQ ID NO: 14743 - DNA, 754 bp, Macaca Fascicularis
  misc_feature (1)...(754): n = A,T,C or G
tctcaccccatgaatgtacctggggaaatcaactgacctccctgaacatttcatgcagtgagggaacgggtgaggaaagaaataaataagtgattctaatgctgcctaggtcaccctcaacccccatttactggcacaactgggtggggagaagggaaggggtannnnnnnnnnnnnnnnnnnnnnnnnnnnaaggttcagaggggaaggaggaaaggccaggctggaggctgggctattagtgctttcctcccannnnnnnnnnnnnnnnnnctggnnnnnnnnnnnnnnnnnnnnnnnnnnnnnnnnnnnnnnnnnnnntccttagtcctgtgccctgttcgacttttggcctggaggcctttttgtgctgctgctgttgcagggctagctgcatggcccagatgctcagtggccgcatgtaggccagtgagcggnnnnnnnnnnnnnnnnnnnnnnnnnnnnnnnnnnnnnnnnnnnnnnnnnnnnnnnnccacacggtacggtagcagccttcagctgtctggaagccctcccaannnnnnnnnnnnnnnnnnatggtagctgccaatccgtagaccacacccacccagacttcatcagactgcacactggatttatcagggacaccatggggctgcatcccattcacagcccccatggcccctcctgcnnnggcctggacgtcagctcannnnntagtttggagagcacgaccacatgtggggtaggaaacactcngtctctcctctct

SEQ ID NO: 14744 - DNA, 785 bp, Macaca Fascicularis
  misc_feature (1)...(785): n = A,T,C or G
aaggtaaaggcaatgagagtgactgtagatcaggaagacagtggcaaagacctcagnngagaaaagaggaaaacttttgacactcccagagaagagcttaagtgacgtcttaagtcaacagagaccttgcttgggagagagaccatataaacatctcaaatacagcaaaggctttggtccgaattcccttctcatgcatcaggaatcccaccaggtggaaaatccatataaatgtgctgattgtgggaaaagcttcagtcggagtgcacgactcattagacaccggagaatccacactggagagaaaccttataaatgtcttgactgtggaaaaagtttccgtgacagttcaaatttcatcacccataggagaatccacacaggagagaaaccttatcaatgtggtgagtgnnnnnnnnnnnnnnnnnnnnnnnnnnnnnttatcattcaccagagaacccacacaggagaaaagccctatcaatgtgaagagtgtggaaaaagcttcaataacagttctcattttagtgcacatcggaggatacacacaggagagagacctcatgtgtgtactgactgtggaaagagtttcagtaagagttctgacttacgtgcacatcatagaacccacacaggagagaaaccctatgggtgtcatgactgtggcaagtgcttcagtaaaagctctgcccttaataagcaccgagaaatccatgcacgggaaaagcttctgtcacagtcagcacctaagtaagcccctaaggatttataaaggaaagaggctc

SEQ ID NO: 14745 - DNA, 713 bp, Macaca Fascicularis
caaatgctgcttaattacagactcaggtcgattacttgtatttcatgtaatgttcctccaagttagacatctggtgcaagaccaaccgggagaccatggaattgtcaaaagtacaaactgacagtgtgtatatttaatttaaagacttatttaaaaactcacaagctctcacctagactttggagagcagtctgttttctgtaatgtctgatactagaaactaatttgcttattttagttgtattcaagatttgaagatgtattttatagacaagttctgtttttgaactttgtggaactgttccaatcaatttcccagttatgatgagtatttacattatgaatgtataacccagacatgatttgtaaagccgacagtatgtttctattacacaacactttttgatacagcgtctcttgtcttcactgatactggagtctccgttgtctgcttggtcccttcgagtttctagttacagacacaatcatactgtgattttatttttaatatggatatgctatcaaactgtgatacacttataattcactggtcctgcatcaggagatggagtggggaaaactgtatttaatacagtttgtatctgaataatctgtatggtttatacagtttgtgttgttcagagatgtttaaagtttgatctttgtttttttaaagattaaaaaagcacttgccccactgtaaatatacagca

SEQ ID NO: 14746 - DNA, 794 bp, Macaca Fascicularis
  misc_feature (1)...(794): n = A,T,C or G
cagcaccctgngnnnacaggcctgtggctttggccccagcttnttcccgagccaccagacagcactgggtagtgctttccaagacgctgagcacctgaagaccctgtgcctgtcctacaatgccctgggagccccatccctggccaggaccctgcagagcctgcccacccacaccctcctgcacctagagctcagctccgtggcagccggcaagggtgactcaggcctcatggagcccatagtccgatacctggccaaggaaggctgtgctctggcccacctgaccctgtctgcaaaccacctgggggacaaggccattagagacctgtgcagatgtctctctctgtgcccctcgctcatctcgctcgatctgtccgcaaaccctgagatcagctgtgtcagcctggaagagctcctgtctgccctccaaaagcggccccaaggccttagcttccttggcttgtcaggctgcgccatccagggtcccctgggcctgggcttgtgggacaagatcgccgcgcagctccgggaactgcagctgtgcagcagacgcctcggcgccgaggaccgggacgccctgcgccagctgcggcccagtcggccgtgccccggcgagtgcacgctggaccacggctccaagctcttcttccggcgcctctgaccccggcgccgcctttccccaccctcaccgannnnnnnnnnnnnnnnnnnnnnnggccggacgcgatggttcacgcctgtaatcccagcactttgggagcccgagacgggcgnnnnnnnaggtcaggagatgg

SEQ ID NO: 14747 - DNA, 714 bp, Macaca Fascicularis
  misc_feature (1)...(714): n = A,T,C or G
gatatatataaggaatttactactttatgtcctactctctaaactatatcctgaactcgacgtnnngaggtataacacaacggagcactttttgaggcaattgaaaaaccaacctacattcttcggtgcttggagagatctatctcccaaataagcttnnnnnnnnnnnnnnnnnnntactgtactccaaatgattgctttcttttctgattatatctgtgcttctnnnnnnnnnnnnnnnnnnnnnatatttnnnnnnnnnnnnnnnnnnnnctgtcccccatgttccatgttagagcaaagtgaagagtttaaaggaggaataagaaagaactgctttacaccatttgagctcagacctctaagccctgtatttcccttatgatgtcctctttttgagacactaatttttaaatacttattagctctgaaatatattgatttttatcacagacagtattcccagggtgaaattaaaccaactataggcctttttcttgggatgattttctagtcttaaggtttgaggacattataannnnnnnnnnntttgttgtacacaattgatattccaaatgtatggatgggagggagaggtgttttaagctgtaggcttttctttgtactgcatttattagagatttagctttaatattttttagagatgtaaaacnnnttgtgctttcttagtcatgcttagtnngaaacatttta

SEQ ID NO: 14748 - DNA, 735 bp, Macaca Fascicularis
  misc_feature (1)...(735): n = A,T,C or G
ccagcagcgtgannnnntgacatcccacctacaagcatgacacnnngnnaacaccagctaggtatggctgaggaaggctgaaagaaagccattaaatgaaagaatgtactgattgtagtgaccttctccacccacacacacacacacacacacacacacacccctagagtaatacagcaaacatggaataatcagccaatatataacatcagtattttattaaataatctgaatgtggttgnnnnnnnnnnnnnnncaattacaattttcttctatttttcaagtcacaataaggaaaataaactactcatggtctaaataccagagataaagtagactcatggcttggtaaggaaattttaagcatttcttcaaagattgacgtgctaaaataagtattgatgttttgggtttttttacacctaggattttagcttgggtgtgtaggtgaaggccaagaccctctgcaggaaaaagcttattttcaaactcagaaaataaaatgtcaatcataaaaatctacttcaactttagcaaaaagaaaaaaaatcaacaaaaagtatactctgtatgctgggattccgaggttccaacacaccgttacaaatctgtggggggtttctttcttctgataattctagagcctgttaccatagaaaggcatttcttcaatggctggttgtagttagttcatgtttttcaatcaaatttgcaaatgtatttgttgctgtatag

SEQ ID NO: 14749 - DNA, 700 bp, Macaca Fascicularis
tggtccctcaccgctgctctgggccaaaggagtgcagtggccctgcagcacaggcccgtggtgctgttcggagacctggccgggactgcgccaaagctcccaggactccagcagcaagaggctgtgacactgccccctaatcttcatctgcagatcctgagcatccctggctggcgctacagctccaaccacacggagcacgctcagagtctccggaaaggccatcgaggggaagcccaggctgacctccgccgtgtcgtgctgcggctccaccacctgtatgaagtgggcgaggacccagtcctgtctcagccagtgacagtgaatcttgaggctgtgctgcaggcgctggggtccgtggtggcagtggaggagcgctcgctcacagggacctgggatgtgggcatgatgcaccgctggagctggaggacggggcctggccgccgcagaggtgacaccacctttccctcgaggccaccaggaggccccatcatcaccgtccacccaaaggaaatccggacattctttgttcactttcaacagcagtgagccccaggcagatgccccgtccccacggctgcccccatgaactccatgtaacagaacagacccaggacagggaaaagcagtgtggagggatgggagtcagctgctcatctgcaggcgaatggcaggaaatggtcatattaggggttttgtc

SEQ ID NO: 14750 - DNA, 693 bp, Macaca Fascicularis
  misc_feature (1)...(693): n = A,T,C or G
tgccccaccaccccgacgccgccctcttcnnnnnnnnnctacgccgcctcatcctcttcaagnnnnnnnnnnnnnnnnnnnnnnnnnnnnnnnnnnnnnnnnnnnnnnnnnnnnacccccgaagtctgcaggactggggcggcatccctgaggaggtcagcggcgccctgccgaggcctgacggctccatcatcttcttccgagatgaccgcnnnnnnnnnnnnnnnnnnnnnnnnnnnnnnnngaccacctcaggccgctggggcaccgagcnnnnnnnnnnnnnnnnnnnnnnnnnnnnnncagggnnnnnnnnnnnnnnaaggcacctcctcatctcagaaannnnnnnnnnnnnnnnggcaaaatcgtgttccccacccctggggcagaacccgtcttagaagcctctgagtccctctgcagaagaccaggcagcaaagcccccatctggaagtctgtctgcctttgttccttgaagnnnnnnnnnnnnnnnttgtctgttcccaccacatggaggtgggggtgggatcaatcttaggaaaagcaaaaaagggtcccagatcccttggccctttccttcaaggacttctgtcctccccaggcctttgtttcttctgctaaaggtacagttcctttcaagaggtgacagcactgggatccaaacagcaggagaaaannnnnnngagagat

SEQ ID NO: 14751 - DNA, 672 bp, Macaca Fascicularis
  misc_feature (1)...(672): n = A,T,C or G
tttgatgtaggtccaannnnnnnacaagaaactattcctgtgccaccnnnnnnnnnnnnnnnnnnnnnnnnngcagtgttgtcacgactgggtgccaacatgctcatttcagttttgaaaaatttgcctgaaagtctgagcaatggaaggcagcagccaacagagggggcgacttatgcccctaagatttctgctggtaccagttgtgtaaaatgggaggaacaaacttcagaacaaatattcagactttaccgtgccattggaaatataattccattgcagacgctctggatggggaatacnnnnnnnnnnnnnnntttggtagaagnnnnnnnnnnnnnnnnnnnnnnnncaaaattaacgagacaggctcttattccaggatcagtaatataccacaaacagtcacaaatactgttggtttattgcaaggatagttggattggtgttcgatcagtgatgctcaagaaaannnnnnnnnnnnnnnnnnnnnnnnntggatatttgcacccctggtaccaaaaaaattcccaagctcaaccaagccaatgcagatttcagactctcagacttccaacaaagaagaagcagaacaaaactgttactatgtaacaatgcattgagtagttaggaagaagatggataaaaacctattatgtatttgtaatttat

SEQ ID NO: 14752 - DNA, 729 bp, Macaca Fascicularis
  misc_feature (1)...(729): n = A,T,C or G
cccatnnncnntatggatgtgcttaaagatcattaaggagtatgaacgtgctgttgtattccgtctgggacgcatccaagctgacaaagccaaggggccaggtttgatcnnnnnnnnnnnnnnnnnnnnnntgtttgtcaannnnnnnnnnnnnnnnnnnnnnnnnnncattcctccacaagagatcctcaccagagactccgtgactactcaggtagatggagttgtctattacagagtctnnnnnnnnnnnnnnnnnnnnnnnnnnnnnnnnnnnnnnnnnnnnnnnnnnntnnnnnnnnnnnnnnnnnntctgaggaatgtcttagggacacagaccttgtcccagattttagctggacgagaagagatcgcccatagcatccagattnnnnnnnnnnnnnnnnnnnnnnnnnnnnnnnnnnnnntggcccgagtggaaatcaaagatgttcggattcccgtgcagttgnnnnnnnnnnnnnnnnnnnnnnnnnnggccacccgggaagccagagccaaggtccttgcagctgaaggagaaatgaacgcttccaaatctctgaagtcagcctctatggtgctagctgagtctcccatagctctccagctgcgctacctgcagaccttgagcacggtagccaccgagaagaattctacaattgtgtttcctctgcccatgaatatactagagggcattggtgggatcagctatgataatcacaagaa

SEQ ID NO: 14753 - DNA, 730 bp, Macaca Fascicularis
  misc_feature (1)...(730): n = A,T,C or G
ccgggtcgnngnnccctgctcctgggcctcngcctgctgngtccgccctggggggggcgccccccgtgccctccaggccgggggcttcccctgaccctttcggccctccccctcaggtgccctctcccgttttctctttgctttcnnnntcagccatgccgatnnnnnnnnnnnnnnnncatcccgtcctgagagccccaggccccccttcgacctctaaacagatccctcctcttctcggagacctccctttccaagcctgcctggacggctgttctgtgacttgacagtggcttccctagccccaaagccagcccccttcatctgtgacttagtctgttgtagtggtgagctgacacctccaggcgtgaccattggtgannnnnnnnnccccttcagtggtatgcccttgccctgttctataaatatctataaatactcatatatatacacacctacacatggccgaccgcctcgcctctagcgctgggaatcagtcactgtgctgtccttgtggagtcttgtggcccaactacaagagaacgctgtcccctgacatccccctctaaagtgtgccacctccagtgagcctccnnnnnnnnnnnnnnnnnnnnnnnnncagcccccgccatacctcccgccccctaccaagcatgggggnnnnnnnnnnnnnnncgtgtggcctgacagtctctaccagtcctgctttccctcggctgagaataaaacc

SEQ ID NO: 14754 - DNA, 791 bp, Macaca Fascicularis
  misc_feature (1)...(791): n = A,T,C or G
ggtgaataccactaccgagttctagctttgtttttgcttgcctcctgattatctgtactgtgggtttaagtgtgccactttctctcagcatccaataatgatggcctctcaatttatttgtggtcgcccagggttcagagcaagaagtcttnnnnnnnnnnnnnnnnnnnnnnnnnnnnnnnnnnnnnnnnnnnnnnnnnnnnnnnnnnnngttccaataatatggttctgtttggaaaaaagctgtaaatcagaaagaatgatttgcagaaagaaagaaaaactatggtgtaattcaaactctgggcagcctctgaatgaaatgctactttctttagaaatataatagctgccttagacattatgaggcatacaactagtatttaagatactatttaatatgccccataaatgtcttcagtgtttnnnnnnnnnnntgggatctcagaagatttggttcagatccaaacaaatacacattctgtgttttagctcagtgtttttttaaaaaagaaactgccacacagcaaaaaatggtttactttgttggacaaaccaaatcagttctcaaaaaatgaccggtgcttataaaaagttataaatatccagtagttccaaaacaaaccnnnnnnnnnnnnnnnnnnnnnnnnnnnnnnnnnnnnnnnnnnnnnnnnnnnnnnnnnnnnnnnnnnnnnnnnnntgcaaactggtacagaaattctatnnnnnnnnnnnnnnntttgatacctgctttttgtttcattttgttttgttttgtaacactgacattt

SEQ ID NO: 14755 - DNA, 761 bp, Macaca Fascicularis
  misc_feature (1)...(761): n = A,T,C or G
ccagatcccatggatgagtaaactgttnnncaggcannngaggcgttcggtgatatctttctcattaccaatgactaattttgccacagggtactaaaagaaactatgatgtggagaaagaactaacatctcctccaataaaccccaaatggtttatctaactgtcagatctggtccgttatctactgactgtattttgccttattactgcttgcagtaattcaactggaaatttacaaaaaaaaaattagactccattgtgccttactaaatatgggaatgtctaacttaaatagctttgagagtttagctatgctagaggcttttattagnnnnnnnnnnnnnnnnnnnnnnnagttactaatatatctgtaacactattacagtattgctatttatattcattcagatataagatttgtacatatcatcctataaagaaatggtatgacttaattttagaaaaaattatattctgtttattatgacaaatgaaagagataaaaatatatttttaatggaaagtttgtagcatttttataataggtactgccatttttttctgtgtggagtatttttataattttatctgtataagctgtaatatcattttatagaaaatgcattatttagtcaattgtttaatgttggaaaaannntatgaaatataaattatctgaatattagatgctctgagaaattgaatgtaccttatttaaaagatttattcggttctataaataatacacatgacattataa

SEQ ID NO: 14756 - DNA, 1279 bp, Macaca Fascicularis
  misc_feature (1)...(1279): n = A,T,C or G
catgacccagnnnnnnnnnnnnnnntacannnnnnnnnnnnnnnnnatgctggagtaccttgtgactggaggccaggagcatgagatgaatgaacagcagcaacaaaaggtggcagagacagttgggttctactcctccatcttcggggccatgcagctgttgtgccttctcacctgccccctcattggctacatcatggattggcggattaaggactgcgtggacgccccaactcagggcactgtcctcggagatgccagggacggggttgctaccaaatccatcagaccacgctactgcaagatccaaaagctcaccaatgccatcaacgccttcaccctgaccaacctgctgcttgtgggttttggcgtcacctgcctcatcaacaacttacacctccagtttgtgacctttgttctgcacaccattgttcgaggtttcttccactcggcctgtgggagtctctatgctgcagtgttcccatccaaccactttgggannnnnnnnnnnnnnnnnnnnnncatcagtgccgtgttcgccttgcttcagcagccacttttcatggcgatggtgggacccctgaaaggagagcccttctgggtgaatctgggcctcctgctattctcactcctgggattcctgttgccttcctacctcttctactaccgtgcccggctccggaaggagnnnnnnnnnnnnnnnnnnngcccactgaaggtgcttagtggctctgaggtgactgcatagacttttgagaccaagggacctgcatgacaggcaatcaaggcctgagcaaccaaaaggagtgcctnnnnnnncttttttacctgtaacatgcacatagagccatggccgtggatttataaataccaagagaagttttatttttgtaaagannnnnnnnaggaaaaaaaaaaaaaaccctgcaaaaaggtcccccaaagcaacgctccattgattgaagacagtccctgtcttagaggggttgagccttcttcctccttgggttggaggagaccaggatgtggagctgcctcttatctctttctaggggtctgcttcctggtgcctcttgggggggattggcaaacaggctatccctaaagtcccatgtgccatgnnnnnnnnnnnnnnnnnnnnnnnnnnnnnnnnnnnntgtgagagannnnnnnnnnncnnnnnnnnnnnnnnnnnnnnnnnnnnnnnnnnnnnnncctgggttgggggttgggggtcggccccttccaggggcaggagggcgggttccctctctggtgc

SEQ ID NO: 14757 - DNA, 1331 bp, Macaca Fascicularis
  misc_feature (1)...(1331): n = A,T,C or G
gccgccgcaacctagacatcgagcgcccaacctacaccaacctcaatcgcctcattagccaaatcgtctcctccatcacggcttctctgcgctttgacggggccctcaatgtggacctgacagagttccagaccaacctggtgccctaccctcgcatccacttccccctggccacctatgcaccagtcatctctgcagaaaaggcataccacgagcagctgtcggtggcagagatcaccaatgcctgttttgagcctgccaaccagatggtgaagtgtgatccccggcacggcaagtacatggcctgctgcctgctgtaccgtggagatgtggtgcccaaggatgtcaacgctgccatcgctgccatcaagaccaagcgcagcattcagtttgtggactggtgccccacaggcttcaaggttggtatcaactaccagcctcccactgtggtgcctgggggcgacctggccaaagtgcagcgtgccgtgtgcatgctgagcaacacgacagccatcgctgaggcctgggcccgcctggaccacaagttcgacctgatgtatgccaagagggcgtttgtgcactggtacgtgggtgagggcatggaggagggtgagttctccgaggcccgtgaggatatggctgctctggagaaggattacgaggaggtgggcatcgactcctatgaggacgaggatgagggagaagaataaaccagctgcctggagcctgttcactatgtttattgcaaaatcctttcgaaataaacagtttccttgcacggtttcttgtcccctctgagtgcttgagcttctgctgccttccccttcatgctgctgctgctctcactgtttgctgttcatgacccttatcccttccgtcgaacgtgagacctgcaaaggggcccttgccaggcccaggaagcataaccccagggactttaaatcgaagccctaggggtattcagtatagggaggaaatgaggaccaaatccaggcacaaactgttgaaggatgagtcttcagttccttttcaagtaggannnnnnnnnnnnnnnnnnnnnnnnnnnnnnnnnnnnnnnnnnnnnnntcttcctgctgcctctacatttaccaactctggaagcaaggcttggcccagactcctctgtgcattatgagggtttgggagtggggctggnnnnnnnnnnnnnnnctgggcatggagccacatcataagcttgggggatgggagggaacacaggcaatctcctagagttgtttgtgccactgcacctctgagcagctttgcatagcttcctgtcttgctgctttgctggagctggggctgtgcca

SEQ ID NO: 14758 - DNA, 830 bp, Macaca Fascicularis
  misc_feature (1)...(830): n = A,T,C or G
agcaacaatatgctacacannngctttgctcaaagcaagagctgnnnntgacaaattctnnnnngaggctgcatctcggcgggggctgagcacagcagagatgaatgcagtagaagccattcatagagctgtggaattcaatcctcatgtgccaaaatacctactagaaatgaaaagcttaatcctacccccagaacatatcctgaagagaggagacagtgaagcaatagcatatgcattctttcatcttgcacactggaagagagtggaaggggctttgaatcttttgcattgtacgtgggaaggcacttttcggatgatcccttatcccttggaaaaggggcacctattttatccttacccaatctgtacagaaacagcagaccgagagctgcttccatctttccatgaagtctcagtttacccaaagaaggagcttcccttctttattctctttactgctggattatgttccttcacagccatgctggccctcctgacacatcagttcccggaacttatgggggtcttcgcaaaagctttcctcagcactttgtttgcccccttaaactttgtcatggagaaagtggagagcatcctcccatccagtctgtggcaccagctaacacggatctgagagaagccccgtcctccagtcacctcacccgctgctgccactgtctcctctgtgccaactccttgtggaccgcaagaaagcatgactttgaaaaagggaagccattccgagattttaaaatgttcatggactatcccatattaaaagctgtttttgttgtacaaaattcattgatgttcagttctattttatt

SEQ ID NO: 14759 - DNA, 742 bp, Macaca Fascicularis
  misc_feature (1)...(742): n = A,T,C or G
tcaacgagttgcccaaaacccagcatgacgtcaattccttcgtggtagacataagcgcccagacaagtacactgctgtgtttttctgtcaatggagtcttcaaggaagtggacgnnnnnnnnnnnnnnnnnnnnnnagccttcacccggacgttcattnnnnnnnnnnnnnnnnnnnnnnnnnnnnnnnnnnnnnnnnacgagctatttgtgcggaatgccagttctgaagagatccaaagagccttcgctatgcctgcgcccacgccttcctccagcccagtgcccaccctctctccagagnnnnnnnnnnnnnnnnnnnnnnnnnntacccnnnnnnnnnnnnnnnnnnnnnggtcccagaagtgccttcaggacaacaactgggactacaccagatctgcccaggccttcactcatctcaaggccaagggcgagatcccagaagnnnnnnnnnnnnngtgattgtagtcatgccccagaagcagcctcccctgtaaatagtccttggatnnnnnnnnnnnnnnnnngtctgtcatctcctcctgtctggccctaggccgccccgtgactgtgaccgagggagggagggctgcctgatccctctcctcgcctgccctggaagccttcannnnnnnnnnnnnnnnnnnnnnnnnnnnnnnnnnnnnnnnnttgtagaactgacactaaactacccgaaggatttaggtgctttgtgtacttaaccccaggaccctccttac

SEQ ID NO: 14760 - DNA, 712 bp, Macaca Fascicularis
  misc_feature (1)...(712): n = A,T,C or G
acannnnnnnnnnnnnnnctgtcccacccntnctgccaggcccacaggtgttgaagaagataaaggtctnnnnnnnnnnnnnnncctgtggcccactctgccggtatgtgtgacaagcagcttaaactgcaccctggagaacggcatgccttgtgtgattcaggagccggccccggttcataatagtttcattgattggaatgcaacatgcgaannnnnnnnnnnnnnnnnnnnnnnnnnnnnnnnnnnnnnnnnnnncaatgcctttccagaagaaaacatgaactatgccaatggcttcccttgtcctgcagacgttcaggcagactttattgatcacaactctcagtctacctggaacaccccacccaacatgcctgctgcctggggacatgccagtttcatcagctctccgccctacctcacaagcacccgaagcttgtctccaatgtctggactttttggttccnnnnnnnnnnnnnnnnnnnncgtgtatgaaaattgctgccccatcaaccccaccacggaacattcgacccacatggaaaaccaagcggttgtgtgcaaggattattacccggggttcaacccgtnnnnnnnnnnnnnnnnnnnngacatatggactaccacagcaaatagnnnnnnnnnnnnnnnnnnnnctagagactcgagttactgtgggaatgtggaaaataattggagtttaaacaag

SEQ ID NO: 14761 - DNA, 831 bp, Macaca Fascicularis
  misc_feature (1)...(831): n = A,T,C or G
tcagcagttctagtactcttctttgtcagtatatcaacctacagctnnngaatgcagagccacaagagtgtttaatggggacagtgggcactctcctgcttgaaaacccnnnnnnnnnnnnnngactcacccaccaaggtcttctgtatgaagcagccaaggtgtttggccttcgnnnnnnnnnnnnnnnnnnnnnnnnnnnnnnnnnnnnnnnnnnnnnnattacagaagacatccccgtgaagactttgaatatgaagactgtgtatgtttctgtattaccaacaacagcagacttctagcatgccctttcagtgttgttcagtcagcctttccctgattgcacatagacacacacatgaacacactgaagatgtttccttcaggtgcatgtaaannnnnnnnnnnnnnnngaaatacaaatgggattgatgagttaagtaacttgagacctcacagtaatcttcacacttaaccttagacacctatgcagtcatgttgggnnnnnnnnnnnntgttacctcagcaccacagtttatttctatacttgagttcttcagtatagaaggtagaagtgatttaaatggcatagtatatatatcattttctggcctcttaaaatttgagacctcttgatgaaatggacatattatatatttnnnnnnnnnnnnnnnnnnnnnnnannnnnnnggaannntttaagtttnnnnnnnnnnnnnnnnnnnnnnnnnnnnnnnnnnnnnnnnntgaaagtaattcattctcccacagatagatgaaacttgaaatgtgtcatctttgaagaacgtaaaaacttcacagtggtttctg

SEQ ID NO: 14762 - DNA, 726 bp, Macaca Fascicularis
  misc_feature (1)...(726): n = A,T,C or G
tctctgatttccattagcttaaaattcaattcagtctttccatttctccactgaggtcaccgcctcagcatattacacaacaccttctcccgcactcagtgtgacacgcatccacacggtcagccccatggtcagcctctttgtttcccaggtgaaccaactagatgttaatactgctctgctacaaggtaaaagctcctaactcaaacttattggaaaaggagtgaaacgtctgnnnnnnnnnnnnnnnnnannnnnnnnnnntgcttatgaaaagaaaccagtgagtcctctaaggataacaaaagggagtatnnnnnnnnnnnnnnnatgatttggagtgaagaattctgatgttgctctgctggtccaggctgttaatactcttcttgctcctcctgtgggcccccttcatcaggtatcacaaagccttcatctgtggcatacagaatgtctacaatcctctgcaatacagggtcgttttccccctcattctcctggcaaatcaattcannnnnnnnnnnnnnnnnnnnnnnnnnnnccctctctttctccaagtcttcaacagtaagtnnnnnnnnnnnnnnnnnnnnnnnnnnnnnnnnnnnnnnnnnnnnnnnnnnnnnnnnnnnnnnnntctttnnnnnnnnnnnnnnnnnnnnnnnnnnnnnnnnnnnnnnnnnntgtgttgacatgggcctctggggagctgcactgctagaactg

SEQ ID NO: 14763 - DNA, 491 bp, Macaca Fascicularis
ctcaccccgccaagctccgccgagtcagggagcagatctcccccgagtagtggtgggaggagaggccgggcctacatgcccccgcggagccgcagccgggacgacctctatgaccaagaagactcgagagacttcccacgctcccgggaccctcactacgacgacatcaggtctcgggagcgcctccctgccgaccccaggtcccactaccaccgtacccgggaccctcgggacaacggctccaggtccggggaccccccttatgatgggcggctactggaggaggccgtgaagaagaaggggtcgggggagagacggagaccctacaaggaggaagaggcctactatccgcccgcgccgcccccgtactcggagaccgactcgcaggcgtcccgcgagcgcaggctcaagaagaacctggccctgagtcgggaaagtttagtcgtctgatctgacgttttctacgtagcttttgtattttttttttaatt

SEQ ID NO: 14764 - DNA, 733 bp, Macaca Fascicularis
  misc_feature (1)...(733): n = A,T,C or G
gacaatacaccaaagtgatactgaggatggtgaattcactgaatgtaacaacatgaccctcatcaacttgctacttaaaatctttgggcccatacatgagagaaacctcacattgctcctgctgctgctgcaggtgaggatggggattgggtttatacctccttgtctccctttctccgtgattcttactccagtccatttctccttgcagatcctgggcagtgccttcaccttctccattcgatatcagctcgttcgactcttnnnnnnnnnnnnnnnnncttgatcattgtcctttacctcacagtctctaggattcctgactcaggctgacctctctctggtcccagactgcctccttgcccaggcctctctcactcttcatactcttccagattttgttctcagcattttcttttccctgtgatcactggcatcctgggcgtttcttgccccctactgtctactgattggattttacttatgactttctgcaacttgctactctccctctccatcctgtctttgcagcctcacagggtgggatacagcagttttttttttgcagttatccacagtcacatttcagagtcctgactctcaaggaactactggtttttgggatagaacttgggccagggctagggacacaggctccacagtgacctgttatttgattgtaaattaagtgttctgattagtaagaagtaagcaggggcccacatgctctcaa

SEQ ID NO: 14765 - DNA, 756 bp, Macaca Fascicularis
  misc_feature (1)...(756): n = A,T,C or G
agtggttgaaggacnnnnnnnnnnnnnnnnnnnaaaagannnnnnnnacaaatttctgcagctggcagaatctaatacagtgagaggaatagaaacctgnnnnnnnnnnnnnnnnnnnnnnnnncataatgaatttactattactcannnnnnnnnnnnnnngcagtctgcgggaccagactattgtgacgtggagaatgtagaggaattattcnnnnnnnnnnnnnnnnnnnnnnnnnnnnnnnnnnnnnnnnntcatacgcatcccactcaaactgcattcttatccagcnnnnnnnnnnnnnnnnactgttcctatcaactcatgttaccagaggnnnnnnnnnntgtttgctcaccaaagcnnnnnnnnnnnnnnnnnnnnaggctcaccaatgctggcatgcttgaggtttctgcttgtaaaaaaaagggctttcatccacacaccaaggagcccagnnnnnnnnntatatgcaaacatgtgttggtaaaagacataaaaataattgtgttggatctgaggtgatatgttctgaatgtaagcaccatcaacatcagacacctactcacggacatgtggttgccggattttcttaagatgtttccagaaatgactgatattttatatttatacattnnnnnnnnnnnnnnntgatatttattgctgttgcacattttgaagttttctttttgggttgctctgtgtcaagagaggttacatggtgttaaatcggtacctaataatgtgcccaa

SEQ ID NO: 14766 - DNA, 771 bp, Macaca Fascicularis
  misc_feature (1)...(771): n = A,T,C or G
aatgcattgtaatcnnnnnnntcaagtnnnnnnnntgccctgttcacatttgtctctaaaagtcntcatcnnnnnnnnnnnnnnnnnnnnnnnnnnnnnnnnnaagctttctatgttatactttatatttgtcactttaaaaaatccatttcttttagaaaaaattagggtgatagcatattcattagttaagatggtaacgtcattactatttttttaacatcctctttagaggtaatttttgttaacataaccaaaaattaaattgaaacaaaatgtcccaactaagaacatatatagagcattttattttttttgagtgttgtaaaatattagcctctgtgagatcctttgtatcttaatgcattacctttacacatatttattcttattttctctccttccagagtttacatttttatatttaatttactatttcagatttttaaaatagtatagaaaaaagtaggagtgatagagaacaaaaatactgttacacagtgcaacccaaataccgtgaatgcgtcagctaaagcagcgtgtacataggaatgatgagaaaaagttaatggagtattttattttcaaagtccctgataagcattgnnnnnnnnnnnnnnnnnnnnnnnnnnntttcctttttccttgcctattttttcattgtaaatatttatatactactgaccaagatgttggggtgggggggattgttttttgtaaaaatgtcattatcaggtcacataaatctgcctttatgttgcataaggaaaa

SEQ ID NO: 14767 - DNA, 709 bp, Macaca Fascicularis
  misc_feature (1)...(709): n = A,T,C or G
ttcctttgccgtgttccccaatgaagatggctctctgcagaagaaattaaaagtctggttccggattccaaaccaatttcaaagcgacccgccagctcccagtgacaaaagcgttaagattgaggaacgggaaggcatcactgtctattccatgcagtttggtggttatgccaaggaagcagactacgtagcacaagccacccgactgcgtgctgccctggagggcacagccacctaccagggggacatctacttctgcaccggttatgaccctcccatgaagccctatggacggcgcaatgagatctggctgttgaagacatgagtgacccactgagccaagaacttcctggaagcgtgcctctgtgtctccttcctcggggggcaggaggggacagtacttcccaagttccaacnnnnnnnnnnnnttaaccaactttccttcaaagtcagttactgccannnnnnnnnnnnnnnnntgttccatatactaagtctcttttctcacggtgggaaatagtacagccaagataggcagcatccttctcattgatttagaaaattctgcggtagaccagaaaaatcctggcagcttttctccagccatctgggtcactaaaaactgattttctaaaattattgaatttgtattttgttattaagggggaaatgtgatttgtgcctttcatctgtgattcctataagagct

SEQ ID NO: 14768 - DNA, 750 bp, Macaca Fascicularis
  misc_feature (1)...(750): n = A,T,C or G
cggaaaaacaaaaatctcacagacacagacctaattaaacagtgtatagatgaatgcacagccaggattgaaattggactgcattacaagattccttatccaaggccaattcatctgcctccaatgggccttaccccactccaaggccggggacttcgaagccaagagaaactgaggaaactttccaaaccagtatatctcagatctcatgatgaagtttcctaatctagaggaaagnnnnnnnnnnnnnnnnnnnnnnnnnnttgttcttgaannnnnnnnnnnnnnnnnnnnnnnnnnngattggggcaaaaattcaaatgtcttcttaaaacctccacaattgattctcacccatgatnnnnnnnnnnnnnnncctagagtttctcagcgtctttcttcctgagtggatggcattatccatagaggtcatggaccttacatcctcactgcagtcacctttggaaacaagactaaggcctgtacaagggaggtggaagggtgcaagagctgttgatgggaattccattcaccacgcgtgccagctgatgcaaagaaatttgccagtcactggaagttactgtggctactgtaaaactatgtaccactctcagaatattcttaggctttttatttttttttaagctatagatttgcttagaagtgaggtttttttgtgtgtgtgcttttttgttgtcttttgacccttccagtttccagataaacttatcttaaaaagtttggtttttc

SEQ ID NO: 14769 - DNA, 900 bp, Macaca Fascicularis
  misc_feature (1)...(900): n = A,T,C or G
ttnnnnnnnnnnnnnnnnnnnnnnnnnnnnnnangggagtcgtnnnnnnnnnaatgtttacatttnnnnnnnnnnngacgnnnnnnnnnnnnnnnnnnnnnnnnnnnnnnnnnnnnnnnnnnnnctggtggtccgggagatggggatttccggggctagtgatcgtgatcccttttatcttgcaactgtaatgagaatctttgacatgaacacnnnnnnnnnnnnnnnnnnnnnnnnctcctcctgcctctaccatgagtctccagcctgcaaagcactggcagctgtggtgcatgtgggtgctgctaccccggcacgcgcctcttccacgggcacaggtgtgtggaggccgtggtcagagcctggtgtcctggttactgctgcccggccgtctgtattttgagtaactgctctgagttttgcacatgaagttgtcctcatctgctggagactgataagaaaaaggcggcacaaaacattcgccgcctccggtgagcttcccgcagccatccggctccacctgggcacgttctctgaggcacgtgtctcccccgctcaccctcgtctgggcaccgcagcatcggcagacttagcgtccaaaaaccccgagtgtgattctgggcagcgggcctggctttaagtctgccgtgaccctgggcacaggagaggcccagctgtgggcttaggaggagagagggaccagcacccagcgtcagggccggaagacagcagtgttcagaattccagccactcatctgaagaaaaaaggtgtgaactgagctctaaagcagcacgagacggaaatgatctagaaaactttggatttttgacgtaaattttaatgtttcatattaatttcttgaaaatttattaaatgtcattgaaagccttattaatttc

SEQ ID NO: 14770 - DNA, 713 bp, Macaca Fascicularis
  misc_feature (1)...(713): n = A,T,C or G
ggcaattcagggtcaccaaagaatggnnnnnnnnnnnnnnnnnnnnnnnnnnnnnnnnnngataacagaacatggtcagaagttacttatacatacagacctgagactcagggacaatcatggacccgagatgctagccgtgacaatttaccaaaatgctcagcctttcagcacgcaccctttcaggatcatggcctccctgcagtttcggtagatagtccnnnnnnnnnnnnnnnnnnncctgccgcagaagatgccagtccatctgggtatccatattcagggcccccgcctnnnnnnnnnnnnnnnnnnnnnnnggacgggctttccatnnnnnnnnnnnnnnnnnnntgagattnnnnnnnnnnntgctaaagacaagagagaaaccccatgaaaccaacattgctatgttcataannnnnnnnnnnnnnnnnnnnnnattgtaaacagctcgcacatctctcctgtgagtagtaagaatacagggaaatgtctnnnnnnnnnnnnnnnnnnnnnnnnnnnnnnnnnnnnnnnnnnnnnnnnnnnnnnnctgttagaatttaacccggaaacatagcaatagcatttagggatgcacgcacaatggtaatttattactcagttccgtttatgtttttctccaaaacctgaacatttttactctgttggctcattctattttgactaatgttacaaagtactgaaaaaac

SEQ ID NO: 14771 - DNA, 1224 bp, Macaca Fascicularis
  misc_feature (1)...(1224): n = A,T,C or G
cgtcannnnnnnnnnnnnnnnnnnnnnnnnntcnnnnnnnnnnnnnnnnnntctttccctggaggaaattcagaagaaattagaagctgcagaagaaagacgcaagtcgcatgaagctgaggtcttnnnnnnnnnnnnnnngaaacgagagcacgagaaagaagtgcttcagaaggcaatagaagagaacaacaacttcagtaaaatggcagaagagaaactgacccacaaaatggaagctaacaaagagaaccgagaggcacnnnnnnnnnnnnnnnnnnnnnnnnnnnnnnnnnnnnnnnnnnnnnnnnnnnnnnnnnnnnnnaacaaagaatccaaagnnnnnnnnnnnnnnnnnnnnnnnnnnnnnnttgctctgacaactgactttctccccatccccttcctnnnnnnnnnnnnnnnnnnnnnnnnnnnntcattttattttttccctcctgacaaatattttagaagctaatgtaggactgtataggtagattcagactgtaagatgttgttttaggggctaaaggggagaaactaaaagtgttttactctttttctaaagtgttggtctttctaatgtagctatttttcttgttgcatcttttctacttcagnnnncttggtgtactgggttaatggctagtactgtattggctctgtgaaaacatatttgtgaaaagagtatgtagtggcttcttttgaactgttagatgctgaatatctgttcacttttcaatcccaattctgtcccaatcttaccagatgctactggacttgaatggttaataaaactgcacagtgctnnnnnnnnnnnnnnnnnnnnnnnagttaggttaataaatcaagccatagagacccnnnnnnnnnnnnnnnnnnnnnnnnnnnnnnntggggctggtagaaataccaaggcacnnnnnnnnnnnnnnnnnntgccctcagtttcttgccccagtgtggtttgcattgtctccctccacaacggccgctttgtttggatgcctcagcccaggtcagctgttactatattctttcagatgtttatttgcaaacaagcattttttgttctgtgtcccttttaaaaggcagattaaaggcacaagcgtgttactagagaacagtttagagagaatctcaaggtcctacttggtggtttnnnnnnnnnncattacaggtggggcatgtcctcatcctttcctgccataaaaacgacaacac

SEQ ID NO: 14772 - DNA, 736 bp, Macaca Fascicularis
  misc_feature (1)...(736): n = A,T,C or G
gggctctggtgnnnnnnnnnnnnnncatgcagcagctgcagctggcagaggctcagtgnnnnnnnnnnnnnnnnnngcaggtgccgaccccactgtgcaggactctcgggcccagccaccttacactgttgcggctgacaaatcaacacgtaatgnnnnnnnnnggttcatggagaagaatccagatgcctatgattacaacaaggctcaggtgccaggaccattgacaccagaaatggaggcacggcaggctacacggaaaagggagcagaaggtagcccggcggcaacgggaggaacagcagcggaggcagcaggagcaggaggagcgtgaacgagaagagnnnnnnnnnnnnnnnnnnnnnnnnnnccaagagaaaagagctctggctgcagatcgnnnnnnnnnnnnnnnnnnnnnngcccctacccctccaatccctgactctgcaatcgtcaatactcgacgctgctggagttgtggggcatccctccaaggcctcactccctttcactacctcgacttctctttctgctcnnnnnnnnnnnnnnnnnnnnnnnnnnnnnnnnnnnnnnnnnnnnnnnnnnnnnnnnnnnnnnnnnnnnggcacattcacaacagccctaggttttctcatccccatgaaaccagaggttatttggaagatgggggtgaaggacactcgggaaccaggacaaagacagggccacagaggcatgtggagctggtactgtct

SEQ ID NO: 14773 - DNA, 547 bp, Macaca Fascicularis
gcagagctgtctttctaacagaagctttggaaagggcaaaacttcacgagaagccatctcatgttagagcttttcaagagcacgacagccccgactctctcagttttctggattttgagatgtgcaaggactaccgagtattgcccaggataggttatctttgtctgaaggatttaaagcccgtgtgtggtgaggacggccaaacctacaacaatccccgcatgttctgtcacgaaaacccgatacgccaaacaaatacacacatctgcactacagggaagtgtgaggagagcagcacccccgaaacacccgctgccagcaagcccgcgtgtgatgaatgacgggaagattgttgaaagccacgagggaaaaagtaaaccccaattttgaatcacccaccttctcctctgtatatacaaagaattctttggagcttgtcttatttgctatagaaaacaatacagagctgttgggaatagactcactgattttcagtcttttccatctctttcttcttagactctgtaatatgagggtataaagaaat

SEQ ID NO: 14774 - DNA, 640 bp, Macaca Fascicularis
  misc_feature (1)...(640): n = A,T,C or G
ggaggcgtgggaagaccactcagtggtcagagatacttggggaggggagactgagtttgaaatcatgcttaagatgccagtggctcgacctgtggttggtttaagttctaatttttaaaagctagttagagaacagaaaatcattgggccaagtcacacctgtattttttttttccccctcctctgtctccaacctctttctaggttcttcacacacccccattcggcgtagtacccagagagctcaagatgtgtggcagttttcggatggaagctcgagagcccttaagttctgagaaaatttgaagcccccaggggcggggtggacgcgtgccgcccagtcgacgtnnnnnnnnnnnnnnnncctgctagtttgtgatgttttctgacagtagcctccaagaagccgttgtgcgaagacagagtcctgcagagtccttccagcctggacctgcagtgccattttatttatattttttaatnnaaagtaaaaacaaaaaaacagacccacattggaacnnnnnnnnnntcccatagagagggcccgtggaccatcgctgtcatgagtgatgccctggccctnntgaaaccagccaacctnnnnnnnnnnnnnnnnnnaaatnnncatgagtccccaccc

SEQ ID NO: 14775 - DNA, 755 bp, Macaca Fascicularis
  misc_feature (1)...(755): n = A,T,C or G
aagtaatgggagnnnagtcaatgggagttctcagcagggaaactcaaatccttccctaggttcaaatattccaagtcttcagaattcattaaatggatcttcattgtttcaggtatttctttccccctctggattccccacgggctggatcgagatggtccagttatgcccagctccttcctcctcctcctcctctctctggtagagcactcttgcgatgctgacactgccaacctccagtatcctcaccctagcagacgatatctctctcggcctcttaatcccttacctgagaannnnnnnnnnnnnnnnnnnnnnnnnnnnnnnnnnnnnnnnnnncaagtgcttgtaaatgctttcatttctggatgctttttgtttttcttcactttctttcagaagatttttataacttagggtctgtcttgcatgtattacaactggaatacggtgtttcgaacctaaatctgcttgtgcgtctnnnnnnnnnnnnnnnnngcttcactgggtgataacctttgatgaaatgagatatgtccaagtaacattaactgnnnnnnnnnnnnnnnnnnnnnnnnnnnnnnnnnnnnttttgtaaattttattttgaactgttaccatagtcttaagttgtttatgctnnnnnnnnnnnnnnnnnnnnnnnnnnnnnnnnnnnnnngctgattctgtctttgagaccttagaaaatggatttcattttacaggctaatgttgcaacgtgactagtatgtaaa

SEQ ID NO: 14776 - DNA, 719 bp, Macaca Fascicularis
  misc_feature (1)...(719): n = A,T,C or G
cgnnnccgggcgggacccgccccacagactccaacttcccctccaaaccccgaagtgaaacccgccaccgagttatccccacaaatggggccactgcgagaagttcccccacccctaaaaaaataattaaactcgcaggccnnnnnnnnnnnnnnnnnnnnnnnnnnnnnnnnnnnnnnnnnnnnnnnnnnnnnnnnnnnnnnnnnnnnnnnnnnnnnnnnnnnnnnnnnnnnnnnnnnnnnnnnnnnnnnnnnnnnnnnnnnnnnnnnnnnnnnnnnnnnnnnnnnnnnnnnnnnnnnnnnnnnnnnnnnnnnnnnnnnnnnnnnnnnnnnnnnnnnnnnnnnnnnnnnnnnnnnnnnnnnnnnnnnnnnnnnnnnnnnnnnnnnnnnnnnnnnnnnnnnnnnnnnnnnnnnntccgtctcaaaaaaataaataaacaaactcgtgagctggtcccaacccccccgctaggaatcacagctccccgtactggtgccgccgcagtggccaagttgcgacactgcccacggcccttcnnnnnnnnnnnnnnnnnnnnnnnntcttcgatcatgttgggttttgactctgtttttccttgactgcaaaaccctctttcctctcctcttttgnnnnnnnnnnnnnnnnnnnnnnnnnnnnnnnnnnnnnnnnnnnngcctgcccggcgagctgggaggcaggttttgtacggtacgttgtta

SEQ ID NO: 14777 - DNA, 697 bp, Macaca Fascicularis
  misc_feature (1)...(697): n = A,T,C or G
gcaagtgcctgnnncagaaaatcactcaactaagaggccaggagagccaaaagtatgctctccgcagttttcaaatggcccgggtcatcttcaaccgggacggctgctcagtcttacagannnnnnnnnnnnnnacccacttctatccactggannnnnnnnnnnnnnntttgaatgatgaaaagccaaacccaggactgtcaaaagatattattcatttcctcttgcagcagaatgtaatgaaagacctgtaactggtgccgggcggtgtgcaggctagtaatggaggtgctgcgccatgnnnnnnnnnnnnnnnggccacccagatcccctagggtctctggccagctctgtgtgcccaatcccaattaagtgctttgtgnnnnnnnnnnnncacctgtgacctggtattggagccagtcagcccatatggagagccagcagggtctgagagttctctgtccccatggtcaccccacccaccactccccttggccaaggccactgactgactgggctatgagtcaaaaacccagctcccttgcctcaaggagaaggacattctctgacgcgtaatttatgctctagagctccctttccttgagatcagcctgaggctgggacgttacatgaaatcacgcccttgctgggcttaatccctttccctatcctcctcccatttatttactggtgtctc

SEQ ID NO: 14778 - DNA, 683 bp, Macaca Fascicularis
  misc_feature (1)...(683): n = A,T,C or G
aaacagagagaagagatgacacactaaagatgtccagtaaggggaattctaaaaagaacaagagttcgatagttttcaaatagctggttggcgactcttctttccagacctgctcctgctgcacagagctgcggggctgagaccacgtccannnnnnnnnnnnnnnnnnnnnnnnagtattgtcggacctagtaaactagtcagtgttggaannnnnnnnnnnnnnnnnnnnnnnnnnnnnnnnnnnnnnnnnnnnnnnnnnnnnnnnnnnnnnnnnnnnnnnnnnnnnnnnnnnnnnnnnnnnnnnnnnnnnnnnnntccttatgctgtttttactgtgcactttttaaaattaggttttaatttcagtatgtaagaacaacaaatattttgtatactttcaaactcaattatatggtaatcgatttggtatctatggaatagatatatgtttctggaaaaaaaatgcttaaattgtcaaactgtcattacttcttactatagttgaaggcattctccagattctttttaaaagatttgttcatatttctctctctctctctctctttctttctgtctctctgtttctctcctttctctctgagggggagggagccctgcaaacttcagatcctgtgggtttagtatcattatcttcagctctttgataccctgtgttagag

SEQ ID NO: 14779 - DNA, 680 bp, Macaca Fascicularis
  misc_feature (1)...(680): n = A,T,C or G
gaaacataatgctggcatctgcttctgggaaggcctcaggaagcttacaatcatggcagaaggcgaagggggagcaagcatctcacacagtgggagcaggagcaagagggcaaagggggaggtgctacacacttttttaaatgaccacatctcatgataactcacttcaagagggtggtgctaaacattcatcagaaacccacctccgtgatccaattaccttccaccaggccccacctccaacattgcagattacaattgaccatgagatttgggtggggacacagatccaaaccatataatcttccttacccatgcagcttagattctgcattccatcatttcagccacgttcttgtgtatgttcttgatgcccctctcccattgttgtttcactgcagctgnnnnnnnnnnnnnnnnnnnnnnnnnnnnnnnnnncaatttgactgggggttcttcctccttgtcgcccacacttaacaactcctgggccaattcctcctgttccagcaactctagctcctccagcagttcatcctnnnnnnnnnnnnnnnnnnnnnnnnnnnnnnnnnnnnnnnnnnntgagatctgctgggccacctcctgttgttctgtgatgtcagtcatcagttcatctaccttgtcaatgtccatgtcnnnnnnnnctttcttcatgcctt

SEQ ID NO: 14780 - DNA, 745 bp, Macaca Fascicularis
  misc_feature (1)...(745): n = A,T,C or G
tgccgggccatgctgacggaccnnnnngcagtgcccaaaggaaatgccactaaagaattcatcgagagtttacagttgaagcccgnnnnnnnnnnnnnnnnnnnnnnnnnnnnnnnnnnnnnnnnnnnnnnnnnnnnnnnnnnnnnnnnnnnnnnnnnnnnnnnnnnnnnnnnnnnngatcaccactgtccgtgggtcaacnnnnnnnnnnnnnnnnncaaccagaagtacttcgtcctgtttacaatgtacatagctctcatttccttgcacgnnnnnnnnnnnnnnnnnttccacttcctgcattgctttgaagaagattggacaaagtgcagctccttctctccacccnnnnnnnnnnnnctcctcatcctgctgtgctttgagggcctactcttcctcnnnnnnnnnnnnnnnntgtttgggacccaggtgcactccatctgcacagatgagacgggaatagaacaattgaaaaaggaagagagaagatgggctaaaaaaacaaaatggatgaacatgaaagccgtttttggccaccccttctctctaggctgggccagccnnnnnnnnnnnnnnnaccaagggaaggcagacccgtaccagtatgtggtctgaaggaccccgaccagcatggccactcagacacaagcccacaccacagcactaccgtcccatctgttctcatgaatgtttaaatcgaaaaagcaaaacaactactcttaaaacnnnntttatgtctcaa

SEQ ID NO: 14781 - DNA, 741 bp, Macaca Fascicularis
  misc_feature (1)...(741): n = A,T,C or G
atcgacaaagaanntgaagtttacnnnnnnnnnnaggagaaacaggagttgaatgagcccccgaaacagtccacgtctttcttggttttgcaggagatcctggagtctgaagaaaaaggggatcccaacaagccctcaggattcagaagtgttaaagctnnnnnnnnnnnnnnnnnnnnnnnnattggaaatgctcagaagttgcctatgtgtgacaaatgtggcactgggattgtcggtgtgttcgtgaagctgcgggaccatcannnnnnnnnnnnnnnnnnnnnnnnnnnnnnnnnnnnnnnnnnnnnnnnnnnnaagggccatttctttgtggaggatcaaatctactgtgagaagcatgcccgggagcgagtcacaccacctgagggctatgaagtggtcaccgtgttccccaagtgacccagcagatctggccactgttntccagccggcctctgctgcagctttttctctcagtgttctggccctctcctctcttgaaagtctctgcttactttgggtttccctctgcttctaaaacattgagttccctccccgccttggttaattgactcacaccagctgtgcgatgcctgcttttacaatgaaaggaaaactgttttgttcagtgtccccttnnnnnnnnnnnnnnnnnnnntcctcccctctgttcttctctgctgcatttggacatcagccaaatttgaacccaatcaaatataatgtgtctgacgttga

SEQ ID NO: 14782 - DNA, 769 bp, Macaca Fascicularis
  misc_feature (1)...(769): n = A,T,C or G
gaaaacaaataaaggaagagtctgaggctaatctgctggagacacgggagtgaaggtggcaatgtggggtagggttgtttttaaagagaggaagagcgggaggggctctggctctagggaagcccgaggttctcagcctctgctggcttcacaacggccagacctatcctccctcaaaggctcaaattaatggcccgcagctgagcctcccactgcccaatctgggnnnnnnnnnnnnnnnnnnnnnnttcccagctcaagggggctggagtggcaggcgaaacaggccggagagggcccacgagtcctgccaccactcctcactgtggtgtgatcttggcagcctcggcccggatgagggcaatgaggtcctggttgatgaggaagacgannnnnnnnnnnnnnnnnnncaccacagagttgttgctgaggcgccatttggagccacacagcactggccgnnnnnnnnnnnnnnnnnnnnnnnnnncctcannnnnnnnnnnnnnnnnnnnnnnnnnnnnnnnnnngatgacacctgtggaagcagaaaggaaaaagggatgaccctccagagacaggtccacatcaatctggttatccttggttgctctgcccagggtgatctcgcgtnnnnnnnnnnnnnnnnncaccatgcggccccnnnnnnnnnnnnnnnnnnnnnnnnnnnnnnnnnnnnnnnnnnnnnnnnnnnnnnntgtccnnnnnnnnnnnnnnnnnnncnnnnnnnnnnnnnnnnnnnnnatctctc

SEQ ID NO: 14783 - DNA, 853 bp, Macaca Fascicularis
  misc_feature (1)...(853): n = A,T,C or G
tccgccagtgggtggtcattcccccgccactttcgagccctggaccnnnnnnnnnnnnnnnnnnnnnnnnnnctgtccagagctggccaggccactgggcnnngagccagagacaaggnnnnnnnnnnnnnnnnnnnnnnnnnnnnnnnnnnnnnnnnnnnnnnnnnnnnnnnnngagcctgatgtnnnnnnngtgtgtgtgtgtgtgtgtgtgtgtgcgtgcacgtgcatatgcatgtgtgtgtgtgcatatgcgtgtgtgtgtgtgcatatgcgtgcgtgtgtgtgtgtcttaggtgcgcagtggcacgtccacctgtgtgtgtgattgcatgtgcctgtgggcctggaataatgcctgtggtactccatacattcacctgccctgtacatatctgggcccacggagctcacccatgtgcacgagtgtgcnnnnnnnnnnnnnnnnnngtcaacagatgacaacagtcatcttcccttctagggtcttgtgttgcaagctggtccacagtacctccggggnnnnnnnnnnnnnnnnnnnnnnnnnnnnnnnnnnnnnnnnnnnnnnnnnnnnnnnnnnnccaggagctgcaagaagtccacgttgttccttatcacctgccagcaggaagggaaaggggatggagtgagcccacagtgaccccgggaatgggaagattttgggtggcccatgnnnnnnnnnnnnnnnnnnnnnnnnnnnnccttctggctgtgctacctgagccaagtcgccgcccctctctggtctagagtttccttgtccggacaatggggaaggcatgacccacctggggaaaattggcaatgtcacccatgtacagtacacagccca

SEQ ID NO: 14784 - DNA, 704 bp, Macaca Fascicularis
  misc_feature (1)...(704): n = A,T,C or G
gctggggtgggggagcnnnngctgttgngggagggatggtggggaaggaaggaacatgatccctccagaagtctcccaccctggggccaagtcactgccaggttcagtgtcctggctccaaatgccccctcacccagatgaaaccctgcagtggttacaggaatggagctctttgtcattccacctcctctggtcaggcgaggttcaccgtgcatatggcagagacaggagtggccctgcagtatgttgggttgtgggcagggacagtgatggatgactcagagcgtctgtctttgtatttctgctctgttcattctgtcctactttcttcannnnnnnnnnnnnnnnnnnnnnnnnnnnnnnnnnnnnnnnnnnnnnagtaaatggagccaagtcttggtttgacaaggggaacttgatccttcagggaagaaccatctccaaaatcactccccatctggtttcttctaccacccaattctactaggaaaggagcacttaggaggctcttgggatgcagcaagtcctaggcaatgccagcatttcatgggggctgaggcagaacccaggagctccaagaaagaccacccatagagctcattccccgtggnnnnnnnnnnnnnnnnnnnnnnnnnnnnnnnnnnnncctcccatggtcatgccacccaccaggaaagcatctctgatctcttctttactgccag

SEQ ID NO: 14785 - DNA, 683 bp, Macaca Fascicularis
  misc_feature (1)...(683): n = A,T,C or G
gatggaagagtcgtggtgtatcccagcaaccagaccttaaaggactanctcagctggcgacaagcagattgtcacatcaataatctttataatacagttttctgggcacttatacaacaatctggactaacaccagtannnnnnnnnnnnnnnnnnnnnnnnnnnnnnnnnnnnnnnnnnnatgagattttgttttctgaattcaacatcaactataannnnnnnnnnnnnnnntataggaaagggactgtgttgatatggcagaaggtggatgaagtgatgacaaaagaaattaagctgccaacagaaatggaaggaaaaaagatggcagtaacccggaccaggacaaagccagtgcccttgcactgcgatatcattggggatgctttctggaaggaacatccagatattctagatgaagacagctgacccttcgcgcttcagttctggtgtgcttaaccatgcaagccctcccacctcccagggctccttgccttaggtggctgtatccctaccacccagaacactggtgtgaattacacnnnnnnnnnnnnnnnnngaacagggaaggaagggatggatgggggtggtgtatcttgttctgtttcagcagaacaccttgtttgcagtgttggaacatggttcctttggcagaagtgctttttttttttttaatcgcagta

SEQ ID NO: 14786 - DNA, 759 bp, Macaca Fascicularis
  misc_feature (1)...(759): n = A,T,C or G
catcaagnnngagatgctgcagctgtgctccatattgtctagctcttcctggctctggctgacaagaacatctccacaaagggcacaaagagtggcacctttgtcatgtataattgtgcccgtcttgccacactctttgagagttacaagtgtagtatggaacaaggtctgtaccccacttttcctcctgtgagcagtctggacttctcactattacatgatgaggtgagtgtccctcccggtagctggcacaaaggaagcctggacttcccctcccagcacctttctcccccacagggtgagtggttgttgctcttcaacaatatcctcccctttccggatctgctgagccagacagcaannnnnnnntgcacagccccagggctccacatcactgcacgcacagagatggtgaggcacaaccaggacactctacactctaggatttnnnnnnnnnnnnnnnnnnnnnnnnnnnnnnnnnnnnnnnnnnnnngtctctgtctctagatgtgcaannnnnnnnnnnnnnnnnnagggatttgcgtgaggtgctccatactggcctggctatgctgggtctccctccacnnnnnnncatctgaggccacagaggctccaatatttgagggatgttcagtgaggtgctccatagtggaatggctatgctgggtctccctccacnnnnnnncatctgaggccacagaggctccaatatttgggaatgttcannnnnnnnnnnnnnngaaaaaaagcaaaaac

SEQ ID NO: 14787 - DNA, 743 bp, Macaca Fascicularis
  misc_feature (1)...(743): n = A,T,C or G
gcagccaaactttgannnnngttgcaaagttctggggacttgcgggggttgccgtaaaccctgacagtgggttttggttcagcatgtaaatgcaactttgattttcttaaggactgattggcctgtcatgtccctnnnnnnnnnnnnnnntcatctcagcaggcctgagaggccaggtcagtttgggtgttcatcatgaggattgcttctgctgtggagctgagggacatgggcacgttgctgagaaggtggggtgaaagtgagtgctgggggtgggtgagcgccctggtcttgttcacaggggagtctttccctagcagtggaacgctgtggtcattttctctagcatattcccttaggaagtctagatttgctannnnnnnnnntgagaatctaagttctgtgccttagagacagtctgcactttctcatattgtgcctgagacagccatatgattttttttcccaccaaacaagtatggaaacagaaaccagttcaaagggggatggagtaaaagatgaggcagtagaaatgcctttgaatggttttctgtagctaattctctttacattttgtcctgcttttttctttatgcagtgctaggtgttttaagttttctaatagtattgcttttgagttacaatataacctgagttactcctctgctctaacattgttgcggaagaactagtttattgttagccaggttgcttgaaaggttgagggtgannnttggcattca

SEQ ID NO: 14788 - DNA, 699 bp, Macaca Fascicularis
  misc_feature (1)...(699): n = A,T,C or G
aatgaccaatacaagttncnnncagtttccactgactataagaagctaaagaaggaccggccagactnnnaagccaggctgggctgccagtgccatgcaaaccacggacagccagcccatccacttcttccactcctcccctcaggccccaaggcgtcagtctggccaccctgtcctgctcctgctcacacaggccgggttcccacgcagaggggaggctgctccacccctactctcctcccttgctcccagcagcggaagcgcctctgacccttggcttgagtcccacgtgggggaggaggaggcaggcagcaccagcaggggtccatcaaaagagcccagactagcccctctgccctcctacccaggcctcgaagggtgtggcacaggctacgtgttgagcgtggcctacgtgagccaacaagaagcagggacctctgagtgccaagagacgtggcgggctccacgttcgcccaggctctgggagtcagcccaggggcggtgctgctcagctccggctggtccagggcctgcctaggctggggcacctttgcctcctgaggtgtagcgcattcctccctgcccaagcccactgcctctcgctgccatcagtaccccctccagccccatacctgggcctccccttgctgctcccctcccttgctcccctctgtccccagggatcaaacagaagcagcc

SEQ ID NO: 14789 - DNA, 703 bp, Macaca Fascicularis
  misc_feature (1)...(703): n = A,T,C or G
aagcaaatagaagccgagtgttaaggtgttttgcttctgaaagaggnnnnnnnnnnnnnnnnnnnnnnnnnacgttttgctgttacattctgccaggggcaaaagatattaggcccaggagtcaagaaaagcttttgtgaaagtgattgtttcacctgactttgattccttaacccccggcttttggaacaagccatgtttgtcctagtccaggattgcctcacttgagacttgctaggcctctgctgtgtgctggggtggccagtaggactccggagggagcaagggaaggagtcaccaaaaaaaataaaagagagaatttaaaagtgtacagttgtgtgtttagatacactgtagaataatgtggtatatattgtacaaatagtctacatagatgtctgggataatgtaaaactggtgctttggctttgtaaagaatttgcaaatcacttaacagctgcaggggcaaggggagagtttcatcatccccatgatatttgggaatattctgtttacttcttagatagttaagaatgtattcagctactctgtactaacttgaaccatgtttaaggaaaactcctatttcatcctcttcttgtgccatcccctctccctaacttggtaatgtgaagaaactaaaacctgataccgcagctcctataggctttttagagatcttggatttttatgtacagtctta

SEQ ID NO: 14790 - DNA, 677 bp, Macaca Fascicularis
  misc_feature (1)...(677): n = A,T,C or G
gaaggatatgacagtccagcatcgatgcctgtgccctctggaaaaatttcctcctagccnnnncagggcctcatcataaaactctggatttagagtattcattttgaaggcaaccccccgcttccccaagttttcttggagctgtatagctgggttctaagcttcaccatgcaaatcagaaattttatctctaagtacaggctgtgctgtgtctcacccacaccccccggggatttcagttccatttcaggttanntggggcataccttgatccctagagtgactggcagagtaagtaagagaaggggagggatagtaggtgtgataattttaatatggagagtgggagtgtggttggagatagaaagtctcctccccaccatgtgatagcttcctctcagagttttattccaggctagcttgatgcaggtctgggtagttggatcatggctccactgggattggggtggagggatacagcttgaggggagtagggttccagctccgggacattgtgctcaggaattcgaaaacggtggtatatttattctggttactacatttcttccaatcccctttcccctacctgccttaccaaggcttatacctgtcctgtccttaccctcagatggagccaggaagctcagtgaaaggcttcnnnnnccacacgcacctat

SEQ ID NO: 14791 - DNA, 774 bp, Macaca Fascicularis
  misc_feature (1)...(774): n = A,T,C or G
cagaagannnnntnnncnnctccagcatagatgctgaagcaatggagaacagnntgaggagctgaccctggaggaagaaagccctgtgtctcagctctttgagctagagattgaagctttgcccctggataccccttcctctgtggagatggacatttcctcttccaggaagcaatcagaggagcccttcaccactgtcttagagaatggggcaggcatggtctcttctacttccttcaatggaggcgtctctcctcacaactggggagattctggtcccccctgcaaaaaatctcggaaggagaagaagcaaacaggatcagggccattnnnnnnnnnnnnnnnnnnaannnnnnnnnnnnnnnatgagaagaatgggaaaaagatatgtaccctgcccagcccaccttcccccttggcttccttggccccggttgctgattcctccacgagggtggactctcccagccatggcctggtgaccagctccctctgcatcccttctccagcccagctgtcccaaaccccccaatcacaacctcctcggcccagtacttacaagacaagtgtggccacacaatgcgatccagaagagatcatcgtgctctcagactctgattagctgcctccccttctccctgcctccagaatgttttgggatagcatgtggaggaatgtgggaagcagatgactgaggaagggatggactaagctaatccccttttggtggtgtttctttaaaaaaaaaaaaagcttaagtttacacagaaacat

SEQ ID NO: 14792 - DNA, 739 bp, Macaca Fascicularis
  misc_feature (1)...(739): n = A,T,C or G
tcnnnnnnnnnnnnnnnnnnnnnnnnnnnnnnnnnnnnccctgccctgtggttccttgccaaaaaaccctggatggactatgtagacacagtattgcgcacagacatgtctgacatcaccaaatcctacctgagtgagcctgactcctgcttctgggnnnnnnnnnnnnnnnngaaggtggtgggcatggtaggagcnnnnnnnnnnnnnnntcccaccttgaaggagaagcggttgcagctgtttcatctctctgtggacagtgagcaccgttgtcagggnnnnnnnnnnnnnnnnatcaggactgtcctccagtttgcccgggaccaggactgcagtgcagttgtcctggacaccagcaacatccaactcactgccttgtccctctaccagagcatgggcttccagaagacgggccagtccttctcctgcatgtgggccaggctagtggctcatattacaattcatttcatctaccgcctcccttcttctcaggcagggggtctgtgatctctttccttgtgtattggtcagaatagaatccattcagctgtaacagcaagcaatccccaacctttcactgcaacgacctttcaatgcaaaaaagcttattgtccagccccatctgagtcccaggtgattgcttgtggggtagcttctgggtttctgcttcattcagtctttttgagtcccatctatttcgtttttctagtgccagcataatgctgctaagaacaac

SEQ ID NO: 14793 - DNA, 504 bp, Macaca Fascicularis
  misc_feature (1)...(504): n = A,T,C or G
ctcagctgctnnnnnnnnnnnnnnnnnnnnnnnnnnnnnnnnnnnnnnnnnnnnnnnnnnnnnnnnnctgaatgagcctacactnnnnnannnnnnnnnnnnnnnnnntaaggagatgtgttaccgataccgagaagacctgatggcgggaatcatcatcgcaggctgggaccctcaagaaggagggcaggtgtactcagtgcctatggggggtatgatggtaaggcagtcctttgccattggaggctctgggagctcctacatctatggctatgtggatgctacctaccgggaaggcatgaccaaggaggagtgtctgcaattcactgccaatgctctcgctttggccatggagcgggatggctccagtggaggagtgatccgcctggcagccattgcagagtcaggggtagagcggcaagtacttttgggagaccagatacccaaattcgctattgccactttaccgcccccctgaatcctgggattctagtatgcaataag

SEQ ID NO: 14794 - DNA, 675 bp, Macaca Fascicularis
  misc_feature (1)...(675): n = A,T,C or G
cgacccagaggcannnccttggggtctttctctagggtctcttctctacaaagcacaacactaatgttcatttccttagacctcagttcgagtgcccctatttatttcaataagaacgcacatatcccggcagttttttgtttgtcacctctatttagttgtaacctgtttctctcctttcaccccttgtccttttccacccttttaagagttatgctagcaaatcttactccacgtatacttttnnnnnnnnnnnnnnnnnnnnnnagggcacaaagacagccatggggacatttatgtaaatacgtctctctaattgccacactgcagctggacagtgtgtagtattttcccnnnnnnnnnnnnnnnnnnnnnnnnnnnnnnnnnagagaaattattcagattttatttttgtatctgtggtaacaaaacattaaccaaaagattttctgtccagaagcctccccgaccccccaagctatttgctcacattaacaaattaaagtgcctgaagcataattcattctttacctgtatactnnnnnnnnnnnnnnnntgatttttttataataagcctttttacctctgtgtaaaaaatatatatacaagtgtatgatgtacattttagttcttaacttatttttatggtttctaatatgtatgaccaatgtagcc

SEQ ID NO: 14795 - DNA, 733 bp, Macaca Fascicularis
  misc_feature (1)...(733): n = A,T,C or G
tatgnnnngcatcacagccttgggaaaaattaacacctagtattgatgtcagaatgaatctgttacccatgtactactagacttggttccgtgaggggtgctatgtcttgggcaacatgatttctggtnnnnnnnnnnnnnnnnnnnnnnnnnnnnnnnnnnnnnnntgtggctcctctcatttcatctactttgctgtatttcccagatggtaggnnnnnnnnnnnnnnnnnnnnnnnnnnagacggatgcaacctgcatccgtggcctctgagtactgcttgtcctcttttccttcctgtgccagtcccatnnnnnnnnnnnnnnnnnnnnnnnnnnnnnnnnnnnnnnnnntctttctcttccacatctaaatggaggatggtacctgctctttatctagttaccacccgtcgagctctactcttgtcgtggtgtcagttattnnnnnnnnnnnnnnnnnnnnnnnnnnnnnnnnnnnnnnnnnnnnnnnnnnnnnattcctaagggccatcctccaaaaagccaaatctccctttccctctgaggctggactggtgggagtgtctcctcacccattcatccagnnnnnnnnnnnnnnnnnnnnnnnnnnnnnnnnnnnnnntgcagcnnnnnnnnnnnnnnnnnnnnnnnnnnnnnnnnnnnnnnnnnnnnnnnnnnnnnnnnnnnnnnnnnnnnnnnnnnnnnnntgggaatgtctcttgaccattca

SEQ ID NO: 14796 - DNA, 724 bp, Macaca Fascicularis
  misc_feature (1)...(724): n = A,T,C or G
cttatttctctgggcagacagccttcaccttattgcactaatagcacatctgtaatatcaagctacaggacaagtcttaacaagaggtttgtattcttcaacgtagcacttgtctaccaggcactgtagaggggagtgatgaggaaaagccaggactgcttaggaggatgggaggggagggggcaacatatacccttctcacaattggtttcctcccaggaaggggaacatgcaaagctgacttctggattctgggaatgggaagagttgggaggcggagaagcccaatgcaaccctgcagctcacctccctttatttctgagggaagcagggactcatcttttgctcttttgtaacaaatcactccagcctagctgacgctttggggtaaacaatggagtaggaatcatcatcagaattagaattagcagcaattaacaggcaatacactgccacagtgaggcgggtgtcatccaggtcnnnnnnnnnnnnnnnntgtgtatcctagggagaggtgccattcaagacctggcgctggctctggaagagtctcttaacctaatgcagctgggactcattaggctcagacggctcctgaccacactaattattagcaaagctctggtgttgggttccaaccattggtcaaagctgtaatgagactgagtatgtaggcagagtgaagggggtgcctgagtnnnaatggggagacctgctgggagag

SEQ ID NO: 14797 - DNA, 821 bp, Macaca Fascicularis
  misc_feature (1)...(821): n = A,T,C or G
aggccactcacatttttggactgggtggggctgggcccaggaaagggtgggctggattttgtaaagctggaggcagccaggaatctgatcgtctggaatacgaggtgaggggtctccccttgaagtcctctcctggaagctgcagatgggggccagggtgcgagtctgggactcattcctgggcacacgcatggctccttctgttatnnnnnnnnnnnnnnnnnnnnnnnnnnttcttccattccctactcctcctcccgagggagtcaggatggnnnnnnnnnnnnnnnnnnnnnnnnnnnnntgcctccctccctggcccgcatgaggccaagtcccaggtgtcatggctgctnnnnnnnnnnnnnnnnnnttttgcacaagcactttgctgccctccggtggctgcttgaggaaacacagagcctggtttggnnnnnnnnnnnnnnnnnnnnnnngctggaggttgggggcaggatctggcccccagctctcctcagacctccccagacctatctgctcatcagccgcnnnnnnnnnnnnnnnngaacgatggttgcatctcttggacacagtgtaccccctcccgagccctccctgagccgttctcctgannnnnnnnnnnnnnnnnnnncnnnnnnnnnnnnnnnnnnnnnnnnnnnnnnnnnnnnnnnttgtccactggcctcagctcctgcaagttccccagtgtccgtgcctgttcccttccctggcctcaccttcctggggtctgtgactgactggagataaaaataaaagcaattctgacacctgaaaaaaaaaaaaaaaaaaaaaaaaaa

SEQ ID NO: 14798 - DNA, 717 bp, Macaca Fascicularis
  misc_feature (1)...(717): n = A,T,C or G
gctgatcccaatatggcttgatacgttnnnnnnnnnnnnnnnnnnnnnnnnnnnnnnnnnnnnnnnngttctgcactcggtagcaggcagtgccccaatgccagggactgactcctcttcccggagcatgccctccagctcataccgggatatgccaggtggcttcctgtttgaagggctctcggatgatgaggacgactttcacccaaacaccaggtccacaccctctagcagtacccccagctcccgcccagcctccctggggtacagtggagctgctgggccccggcccatcacccagagtgagctggccaccgccctggccctggccagcactccggagagcagctctcacacaccgactcctggcacccagggccattcctcagggacctcaccaatgtcctctggtgtccagtcagggacgcccatcaccaatgatctcttcagccaagccctacagcatgcccttcaggcctctgggcagcccagccttcagagccagtggcagccccagctacagcagctacgtgacatgggcatccaggacgatgagctcagcctgcgggccctgcaggccaccggtggggacatccaagcagccctggagctcatctttgctggaggagccccatgaactccctgcttcccctgaacccccagcaagttgcagaggctgctgcccgtgggaggcactcatgaaggtgcctccatctc

SEQ ID NO: 14799 - DNA, 743 bp, Macaca Fascicularis
  misc_feature (1)...(743): n = A,T,C or G
annnnnnnnnnnnnnnnnnnnnnnnnnnnnnnnnnnnnnnncagagtgcagaggaactggagcggctcaaggcagaagaagattccagcgnctctagtgccagcctggactcgagcattgagagcctgggtgtgtgcatcctggaggaacccctggctgtccccgaagagctgtgcccaggccttnnnnnnnnnnnnnnnnnncaggctcagctgcccccaggctcctctgtcctgtgttttaccgagaactcagaccacccaactgcctcagcggtgaacagcccatcctacttgaacagtgggcccctggtctattatcaagtggagcagaggccagtcttgggagtgaaaggagagcctggtacagaagaaggctcagcctctttcccaaaggannnnnnnnnnnnnnnnnnnnnnnnnnnnnnnnnnnnnnnnnnnnnnnnnnnnnnnnnnnnnnnnnnngccctctgtaaatcagaggtggggaaaacacccaccctagaagcgctactgcccgaagaattgtaaccctgaggagcctgaaaaagaaagacttcagcccttcctggtccccctcaaagcctccccttccgcacggacaatgaagagggctgtggggtggcgaagccctcccagcagaatgaggatcggccccccgaagattcttccttagaactccctctggcagtgtgacgggggctagaggtcctgcctcttacccattctctatttattccctta

SEQ ID NO: 14800 - DNA, 655 bp, Macaca Fascicularis
  misc_feature (1)...(655): n = A,T,C or G
tgcggggaaggggcagtggagccatggtgagcacagctcccgggacgcagcctcccatgggctgggaggctccgagtcctcctcacctcctgttctgcttaggcagggttcctgcagtttttagccagaaactcaaaactcggaaggagcaaggagcatccgaagtgaaggcattgaactcctcctgattcatttcaaaagggtttgatgtgttcaatgcactggatctcatggannnnnnnnnnnnnnnngagaagctcaagtttggcataggggacggcaacctgcagtattacctttacaattggaaatgccccagcatgggggcagagaaggttggannnnnnnnnnnnnnnnnagtcaccactgagattctggataaagccactgaaaagtcgaaccaggaaatggaaccccaccactgttggtccaattttcacacacgtgagaatccctggcaaagggagcagaactgnnnnnnnnnnnnnnnnnnnnnnnnnnnnnnnnnnnnnnnnnnnnnnnnnnnngggctgcgtgacgtcacctccggtcgtgtctctggtctccgtgnnnnnnnnnnnnnnnnnnnnnnnnnnnnnnnnnatcaagggaatgtaactgctgaaaactagctcgtgattggcatataatggag

SEQ ID NO: 14801 - DNA, 1066 bp, Macaca Fascicularis
  misc_feature (1)...(1066): n = A,T,C or G
tacagagcaaaacaacaaataaaatcataactatgtaaacgagaataattgctgctaaatcaaaactgtcgcagcatctcctttcaataaattaaatggttgagaacaatgtgtaaaaaagttgcacaagttcccttaaatctattttccttaatatttcacttctatttaaaacaagctgggacataaaaattctgttggagacacttggggaagatgtgagcaactaatgctggattcagcttatacatgatgaaaagaaaaataaaccagacaaaaggagcacataaatacgcatacagtgtaactgttattttaatacccacaataagggatttttgttagcatgtttgggggaatgaggattggtgggattcttggggccacaggaatctgaggcaacggaagatacatagagtcatcttccccctgccgagaggaaactggcacctgtcaagcagatgctgtcagttcaaacttcagcttttaagatagctattcaaggcagaaggtcagcaggaggatgtgtatttctaatcnnnnnnnnnnnnnnnatnnnnnnnnnnnnnnngcaggatcttactcaaaaggcaggtatttcctgccttctgtcttgaaacagccccttcccctaaggtgcattctctcaagtcttcagtattgctttatttgcagtgatttttaaaagagatgagagactttggagacaacataagcaacacatatagacatgaagtgctctagacagagatgaatataaatctggcctgataaccagttttccgtgtaacagtgattttgtgtttcaggggctgaagtagtggttatattaatagccactaattcccttatccctttaaaagatttttacagttctccagccacaaacagtacttctaaaaccaactttattttctgcccataatttgttctacatggaaaaaaaaaaattactttggccaggggcgtgtgtaaatgtggcagaattcctaggtaggctgacctttacagtatgggcctttannntacaggatcctggtcaggcgcggtggctcacgcctataat

SEQ ID NO: 14802 - DNA, 1048 bp, Macaca Fascicularis
  misc_feature (1)...(1048): n = A,T,C or G
actggaatccaatttgtaagctaaaattatgactttccctgggtaaaaagtcttctcagaaaaacaatgtcagaaaatacagtgtgcttcttagagatacagctgggctctgtactatgcaaaatctagaaggtgtggggaaactttaaacccaagaaaacgttcttagtattcatcctnnnnnnnnnnnnnnncagnnnnnnnnnnnnnnnnnnnnnnnnacttaagaaaaatcatcagttaagaaatctactttaacaaaacacaaagcagaaaaagtaataatgtgatggcaatcttaattttgggtacaacatgacaagctgtgagtttgtgtgttgtaagagaaaaatgtgtgggtacttgctataannnnnnnnnnnnnnnnnnnnnnttatctcattgctggcttctttccaagttgagcaacaacaaaatgctgtatttgagtttctgacaaatgtgttttannnnnnnnnnnnnnnnnnnnnnnnnnnnnnnnnnnnnnnnnnnnnnnnncatgacatgccattttctagcagctgccagtgataatttgttttacactaacttttaaatcagtgtgtatactgcagggaaaaggatataggaatattcatcttacaggggaannnnnnnnnnnnnnntgtagtaactttaatgactgaaaaannnnnnnnnnnnnnnnnnnnnnnnnnnnnnnnnnnnnnnnnnnaaataaatggcaaagagaaatcaggacaaaaaatctaattgctgttggggaaaaaacttgattttggtgtttactctccaggtttttggttgtttttttctttctttcttttttaannnnnnnnnnnnnnnccattggcnnnnnnnnnnnnaaaattgttcattaatcttcccttaggccaataaaagaagggcctcacaggacaaaacaggagccagaagtaaggactgaaggggaaggggagaatagctaatagatatactatatgtacatgttaaaaactgaatatcccatcatcctatttcatgtatannnnnnnnnnnnnnnttgtaa

SEQ ID NO: 14803 - DNA, 738 bp, Macaca Fascicularis
  misc_feature (1)...(738): n = A,T,C or G
cttttctgaccaagccnngnncaccagcaatctccaaagtcctgtggtgggagggccgaataaataaagatgcaaagaggtgggcaaggagtaggaaggtagagagcaccactgatgaggccctcctagcccatggcagacccagacctcttctcccccaggaattagaagtggcaggagaggacaacaggggctgggaatggaggggagaatttctaggggaagtttcctgagttgaaacttctcctgtggttnnnnnnnnnnnnnnnnnnnnnnnnnnnnnnnnnnnnnnnnnnncaagatcaagtcagttctaagactgctagagagagataccaagcccttagccttgctctcagtagcatcagccccaggtctgagcttccccacattacagcctccccacattacacttgacaaagcagtaaaggagggagcactttgggtcctgacactcatgtctggggaggaagagcaagaagaaaagtggcatttccttaattggaaagggggaaggatcttattgcacttgggctgttcagaatgtagaaaggacatatttgaggaagtatctatttgagcactgatttactctgtaaaannnnnnnnnnnnnnnnnntaaactaatggaagcgattctcccatgctcatgtgtaatggttttaacgttactcactggagagattggactttctggagttatttaaccannnatgttcagtattttaggactttatg

SEQ ID NO: 14804 - DNA, 997 bp, Macaca Fascicularis
  misc_feature (1)...(997): n = A,T,C or G
gccgctggggcttgctccctcgnnccaacaccccagctcgggnnnctgaggccagatnnnaggtcacacattccgctgctccccttgaggccctagannnnnnnnnnnnnnnnnnctgtgagggcggggcagtgggtgggcaagatggggagcaggcacccccactgcccatcaaagctcccctcccatctgctagcacgtctctagcccccactactgtccccgaagccccagggccactgccctcactgcctctagagccatcgctattgtctggagtggtgcaggccctgcgaggccgtctcctgcccagcctggggcccccaggaccaacccggagccccgctggaccccacacagcagtcctggccccagaagatgaggacgatgtnnnnnnnnnnnnnnnnnnnnnnnnnnnngtgtgggtagctgaggcagaggatgagccactgcttacctgaggggacctgggggctctactggggcctctcccctgggggctctactcatagtggcacaaccctttagaggtgggtcagcctcccctccaccacttccttccctgttcctggatctgagggacttggtgggcctcctgttgaccctcagtctatgctataaagttaggtgtccctcaggcagggagagcgctcacagagtctcctctgtacatggccatggccagagaccccagtcccttcaccaccacctgctccccacgccaccatcatttgggtggctgtttttaaaaagtaaagttattagaggatcataggtctggacactccatctttgccaaacctccacccaaaagtggccttaagcacctgaatgccaattaactagagatcctccagcccccaaggggaggatttcggcagaacctgagattttgccatccacaatctctcctacaaggcctggctcacaaaaagagtgcaacaaatgcttctgttccatagctatgcgttgctcagtaagtgagntaaaaataaag

SEQ ID NO: 14805 - DNA, 1134 bp, Macaca Fascicularis
  misc_feature (1)...(1134): n = A,T,C or G
gagaagatgaaaaggaagggcnnnnngctgtgctgcccttgaaaaggtccaaagcagacatgannnnnnnnnnnnnnnnnnnnnnnnnnnnnnnnnnnntcgcctttcaaaaggcttaacagaatcaccaaatgtcacggnnnnnnnnnnnnnnnnggaaaattgtctgggcctgtatatgttggaggaactcagannnnnnnnnnnnnnnnnnnnnnnnnnnnnnnncaacatctgctgtctcaagcacttgaatgaggctacaattcaggtgttactggatgacttaactgcacggacatttgggggctgacttnnnnnnnnnnnnnnngtgggctttggagaagcagagggatggttttcagttgtgcgggtgttaagtctatggattgggaatttaccactgaaattgatcgttcaaagtgtgacttcatagtagggccagctcctcctaagttgtccttttgtttttcacataaaatacatctggtactttttacttgtgaagttgtactatgtccatgaaaatagttaaatgagaaggccatcaagattcatttaatagctgaaaagcaatttttaaaatagaataggacgannnnnnnnnnnnnnnnnnnnnnntagggaactttnnnnnnnnnnnnnnnnnnnnnnnnntggggagaattttgtcttctatttccattgaacagtagcaaactggtggttttataaaattaacattatagtatgttatataaataaatgttatataaaatgacattaaagtataactgtgaaaaattaaagacttggagttatccacaacctttatgtgcaataaggaaaactgcagtaggcccccaaagtgctgtctttccctagcattttactcaatgtttgcctttgtgtatgtttagattgttattgtaaagctagccatgtgtgttcctgccctttactgatatttaacacattttctcaaagctttttttttttttttaacaaaactcaaaataaaacaactaactggctgagctaattttgttttgtattttaaagtatcatctgttggtagaaggctgtagtgcgatactattcttagtctgtttccctcactgagaggttcttttctgggtgtaactattcctctcc

SEQ ID NO: 14806 - DNA, 671 bp, Macaca Fascicularis
gaaaactcacttgggcgagcaggctgggaaagattccagctgaaggacagccccatttagagtgaaggagagagagcgagagaccccaacctattggaggaagatcttgagcatctgctgctgctaccttgacctcaagcccttcatcccactttggagaatggttttgtattgcctctgaagtcaggatctcaggaagtcctgataagggactctggagtaaaaacccttgcctctttccgggccaatttctcgtgctgaaaagtcagaggacccagtcttggcttcactttcttggggtgaaagagaaatagggtaggctcagaacatgctcgtgtcattaaggcagcagtcccctggcctttgaggaagtacctatgagatgggtgtcactatctgaaggttctccaaattgtctgtgaacttgcttaggtaggagtgcactgcagcgtcctgctagttcccacctattgtgccccaactttgcttctagatctctgggctgggaggagtgaccttctcaatggaaggggcctccttggtctggagaagagatctgaggtcctgccttagaaatgaaagggaaaccctcagggagccatgacccagggaccttcacactccccaatgtttgttactttttccctcccccaacctccccaacctgcctc

SEQ ID NO: 14807 - DNA, 670 bp, Macaca Fascicularis
  misc_feature (1)...(670): n = A,T,C or G
cgggcccgggacnncggcaannnnngccaggaggaagccgcgggcggaggatcagacggaaagcagcnctgagagccacaggaaaagcaagaaggagaagaagaaaaagaaaaagaagaaacacaagaaagagaagaagaagaaagacaaagagcacaggcagccagctgaggctgcctcctctcccacatctcccgagaggcccaggcaccaccacgactcctattccaactccccctgttgtaagaggaggaagcggggacacagtggggacaggagaagtccgtctcgcaggtggcatgacagaggctctgaggcctgnnnnnnnnnnnnnnnnnnnnnnnnnnntgggaccctgaactctccctttgccttgcttgcctcctgcctcggaagcccctcgtgtgtgggtgaagcccggggctgctcctgtggaagtggctctgggcaccagcctgtggggctaatggctagacagctagctctggaaaacctccaggtttcacatagcggggatggtccctggcttgccctgtgaagnnnnnnnnnnnnnnnngtaccagtagaagctggactccctctgccagtagagacagcagccatgggcctnnnnnnnnnnnnnnnntggccaagtatggtgacctctatttttccttacattgactcttga

SEQ ID NO: 14808 - DNA, 911 bp, Macaca Fascicularis
  misc_feature (1)...(911): n = A,T,C or G
gaccatgaggccannnngaggtgctgggccctgggcttctacnnngcggagatcacactgacctggcagcgggatggggaggaccaaactcaggacacggagctcgtggagaccaggcctgcaggagatggaaccttccagaagtgggcggctgtggtggtgccttctggagaggagcagagatacacctgtcatgtgcaagcatgagggtctgcccaagcccctcaccctgagatgggagccgtcttcccagtccaccatccccatggtgggcatcattgctggcctggttctccttggagctgtggtcactggagctgtggtcgctgctgtgatgtggaggaggaagagctcagatagaaaaggagggagctactctcaggatgcaagcagtgacagtgcccagggctatgatgtgtctctcacggcttgtaaagtgtgagacagctgccttgtgtgggactgcgaggcaagatttcttcacgccttctctttgtgacttgaagaaccctgactttctttctgcaaaggcacctgaatgtgtctatgttcctgtaggcataatgtgaggaggtggggagaacaccccacccccgcgtccaccatgaccctcttccccacgctgacctgtgttccctccccatttatctttcctgttccagggaggtggggctgggatgtctctatctctgtctcaacttcatggtgcactgagctgtatcttcttccttccctattacaattagaacctgagtataaatttactttttcaaattattatcatgagaggttgatgagttaattaaatgagaagattcctgaaattgagagacaaaataaatggaagacctgaaaaccaaaaaaatcaaaaaaaaaaaaaaaaaagaacctgagtataaatttactttttc

SEQ ID NO: 14809 - DNA, 743 bp, Macaca Fascicularis
  misc_feature (1)...(743): n = A,T,C or G
catccagcagcncattgagctggtgagacggctgtgagtgtgcagagaaacccagttcaggtgtaggaggctgctgtgagcagccctgtctgatggggcacccgtgtgggctgtgccctggtgcctgagaatggccggtgcccaatcgacatgagaagacaagcaaaagacagagggtttggagtctcctcaacagtgttaagagaggaagtgaccnnnnnnnnnnnnnnnnnnnnnnnnnnnnnnnnntcacaacccccagggtagggagacactnnnnnnnnnnnnnnnnnnnnnnnnctgtcaaggatcccacggggtgggccctctgtatagctgctctctgtcactggcccctggagtgggagcagtgtcctcggtcactgcaggcccaggcgggcaggtggtcccaggacagaggtggggaagttgtcttgaggaagcagaagtaggccttgctcccgcccagcccaagggcctccagtggaccagcatttgagatgtgagtgcccgtggtgcacaaggcactcccatggcactgtannnnnnnnnnnnnggcttccctgacccctgcccaggaagagttcattggtcgctctgttgtgccccacagcactttgttatacctctgccacacacttcacgcagcgcgttgtaactcatgtgtttacatgtctgtcccccagactgtgagctccttgagggcagggactgtacattctccagctctgtgtccccagggc

SEQ ID NO: 14810 - DNA, 746 bp, Macaca Fascicularis
  misc_feature (1)...(746): n = A,T,C or G
gaaannnaagtcatagccacactcaagaatgggcagaaagcttgtnncaaccccnnnnnnnnnnnnnnnnnnnnnnnnnnnnaaaagatactgaacaaggggagcaccggactgacgggagtgaagtaagaagcttatcagcctgacattgacacttcctgcgggatggtccctgcccttaccagagctgaaaatgaaaaannnnnnnnnnnnnnnctagggacacctggaaaggacttaatgtgtttgactatttcttatgagggttctacttatttatgtatttatttatttttgaaagctcgtattttaatattttacatgttgttatttaaagatatgagtgtgtgtcatcaaacatagctcagtcctgattatttaattggaatatgatgggttttaaatgtgtcattaannnnnnnnnnnnnnnnnnnnnnnnnnnnnnnnnnnnnnnnnnnnnnnnnnnnnttggggaattggagggtggggtttggaatgtaagcaatgagtggatcactgttagggtaagggaatgtatgtgcacatctgtatttttatacatttttttaaaaaaagagtgtcagttgttatgtattgaaattatctcacattatgtgttcaacatttttatgctgaagtttcccttggacattttatgtcttgcttgtaaggcataatgaccttgtttaatgtccattctgcagtgtttctctttgcctggaaaagaggagttgccattactgtta

SEQ ID NO: 14811 - DNA, 975 bp, Macaca Fascicularis
  misc_feature (1)...(975): n = A,T,C or G
catgtgttacagccctggatggttattatgtggagtccattatttgtgttttcattggatttggttggtggttctttcttggtccaaaatttaaaaagttacaggatgaaggatcaacttcatggaaatgcaaaaggaacaattaatatnnnnnnnnnnnnnnnnnnnnnnnaggtaatttagtttagttttaattcggagagcaatgataatcagtgcacaggaatataaaatattattttaaacagcaaaattaataatataaaaatgccaaatggtgnaaaaatagaaacctctctgtatatttgatcatatttttctttgccttgttgatgtatttaaagtttgcttaaggtcaggaaattctaaaacaacttttctggcctcgttatttgatttatatcttttaaatttactgaccaaagcatgttttaagctgcaatgcagtagtcatgggtggtaaccatgtagttaagtatagttattagtacctatcactgctggatctgtatttaaaattgtggtacaatatataaaatggagaagaacttgatattcaggtactaaccacaactagtctgacattgttggcagttaaaatcttattttgaattgtaaattagttaaattttatgtggaatttgctgagaagagaatatagactactgaaatgtcattttagttatttttcttatgaccatattgtacaaatgaatctgtgttaaaaagactattttaaatgtatttcctgcttttgtaagcattaaagatttataagaaaattattcaaactattttttataaaatgaaagttatgatttttaacttattgattactcttgtccctaccgcctctttttggaagatattttgattccttataaacttttaccctaagcttacatatgttttctgtcacaagtgcttcatggcacacagacagccaatggaggggatcaaattcagtgttgtatg

SEQ ID NO: 14812 - DNA, 703 bp, Macaca Fascicularis
atgatgcagagatgtctgatatgtatcaagatgttcgaagaagcaagtgaggttgcacaaagcaatagaggacgaggaagatctcgacccagaggtggaacaagtcaatcagatatttcaactcttcctacggtcccatcaagtcctgatttggaagggagtgaaactgcaatggaagtagatacaccacctgaacaatttcttcagccttctacatcctctacaatgtcagctcaggctcattcgacatcatctcccacagaaagccctcattctactcctttgctatcttctccagacagtgaacaaaggcagtctgttgaggcatctggacaccacacacatcatcagtctggtgaggatattcctctctaagtatgctgtggttcatctcatgatttttgataatgaaaacttcttaactggctattttgaaagatactaaatcacatcaacttcttgttggaataaatgatcaaaatgagatgtaatatatggttatgtaacttaaacacaaaaattatgtcttacttgcatgagttttaacaaatagcaggaatcttcaatttatatgaaacaattattttaaaagtacaggtaccaaaagatagtgttttgacatagtttaatgtgcctgacttaaatattattttatagattattagagaccaaaatctcttctagatttatttggttttatgtc

SEQ ID NO: 14813 - DNA, 681 bp, Macaca Fascicularis
  misc_feature (1)...(681): n = A,T,C or G
cagtaagttttcgtgaatgaatacgaatgatatagattttnaaaaaaataataaccagttcaccctctttgcctaacaatctcggaaggaaatataccgcatcaataatcaataaaaatacttaaaaggctttttgtgccttttcttaggtataataatttataaatgttttcttaactgactttcagtcacctttactattaaactaaacattgtgcaaccgctttgtaaattaatatggaaaatatatatccctaatgacataggaatgactattactgccatatttatttagttgaagaatgtctttgtgttaattcattcatatttttataaatgtatatttatatttttgtatttttatgaaataaactagtatttataaaatacatttcattttatttaattcctagaggcagatctgatttcatttataacaaaaattgttttacacctttaaatgtaaaacatggttcactcagggaacaagcagttcagaaaatactgcatggatttggacctacaatgtagtgaaaactataaaataactttggtaccaactgttatttttccgtttcatcacttaaatattgactaatgtttatagaaccactgatgtctaaccatcaatagagtatgagacacatttggaattaaaatattatatatatatatagttgg

SEQ ID NO: 14814 - DNA, 480 bp, Macaca Fascicularis
gcacagaagcagggacgtctgacctgggatgcccagaagtttcattttgttaagccttgctggggaggaattgttatcggagggaacactggactttccaaaactggtgtgggagagtaaggggagaagcaaaagccaaggccagggaaggaagtcagttaggtaatggaggatcttatgcttaagatgagctggggctggttaagcagaggatgggcgtgggtggtcagaggtggttttgaggaatgttccaggtgagggcatgggagaaagaggacaagaggccggcataccagagacggctccatagcgagcgggcgagagcgtgacgattggcatgagcagcgggaatgccaagggaggcaaggcggcgtttctgcgatggaagccacaacacgtggtggccaacccgatgcaggggacggggaaggaggttcatgagaattcacctcaacggagtcgggcaaggtggcatagccc

SEQ ID NO: 14815 - DNA, 706 bp, Macaca Fascicularis
  misc_feature (1)...(706): n = A,T,C or G
ttttattaatgcagtatgttttttttatttcaagtatgaacttgttgagaaactatagtaatatgatttttaagagatttatgttctactttaaatgtgaattgtacttctgagctgccttaatgcaagatcatttatatttgttaagaggaaataatcaagatcactcatatcccaactgaatctgaggttttataaatctctcaaactattgctgagagcctgattgtggaaggaagtgagatgcaccttattttccagaagtcctgtgaagcgctctcctagcatgtccatttccaggaggagaagtgagcagatgaggggttttccattttgtcatccaaggtagctgtgcaattgccttgttgctgaagttccaataatgtgaaaaccaaagtagagggttttttttcttcttctttttgctttgtattaatttcacttataccaaagtgtttgaaagtatgaaatgtattgcttctgggctatataaggctacttcatgacaagactgctttgtaatatttcatttgttttactataaattcaaattatctaaatattttcctaatactacatgnnnnnnnnnnnnnnnttttgttacgtagtggaaatattttgcattgtttacatagttctcatggaacatggaaatttttgaaagtgatatatgatacacattttttgtgtatatattctaattagt

SEQ ID NO: 14816 - DNA, 663 bp, Macaca Fascicularis
  misc_feature (1)...(663): n = A,T,C or G
gttttgcagnnnnnnnncatcctttttataanctggnnnnnnnnnnnnnnnagaaaacttagannnnnngaaacaagaggaaatgaactcatccatcataagcgcctggccaggtctactctcttgctgatccccctctttggcatccactacatcgtcttcgccttctccccagaggacgccatggagatgcagctgttttttgaactggcccttggctcattccagggactggtggtggccgtcctctactgcttcctcaacggggaggtgcagctggaggnnnnnnnnnnnnnnnagcagtggcacctccgtgagctcccactgcaccccatggccctcagctcctccttcagcaacagcactnnnnnnnnnnnnnnnnagcagagccagggcacnnnnnnnnnnnnnnnnnnnnnngaggctggagcagggccacctacggacagagaccaagacaggtcctgagacggctgggcactgctgcgggacagcgcgtcttcccagcagacaccctataatataccctnnnnnnnctgtagaagccccttcccaggtcttggactcttccaaagggatgtggggcactgtggggcaggataagggcctgggatttggtttgtttgctcttctgggaagagttcagggtcccagaaaggacaa

SEQ ID NO: 14817 - DNA, 690 bp, Macaca Fascicularis
tgggaggccaaagcaggaagatcgtttgaggctaggaggtcaataccagcctgggcaacatagtaagaccctgtctctattaaaaaaaaaaaacccttcttccccacaaaaccacccaactcctctctgattttatccttttattctctctctgcttttatcacctctcttgtgtatttctggattttcttccctcttctctcctccaaatcattaaatgtttggccttagtcaatgtctgtgcccgtcacataacatccaaggcaccgaggcccacggggaatacaggaagcagctgggagcttggaaacctggtctcttgaatttcaaacctggtttcttgcagttggttggggtgagtggagtggctacaggatagggctgaaggactatgcaaatgaggatgtaaatcagggcgggctttgagaagtggacccatatcctacaggcaaaaagcaggctaggtgaccttgggacactatgctaagggaggaagcctaaaggcagccaggtttacggagcgggaagatgagcaggccaatgagaggaggggcagggcaggactgtagttggtgactgggtgttcattttagctgtgggagaaaatctgtgttttgtgaaggtgttggagaggggctgtgtctaggtgagggatggtggagtactgattttttggggacgttatgagca

SEQ ID NO: 14818 - DNA, 606 bp, Macaca Fascicularis
  misc_feature (1)...(606): n = A,T,C or G
agtctatatgctgcagccttggctaagttggccaaagtggagttgtcctctctgcccgtcttataacaagggaccctgctgtcctcccaccaggccagggctgagggctcagcctcaaggacagctttctttggtcagggggcaggggacagggcaccacttctccctccctccaattaccgcatcaatccattatgccattcctagaatcttcactattattgttatttctaaatcggtacaaaactgacagtgatcagctcaggtgacgagaggtagaaacccggccaggcagccggagaaaatggggtcggagtgagttagggcatagggctgactggtgttgggacaagagggcgtcagatcctgagggcctccatctggggccggcggggggaagatgcaggtgtgtatcccccaagcacaggggtccccaccattctttccctgnntgatgtnnnnccccagattaatcaggatagnnnnnnntgtgaggcaggcagagtcaggggtagtcagatggggttgagacagggcaacagaatcttcactgggacaacctgacccccttttgggcaccatcctgcccacgaccagaccccagaa

SEQ ID NO: 14819 - DNA, 686 bp, Macaca Fascicularis
  misc_feature (1)...(686): n = A,T,C or G
cgcgcccagggcctggagcggcnnnnnnnnnnnnnnnnnnnnnnttgggcccgccacgtacccactgcccctatgctgtggccctacccgaggtggccccagcccggccactcaccgaggcactgagggcttnnnnnnnnnnnnggctctttgacttcgccttttgtgccttgtttgactgcgaccgccctgtggcgcagaagtcctgtgacctcctnnnnnnnnnnagggacaagattgcttcctacagcagcctgcgggaggccgggggcggccccaacaccgcctcagtggaggccgccctgccgaggtgccggnnnnnnnnnnnnnnnnnnnnnnnnggggaccaggagcctgaggctgtgctggccatgctcaggtccctagacctggagggcctgcggagcacactggccgagagcagcgaccacgtggagaagagcccccagtccctcctnnnnnnnnnnnnnnncacggggggcttcctgcagggggatgaggctgactgctactaagtagaaccagattctgccactggggttcaggactgaggaaggcagtgccacgtcctttcgtgggacactgccatccccagggctccagcccagcccagtggatcctctggggaagccaggaccaggagagaaacaaagtcaagaaatgccacattttgatgtattaaagaa

SEQ ID NO: 14820 - DNA, 727 bp, Macaca Fascicularis
  misc_feature (1)...(727): n = A,T,C or G
atgtcgtcggagaccgactgtgacataggtatttggacacagnnnnnnnnnnnnnnnnnnnnnnnnnnnnnnnnnnnnnnnnnnnnnnnnccaaggctgccatcgtttgctatgacctcacnnnnnnnnnnnnnnntgagcgagcaaagttctgggtgaaggaactgcgcagcctagaggagggnnnnnnnnnnnnnnnnnnnnnnnnnnnnnnnnnnnnnnnnnnnnnnnnnnnnnnnnnnnnnnnnnnnnnnnnnnnnnnnnnnnnnnnnnnnnnnnnncaatatcaaagctcannnnnnnnnnnnnnnnnnnnnnnnnnnnnnnnnnnnnnnnnnnnnnnnnnnnnnnnnnnnnnnnnnnnnnnnnnnnnnnnnnnnnnnnnnnnnnngacagaggacaaggggcgtgganntgggccagaagccaaacccctacttctannnnnnnnnnnnnnnnnnagtcagcactcaccnnnnnnnnnnnnnnnnnaggaattccccagaagggctggacccagctcctttctgggcttgggtagtcaaatgtctgagctaccccaggnnnnnnnnnnnnnnnnngtggcgcctgcctgtgctggcccatggaacggagacagcattgggctgactgtgggcatgaggagggataagggctgatttggacccnnnnnnnnnnnnnnnnnncagcacttgtgtctgcagattatttaagtggcttctgatct

SEQ ID NO: 14821 - DNA, 748 bp, Macaca Fascicularis
  misc_feature (1)...(748): n = A,T,C or G
aacagagagggctgtaacagcaannnnngcccctcctttacctcccagnnnnntgcagaggagcccagtgataacacatgtgaagttctttgctatccttttgtagaaggtgctgcagtacaaagtattaatacagtctaacttagacaaaataactctcatcatttgnnnnnnnnnnnnnnnnntgannnnnnnnnnnnnnnnnnnnnttgtttgtttcatttctgcacttctctatgaattttgggatactatatttctgtgaaggacttactgtatggacaactcataaaggaaaaaactttccnnnnnnnnnnnnnnnnnnnnnnntatagctatagtatttctcactagtattattagatacctgtgtacagaaagtatgcagttattcaggttaatgtttcatattaaagaatgtatttgtaaaatgtaacatgatcagtagttaccttttttcaannnnnnnngaagttcagattacgtgttagacttaaattacagtgaaatctgttttaatactacttttgtggctagcaaagattgtnnnnnnnnnnnnnnnnnnnnnnnnnnngccctaaataaagggcattaaagataggtttagctcttaattttagaaattgtgacactcctgatgtctgtcatacagttattaattcttcagaagttctctgagatgtcaaatacaatttttgtttaattcagagataagtaacacctgctctattgattcactattacagca

SEQ ID NO: 14822 - DNA, 1324 bp, Macaca Fascicularis
  misc_feature (1)...(1324): n = A,T,C or G
ttcccccagcctgaggactctggggccacagggtgtnnccttcagcccatgcccacctggtccagcaggggcagcagccaggtctctggtggcagccgatctggtcacaggggaggacagcactcccccgtctagcagccaggcagggcaatgtctgccatccgtggccatttgcaaagaccccaaagacccctgttctggttccctctcgcccccatgaatatcctctcannnnnnnnnnnnnnnnnnnacacacacacgcacctcgtgagacccgggacctgccccggacccccagttcccgggttgaacgaccacatcatgacacggtgcttgctcaggggaagccacgctccctctgtggggcctgctggggcttgggagccccccactgagcccacaatgccacggaaatccttgttggttgccccccagaggggccttcccagctgggaagagctcagagctgacagctgcctcctgccatgtcaaggccccccaaagagcctcaggggctctggggccctggagggtggggttgaggggtgggactctcctcccccactcctgctccctctcccttttcactgttgctttctatgtatagctccctagacctttcacttttttaaaaacgcgttttgtgtagagaataaggaacgtggatctttttattttgcaatcctgggccagctagaagccgggagctgannnnnnnnnnaacttttttcagtggccacattttggttatcgatgtacctagaagtatgtaaattagattaaatttctcttctggaaacgccctggggcaggcagccagcgtgtgtttttctgtcgagtggacaggctggcattggctggcagccggggctgggatcggggcctcctctnnnnnnnnnnnnggaggccctgggttttcccgttggccgccaagcaaaccannnnnnnnnnnnnnnnnnnnnnnnnnnncagctgttggcgctttnnnnnnnggttggtgggggggctnnnnnnnnnnnnnnnnnnnnnnnnnnnnnnnnnnnnnnnnnnnnnnnnnnnnnnnncgtctgggaagggagccaggatcaagaaacagttgaaggctaggggagcttatcaagggcaggagctaccagcgaaggtgtcagggacccactgggagcatttggtgggggcagnnnnnnnnnnnnnnnnnnnnnnnnnnntgcttttaatacacgtgacttctagttagacacatgcacccctaacccaaggaacatgggaaaagaggagccgctggctcctttgcgatgttatttattttcttgctctgcaaatgttt

SEQ ID NO: 14823 - DNA, 283 bp, Macaca Fascicularis
  misc_feature (1)...(283): n = A,T,C or G
aagtggatggaagcatggtgcctcctgactggcatcggtggcttcacagtatgactgatgatcctccaacaacaaaaccacttactgctcgtaaattcatttggacaaaccataaattcannnnnnnnnnnnnnnnngaacaatatgtaccttattccaccactagaaagaagattcaggagtggatcccaccttcaacaccttacaagtaaagacaatgaagaacagttgaaacttgcaaaatatggagcttttcatgtaattactcttttaccatttacca

SEQ ID NO: 14824 - DNA, 726 bp, Macaca Fascicularis
  misc_feature (1)...(726): n = A,T,C or G
gaggcgggaatcactgacattgtggtgtnnnaggcgnnnnngctccatgacacggtggaggacacagacaccaccctggatgaggtggagctacactttggggcacaggtgcggcgcctggtggaggaggtaacagatgacaagactctgcccaagctggagagaaagcggctgcaggtggagcaagcgccccacagtagccccggggccaaactggtgaaactggcnnnnnnnnnntacaatctgagggacctgaatcgctgcaccccagagggatggtcagaacatcgagtccaggaatacttcgagtgggcagcgcaagnnnnnnnnnnnnnnnnnnnnnnnnnnnnnnnnnnnnnnnnnnnnnnnnnnnnnnnnnnnnnnnagcgggggctgacactctgatcagtgcttnnnnnnnnnnnnnngcacaattccagcctcattcaggccggacaggattcatacaccatcttttctgtgcctcccgaactccctccatccttcccagatactacaggccaaaaaaagacttgcattttttcttaatctgaaggtctcctactaactaagctgagccccgcgtgtgggaatcagatgtacccatccatttgtgatgcactcactgcctctccccaagtcttgggtctgtttgctattttgcatggtgggatctctggcccctcagggacttgagattatataagtactagttcctaagacgtt

SEQ ID NO: 14825 - DNA, 765 bp, Macaca Fascicularis
  misc_feature (1)...(765): n = A,T,C or G
gagcatgcagnngtgcaggcgaggtgcagagctggagagcatgnnnnngccccccgagcagaggccgcagcccaggcccagtnnncggccatggcccctgggctcccggggcccacgctgctgttcttcctcctgtggcccnnngtcgtccagtggctcttccgaatgtttcggacccaaaagaggtgactgtcattggaggggtctctgcagccaactgagactatcttgtgtgccatgagccttcctagggtttagaagaacagcattcaaaattccccctcctgtcagtgtttgccttcgcacctcctcccctaacgcagcgcggggtgcaaataagaccccacccctccctgcaccttcatagggacgtttccttccctcccggcaaccacccaggctttccagggaggctgcagttgtggtgcacgtccccggtgctgggttggccgtgactcgggggcggggctatcgggtatcagcccctgccctccccaccctatgggtcacctgactctcttcccacccctgcttctccccgaggaggttcagctcttgggcaagttgggactcgggccggggcctggaagaatgattggctgggaggctgcgggagggaggccaggaggccccgaccagttgggaggagggaacaggccccgggggagggggatgagcgcagtttgctcgtcttcctcccctgccggccccctccgcccccacacacactcaggacgtcttcactgaagattcacttacaaacga

SEQ ID NO: 14826 - DNA, 1284 bp, Macaca Fascicularis
  misc_feature (1)...(1284): n = A,T,C or G
catttcatgataatagttttctacagaattttatctgaatgttttatctctgtaatttatcaattctgacttacattattaccttctactaataccctttcatgatcatactgtttcacataccataaatatgaatctaggaatgacttttttttttaaaaagagatttaaaagttaattacaaagtaaaaatataggacttagagacttaagggttgggtgtgttgagaaaaacatggttcttccctcatggagctaaaataaatgtgtggtaacttcagtcatnnnnnnnnnnnnnnnccttatttctttctggtccatattcagttcagaagctcctccgatgcccttagtatcttttgtttctccagtgacacttatcactcaatactataacacttacatgtctaagattgtacattcagagaagacggggactttgtcttttctggctcacaattgcacactcattacttggcacaatgcttggcaaatttgttcaatgaccgagtaaatagatgaatgattggatgaatgaatttaagaatatatttaaccacgggacaacttaagtatatcaacatggcatcacacaaatctgctcaaataaaagaagtaaaacaattttggctaaggagcacatggaattaatcattaattgtatacaggaaaaagtatgctttgaatacagaggatctcagattgttaggaaactttgtggagaattaagttggtgagataattctatgctttcattcataggctttatgcttttctctcagcgaagaatgttctccacttttttttttttttggtttctcataccatttcaaagtttgtatatctagcaaagcattcccttcatttttatattacatttagttgtattcatgtttctttctccttttcgttataaagttgaaaaaagcagagcttttgtttcatcctctatgcttaagtatagctgacatccagtaaatgttgatcaaatatatatatgtcatcatcattatttcattcacttattcagcagaggtacactgaatgtatgttgtttcacacactgttataggcacttggggtaccatagggaactaaagagattaaaaagagtatcactgtcctcaaatagcgtacattctatcaggagcttcagcttctcatctataaaatggagatacccacttgcaaagttgtgaaaatcagaaatgtgtataatacagtgcctagcacatttgtagatgttcattaaatggtaattattattttacaaatatttgtttg

SEQ ID NO: 14827 - DNA, 757 bp, Macaca Fascicularis
  misc_feature (1)...(757): n = A,T,C or G
gcagcaaaggatcatggtcatcaaagccaaagggatggagcctatagaggtgcctcttgaggannnnnnnnnnnnnnnnnnnnnnnnnnnnnncagggtctgtgctgacagagtaaatacttatgactgtggagaaaaaatttcaagctggttgtccannnnnnnnnnncgtccttgtcatttgatcagacaaagttcaaactttcaaaggaatgcaaagaagaaacatggaaaagatcaacttcctggtacaatggccaccctttctctgnnnnnnnnnnnnnnnnnnnnnnnnnnnnncacatcaagtattttgnnnnnnnnnnnnnnnnnnnnnnnnnnnnnnnnnnnnnnnnnnnnnnnnnnnnnnnnnnnnnnnnnnnnnnnnnnnnnnnnnnnnnnnnnnnttattatcaatggaaaaagggcttttgaagaagagannnnnnnnnnnnnnnnnnnnnnnnnnnnnnnnnnnnnnnnnnnnnnnnnnnnnnnnnnnnnnnnnnnnnnnnnnnnnnnnnnnnnnnnnnnnnnnnnnnnnnnnnnnnnnnnnnnnnnnnnnnntgagagtcgtgaaacaaaggtcaacttnnnnnnnnnnnnnnngcatacatcattggatttatcctctccatgtttcctgtctgtaggaactcaggtnnnnnnnnnnnnnnnnnnnaatgtggaannnnnnnnnnnnnntgcatctgagaaacaccaggatgttacctcctaaaaaaaaaaatagcacaca

SEQ ID NO: 14828 - DNA, 611 bp, Macaca Fascicularis
  misc_feature (1)...(611): n = A,T,C or G
atgaggatcagaatnntattaagaagcggaagaagatacctaagaaaggtcggaagaaaaaaggtcagtgaactgctaggacttaggtgatcaggtgcaaggtggggagtacaaattgagactctctggatttgccattctgggtctcaccaacccttgtagtatctcttcgtactggacaataatctccttaggtgggcttttattttttctttccnnnnnnnnnnnnnnnnnnnattcacaaaatgaatttctggattccacctctaaggtcccacagctcctgttcaggcttccctaaatagaactgataaagtgtcacttgaaggaaccgttatcccatttcaatttattcctacttctcatcttttgtcctgggaagatattcagagtactgcctaggagaccccacccctgtgagcccttctctctagatgtcctcttttcctgtccctttagcttttccaacagtcctttgcctcattcttggtttcccttcctttcaggttttcagaggcggcggtgattatgggtgtacgtatttgtatattttttgtcatcctgagatacttctaatttcattgtatataggttgttttccatggnnnttc

SEQ ID NO: 14829 - DNA, 745 bp, Macaca Fascicularis
  misc_feature (1)...(745): n = A,T,C or G
agacgacatgacacagcagnntgatnnntcaggtcccagacttctagcnnntttacacgttcgtttttttcaaactatacagcccnnnctgctactatgtcttcatttcagggagagcttatggatggagaccagacatccagatctggagtgccggcacaggtacgagggagtaactaattacacccagggcccggcacgcttactcttggccatatatggtggggcctttagtgcttgacaacttctgataaacttcaagtcatgtgctggagtggaccttccacacccagctgaactctacacttaaaggctgtcctgatgtatagtgtctgctgaggtgctaggtggctccaaagtctgccgtctgaagggttccaaaatagctcatcagtctcttggccttagttaccttagtttctctatcttatacagttagacactaactgttgaagaaatggctgtgaaaaagcagcacatacacgtgtagtgttgtgtgttagtacagatgtttcagtgaccacagaaaacaatcagtagtgtcagttagcctcatgcccatttgccttgctacggtgaaactgttctaatttagttaatgaaagagccatctgaattagtgaaaaaatgtagctatttactgattgtaattaataatattgtcccaatgaggtccttgggcatcctgactgaataacatgtaagggcttgtaattaatatttacttgtacgtgagtgatctaaa

SEQ ID NO: 14830 - DNA, 769 bp, Macaca Fascicularis
  misc_feature (1)...(769): n = A,T,C or G
gnnnnnnnnnnnnnnnnnnnnngcagctgtgatnnnggagggtgccnnnnnnntttgtcaagagtggaaggaggctctgtggccaggtgacctggctgccttccactcccttgtacctcagtctaaacatggagtggccactgacaaggtgctccagccccagagccagcatcttcatggggaagatgagtggacctgagtagctgaaggaaggcccctccctacccaaagattggaggcttctcagcctcaatttccctgtctggacagctgagggctctgcctgtcccccactgctatcagtatggaaccccagctggggtcccctattcagtgctgactccccccagccagnnnnnnnnnnnnnnnnnacacccctccttctgctccccccaccnnnnnnnnnnnnnnnnnnntggcctacccccctccacaggccaccagatgggctcctgagaccctccccaggctgcttacagctcattctgctgggggtagagatgaggggagggagtaagttaaaccttggagtagcaagnnnnnnnnnnnnnnnnnnnngtgtgcctcagtttcctcctctacaactgaatatttatagtggctgaaaactggggagatacctgatggtgcagatgtccattttctctcccttcccacctcctgcaggaagcaggagggggcaggccgcacctggtaggcagagtggtttgctccccctccccttcccttctggaagtcttggggcctcagtgcttgcaacagccggcct

SEQ ID NO: 14831 - DNA, 735 bp, Macaca Fascicularis
  misc_feature (1)...(735): n = A,T,C or G
catgaggattnnnnnacgaagcaaatttatattttttaatatcgggggtggaccacgccgccctccatccgtgctgcatgaaaaacattccacgtgccgcttgtcgcgcgtctcccgtcctgatcccagacccattccgtagctatttatccctttcctggtttctgaaaggcagttatatctattatgtataaataaatatattatatatggatgtgtgtgtgtgcgtgcgcgtgggtgtgtgagcgcttctgcaacctcagcctaggtcacattggccctcaaagcgagccgttgaattggaaactgcttctagaaactctggctcagcctgtctcaggctgacccttttctgatcgtctcggcccctctgattgttcctgatggtctctctccctctgtcttttctcccccgcctgtgtccatctgaccgttttcacttatctcctctctgactgtcccatgctccagctgtcgtctgactctgggttcgttggggacatgagattttattttttgtgagtaagcctgagggatcgtagatttttacaatctgtatctttgacaattctgagtgcaagtgtgagannnnnnnnnnnnnnnnnnnnnnnnnnnnnnnnnnnnnnnnnnnnnnnnnnnnnnnnnnnnnnnnnnnnnnnnnnnnnnnnnnnnnnnnnnnnnnnnnnnnnnnnngggggctggggcagattggcgatgggccgtcccctctcccct

SEQ ID NO: 14832 - DNA, 448 bp, Macaca Fascicularis
gcaagaacgggcagaccaactgcttcaagagcaagtccagcatgcacatcacagactgccgcctgacaaacggctccaggtaccccaactgtgcataccggaccagcccgaaggagagacacatcattgtggcctgtgaagggagcccacatgtgccagtccacttcgatgcttctgtggaggactcaacctaagagacggagtttcaccatgttgtccaggctggtctcaaatccctgagctcaagcaatccgacgacttcagtctcccagtttcacattgtcttaagatggaatgttaaatacactcttttgagttggaaaggattgaaaaacaactataaatagaacaagtcatgtggtgggggcacagaagtgtaaccaattaatttgttgtaactcttgaaccagtctggtatagaaaatgcaattctctctcacttcttctc

SEQ ID NO: 14833 - DNA, 787 bp, Macaca Fascicularis
  misc_feature (1)...(787): n = A,T,C or G
aggatggcatagtnnnggagcagatacaagagcaactgaaggaatggttgtnnctgacaagaactgttcaaaaatacacttcatatctcctaatatttattgttgtggtgctgggacagctgcagacacagacatgacaacccagctcatttcttccaacttggagctccactccctctccactggccgtcttcccagagttgtgacagccaatcggatgctgaagcagatgcttttcaggtatcaaggttacattggtgcagccctagttttaggaggagtagatgttactggacctcacctgtacagcatctatcctcacggatcaactgataagttgccttatgtcaccatgggttctggctccttggcagcaatggctgtatttgaagataagtttaggccagacatggaggaggaggaagccaagaagctggtgagcgaagccatcgcagccggcatcttcaacgacctgggctccggaagcaacatcgacctttgcgtcatcagtaagagcaagctggattttctccgcccgtacacggtgcccaacaagaaggggaccaggcttggccggtacaggtgtgagaaagggaccactgcagtcctcactgagaaaatcactcctctggaaattgaggtgctggaagaaacagtccaaacaatggacacttcctgaatggcgtcagtgggtggnnnnnnnnnnnnnnnnnnnnnnntgggcattggaggcccnngtaagacattcatgtggctagtgttgctgaaactcaataaaaacaaaacc

SEQ ID NO: 14834 - DNA, 735 bp, Macaca Fascicularis
  misc_feature (1)...(735): n = A,T,C or G
agagagaaagggagagagagagagatgtggatcgagaggatcgcttcagaagacctagnnnnnnnnnnnnnnnnnnnnnnnnnnnnnnnnnnnnnnnnnnnnnnnnnnnnnnctcaagtcgtcgggatgatagagatagggatgaccgtcgccgtgagagggatgaccggcgtgatctaagagaaagacgagatctaagagacgatagggaccgaagaggacctctgctcagatcagaacgtgaagaagtaagttcttggagacgtgctgatgacaggaaagatgaccgggcagaagagcgggaccctcctcgtcgagttcctcccccagctctttcaagagaccgagaaagagaccgagaccgagaaagagaaggtgaaaaagagaaggcctcatggagagctgaaaaagatagggagtctcttnnnnnnnnnnnnnnnnnnnnnnnnnnnnnnnnnnnnnnnnnnnnnnnnnnnnnnnnnncaagataatggatttaaactggtgtcttaaataggtttgnnnnnnnnnnnnnnnnnnnnnnnnnnnnnnnnnnnnnntctaaattggattctttaatgtttcaccataacacaaaaagcatgaacttgtattaatcctatataatagattgatcatgcaccatatccnnnnnnnnnnnnnnnnnnnnnnnnnnnnnnnnnnnnntaagggtgttgcattatttcatcaatcatttgttgacaaaaaagaaaa

SEQ ID NO: 14835 - DNA, 711 bp, Macaca Fascicularis
  misc_feature (1)...(711): n = A,T,C or G
accagtcccaaacaaaccatctctccactgggaaaggagctgtcgcaaaccctgtgatnntaagcttctgatgaaaagcaatgtatgttaataagcctgcaaggaacagacaagatgttccaaagctgatgaggaaaatatcgcttccctgtctctgcctctaccttgctgtgcctctctggctttagaagcattggatgtcgaattggtttggttcatttctctggagtcggactgtcaggaggagccagaggttggctttctgggatgggaagggggcagtgtcagcctaagcctctggaaatgcttaggatgctgaattttaaccccttctttcactgcatggtccttcaaacagggattggcaggctccgtgagttacagagtgggtgagccttggaaagaaccaacgactaaggtagctgagctctcttttgttcctggaagccaagagaatgcaagatcctggtgggtgagcaggggtatgaagaggggacactggtgggtgaacagtggcatggaagtcactgatgcagcctctggccctcagtctccctatcggcaaagtggggggctcttcctgtctatctctaaagagtttcatccctgacaggtggatgagtgaaagatccagggagtgggggtgaggggtgggccctgaagactttttgtctgtagctcttacatattgagtgtgtaaacccggccttg

SEQ ID NO: 14836 - DNA, 883 bp, Macaca Fascicularis
  misc_feature (1)...(883): n = A,T,C or G
cagaaggccaggcgagactacaccannnnnnnnnnnnnnnnnnnnnnnnnnnnnnncttaggtgctgggcagaagggaaaggtggtcagggtgaggatggtgagggagggctggtgagggctcaaaggaatagttggaacaacagcagtgttattgtagtgtggcagtttcttttatacataggcgggagtttttaaagtgtaagggaaaaattaattttttaaaaaataccatgcttggagggtgggggtagaaatagagagatacggtattatttctaaggaatcgggttttcatttactctggactggtgaaaatattttttaaagccagtgcactaagacctcagcttttatctcagaaccccatgggttccagaccaagagtacaggaaatcaaattgttgtcctgtgtgtctatagcttgcaacagggaggctttgattactgaccctggttccacacactgtaagatcaaaaaaccgtctccacatttgaaagagatgtaaggtgtattcatagggatggtggctcaacaaatcaagcatactggaatcaaggggagggggaagggaatggaatggaaagggaggctgattcccttcccctgacttaccactgatttactaggctacctactctcatgagtaacctctcacagctacacagcacatgccacaatcctatgctcttgccttcttttatctgcagtgtgtgaagggactcttttaaataaatgagcaagtgtcctaagctatgtcatccaaagattgtcctttccattatcaaatcctatgactgggatcactcaacagcactgtgatgtattattttcaatgaggtgcctttcttaactgaccaaatgctgccnngttggcccctaa

SEQ ID NO: 14837 - DNA, 149 bp, Macaca Fascicularis
tgtcatagctccaccttcctttgagggagagggctgtgggagaccccccattcatggcacactagctacagcagtgcatgtcccgagatgattcccatgacagctggtgcctcttggctttcttgtggcaggccaaggggcaccccaga

SEQ ID NO: 14838 - DNA, 755 bp, Macaca Fascicularis
  misc_feature (1)...(755): n = A,T,C or G
acacatgacgatgtcagcagcnnnntnnngaacagtgaaaccatcatgtttttacatcagatcttttaccaaggcctgaaggcccgcatctccagctggcccacgctagtcctcgaatccttcagagggggcagaagagaaaagacaagttggcaaatcctgtatttctaagaggaaatgatatatttttagtttcctatccactttccccttttataaagaatgtatacacatccatttcagaaaaattgagaacccataaaagtagaaaatgtttaaaaatatcaagcatagttctgcttcccaaagataaccactataaacactttggtgtgttttcttccaatttttttctatgcagagatcttgggtttttttccactttacataattgcaaacatactgaatatagaatttgtatattgctgtgtgttgtttttttttcttttacttagcattatcccataagcattttctcatgccaaaagcatgctttttgatcactgtgtaatactccagtacccatgaaggcactgtcatttatcaaactgtctgctatggttggctcttagagttgttccaattttttgttattagaaataatcatcgcttcataagaaattttctccatattagagatcatttccttgggataggtttccaattagcagaattgctaaaacaaagaacccaaaaatgtgaaggctcttgcttcatacatattgtcccattgttctccaagatggcagcactgc

SEQ ID NO: 14839 - DNA, 404 bp, Macaca Fascicularis
  misc_feature (1)...(404): n = A,T,C or G
gatatggacatttgtcatgtagttccagctgagaaaaagattgatgaagctaaagatgaaagactctgtgaaaataatgctgagtttaacaaaaactgtagcaagagccatagtgggatagattgttcatatttagaatgttgtagaacgcaggagcatgcacattcagaaaacccaagccccacgtggattttggaacagacagccggtttagttaaacagctgggcctatcagtagatgtattacaacacctcaaacaactataaaattatcttcccttttctaacgaaaataatgnnnnnnnnnnnnnnnttcctaacaatcgaaatttgtactggtttctgcatcaaacacctcaacagtagggttatcctttatggaagtttgaaatgaacactatgtc

SEQ ID NO: 14840 - DNA, 742 bp, Macaca Fascicularis
tgactagtattgataatgcagccacttttatttaatgttaatattatttatttggcagctcagtgtcttaacagcttgatatgcaggtccttgtatcctacatttctttaggaagttacccatttgtaactttagaaacaggaaaaatgtcagttggtaaatgcaatcttttttttttttttaagctaaaggtgggtgaactggaatgaaaatctttctgatattgtgtctataagcagttttgatggggatgtgttagaagtgtcatgaaagtgtgattctacttttgcagaaaaaatctaaagatcaatttatatagctttattttttactttatcaaagtatacagaattttaatatgcatatattgtgtctgacttaaaattataatgtctgcgttaccatttaaaatgtctattcattaggtaatgtaataaaagaaggtcttcaaaaatgtatttaatatgaatggtatccatagctgtcatcatcataaatactagagtttatttttaaattattaaacatagtaggtgcatttaacataaatcaagcctccacacattaacatttaactgataattcattaatctgctttgaaaagttaaaatataaattaaaccaaatctaacatttctgtaaagtttattttgtatgctcctgtttttaacttttatttctgtagataaactaacttgataatattatattggacttttctctagattatctaagcaggaga

SEQ ID NO: 14841 - DNA, 742 bp, Macaca Fascicularis
  misc_feature (1)...(742): n = A,T,C or G
ccgccaacaccnnnacgcctgacgacaagcttttccagaagctggccaaggtctactcctatgcacatggatggatgtaccaaggttggaactgtggagattactttccagatggcatcaccaatggggcttcctggtattctctcagcaagggaatgcaagactttaattatctccataccaactgctttgagatcacgctggaactgagttgtgacaagtttcccccgcaagaggagttacagcgggagtggctgggtaatcgggaagccctaatccnnnnnnnnnnnnnnnnnnnncagggcatcaagggaatggtgcatgatgagaattataataatctcgccaatgctgtcatttctgtcagtgggattaaccatgatgtcacttcaggtgaccatggtgattacttccggctgctgcttccaggtacctacactgttagtgccatagcacctgggtttgacccagagacagtgactgtgaccgtgggtcctgcggaaccaacattggttcacttccacctcaaaagaagcatccctcaagtaagccctgtgaggagagctcccagcagaaggcacggagtcaaagccaaagtgcagccccaggcagccagaaagaaaggaatggaaatgaggcagctccagagaggccctgcctgaaacccacagtgccaggcaacccttnnnnnnnnnnnnnnnnnnnnnnnnnnatcagataaagcgttctttctattttataa

SEQ ID NO: 14842 - DNA, 727 bp, Macaca Fascicularis
  misc_feature (1)...(727): n = A,T,C or G
atggcaatattgacatgattctggaaatcatactctttgcaactatttaaacttggaaannnnnnnnnnnnnnnnnnnnnnnnnnnnnnnnnnnnnnnnnnnnnnnnnttagttcacaggtgcacaggcagacaggcttgaaggcagaccccgagttacagaaacagaacgtgaaacagtcctgtgtgaggggtgcctctgacctcccctgacccagggagggtccgcacctccctgggctccagcccaagcctggggacttcccctgtggaggatttgcttatttgggagctgacggctcgacccaagttgcctccnnnnnnnnnnnnnnnnnnnnnnnnnnnnnnnnnnnnnnngctggctcccgtgtgcagatggaaaaactgaggcttagtgagtttaaaacttgccgggattcaaacccaggcggcctcctgagcatgggctcctgactcggataggccggttccctcctgatgggctccagcacctcctaatcaggtgcttaccttttgtgcacctcagnnnnnnnnnnnnnnnnatggggtaataatacgcatatcccgggctggcagtcacgagtgaataaggtgtcacgggcaggagtgcctaacagggtgtgccccgcctccctcacggcggnnnacaggggcctgggggctagggccccccgannngtnnnnnnnnnnnnnnnnnnnnnnnnnnnnnagctgctcacattgccttc

SEQ ID NO: 14843 - DNA, 726 bp, Macaca Fascicularis
actgtaactgaccccaggaccattctgtaacaaacgaacaactagagagtgcaagaaaaatagtacgtgattacaggcaaggaattgttcctcctggtcttacagaaaatgaattgtggagagcaaagtacgtctatgattcagcttttcatcctgacactggggagaagatgattttgataggaagaatgtcagcccaggttcccatgaacatgaccatcacaggttgcatgatgacgttttacaggactacgccggctgtgctgttctggcagtggattaaccagtccttcaatgccatcgtcaattacaccaacagaagtggagacgcacccctcactgtcaatgagttgggaacagcttacgtttctgcaacaactggtgccgtagcaacagctctaggactcaacgcattgaccaagcatgtctcaccactgataggacgttttgttccctttgctgccgtagctgctgctaattgcattaatattccattaatgaggcaaaggtaagacgaatatgcactctcagtagggacgtgtgcttgatgggggaggctcttgtaataattagctttgttgaaactttcaaatattcgttttaatatgtataggtgaaattatgtgagatcttggatttccttcacaataatctggggttggggatgaggatgggtgtgttgataaaacaagcttagctatgagttactggttatcgaagcagact

SEQ ID NO: 14844 - DNA, 724 bp, Macaca Fascicularis
  misc_feature (1)...(724): n = A,T,C or G
tgtacacacagtnnnnnnnnnnnnnnnnnnntcccagnnncagaaaccagctaaagggcnnntcgccgtgagagcctaggcctggaggggcccgggtcaggctggggaggaacagaaccgggccctcccagagcacctccgcttcccccctgcttccccaggtcnnnnnnnnnnnnnnnnnnnnnnnnnnnnnnnnnnnnnnnnnnatgacagcaaattaaccccctggaggcttctcccggcagagcctccctggggccggggacaggcagtggatggggcagagctgagcagaatatggactgggggagggggcagagagaggagatcaaaatgaggtgggggcacagggttgggcaaggagannnnnnnnnnnnnnnnnnnnnnctttgcctggcccctaatctttaagcccaacttgaagctgagagcagcaggaagttcggatttggcggtttgggggccggggcatccaagctgtagagggcaggacagacagactannnnnnnnnnnnnnnnnnnnnnnnnnnnnnnnnngggagggccactgannnnnnnnnnnnnnnnnnnaccaagaaggggtaaccccatgcccctgcctgcattcctcggggacgtggggcatgcctnnnnnnnnnnnnnnnnnnnnnnnnnngtcccacatccaccctcctgccccttggggcaatttaacctttttcatggaagttattacaatgaaaag

SEQ ID NO: 14845 - DNA, 743 bp, Macaca Fascicularis
  misc_feature (1)...(743): n = A,T,C or G
aattccatgcnnnnnnttnncngtttgctatnncagggaggtggaaaaatcaaggttgagattttgaaaatactttcaaattnnnnnnnnnnnnnnnnnatgttgaagaaacttctcagtannnnnnnnnnnnnnnnnnnnnnnnnnnnnnnnnnttcttatgtggaatcagaaatccttattaatgcccttactctttttgagattatctatgacaatctcagagcagaagtgtttaactatagagaattcaataagggttcccttttttacttatgcactacatctggagnnnnnnnnnnnnnnnnnnnnnnnnnnnnnnnnnnnnnnnnnnnnnnnnnnnnnnnnnnnnnnnnnnnnnnnnnnnnnnaattctgattggttatgtactgtcaaaagacttgaaagaaatttcttgattttgcagtctggaagtgttgaaaattgaaannnnnnnnnnnnnnnnttgctcatgtagtaaaggaatcctttnnnnnnnnnnnnnnnnataatgtatcatccagagtgatgttatctgtgacagtcaccagctttaagctgaaccattttatgaataccaaataaatagacctcttgtactgaaaacatatttnnnnnnnnnnnnnnnntgcttggatggaaatatttttactggttcttctgaattgacagtaaacctgtccattatgaatggcctactgttctattatttgttttgacttcannnnnnnnnnnnnnnactt

SEQ ID NO: 14846 - DNA, 716 bp, Macaca Fascicularis
  misc_feature (1)...(716): n = A,T,C or G
tccccacagtgggcgaggaagatgaggtctccatcaaggaggcagccgaggcggtggtggaggccatggacttccatggggaggtcaccgtatcctctggctccagtgctgggggttgggcgggggccccttggcaggctccgtggcctccccgcacagggccagcgtgggtgggacactgtggagggaggatgcctaccctggcaggcggaggagctctgctgtggcnnnnnnnnnnnnnnnnnggttcaaggacaagctgcgggggctgggagtggaggtgctcctctcgctgtggccttgacaaagcatgcagtttgatacatccaagtcggatgggcagtttaagaagacagccagtaacagcaagctgaggacctacctgcctgacttccggttcacacctttcaagcaggcggtgaaggagacctgtgcttggttcactgacaactacgagcaggcccggaaatgaagctggaaggcaggagcaggtgccagtggaccnnnnnnnnnnagagccaccacccatcaaccctgccaggagctgagggcaccacctgggcccacattccgtccgctctgcagccccaagcatctatccagtggggcccccattcacatcagtcctcagggaaaccagggcccgggcaggcccggtgctttgctccccacactggcccccggccttgcgtgtgtccactctgatcctgtgtccc

SEQ ID NO: 14847 - DNA, 760 bp, Macaca Fascicularis
  misc_feature (1)...(760): n = A,T,C or G
gaggcctggattcatgctaaatatgtggagaagaagttcctgaccaagctgctgagattcgagggcgaagaggtggccgggggcccccaaggggccagcctcctgtgcccccaaagccttccatcaggccccggccagggagcttgagaaccaagccagagcccccctctgaggacctgggaagcctgcaccccggggccttgctgtttcgagcgtctgggcatcctccatctcttcccaccatggccgatgcccttgcccacggagctgatgtcaactgggtcaatgggggccaagagaatgccacgccgctgatccaggccacagctgctaattctcttctggcctgtgagtttctcctccagaacggggcgaatgtgaaccaagcagacagtacgggccggggcccgctgcaccnnnnnnnnnnnnntggccacacagggctcgcctgcctgttcctgaaacggggggctgatctgggggctcgagactctgaaggcagggaccctctgaccatcgccatggaaacagccaacgctnnnnnnnnnnnnnnnctacgactggcaaagatgagggaagctgaagcggcccaggggcaggcannnnnnnnnnnnnnnnttgacatcttccgcgacttctccctcatggcgtcagatgacccggagaagctgagccggcgcagtcacgacctccacacgctgtgaccccaggccctaagggtctgcgcctccctcccctccccgtcaccgggccctctgcc

SEQ ID NO: 14848 - DNA, 713 bp, Macaca Fascicularis
  misc_feature (1)...(713): n = A,T,C or G
tngnnnnngctnnngagcctgcagacctatagannaccaccaagtctgatgtgtggtcatttggtgtgctgctgtgggaactgttgacacggggtgccccaccatacccccacatcgacccttttgacctcacccacttcctggcccagggtcggcgcctgccccagcctgagtattgccccaattctctgtaccnnnnnnnnnnnnnnnnnnnnnnggcggacccagcagcacgacccaccttcggagtactagtgggggaagtgnnnnnnnnnnnnnnnnnnnnncttggggaccattannnnnnnnnnnnnnnnnnnnnnnnnnnnnnnnnnnnnnnnnnctcacatgagatgaatgtgcatccagaacagcagcagtcctcacccatgccagggagtgcacaccgaccccggccactctcagagcctcctcggcccacttgacttagtccttgggctggacctgcttagctgccttgagctaaccccaagctgcctctgagccatgccaggccagagggcagtggccctctaccttgttcctgccctttaatcttcagaggcaataggtaaatggggcccattaggtccctcactccacagagtgagacagtgagggcagtccttctgcaacatgtatttatggagtgcctgctgtggaccctnnnnnnnnnnnnnnntggactcagcagtgaccacaccaacactgac

SEQ ID NO: 14849 - DNA, 669 bp, Macaca Fascicularis
  misc_feature (1)...(669): n = A,T,C or G
gccatgagacccnnncagctccctgttcnnnnncagctccctgttnnnngagacnnnnnnnnnnnnnnntgacccagccatacctagatcctggggtctttctaggactgtgcctccctgcttgacctgtgctccaggaccctgccttcaaccctgtcaactccctatgtcttcctgtttcccagtctcagattgggtgggtgctctcactggcctctctagctaggccatctccctggtcagcttccttgagcctgggccactcctccctggccttcctacctctgccaagagcctccagatgtgcccgcagcctggcccctgtccaagcctctcccccagccaccctctgcccctgcagtagagcccactatgggctcagggatcttacctgcttctcccttggacctgtgtgcatccccccacctgccaggtctgtggctgctaagccccacaggggcttgccacactcttcccttcctgagccgatctgacctcactgccacctcttgcattgggctcttgagggctggccccttctcactgatgggccctcccaggccccttgaaccctggtgaaggagcttaacttgtttttttgagcgttcacaatgcctcactccacaccctaaaagtggaggctcgggtgccaggcgtctcctgcctcca

SEQ ID NO: 14850 - DNA, 1541 bp, Macaca Fascicularis
  misc_feature (1)...(1541): n = A,T,C or G
tgctcatgaatacagnnnnnncccagatgacgccattttccaaagcttggcccgggcatactcttctttcaacccagccatgtctaaccccaatcggccaccatgtcgcaagaatnnnnnnnnnnnnnnntttgtagatggaaccaccaatggtggtgcttggtacagtgtacctggagggatgcaagacttcaattaccttagnnnnnnnnnttttgagatcaccgtggagcttagctgtgagaagttcccacctgaagagactctgaagacctactgggaggataacaaaaactccctcattagctaccnnnnnnnnnnnnnnngaggagtcaaaggatttgtccgagatcttcaaggtaacccaattgccaatgccaccatctccgtggaaggaatagaccacgatgttacatccgcaaaggatggtgattactggagattgcttatacctggaaactataaacttacagcctcagctccaggctatctggcaataacaaagaaagtggcagttccttacagccctgctgttggggttgattttgaactggagtcattttctgaaaggaaagaagaggagaaggaagaattgatggaatggtggaaaatgatgtcagaaactttaaatttttaaaaaggcttctagctagctgctttaaatctatctatataatgtagtatgatgtaatgtggtcttttttttagattttgtgcagttaatacttaacattgatttattttttaatcatttaaatattaatcaacattacttaaaataaatagcctcttaggtaaaaatataagaacttgatatatttcattctcttatatagtattcatttttcctacctatattacacaaaaaatatagaaaagatttaagtaattttgccacccaaggcttcannnnnnnnnnnnnnntattatttacaatgcagaactttttgggtaattctagcttttaaaaattagtgaagttcttttactgtaactggtgacaatgtcacataatggatgctattgaaaaggttaacagatacagctcggagttgtgagcactctactgcaaggcttaaacaattcagtataaattgtcgtttttttcttgtgctgactaactataagcatgatcttgttaatgcatttttgatgggaagaaaaggtaaatgtttacaaagaggttttatgaaaggaataaaaattgacttcttgcttgtacatataggagcaatactattatattatttagtccgttaacaccacttaaaagtttagggttttctcttggttgtggagtggcccagaaatgcattctgaatgaataaaggttaaaaaaaaaaaaatccccagggtgtgtattttaattctctaagatttttggtctagcactgtggtcttgtgatgaaaacatgtatcctcttaatagtggcttctcatgtgttcatcctgtacattttaaaatttgttaggcgaccgctgtgtgccaagcactgcatagcctctatgtatgttattgtggcaggcgaaaggttctgatt

SEQ ID NO: 14851 - DNA, 771 bp, Macaca Fascicularis
  misc_feature (1)...(771): n = A,T,C or G
tgcaggtgagnntgcaggtgaagctgatnnnncagaggcacctgtgtggagggtcactcataggacnnnnnnnnnnnnnnnnnnnngcccactgctttgatggaattccaaaaaccaatatgcctaccttccaaaggtgacacaaacacaatttataccaactgttggnnnnnnnnnnnnnnnnnnnnnnnggaaaaaggtgaaatccaannnnnnnnnnnnnnnnnnaatattcctttggtaacaaatgaagaatgccagaaaagatatcaagattataaaataacccaacggatggtctgtgctggctataaagaagggggaaaagatgcttgtaagggagattcagggggtcccttagcttgcaaacacaatggaatgtggcgtttggtgggcatcaccagctggggcgaaggctgtgcccgcagggagcaacctggtgtctacaccaaagtcnnnnnnnnnnnnnnnnnnnnnnnnnnnnnnnnnnnnnnnnnnnnnnnaaacgctcggatgcaggcgccagcatgaggagcagcccagagtcttggcgagttttannnnnnnnnnnnnnntcaaattctgagcctgggggtcctcatctgcaaagcatggagagtggcatctactttgcatcctgtcataaggannnnnnnnnnnnnnctcagagctgctgaggacaatgttttgctgaagccagcnnnnnnnnnnnnnnnnnnnngagctgataatggaagtcgcaaccgagatctccatgattgtgtgtcgaaa

SEQ ID NO: 14852 - DNA, 736 bp, Macaca Fascicularis
  misc_feature (1)...(736): n = A,T,C or G
ggaagcccgagagcatnnnnannncnnnnncntctttgnnnnnnnnnnnnnnnnnnagtggctgccgaggaccaagctggttcctctgggtgtgaaccaggacctagacaaggagaagatgctggagggccgcaagtccaacatccgcaagtcagtacagatcgcctaccacagggctcnnnnnnnnnnnnnnnnggtgcaaggcgagcagagcagtgagaccagcgatagtgattgatactgctcaacacagcccaacctacacagggtcacacaaccctgtgacctctctcctcccctttgctcactgtcctggagtggcaccggcctctgcactgactcatttctggtcttggggccagtctcaggggaagctgggtgggggaggtccctcctgccctaagtgcagctggactgtacagaacactccaagggccagtggcagttcagtgcaaggagagggagggcccacaggtcagaaagagttccagagacctcacagcattgtagggcggggtggtgggccaaagttaggacactgcataaaacaggccatcccaccacctctacctgctcatgccaggagaatctataactgcctagaggcctgaggcccctaccggtggtgaggtgagcgggcatctgtccannnagcaagagaggcagtaggggactccctcccctgctgttgtaaataactgtaattatcggagaatttaaattattctcatttgta

SEQ ID NO: 14853 - DNA, 1146 bp, Macaca Fascicularis
  misc_feature (1)...(1146): n = A,T,C or G
tgctagcgaaaaggagcgggagatggccgagatgnnnnnaaggangcagcagcagctggatgagtaccaggagcttctggacatcaagctggccctggacatggagatccnnnnnnnnnnnnnnntcctggagggcgaggaggagaggctacgcctgtcccccagccccacctcgcagcgtagccgcggccgtgcttcctcccactcatcccagacacagggtgggggcagcgtcaccaaaaagcnnnnnnnnnnnnnnnngagccgcagcagcttnnnacannnnncacgcactagtgggcgtgtggccgtggaggaggtggacgaggagggcaagtttgtccggctccgtaacaagtccaatgaggaccagtccatgggcaattggcagatcaagcgccagaatggagatgatcccttgctgacttaccgcttcccaccaaagttcaccctaaaggctgggcaggtggtaacgatctgggctgcaggagctggggccacccatagcccccgnnnnnnnnnnnnntggaaggcacagaacacctggggctgcgggaacagcctgcgcactgctctcatcaannnnnnnnnnnnnnnnnnnnnnnnnnnnnnnnnnnnncgctcagtgactgtggttgaggacgacgaggatgaggatggagatgacttgctccatcaccaccacgtgagtggtagccgccgctgaggcccagcctgcactggggccacccagccaggcctgggggcagcctctccccagcctccctgtaccaaannnnnnnnnnnggctcaggagcccaggtgggcggacccatctcctctggctcttctgcctccagtgtcacagtcactcgcagctaccgcagtgtggggggcagtgggggtggcagcttcggggacaatctggtcacccgctcctacctcctgggcaactccagcccccgaacccagagcccccagaactgcagcatcatgtaatctgggacctgccaggcaggggtgggggtggaggcttcctgcttcctcctcacttcatgcccaccccctgccctgcacctcatgggagggggctcaaagccaaagaaaaataaccctttggttttttttcttctgtatttttttttttctaagagaaggttattttct

SEQ ID NO: 14854 - DNA, 702 bp, Macaca Fascicularis
  misc_feature (1)...(702): n = A,T,C or G
agggccatgggcaggggtgctgtgactgctgagnnnctgtgctggagacccacctggcattgcctgtagcaccnnnnntcccaaaccccagctgaggaaggctccattcagtaccaagtgccccacccacccgtcaccctggggcccaggcacacatccgtcgcatgcccattcacatccatggctggacagatgcaagacgtgagagtcctacccgtcatgggcgaggtctggaggccggtccagctgtcccagggccacacacagcagcctggaggaagagctggcctcaggacaggtgttcctgttgtccagagtccattcccagagctctctctgcttggccagtcaggataggggtgcccacaggtcctgccctcagaggctccggatggtcaagtgaggcttacctctgggctccgtgggacaggcctctctgaatagccacatccagggtggnnnnnnnnnnnnnnnnnngannnnnnnnnnnnnnnnnnnnnnnnnnnnggatgaagaaacagtggaggacgaggcagcagccaactcccgagccaggtaaacagatccacggttccctgcattctgtgtatctctnnnnnnnnnnnnnnnnnnnnnnnntacactcaggtcaattactctgcttctgtaaataagatgcttacgtctgtaattttttttctttctttttttttttttttgaga

SEQ ID NO: 14855 - DNA, 744 bp, Macaca Fascicularis
  misc_feature (1)...(744): n = A,T,C or G
gttccagacaataccttccccttgggctatacctcatnccctttcacagggattgtgggactgctgntnnnngccatgggagcagtaatgatagttcgttgtatccagcaccggaaannnnnnnnnnnnnnnnnnnnnnnnnnnnnnnnnnnnnnnnngattcctacacatgactatcagaagggagaccagtatgatgtctgtgccatcnncctggatgnntatnnagatggagacaagctgcgggtactcccctgtgctcatgcctaccacagccgctgcgtggacccctggctgactcagacccggaagacctgccccatttgnnnnnnnnnnnnnnntcgtggtcctggggacgaagagcaagaggaagaagctcaggggcaagaggagggtgaagaaggggagccaagggaccaccctgcttccgaaaggaccccacttttgggttctagccccactcttcccacctcatttggttccctagccccagctccccttgtttttcctgggccttcaacagaccccccaccctctcctccctcttcccccgtcatcctggtctaataaccctctacacgtacacttctggtgacctatttgcacagaccgtcttcttccctccagtcttctaagttgagggataggggacattccatcctaagctgctcccttacccacacctatccttttgaggggcattggggtggggctggggcaagcaaagggactgggtcttactct

SEQ ID NO: 14856 - DNA, 736 bp, Macaca Fascicularis
  misc_feature (1)...(736): n = A,T,C or G
atagaggnnnnnnnnnnnnnncaccgaagcttttcagtgactctgatgaagaatcaactcacatctcctcccagaattcttcccagtcaacacacataacagaacaaggaagtcaaggctgggacagccaatctgatactgttttgttatcctcccaagagagaaannnnnnnnnnnnnnnnnnnnnnnnnnnnnnnnnnnnnnnnnnaacaatcaaagagaatattcctgcctctctaatggaacaaaatgtaatttgcccaaaggatacttgttctgatttgaaaagcagagttcaagatgtaacaacagttcctagtactggagaaccaattactctaagcagtgagaaacatatacctgaggaaaaaagtttgctaaatcttagcacaaatgtggattcccagagctcttctgattttgaagttccctcaactccagaagctgagttacctaaacgagaggatttacaatatttannnnnnnnnnnnnnnnnnnnnnnnnnnnnnnnnntcaaaaaaagaaaatgctcactcttagatatctaagaattcaaagcgcttcaacctagagcaaccactaaaaaacctgcagagagatgatagtcaatattacagtagagaaaatataatacttaaaaatgttcaaataatctggtttggtgtggtggctcacactctgtaatcccagcactttgaggtgggcaatcgcttgagctcaggagttcgagaccagc

SEQ ID NO: 14857 - DNA, 719 bp, Macaca Fascicularis
  misc_feature (1)...(719): n = A,T,C or G
cgcgtgacnnnncnccagaactagggccggggnnnnacggcagcagcagccctcagcaagccagagctgcatctccatcctggtgtgcacaggcgtctacaatcccagcaacccgcagtccacggagcctgtcctcggaggagagcagcctccattccacgggcaccgagacttgttcttcagtccagggctcatggaggcctcccacgtggtgaatgacgtgaatgaggctgtgcagctggtcttccgcgaggagggctgggtctcggagtgagggcagtgcgggggaggcaagggggtgagcctggacctgtgggcgagtccctttggctgggctctggcctgatcactgggctcaggtcagggcttggttcccttgccaccattcctgctgccccatgagtnnnnnnnnnnnnnnnnnnnnnnnnnagacagtggctctttttccctgctgggtagcattttgtatnnnnnnnnnnnnnnnttctgggcacagttcccttgtgcctctnnnnnnnnnnnnnnnnnnngccattctcttcacctgtgtgcctcagtgtccttctcgtttcagtaggaacttctgaaaagggggaggcagtgtggaatactgtggatgtctgtgcagagcctttgccggcactgaaggcgtgcagcctgtcggcagagtgtctaacaccagatgctactttttactgtattgtagtttattgcccaga

SEQ ID NO: 14858 - DNA, 688 bp, Macaca Fascicularis
  misc_feature (1)...(688): n = A,T,C or G
caaagaaacagaaacctgcntgcagtaacccgtagcactaccaccccccactaccacctgcaaggtgggggaataaactctgcctgtctggcgccccaccaagggaaataaacatggcctagctgccaagtcgtgcctgtagggtgctctctgctggcagtttctgggtggtgcatacatctagtctccctagaagagcacagtccagaattgagggggtacagcagaaacagactgcaggcagagagaggtctcatggagcttggacaggctaggcacataaagaacaggcagcctatccaaaaaggggcagggaatgggtgaagaggtgctctagggcagagccgagctctgatctagaaaggatggcaaagatacctggaaggcctcccgattcttgcgttgttggcgtcgctcccgaagccgggcccgctcccgttcctcctcctcttccctctccaaagctcgaatgtgctcctcaaaacagatcagtgcatcttccttgtccatgtctaaagacaggcaggaggttcagcgggcactgtaccaggaggacaccctctcagaccccagcacccctaatgtttcaacgatgctgtcctacaggtgctagggatacccagggtggtgggggaagggcctggagagggctctgtgggagcagccactggaatggtggttcttaaga

SEQ ID NO: 14859 - DNA, 714 bp, Macaca Fascicularis
tcagaacagccttcaggcagcccctgcaaccacctccaccggggagccccggcgggcaagcacagcctcctgcccacccgctgccagttccgaggcgcctgacggccccagcagcactgcccgccttgacttcaagatttctggcttcttcctcttcggctccccactgggcctggtgctggctctgcgcaaaaccgtgatgcccgccctggaggtggcccagatgcgcccagcctgtgagcagatctataacctcttccatgcggctgacccctgcgcctcacgcctcgagcccctgctggccccaaagttccaggccatcgccccactgactgtgccccgctaccagaagttccccctgggagacggctcatccctgctgctggccgacactctgcagacgcactccagtctctttctggaggaactggagatgttggtgccctcgacacccacttctactagcggtgccttctggaagggcagtgagttggccactgagcccccagcccagccagccgcccccagcaccaccagtgaggtggttaagatcctggagcgctggtgggggaccaagcggatcgactactcgctgtactgccccgaggcgctcaccgcctttcccaccgtcacgctgccccacctcttccacgccagctactgggagtccgccgacgtggtggcgttcatcctgcgccaggtgatcgagaagga

SEQ ID NO: 14860 - DNA, 814 bp, Macaca Fascicularis
  misc_feature (1)...(814): n = A,T,C or G
tgcttctcannnnngtnnnnnnntcagcgccgcaccagccggaaagagggtgattgctggggctcgtaccctgcatccctctcctcccagggcctgccccccagctcgggccctctgtgagatctatctttggcctcctcccaaatggagctggccctgtcctggggatgtgtgatggtccccctgcttacccacaaaagacaagtctttacagaatcaaacgcaattttaaatctgagagctcgctttgaacgatttggttttgtgattgcctctgaannnnnnnnnnnnnnnnnnnnnnctacaaactctgaggtnnnnnnnnnnnnnnnnnaaaaaatcaatgaatannnnnnnnnnnnnnnnntgcccgcccctgaagccacagcagggtttcaggttccaatcagaactgttggcaagatgacattnnnnnnnnnnnnnnnnnnnnnnnnnnnnnnnnnnnnnnatttgtannnnnnnnnnnnnnnnnnnnnnatatatttttgtgcacatttttttttacgtttctttagaaaacaaatgtatttcagaatatatttatagtcgaacaattcatatatttgaagtggagccatatgaatnnnnnnnnnnnnnnnttctctattatctcaaactactggcaatttgtaaagaaatatatatgatatataaatgtgattgcagcttttcaatgttagccacagtgtattttttcacttgtactaaaattgtatcaaatgtgacattatatgcactagcaataaaatgctaattgtttcatggtataaacctcctactgtatgtgggaatt

SEQ ID NO: 14861 - DNA, 755 bp, Macaca Fascicularis
  misc_feature (1)...(755): n = A,T,C or G
gagtatnnnnnnnnnnnnnnaaanctggtggctcttcagttaagatccatttttattaagtataaatcaaagccattctgtgaaaaactgctttcctggnnnnnnnnnnnnnnnnnnnnnnnnnnnnnnnnnnnnnngagcagccattcatatcagcgcaatgacnnnnnnnnnnnnnntactcccttnnnnnnnnnnnnnnnnnnnnncatgcaaagaagtgttcaaaataaaataaagagccttannnnnnnnnnnatggaaaaaagccggtgcattcctgaaatagatgattccgagttttgtatnnnnnnnnnnnggggaggcatcacaaaaacacnnnnnnnnnnnnnnnnntctaaagaaatccaaatgnnnnnnnnnnnnnnnnnngtttcagaaggggacaacatcccagatgcattaggtctcgttgagtaccttaatgagtggcttcagataatcaaaccacttagcgatgaccccacagcatctacctcacggtggaaaataccaagttcttgnnnnnnnnnnnnnnnnnnnnnnnnnnnnnnnnnnnnnttttgatctgttttccgttttataccttatacccagaacacttactaccaacacaactgttaaacattctagacaaaaaaatcgtatgatccgagaatgtattaggaaannnnnnnnnnnnnnnnnnnnnnnnnnnagataaaggatctctttgccatgcttttcatcctatgcaacaaatggaatttgacaaa

SEQ ID NO: 14862 - DNA, 667 bp, Macaca Fascicularis
  misc_feature (1)...(667): n = A,T,C or G
aatgcactgtccctccaannnnnnnnnnnnnnnnnnnnnnnnnnnnntacataactaaatgtggggttttgttattggtatttttttcacgtgcctcagaccagcctggcaccaggatctttggttcacagcgtgtagcaatgagccggctgcagtctgtctccccacgcctcgccttctgtaaaccaccgcagccaccacagcgttggggtggagatctgggtttctagacctcactgaacacactgaaatggctgagtttaacttatttaggcattcatcttggagatttggtttttccggtgtggattcctcagcagcatctcccaacatcgactgtgccgctggctccctgccacccaaagccgagttcctccagagctttctccgcccacctcactgcgtcctaaatggagcttttggtgtccagttaaactagcaggagcagtctcctgatttattttgatctcattcttggactcttggacctctgttcttcaaacattgtgtcactgtgaaatcctgacgcccttgtgtcctacagaccgactgggtgcaacagacagctgcccataccatgccatgctctaccctctgcctctcaccagtagacactctggnnnnnnnnnnnnnnnnnnnnnnnnnnnnnnnnnnnttctaagcaata

SEQ ID NO: 14863 - DNA, 694 bp, Macaca Fascicularis
  misc_feature (1)...(694): n = A,T,C or G
gagacccatggccactgacccctcnnnnnggagcagggtctcccagaccccagcagggtatcntccgaggtgcagcagatgtgggcactgacagagatgatccgggccagtcacacctccgcgaggatcggccgttttgatgtaagtaatcgcttccctctgcttggcttgctttgccctgagcagatcagacctcatggtcttttgtatttcaggtggatggctgttatgacctgaacttgctctcctacacttgaatggtggctcctacccaagatgttggcctttctgtgcccaccnnnnnnnnnnttgggccaccagaggctgaagtgggtttcctgtgtattccgaatgttgcctgcatgcctattctgtctggnnnnnnnnnnnnnnnnnnnnnnnctcgggggctcactgtgttacttcagcatgagctcctggcagggggggtgctctgnnnnnnnnnnnnnnnnnnnnaattcttccttctacccaaaaacactccagtcagttgtacttactgagaatccctgagtgccctctgcccatcctgccaacatgcacattcctatcttctgcctgctccctcacctcagtgcagttgggctgggctgacctactagaacctgctccatgtatgcacctggaaggccattgctgccatggcacttgggacacttgaggaagaaacaga

SEQ ID NO: 14864 - DNA, 710 bp, Macaca Fascicularis
  misc_feature (1)...(710): n = A,T,C or G
tcaatttattgactgtgtctggcagatgacnnnnnnnnnnnnnnnnnnnnnnnnattcaatgagtattttctcattaccattttggaccacctatacagctgcttattcggaacattcctctgtaatagtgaacaacagagaggaaaagagaatcttcctaaaaggactgtgtcactgtggtcttacataaatagccaggcggaagacttcactaatcctctctatgggagctattccaatcacgtcctttatccagtagccagcatgcgccacctagannnnnnnnnnnnnnnnnnnnnnnnnnnnnnnnnnnnnnnnnnnnnnnnnnnnnnnnnnnnnnnnnnnnnnnnnnnnnnnnnnnnnnnnnnnnnnnnnnnnnnnnnnnnnnnnnnggaactacagagagagatttctaaccgatcaacctcatcctnnnnnnnnnnnnnnnnnnnnnnnnnnnnnntcactcctgtccaaactgttgtataaaggactgtaagatcaggggcatcattgctatacacnnnnnnnnnnnnnnnnnnntctatgagtagaaagtcttccgaatttagaacccatctatgagagaaagttcagtcactttatttattttaaatctctctaggatgagtttagaactgtagcagtgcaggtggcttaagtgaaataactcccatatgtaattacatgattatgatactaatctttt

SEQ ID NO: 14865 - DNA, 727 bp, Macaca Fascicularis
  misc_feature (1)...(727): n = A,T,C or G
cacccagaccacaacctggaccagacagaggaggcacagaggcacttcctggagatccaggctgcgtatgaagtcctgagtcaacccaggaagcccaggggatcccggaggtgaaaagaaacttccccctgaggattgactcttcctatcagagctgggcaacttgtcccaaatctagctttgcccaggaatggcatcccaacaaggttaaagaaactgcttgcaggggccgggagtgnnnnnnnnnnnnnnnnnnnnnnnnnnnnnnnnnnnnnnnnnnnnnnnnnnnnnnnnnnnnnnnnnnnnnnnnnnnnnnnnnnnnnnnnnnnnnnnnnnnnnnnnnnnnnnnnnnnnnnnnnnnnnnnnnnnnnnnnnnnnnnnnnnnnnnnnnnnnnnnnnnnnnnnnnnnnnnnnnnnnnnnnnnnnnnnnnnnnnnnnnnnnnnnnnnnnnnnnnnnnnnnnnnnnnnnnnnnnnnnnnnnnnnnnnnnnnnnnagagtgaaactctgtctcaaaaacaaaagaaaaagaaaaagaaaaagaaactgcttgcagggaacatgagaaaaccttaatggggtgagaaaaggttgtggtagaagaatgtgtttatattctgaatttctgaattcttggctattgcattcttgacaatttttcttaaaaccagagagtgaaaggcatattataaaacagtcaaatatcttttagagtatggacaactatta

SEQ ID NO: 14866 - DNA, 751 bp, Macaca Fascicularis
  misc_feature (1)...(751): n = A,T,C or G
agcaacataaatttatcaaatttgcagcactttgtaaatgatgagatgnnttcctacctttatggatgtctttttctatgttatctacctttcaaaaacttttttaaaaagtttaaagnnnnnnnnnnnnnnnnnnnnnnnnnnnnnnnnnnnntgtatcattttttttgtttcttaatccaatattcctttacaaattaaatgccttgaaaaatgtaatggagttcaatgtgattttgatgctttggtctaacttctacattcctactgttaaaaggccagtatatcttaaacaaatgaataggcatgaggcatattcagttgacttacaatgaaaagttatacagacaacagtaataactaagagggtgaatctgctaaacccttttgaaatgctgcagatttgataaatatttattttagactaattggttttgggggaattggttttaggcaaattaatctagtaatctttgatctttagtcctcattttctatcactcagtgagtttcatactggaaatgatgactcctgacaacagaaattccacatttgggggctattctaagatgactatgccagccaacctgggaaatacatagaggagatctctgagtgagagggaaagagttcagatttatacaactgagtgccagaggggaaaatgcaccttgttgaagtgagaaatgttctgaaactgaattacttcttgtacagctgagatcgcttcttctgtactattgtaaataa

SEQ ID NO: 14867 - DNA, 766 bp, Macaca Fascicularis
  misc_feature (1)...(766): n = A,T,C or G
gcgccgtaattgactcatctcttatttgagaagtgtctgttgccctcattaggtttaattacaaaatttgatcacgatcatattgtagtctctcaaagtgctctagaaattgtnnnnnnnnnnnnnnnnnnnnnnntgggtnnnnnnnnnnnnnnnnnnnngtatcaaagttgtacatatttccaaacatttttaaaatgnnnnnnnnnnnnnnnnnnnnnnnnnnnnnnnnnnnnnnnnnnnnnnnnntgacaaggcatttaaagatgcttctggcttttgttttttaatttgtaaggtggtgttaactatggttattggctagaaannnnnnnnnnnnnnntgtatatatctatagtttgtaaaaagaacaaaacaaccaagacaaactcttgatgctccttgctcggcgttgaggctgtggggaagatgccttttggaggggctgtagctcagggcgtgcactgtgaggctggacctgttgactctgcaggggcatccatttagcttcaggttnnnnnnnnnnnnnnnnnnnnnncatagcattctgctgccatcttagctgtggacagagaggtcagctggcatgagaattttttttttaagtgcggtagtttttaaactttgtttttaaacaaactgtagaactcttcattgtcagcaaagcnnnnnnnnnnnnnnnnnnnnnnnnnnnnngaacctcctgtacttaaacatgatttgcaacgttctgttatttttttttgtatgtttagaatgctgaaat

SEQ ID NO: 14868 - DNA, 626 bp, Macaca Fascicularis
  misc_feature (1)...(626): n = A,T,C or G
ttataaaattaattacatcacctatatacaactatataataaaccctctgattcttattatgtatatccctgaactatccccttttttaggcaccttgtaataattataggaagaaagtggtactaggttctagaataaacttaaaaggctgacatgtatcataagcttagctatcattgggatattcttattaaaggaagttacgagtttcctcttcgtagtctttaataatctgacagatctttgggaatatttgggtgttttgtttagtcaaataaatgagcaaccaacaattcgagtctgcattacttatctactgctgcataacaaattacctctaaacttaacagcttaaaacaacaacagaaaaccagtaccttacagtttctgtgaatcaggaatttgggagcagtttaggtaggtggttctggctccaggtctccaataaggttgcagtcaaaatgttatctgggctgcagtcatctgaaggcttgactaatgctggaaatctgattgtaaaatggcttattcatcaaaatcaattcaaaatttattttggttgttgggnnnaggcctcagttccttgccatgttgttctcacaggactgtttaaatgtcctcctga

SEQ ID NO: 14869 - DNA, 740 bp, Macaca Fascicularis
  misc_feature (1)...(740): n = A,T,C or G
aggatgtcacatataagacgggatcaaacctgaaagtaagacgctgatggtnnnccatcctctataaggcccacaaggaaaagaaattagtgtgatgtgacttggatttatgtgcactctgcnnnnnnnnnnnnnnnnnnnnnnnnnnnnnnnnnnnnntttaccctgttttccatttacacagtcatattgggaaagatggcaaagcttttgcaaatataaacacacctgttttgtttttcttaagttcaatgtacttttgtagaattttgtaaaataaatgtgttcgtatcataatttagaatttatagccaaggatcctcaaaacagaatttcatcttaggataacgcttgatatatctaagaaaaagtccaataacagagaagaaatgtctcatcagttttagtgttttcgatattagggaaaggtaatataaaaacaggtaaaatgtataaaaacagacctgatcaacatcataggagataaatattcattatatagcataggatattattacttgaatgttctcagggaggcagcaagtcaggaggcctaggttctagtcctagttccatcatttaccaactgtgtgaccttacttcacctcttagccttgttctcctcactagtagtaggaaagtaacacctaccctgcctacctcacagggctgttgtgagggttcaattggtatatgtgaaaattctttcaaaattgtaaaatactatatgattataagga

SEQ ID NO: 14870 - DNA, 819 bp, Macaca Fascicularis
  misc_feature (1)...(819): n = A,T,C or G
ggacagacggcacaggggatggaaactccatcaggaagtgctcccctgggcagaggcgcccactgggtgctgtgggctcaggaggggatggggcaggagctggtgccaactaggaccagagccccacagccatacagcccattggtgacaaggtcctgagaacacagtgacttgggacgcctggcccctccaacgacctcgactccacccagcccagtcgttggccatcagcgacgctctccgccccccgtcggatcccatgtgtgccatgtttatcatcagtgttttgtatttttgtactgagtatcagagcactttacaaaagctgactgtacattcctgttctgttnnnnnnnnnacattcccagaccctcgcaccctcctgagccggcatgtgccggtccagccctccgagatgccacaattccttggatgggggagaagttcaaggaatttctgctcggccactcggtgggaaccctgcgtccccgccacatggccgaggggtctcagttgtgctaggcatggggcggcggcagtgacagcccttccctcaccagtgcccctcggccactcttgggttggagcccgattttatttgtaaagttgacagtcgagcacatgttcgtattttcgtgggatctgcacacgtctttgtcagtcgtgatcgtgatcttagtcacctgctaattatgtttacgatgattacaacgtttcctcaccgcgggatatttctgacctgctttagaannnnnnnnnnnnnnnnnnnnntaaaagtgtccaagatgaaaaaaaaaaaaaaaaaaaaaaaaaaaaagg

SEQ ID NO: 14871 - DNA, 751 bp, Macaca Fascicularis
  misc_feature (1)...(751): n = A,T,C or G
cnnnnnnnnnnnnnnnnnnnnnnnnnttcagaactggatgaaaagcatcaaggagaatgcctcggctggggtggaacgcctcttgctagggaacaaatgtgacatggaggccaagaggaaggtgcagaaggagcaggccgataagttggctcgagagcacgggnnnnnnnnnnnnnnnnnnnnnnnnaaatccagtatgaatgtggatgaggcttttagctccctggcccgggacatcttgctcaagtcaggaggccggagatcaggaaacggcaacaagcctcccagtactgacctgaaaacttgcgacaagaagaacaccaacaagtgctccctgggctgaggaccctttctcgcctccccaccctggaagctgaacctgagggagacggggcaaagggactgagcaggggagaaatagcagaggggcttggagggacacataggtagatggtaaagagaatgaggaataaaaggagaagagaaaagggaaaagcagaaaggaaaagaaggaagagagaggagggagaagggagaggaaccgattgaggaagtgaaagaaggtaaggaggtaagaagagggaggaggaaaggaaggggagatgnnnnnnnnnnnnnnnnnnnnnnnnnnnnnnnnnnnnnnnnntaaatgtaaatacactgatttattctgttactagatcnnnnnnnnnnnnnnnnnnnagggctagctcggcactacactagcagatttgctcctgttctgtcactt

SEQ ID NO: 14872 - DNA, 700 bp, Macaca Fascicularis
cttggtagcctttgccattttgaatttagagtccattttgtggctgactattctcttgagtttatgttggagaattaacattcgctgactcgaatgtagagaactctgaatgtattaaggatatgttttgagtcctcacaggtgaccttactgagggaaagcatggcagagaagaaatgcagtctgcactttttatgtactttttaagtgtccgtaagtgaaaggtttcgcttataaagcatgaattttaatatctagtcattaaactgcacaagtgcaaatacaagggcaggaaaggataatcacttagctttggagtaagagggtaagagaggcccagaagcctttaagtgttttgccattactaagttacctgggtatgtagcgactggttcgtggttaggtgtaaatgttacttgcttgttcgattgcttcaaaacatgctaattccaaagccactttaaaagtctatagtggaaaatatagatagggtgaaagatataatttattgatttttaaagctgtttataagccgtcccacgtataaaatgaaacattttaccttctctctttataatgagatggccacttgttaaatcatgaaaacatccagaatccaagtgccacttaaactttgaagcacatagttaaatttgatagaaaagtaaaccaggattaaaagttcttacaaatataatag

SEQ ID NO: 14873 - DNA, 774 bp, Macaca Fascicularis
  misc_feature (1)...(774): n = A,T,C or G
atcagggtacccagaccctccaannnnntgtcctgtggaaaaaaaacagatgatggatgtctagaaannnnnnnnnnnnnnnnnnnnnnnnnnnnnnnnnnnnnnnnnnnnnnnnnnnnnnnnnnnnnnnaacatgactatccaggcttgggcaagtggaacaagaaactcctttatgagaagatgaagggaggagagagacgaaagcggaggagtgtcaatccatatctacaaggacagagactggataatgttgtggcaaagaagtctgtcccccatttttcagatgaggataaggacccagagtaaagagaannnnnnnnnngaaaacccacattacctgttaggcctcagcatggcttatgtgcacgtgttaatggagcccctgtgaatgacagcatgtttcttacatagataattatggatacaaagaagttgtatgttgatagtgtattgtcttcacaccgatgactctgctttctgctaaattagaataagagcttttttgttttttgggtttttaaaatgtgaatctgcaatgatcataaaaaaattaaaatgtaaatgtcaacaataaaaagcaagactatgaaaggctcagatttcttgcagtttaaaatggtgtctgaggtcatactatgttggccaagtctgtaaaaannnnnnnnnnnnnnnnnnnnnnnnnnnnnnnnnnnnnnntgggcattgttatacaccaataaagaaggctgtactcaagaggaggagctgacacatttcacnnggctgcgtcta

SEQ ID NO: 14874 - DNA, 734 bp, Macaca Fascicularis
  misc_feature (1)...(734): n = A,T,C or G
gcagtgagatnnnnnnnnnnnnnnnnnnnnannnnnnnnnnnnnnnnnnnnnnnnnncagccgccttgtggggacagaatggagaaatcttgagacagccaagaaagcagaatatgaaggtgtgatgaaccaaggagtggcccctatggtagggactccagcaccaggnnnnnnnnnnnatggacaacaggtgggagttttggggcctccagggcagcaagcaccacctccatatcccggcccacatccagctggaccccnnnnnnnnnnnnnnnnnnnaacacccatgtttgtagctcccccaccaaagacccagcggcttcttcactnnnnnnnnnnnnnnnnnnnnattgaaggactcnnnnnnnnnnnnnnnnnnnnnnnnnnnnnnnnncagacactggcagctcgaagannnnnnnnnnnnnnnnnnnnnnnnnnnnnnngccgcctaccctctcactggctgaaaagcaaaggggcccacaccaccatggcagatgccctctggcgccttcgagatttgatgctccgggacacccnnnnnnnnnnnnnnnnnnnnnnnnnnnnnnnnnnnnnnnnnnnnnnnnnnnnnnnttttatatagaannnnnnnnnnnnnnnnnnnnnnagccattttagttactgggggtggggggaaggaacaaaggaggataatttttattgcattttactgtacatcacaaggccatttttatataaggacactttta

SEQ ID NO: 14875 - DNA, 703 bp, Macaca Fascicularis
  misc_feature (1)...(703): n = A,T,C or G
taagaggcgttgcttgttcaaattaagctcagtnnnnnnnnnnnnnnnnnnnnnnnnnnnnnnnnnnnnnnnnnnnnnaggnnnnnnnnnnnnnnnnaagccctgtctccattcccccaacccagctagctgatcacaccaacagatcctcatcagcaaagcgttcggctttgtcctgcccaagtgtnnnnnnnnnnnngtgctgcccttgtagcttccccagaccccacctcactgcagtccatctgaacaacctgagctcccgggcaggggtnnnnnnnnnnnnnnnnnnnnnnnnnnnnnnnnnnnnnnnnnnnnnnnnnnnngttctccagggctgcagtctctccaggtgtacagctgctgtccctgccctgccctgtcctttccttgcacagtcnnnnnnnnnnnnnnnnnngtgccttctgttcaggccctgctttggtgggaaggcggagccctgacccttggacagctgtccttgactctgtgctgctgccttccgcagagaggcacctaagctgatgaaagnnnnnnnnnnnnnnnnccactcctcctcgaggtgggagtgggagnnnnnnnnnnntggtcagtgtcctgctttctgggcagggacttggctttttgttccaacagtggccttctccgggcttcataattctttgtaatatgttgaagttaatttgaactgactgattttgtt

SEQ ID NO: 14876 - DNA, 736 bp, Macaca Fascicularis
  misc_feature (1)...(736): n = A,T,C or G
tggatatgggcaacccaggaaccctttcgcccaccaaaccnnnnnnnnnnnnngtnnnngtattctagcaataatccccgaaggaggcctcttcacagtagtgccatggaggtacagacaaagaaagttcgaaaagttcctccaggtttgccatcttcagnnnnnnnnnnnnnnnnnnnnnnnnnnnnnnnnnntagggactcaccaggctatccttcctccaaaccagaaaccagcactttccctagctccttcttcatgnnnnnnnnnnnnnnnnnnnntgacccttggagctcctccagtgggatgaatcagcctggctatgcaggaatgttgggcaactcttctcatattccacagtccagcagctactgtagcctgcatccacatgaacgtttgagctatccatcacactcctcagcagacatcaattccagtcttcctccgatgtccactttccatcgtagtggcacaaaccattacagcacctcttcgtgtacgcctcctgccaacgggacagacagtataatggcaaatagaggaagcggggcagccggcagnnnnnnnnnnnnngatgctctgggnnnnnnnnnnnnnnnnatctattctccagatcacactaacaacagcttttcatcaaacccttcaactcctgttggctctcctccgtctctctcagcaggcacagctgtttggtctnnnaatggaggnnnggcctcatcgtctcctaattatg

SEQ ID NO: 14877 - DNA, 730 bp, Macaca Fascicularis
cgaaaatgctgatgtccagaagccacgccggagcttggaagtcatacctgaaaaagcgaatgatgaaactggagaatgaggaaacttacaataaatcattatggagtttataactctaggaccaattatagtcagatgggacatttgctttgcactcgctaatgagaataatattcgggattttaaagcacaactggaatagctaattacagtctattaaaactgtgaatgtatgtagcaatcctgcgtgtgaaggcaaataaactctatagcaagcaattatattgctggccaaaatatgctatatttgtatacaaagacattctaactcagttccagtatgaagaacagattattcactctagctccattgagaaacattttcctaagtgaaaacaatttcttaagatggaaatggattggattgtcaaattactatttattggagaaaaaacttgatctacgcgtttttacttacgtggggttgccagagtatctgggttctagatgattttggtggcatgcttgctgagccataattactaaggagaatgtaagtggacaggttccctgaatccccggggtccttggagagccatcgaggagaatgtgcaattggactgaagctccctggctgaagacacatgccgaatcagcacatgggtagagatgatgtaaaagcaacaaatctggaaacaatacattgtaaatagtttttcattgtatgaag

SEQ ID NO: 14878 - DNA, 753 bp, Macaca Fascicularis
  misc_feature (1)...(753): n = A,T,C or G
ccacatttatgtatcaggagaccaaaaagaaataatatcttatgatgtaaaagatgctattgggataagtttattaaagaaaagtggtattgaggtgaggctaatctcagaaagggcctgttcaaagcagacgctctcttctttaaaactggattgcaaaatggaagtcagtatatcagacaagctagcagttgtagatgaatggagaaaagaaatgggcctgtgctggaaagaagtggcatatcttggaaatgaagtgtctgatgaagagtgcttgaagagagtgggcctaagtggcgctcctgctgacgcctgttccactgcccagaaggctgttggatacatttgcaaatgtaatggtggccgtggtgccatccgagaatttgcagagcacattttcctactaatggaaaaggttaataattcatgccaaaaatagaaattagtgtaatattgagaaaaaaatnnnnnnnnnnnnnnnnnnnnnnnnnnntttatttttgattaagtaaaatttcatgttgtaatgttacagagagtgtgatttggtttgtgatatatatattgtgctctacttttctctttatgcaagataattatttagagactgattatagtctttctcagatttttagtaaatgcaagtaagaacatcatcaaaattcactttgtattgtaccctgtaaaactgtgtttgtgtgctttcaaagatgtcgggattttatttatctggggacagtgtgtatggtaaga

SEQ ID NO: 14879 - DNA, 719 bp, Macaca Fascicularis
  misc_feature (1)...(719): n = A,T,C or G
ggaatggcgtgctgggcagannnnncagccnnnngagatgtgtagccaccaacttaannnnnnnnnnnnnnnnnnnnnnnnnnnnnnnnnncagtcacgctgaggcccccggggaaaccaggaggtctccacccctcaggaggcctggccaggacccagcctttggttttaccttagcatgaagccctccatctggatggcatcgaacctcttgtttgggttttgttgataaggttattatcagcaaaacccannnnnnnnnnnnnnnnnnnnnnnnnnnnnnnnnnnnnnnnnnnnnnngacttctgtctaccctgtgtgtttctgtctgacaccacaaaggcaggagcaggctggggaagtggtcagaacacttgnnnnnnnnnncactgttctagaagaggacaagaaaatagggtccttaccgtcagcagggtggaggagcacctgacatccttcggatctgaaagagtaaacatgagtccaggctgagcaggtccaccaccannnnnnnnnnnnnnnnnnnnnnnnnnnccagggcagggcaacacggnnnnnnnnnnnnnnnnnnnngaccgtatgcgggattcacgttaaatgagtggatttgagctgctcgtgccacaaaaacaagagcgggcagctgtgnnnnnnnnnnnnnnnnttaacttgcttcgctttactagtgacctttttactatctctatgtatctgtaaca

SEQ ID NO: 14880 - DNA, 749 bp, Macaca Fascicularis
  misc_feature (1)...(749): n = A,T,C or G
gggcacgaaggccaggccagggcctgggcctcttgtgctaagagggcagggggcctatggtgctattgctttaggggcccaccaggggcaggggcctgctcccagctgccacgctctattatatggagcgaggtgttggggaaggnnnnnnnnnnnnnnnnnnnnnnnnnnnnnnaggagaagagactgaggggccatgacctctcctgaggcccccagcctgagaccgtgtaactccaggtagaagttgagctggtccctcagctggggnnnnnnnnnnnnnngtggaggggagggccttcacgcccacccacaccnnnnnnnnnnnnnnnnntagtccatcagcacaatgaagaaggagacttggagaagaggaagagtaacagtattgcttcctgttcaggctgtatccagcttttcccctggggctgcaggaccttccctacctcacataccccctgctccccgtggtagagacacctggtgatcggaagtgtccggtttgctttgctgcccatttgcctcttgagtgggcagccctgggcttgggcccctccctctgtccctcagtgttggctctgcagaagctctggggttcccttcaagtgcacaaggggctaggctgctgtccctgagtcctccattctgtactggggggctggctaggacctggggctgtggcctctcannnggcagcctctccatggcaggcatccctgccttgggctgnnnnnncccagnnnnntgac

SEQ ID NO: 14881 - DNA, 707 bp, Macaca Fascicularis
  misc_feature (1)...(707): n = A,T,C or G
cctgattacagtcacatgatcaagaacaactaataaaggagattcaggagcatgttaaaaaaactacagcaccttacaaatatcccagaaaggtaggcatcctaattataacaaatatttgctcagtgttatggaaaatttcaactgtttatttttacattttaatgaatattttcttcacacatgctacaccacatgtcccaaactgaactgatgacatatgggtaaaaatcagaatctttgagattaaaatgaaaccctgaacctattttgtttgatcctttggcttactggacttgcagtaaatacttaatatcaagacaagtttcctaacaatacccttttccctattttggttttacccaaaacccattccaaagactattctaattcttccacctagaattcataatcaaactgctatataattggctttatgtaaagataannnnnnnnnnnnnaattttcnnnnnnnnnnnnnnnnnnnnnnnnnnnnnnnnnnnagctgccaaagactatcagtgggaagacaaaaagaaatgaactgagaaagaaagaatggaagacaatttaaatttgtttcattaattaccatatctataaaacaaacatagtatctgtcaatctctagaaaccacaggatgatggagacgtgataaaaactgtggtagtatgcttagaaactgttgattttttaaaatatcttg

SEQ ID NO: 14882 - DNA, 769 bp, Macaca Fascicularis
  misc_feature (1)...(769): n = A,T,C or G
aaagatcatgatnctccatgacaaaaccannnctgtcctttcggcaaggctgcatacttccaggcagacgcaccttcacgagaatgctcagctgggcggctccacgctcatccagtgggcctaggttctgnnnnnnnnnnnnacaaaaactgtgacagagatctaggatttcattcaggcagtgaaacacctacccaggaaacagagttggcattaggaaaannnnnnnnnnnnnnnnatgaaatnnnnnnnnnnnnnnnnnnnnnnnnnnnnnnnntgacctcccaaatctgagaggatagacactgtcacttgcaaggcctgccagcccctcagacatacaatatgtgtaaaacaaacacatcctttcctgcgtacgcgagtattactctctcagccccgcaccaaacctccattctagccacatttaactcttcatttcttagacccgcagagtgtgttcctgcctctgagctgtgagtgttgttctctttgcctgggatgctcttctttttaataccagttcaagtcccactnnnnnnnnnnnnnnnnnnnnnnnnnnnnnnagcctttagtgaaccccgtttcttgcttctttattatctgtactgttgtccacttggcaattgttcaggcctctgtgttgttaatgatttctgtatgtatatatatatgtcttgtttttccaactagattgtgagctccttaagggcagagccatgaattatacctctttgtatccccagtgccttgcatacagaagcactca

SEQ ID NO: 14883 - DNA, 724 bp, Macaca Fascicularis
  misc_feature (1)...(724): n = A,T,C or G
gaacatgttatgatataggagacttaatttataataatgagagcatttttttttaaattttactaaaaccatttttgtagtcaactctcttttcttatttgtgtgattggaacatagaaaaatatttactagttgaagttattatcagtttttaatttagttcttaaactcatttgacttctaataatttctgttataaattgccagcattttaatgaaaatctaatgatgtaataggcattttctttatttgaacctacctcttttattttctgaaccaaagagaaagatggactggtgtttgtgaaacatttttttaaaatgtaatttcatttatattagttatgtttgataaatatcttagtatttttataatatgataagcctgggattctattttaagggttatttgtacttttgagtaatatataaagtgacaatattaaggtacatgatcagctctttctaattttactcataaaaattatggaaatgaataattttgctaacttttgaaatttcaaacttctggaagatatgaaaatattcattgttcattatgaatttaaattgttccctatttaacatttgtaaggtatgaatgtgatttgtctgtacatcttgtatcttttccaaaaaataattctgtatcttttggataaaagccaagagttgaagatagtatatttctnnnnnnnnnnnnnnnntacttacagtttctatc

SEQ ID NO: 14884 - DNA, 1193 bp, Macaca Fascicularis
  misc_feature (1)...(1193): n = A,T,C or G
gccgcagatgggccggctgaagagagtggacctggagaagaatcagatcacagctnnnggggcgtggctcctggctnnnnnnnnnnnnnnnnnnnnnnnnntccaagtcatccgnnnctggaataaccccattccctgtgacatgnnnnnnnnnnnnnnnnnnnnnnnnnnnnnnnnnnnnnnnnnnnnnnnnnnnnnnnnnnnnnnggccccttgggnnnnnnnnnnnnnnnctcaagacctttgaaatccagccaagtgatgcacccaagtgatccacccttcacccactgggataaatgactcaggagaaaagnnnnnnnnnnnnnnnnnnnnnnntcnacnnaggaggaaggatacgtgtgtcctgctgcagtcctcagggagaacttttctgggaacgagaagccggatctggccaaaggagtannnnnntttacatgtaatatgtgtgatcaactggggacatgcggcacacaatgagggtgtcatgataatgcatgacacgtaaggttgtatgaggcagcatgaccccttgacatgtggtgttacatgaaacnnnnnnnnnnnnnnnnnnnnnnnnnnnnnnnnnnnnnnnccaagtggcaggatacatgattgtggatccatataggacacatgacaaatgtccatgccacaggactcgtggctggccagatgacctcaggctggcccaagatctaatttattaatttttgaagcaaatacatatttatagactgcatgtgtggagcagctaggtcaggaaaagtcttctgcgcgagctgggaggggagagtgtccatgcactgaccagtccaggagcccaagggccaggactctgggacaagctggggacttagccatgaagtcccctcctgcctcattcctcagcctacccatctgtaaacttgatgacctctcccttacttacatactagcttccaaggacaggtggaggtagggccagcctggccttgggagtggagaagcccagtctgtcccgtgtaagggacaaagccaggtctaacagtactgggtggggggcactgccaagacaataggctaggctagtgggtccagctattaccttggtgggattcaggtgagcctccaggcactccacatgttacccagtgttcttgttacttccaaggagaaccaagaatggttctgtcacactcgaagccaag

SEQ ID NO: 14885 - DNA, 769 bp, Macaca Fascicularis
  misc_feature (1)...(769): n = A,T,C or G
tcaacagacagctttnnncaacagccaatggtgcagttttgcagcattggacaaacaagnnnnnnnnnannnnnttttggacaagttgcagctgctggagtatctagtaatccttttatgactggtgcaccaacaggacaatttccaacaggaagctcatcaaccaatcctttcttatagccttatatagacaatttactggaacgaacttttatgtggtcacattacatctctccacctcttgcactgttgtcttgtttcactgatcttagctttaaacacaagannnnnnnnnnnnnnnnnnnnnnnnngtattaaacaccaggtaatatgtgcaaaaccgagggctccagtaacaccttttaacctgtgaattggcagaaaagggtagnnnnnnnnnnnnnnnnnnnnnnnnnnnnnnnnnnnnnatagcagataccacattcattatgctgcagtactgtatatatttttcttagaaattagctatttgtgcatatcagtatttgtaactttaacacattgttatgtgagaaatgttactggggaaatagatcagccacttttaaggtgctgtcatatatcttggaatgaatgacctaaaatcgttttaaccattgctactggaaagttacagagtcaaaattggaaggttttattcattcttgaatttttcctttctaaagagctcttctatttatacatgcctaaattcttttaaaatgtagagggatacctgtctgcataataaagctgatcatgttttgct

SEQ ID NO: 14886 - DNA, 746 bp, Macaca Fascicularis
  misc_feature (1)...(746): n = A,T,C or G
aaatgacatattatatnntttnnnngcagtacgtgcatagtcaatcccagaaatatcacagnnnnnnnnnnnnnnnggattctacaattaattttatgaaacctaactgtgacagctgtgatttgacacatgttttaattgctcaggttaaatgaaatagttttctggagtcttcaaaaacaaattgcactgataaaaaaccaaaaaactatgttttaaatgcttgaagaccgatacactcaaccatctatgttcatgaactcttaatttcatggcaggccataattctacttatctgagaagcaaattcctgtnnnnnnnnnnnnactattttttctgagattaatgtactcttggagccagctactgtcattactgatcacatctgtgtgaaaccaaagccccgtggttgcccatgagaagtgtcctagttcattttcacccaaatgaagtgtgaatgtgatgttnnnnnnnnnnnnnnnnnctcagggattcattttgtgtcttagttttatatgtgtccttattttaaatatgcctgcttcacgtctctatgttgggaagtccatatttgtctgcttttcttgcagcatcgtttccttacaataatgtccagtggacaaaatgacaattaatgtttttctgatacagttactttggctgcagtaacaatacagtgcttgttattggctaatacaggcaggcagaatactactttgtaacttttaaagtcttacttaaacttt

SEQ ID NO: 14887 - DNA, 600 bp, Macaca Fascicularis
  misc_feature (1)...(600): n = A,T,C or G
gtgggcaggaagctgggcagagctggcctggctctgagttgccactgggggaaaggcagccttctgtctgccaatctgggtaggcccagtggccgagctctcatgggagccccctccccacttttttttaaccggcccccattgtttctggtcgtgtggactgatacgggaactgaaggccagccaggggaggggtcggccaaagtnnnnnnnnnnnnnnncagctccagagctgtctttgccccctttgtgccccgggggacggctgggtctacaggctgggcaggggtcaggcagggagtccagggtgcctggaagagggggccannnnnnnnnnnnnnnnccctggggtcctgccttccaaccacggcgttgcaaggaggacggggctctgagggggcagctttggagggaggccgttttccagggtgggtgggagtgggctgagggctcatccccactgaccctggnnnnnnnnnnnnnngatgtttgcccgtgtgcgtgtgtctcctgggtgtagnnnnnnnnnnnnnnnnnnnnnnnnnnngtaacaaccttttttttaaattgttttttatacaaaaactcacaatctgaaaa

SEQ ID NO: 14888 - DNA, 770 bp, Macaca Fascicularis
  misc_feature (1)...(770): n = A,T,C or G
agtgccgagacnnnnnggagcactnnnacaccagctccaatgccctgtcattatggtcacattgccttgtccnnnntnggcctgctgtgaacgggatccaggtggggaaaggggtcaagacagggagcgatgctgagttcttgcttccgtccttgggccccacttcagctgtccttgtccagagagtaggacctgctgggaaggagatgagcctggggccattaaggaaccttccttgtcccctgggaagtagcagctgaaagatagcgagtgcctggtccggaggcctctctgaatggacaggggtttgtccttgcaggacagggtgcaggcagatgacctggtgaagatgcttttcagcccagaagagatggacctctcccaggagcagcccctggatgcccagcagggcccccctgaacctgcacaagagtctctctcaggcagtgaatcaaagcccaaggatgagctatgacagcgtccaggtcagatagatgggtgactagacccacggagaggaactctcccgcgctctgagctggccagtccctcagggctgtggagcagtgagcctacgtctgccactcagccgaggggaccctgctcacagccttctacatggtgctactgctcttggagtggacatgaccagacaccgcaccccctggacctggctgagggctcaggacacaggcccagacaccccaaggggcctccacaggctgctgcatgacagcaatacagtatttaannnnnnnnnnnnnnnncca

SEQ ID NO: 14889 - DNA, 804 bp, Macaca Fascicularis
  misc_feature (1)...(804): n = A,T,C or G
aggcacagaaaatttgangaannnnnnnnnnnnnnnnnnnnnnnnnnnnnnnnnnnnnnnnnnnnnnnnnnnnnnnnnnnnnnnnnnntacagatgacatannnnnnnnnnnnnnnnnnnnnnnnnngaggcctatggatttgtcaactattaagaaaaacatagaaaatggactgatccgaagcacagctgaatttcagcgtgacattatgctaatgtttcagaatgctgtaatgtacaatagctcagaccatgatgtctatcacatggcagtggagatgcagagagatgtcttggaacagatccagcaattcttggccacgcagttgattatgcaaacatccgagtctgggatcagtgctaaaagtcttcgagggagagattcnnnnnnnnnnnnnnatgcttcagagaaggacagtgtcccaatgggctctcctgccttccttctctctctctttgatggaggaaccaggggacgccgctgtgccattgaagcagatatgaagatgaaaaagtgaagcctcagagtaccctctttgagctgaacctaaaataaaagtaaacaagatagagcttgggcttgtgnnnnnnnnnnnnnnngcggaagttacagaagaggaggtacctgggccacacaacnnnnnnnnnnnnnnnnnnnnnnnagatttggnnnnnnnnnnnnnnnngttttagggcagaaaccatgggctttgttaatgtcctaatgtgtagctagcagattatagctagtttgtattgtcttgtcaattgtacagacttnaaaaaaaaaaaaaaaaaacctgt

SEQ ID NO: 14890 - DNA, 729 bp, Macaca Fascicularis
  misc_feature (1)...(729): n = A,T,C or G
cagccactggnngccagaaactcattgaagtggacgatgaacgcaaacttcgtacttttatgagaagcgtatggccacagaagttgctgctgacnnnnnnngtgaagaatggaagggttatgtggtccgaatcagtggtgggaacgacaaacaaggtttccccatgaagcagggtgtcttgacccatggccgtgtccgcctgctactgagtaaggggcattcctgttacagaccaaggagaacgggagaaagaaagagaaaatcagttcgtggttgcattgtggatgccaatctgagcnnnnnnnnnnnnnnnnnnnnnnnnnnnnnnnngaaggatattcctggactgactgatactacagttcctcgccgcctgggccccaaaagagctagcagaatccgcaaacttttcaatctctctaaagaagannnnctcccccaatatgttgaaagaaaccccttaaacaaagaaggtaagaaacctaggaccaaagcacccaagannnnnnnnnnnnnnnnnnnnnnnnnnntgcagcacaaacggcggcgtattgctctgaagaagnnnnnnnnnnngaaaaacaaggaagannnnnnnnnnnnnnntaaacttttggccaaaagaatgaaggaggctaaggagaagcgccaggaacaaattgcaaagagacgcagactttcctctctgcgagcttctacttctaagtctgaatccagtcagaaataaga

SEQ ID NO: 14891 - DNA, 637 bp, Macaca Fascicularis
aacttttgaaacactgcatgtccaacaaaatttattttgtgtgtgaatgtaagtttttattgagggtactgtttttcaaccctaatctcttgaccaagaatgaaactatttacaaattaagatgccaacagttggggcatgagattttccctgcattagaaggttgttgagacctgaagcctgggaaggtgtattgaaaactatacaggagctcgttgtgaagaggtttttctcccaagctccagcatccaaactaaaaataacctgtttgaagctttcatggcgttggcagtcctaataacacttatcattggagccttctacttcctttgcagtgtcaggaagggccactttcagagagccagttcagtccagtatgatgtcagcctggtagagacgagcagtaccagtgcccaccacagaaatggatgacctggagctgggggatgaggaggatgatccagactccaatcctgctgacccagagagtgactccactgacaagaggactgtccccatctgtggagaggcttgactgtcacagcatcctggctatgctcagagggttttgattttcctttccttttctccaagaagaaatgattttcaggagaatatcttctgatagattcatcat

SEQ ID NO: 14892 - DNA, 716 bp, Macaca Fascicularis
  misc_feature (1)...(716): n = A,T,C or G
gaaatnnngtgaaatagattgcacagacnnnnngtgagtgattggtattggaggtgttcaagaaactgttcaaaaaagaacaaaaacacttccctcattattttatctcattttttgatgggaggaaaatttgaaacattattcttgttgttggtaatagcataatgacagtgggaggggggtacaaggggataagaaaaatgtcatgatttttttcgagtcctgccatttgtaacacttactctgttacctaaatttcatagttagatcatatccaatctacttattaaactgtgttctatttaccagtggagtttttctgcagtggttgtgtttcactgtaaggataatggagttcctctcctctgctttcctcagannnnnnnnnnnnnnnnnnnnnnnnnnnnnnnnnnnnnnnnnnnnnnnnnnnnnnnnnnnnnnnnnnnnnnnnnnnnnnnnnnnnnnnnnnnnnnnnnnnnnnnnnnnnnnnnncaccatctttttctctggataattatttcttacatcatgcttgattcctacattttgttgggtctcaacgttggctcacaaatgctgttaatatttattctgtattgataaaaagtctgtcttgccactacaagtaaatcccccatttaatattttcttctttagnnnnnnnnnnnnatttttgtgaaaatggttatgtttatttattacaatactgagtcata

SEQ ID NO: 14893 - DNA, 732 bp, Macaca Fascicularis
  misc_feature (1)...(732): n = A,T,C or G
ttcaggcctgaacaaaacaggctgcttgctgtgaggagctagatgacaccaagacacagacatatactcttcagcagctcctttcgcctctccttcctgcagggcgtgagttatggctggtcccaaaacccttgaataaactagctgagccattgcaaatgaaggtacagatggattgaaacataaaatcgtagcttttgatgtccttctgaagggtcagaatatgtaattatttgataaccaaggaagtcaagccagatggctaagtagtaactttccaatatgatttatccgtggtacttcacctggnnnnnnnnnnnnnnnnnnnnnnnnnnaactatcacattttacttgttaagtctctttcattctggcagtttaaagacacaactgtgggctttctgaggcaatgcccattgggcaaacttaggtttatgtgtttggtttttcagctacggaagccctgggtgggtgccccctggctggcctggctcttgggttcaagtctgtatgtctggagtgggttggggccccaaagctttgctgctattgatttgtccccgacagcaggcaaagcctcacattgccctcaattttccccctttcatttgaaggaccaatttttcacggtacttgtcttgatctttttcatagtgttcaaatctgtatttttgtatgtagaggaaaataattttctcaacactaatcgttaataactattatannaatcgt

SEQ ID NO: 14894 - DNA, 764 bp, Macaca Fascicularis
  misc_feature (1)...(764): n = A,T,C or G
aaggaccagcctcctaatagtgtagaaggtcttnnnnnnnnnnncaggtacacaacaaaacatttgaatgatgagactacctccaagcaaattaaatccatgctgcaannnnnnnnnnnnnnnnnnnnnnnnnnnnnnnnngaagacagtattctgcaatgactgagaatgcacagttttttagtgattgcaattactatctcatttattcttgcttttatttctttcctctgttcctcttccctcttttttaatcatgttcttgttcttaagacttcttttctgtgccaaaannnnnnnnnnnnnnnnctgaaggnnnnnnnnnnnnnnnnnnnnnnnnnnnnnnnnnnnnnnnnnnnnnnnnnnnnnnnnnnnnnnnnnnnnnnnnnnnnnnnnnnnnnnnnnnnnnnnnnnnnatgtggattttttttgaaactaatatttaatattnnnnnnnnnnnnnnnnnnnnnnnnctattctgctatttaaaaaccctcaatgactttattttctactgccgcctttttcatgtgcaaccaaaatgaaaatgtttaaattaactgtgttgtacaaatggtacccaacacaaactttttttaaattagtaatacttttgtttaaagttttaagtttgcattttgactttttttgtaaggatgtatgttgtgtgtttaacctttattaactaacgttaaaaactgtgatgtgtgcgtagaatattacgtatgcatgttcatgtctaaagaatggctgttgatgataa

SEQ ID NO: 14895 - DNA, 568 bp, Macaca Fascicularis
ccagagtaaggcgcatagagtgcccccacgacgcaaaggtttcaagtaagagaaaggcggcgcgaccgtctccacagatggctctcacttttcaggcaaatatgctctcaatggtggaagataagaggatagcaaggataatacagcagatcatgatcttgatatttttttgctcttccagacaaggaaagaaagaacacatgagaaacatctctgcaaaaagtattttgcagggagacaagtgcacacggacatggaagagggtatgaaggaagagagcaacagaaggaaaaaggagagggatatgggttttaggacccagaatgccaacagaaatgttatttttggtgagacattcaaaagttagatcaaaaggatcccagaggaggtttggggtggtcattctgcgctttagataacatcacgacagatatcccccattttttcttacagccagacactctcaaggagtgaaccaaatttttttggggggaacacctcaaatatgaaacacatagttacactgcattctgtgagagttaaaccctattcaaaaaatgcgcttttg

SEQ ID NO: 14896 - DNA, 682 bp, Macaca Fascicularis
  misc_feature (1)...(682): n = A,T,C or G
ggnnnnnnnnnnntaacggcttcggcggctnnnnnnnnnnnnnnnnnnnnnagtcctcttacgggcccatgaagagcggcggcggcggcggaggcagcagctggggcggtcgcagtaatagtggaccttacagaggcggctatggaggtgggggtggctatggagggagctccttctaaaagaaaatttaaaatgcctgggagtggctcttggggtagctcttttcaaaaacccaagtggggtcaactcctaagccccaccccctcacacccacaccaccgccttccctgttttgcccttgggggagccacttctaaggctgcttacccttgggggtgttcctctatttgcctgccacctctcttgtctctccctctgaagatggactcggccccacatacacatttttgtgttacagtcattgatggactctatttttttattattacttggaccttggtcgtttttatactagcaaaatgtcttgttttaatttgtgttttttggggggagggagggagtgaacttgctgattctgnnnnnnnnnnnnnnnnnnggttggggtggggggtagtttactttgttgtaaggacttgataacctggctacagcgttttctatgaaatctacttggatcccatgcctgaaatttggaagcatatgtacaaaaatcatttttacg

SEQ ID NO: 14897 - DNA, 710 bp, Macaca Fascicularis
  misc_feature (1)...(710): n = A,T,C or G
ctataaaaatacccctgagaaagtgatgcctcaaggtcttgtcatctctnnngctatgagaatgctttacatgattgagcaagtgcatgactgtgaaatcattcatggagacattaannnnnnnnnnnnnnnacttggaaacggatttttggaacaggatgatgaagatgatttatnnnnnnnnnnnnnnnngattgacctgggtcagagtatagatatgaaactttttccaaaaggaactatattcacagcaaagtgtgaaacatctggttttcagtgtgttgagatgctcagcaacaaaccatggaactaccagattgattactttggggttgctgcaacagtatattgcatgctctttggcacttacatgaaagtgaagaacgaaggaggcgagtgtaagcctgaaggtctttttagaaggcttcctcatttggatatgtggaatgaattttttnnnnnnnnnnnnnnnnttccagatagtcatcatcttccatctttggatttgttaaggcaaaagctgaagaaagtatttcaacaacactatactaacaannnnnnnnnnnnnnntaataggctaattgtactgctcttagaatataagcgttcacgaaaataaaatttgaatatagacaatccttaaaaatcacactgtaaatacgaatctgctcactttaaaccttgatttttttcatttgctgtttatgtaa

SEQ ID NO: 14898 - DNA, 779 bp, Macaca Fascicularis
  misc_feature (1)...(779): n = A,T,C or G
cgtaactntggatagaataaaattgataaaagctgaaagaaccaccacaagggagagtcctttttgaaatattaaagacataatgctgtctaataaaaaacgaaatcaaagaaaaactacactacagtgattgcagacttaatgttggctaaccatgcatcttccctagaaatgcatttgaatttgatttactaatcttttatttaggaaatttacatttttacattagtgagattggtcttttgggctattgtactttttttttaagtggagtcttgctctatcacccaggctagagtgcagtggtgcaatctcggcccactgcaacctccgcctcctgggttcaagtgattctctgcctcagccttctgagtagctgnnnnnnnnnnnnnnnnnnnnnnnnnnnnnnnnnnnnnnnnnnnnnnnnnnnnnnnnnnnnnnnnnnnnnnnnnnnnnnnnnnnnnnnnnnnnnnnnnnnnnnnnnnnnnnnnnnnnnnnnnnnnnnnnnnnnnnnnnnnnnnnnnnnnnnnnttccatgcccagcctggttattgtatgttgacattgggattttgctagctctctaaataggataactgtatatctttttctgtgcattaagctattataacatgggaatgatttgttcatgaaaggttgaaagtctgtacttgtagaacttttgcgttcacagtgctttctggaaataatttctttgtaactgtcagtttcttttgtgactattatgttatctatttttaaatttaagcaacttaaat

SEQ ID NO: 14899 - DNA, 759 bp, Macaca Fascicularis
  misc_feature (1)...(759): n = A,T,C or G
tactgcaggaggggcccgtgggctccaccnngagctcagcctggacagcgaccagagtagtggctcaaccgcatccggctcccgccaggctgcccgccgcagcaccagnnnnnnnnnnnnnnnnnnnnnnnnnnctgagagtgagaacaggtcctacgagggcactctgtacaagaagggggccttcatgaagccttggaaggcccgctggttcgtgttggacaagaccaagcaccaggtgagttactatgaccaccgtgtggacacagagtgcaagggtgtcatcgacctggcggaggtggaggnngtggcacatggcacgcccaccatgggtgcccctaagactgtggacgagaaggccttctttgacgtgaagacaacgcgtcgcgtttacaacttctgtgcccaggacgtgccctcggcccagcagtgggtggaccgnnnnnnnnnnnnnnnntcggatgcctgagcctcccggccctgcccggctgctctgcttccagtcgttaccgaccactaggggtgggcagggccgccccggccatgtttacagccccggccctcgacagtattgaggccccgagcccccagcacttgtgtgtacagcccccgtccctgccccgccccgcccgnnnnnnnnnnnnnnnnnnnnnnnnnnnnnnnnnnnnccgtgccgggaggtggccaaggtacagcccgcannnggnnnntgtaaatagtccagccagcggctgcaggcgagtttctagaaccagagtc

SEQ ID NO: 14900 - DNA, 745 bp, Macaca Fascicularis
  misc_feature (1)...(745): n = A,T,C or G
ccagatgacgcgcnntgnggctgagttcgtgcggcggnnnnnnnnnnnnnnnnnnnnnnnnnnnnnnnnnnnnnnnnnnattccacccgtggaagactttcctgtctacagtgcctcccaggcctctgtgctgcagaatcttcgcacagccatgcggagacagatgcgtcggcacgcttcccgcagggggccctcccgccgccgcctcggccgcctctggaaccggctctttcaccggccgcgggtgccccgaggccagatcccactgctgaccgcagcacgcccctcacagaccgtgctgggtgatgggttcctccagcctgctccaggggctgcccccgaccccccagcaccgctcacggacacaggcagccccagggtggccggagatgggccccccagtgcccccagccatgcaccggaggtgggaccttcagggccacccttgccatcaggcctgcgagacccagagtgcaggcctgtggacaaggacagaaaggtctgcagggagccactggcagacggtccagctcctgtggatgcacctcgggagccctgctcagcccaggacccgcacccccaggcctccactgccagcagcaccctgggcccccactcgccagagccactgggggtctgcaggagccccccgcccccttgctccccaannnnnnnnnnnnnnnnngacgaggccctgttggtctgtnnnnnnnnnnngttcgctggtgaccgccacagccccgct

SEQ ID NO: 14901 - DNA, 719 bp, Macaca Fascicularis
  misc_feature (1)...(719): n = A,T,C or G
gcgcacatgtnnnnnancngtctccccaggatccctcntgaaaggggtctnnnncaccctcatggttttctatgccaccatcggtcacccattgatcagcccactctgaaccccctggctctccagcctgtcccagtctcagcagggatgtcctccaggtgacagagggtggcaaggtgnnnnnnnnnnnnnnnnnnnnnnnnnnnnnngcccatgtggtggtgtgatgggtgtgtgcacatatgcctcaggtgtgcttttgggactgcatggatgtgagtgtgctcaaacgtgtatcatttttcaaaaagaagttacacagactgagaaggacaagacctgtttccctgagattttcctaggtggagaggaaagcaagtctgcagttccttgctaatttgagctacttagagtgtggtctccccaccaattccagttttgtggcctaggcctcannnnnnnnnnnnnnnnctctcatcttctaagccgccctgtgtctctgaccccttctcatttgcctagtatctctacccctgcctccctaattagctagggctggggtcnnnnnnnnnnnnnnnnnnnnnnnnnnnnnnnnnnggaggagagagactgcctcttcagagcaaggcccagctgggcagagtaaaaaagagaaatgtgagcatgagacgcccccagcccctagccccactccctgcctcctgaaannttcccaccca

SEQ ID NO: 14902 - DNA, 695 bp, Macaca Fascicularis
  misc_feature (1)...(695): n = A,T,C or G
atagcgcagnnngtgnnctnnnngatgcacncgntgagaacggctatgtgaagctaccaaacagatcatcnaanctgctcgcttcctcaagtcagaactggaaaatatcaaaggcatctttgtttttgggaatccccaattgtcagtcattgctctgggatcccgtgannnnnnnnnnnnnnnnnnatcaaacctgatgactgctaaggggtggaacttgaaccagttgcagttcccacccagtattcatttctgcattacattactacacgcccggaaannnnnnnnnnnnnnnntcctaaaggacattcgagaatctgtcactcaaatcatgaagaatcctaaagcaaagaccacaggaatgggtgccatttatggcatggcccnnnnnnnnnnnnnnnnnaatatnnnnnnnnnnnnnnnnnnnnnnnnnnnnnnnnncttgtacagcacggacactgtcannnnnnnnnnnnnnnnnnnnnnnnnnnnnnnnnnnngctgagtttggaccctttctagtctcaaggggcttccagccttcagaaggttcttgggtatgaaacaggccgtgcacaactttgacatctggtcttgctccatagannnnnnnnnnnnnnnnnnnnnnnnnnngcttgagcctcaggattcttgttcttcctcttgtcttccttttgtggtttttcatttgaaga

SEQ ID NO: 14903 - DNA, 737 bp, Macaca Fascicularis
  misc_feature (1)...(737): n = A,T,C or G
atgtcaagtcgcagctgctgtgnnanngactccacgaagtgtggatataagccagactttgttggatttgaaattccagacaagtttgttgtaggatatgcccttgactataatgaatacttcagggatttgaatcatgtttgtgtcattagtgaaactggaaaagcaaaatacaaagcctaagatgagagttcaannnnnnnnnnnnnnnnnnnnnnnnnnnnnnnnnnnnnnnnnnnnnnnntatcaatgttctagttctgtggccatctgcttagtagagctttttgcatgtatcttctaagaattttatctgttttgtactttagaaatgtcagttgctgcattcctaaactgtttatttgcactatgagcctatagactatcagttccctttgggtggattgttgtttaacttgtaaataaaaaaattctcttaaaccacaccactattgagtgaaacattgaactcgtatctgtaagaaataaagagaggatatattagttttttaattggtattttaatttttatatatgcaggaaagaacagaagtgattgaatattgttaattataccaccatgtgtttagaaaagtaagaagcagtcaattttcacatcaaagacagcatctaagaagttttgttgtgtcctggaattattttagtagtgtttcagtagtgttgactgtattttccaacttgttcagattattaccagtgaatctttgtcagcagtt

SEQ ID NO: 14904 - DNA, 755 bp, Macaca Fascicularis
  misc_feature (1)...(755): n = A,T,C or G
gggactgcttnnnnnncagagttgaagagtcgggacagggacagtatagcctgcaaaattttaggctattttatagcctaaagtatttactacttgtcttcttaaagaaaaagtttgccagctcctgatctagaccaagagggagatattgacannnnnnnnnnnnnnnnnnnnnnnnnnnnnnnnnnnnnacacctcctatgaagaaagtacttttccagcattgctaccatgagttctcagcaggaacttcccagcaatgataatgtagatgaaattaggcatatgacaagattcnnnnnnnnnnnnnnnnnnngttctccttgaacttcctccagctatgcagggattctcattaaagagctgatctgcatctgttcatgcattttagtagcttttaaatatgattttatgtgaagtgccatttctttattctactaaagagacacagcagaaataaagatcagaagcaaatgtaagcaaatctgttttattgttaacttcaattaggaacttgaaattgtgccacatgacttttnnnnnnnnnnnnnnnatcctagtgttttaattacctatgtgcagctattttaaatagcattttacttgaatatttatgttgtcattgtttcatgctatactttgtgggataaaacttgggtatgagtgtgctaaggaatttataaagttttgcttttttaaaatgtggacataactcgtttttnnnagtttttgactaattgtgtgtttcagtgtct

SEQ ID NO: 14905 - DNA, 738 bp, Macaca Fascicularis
  misc_feature (1)...(738): n = A,T,C or G
gcagcagccagnnnnnccccgctacannnctgcagttgagagagagaagctgggcccagccgggccgtgcctgctggcacagacgccttaacgctgtgtgtatgactgtgtgactgtgtgggagcctggactgacagataggccaagggctactctctggcatctccaggtgttttgtagcaaacagccacttagtgctttgtcnnnnnnnnnnnnnnncctcaggatggggaatagccaagaagggcagcctcagtgcagaggcaaggtcagaaagagacggcgcttcagagtttcctttccagacacccctccccgcactgtnnnnnnnnnnnnnnnnnnnncctggttcacaaagagcattaagaaagctgcagtggtctgagcaacatagctcagagggctgagcctcctggcctgcctgcctgcctgcccgcccaccctgggagtcccagtggtggggcccggagaacttctaaggggagagaacagctggagtttctgttgatgtgaggaaggcagctcttggcctcccactcccacacttctttgccnnnnnnnnnnnnnnnnnncaatttgagctacctgagaaggaggcagggcaggaagggcgagggcctgcctctgacctgccgtgtcctttgcaggaaggaggtaggcacctttatgagcttattctattccccacccacacccccaggcagggtggaaatgaaggacttttttaacctttgtttt

SEQ ID NO: 14906 - DNA, 768 bp, Macaca Fascicularis
  misc_feature (1)...(768): n = A,T,C or G
gctnnnnnnnnnnnnnnnggctctaccagtnnnggaggagaaggaccgcgcagnnttgtgccagctgtggcgggctatcannnngcgggacgacgccgccatgagggcgcacgcagccgcactgggggtgaaagactacctcctgttctccgagatgctcatgcagcgccccgtgcgcctggggcagctgtggggctcacacctactgagccgcgaggaggcagcctacatggtggacnnnnnnnnnnnnnncttcgagnnnnnnnnnnnnnnnnnnnnnnnnnnnnngcgacccatgctgctagtactgcgcaacatcaacaccgtgcgcgctatcaacgtggcccttggcgcccccgtggaccgctacttccttatggctaagagggctgtccgcggctggagccgcctggtgggcgccacgtaccggggtgtctacggcaccagtctcctgcgccatgccaaggttgtctgggagatgctcaagtttgaagtggcgctcaggctggagaccttggccatgcggctgactgccctcctggctcgtgctctggtgcgcctgagcctcgtgcccccagcggaggagctctaccagtacctggagacctagggtgcacggcccgacgaccacggcagccgcctggggcctgcggggccctttacgccttgagccgacggaggtggcggggctgaaggtgtggacgccccgagccccgtggnnnnnnnnnnnnnnnggctgtgaccgcagctgggccaggaggccgtgta

SEQ ID NO: 14907 - DNA, 764 bp, Macaca Fascicularis
  misc_feature (1)...(764): n = A,T,C or G
tatatttatcggagaccgactatgtgcaaagcagcgctaatacagggttccccaaggagcttccnngagcttttacctcacctccctccatttacattagggcctcctcccagggtgtgctcggtggcagtgtgggactgggggcatgggagttggtgagagcaggaggagaggtggggacagcaagcagccacagattggcatgaagnnnnnnnnnnnnnnnatccatgccatccatggcccccagactgactctgcacctggcccnnnnnnnnnnnnnnntgtctcaccgtgacctctggaacaactgggcatgggtcatggccatacatgacccttaagtgccactattcttggaagaccccctccagaagcatactagaagccacctctggaaaggcctcatatggtgatatgccaaaacattcatgtcagtgtccaaacaatatccaatgccatgagactgacgtctttgtggaaacatnnnnnnnnnnnnnnnttatttccaaagccacctcatttccaaacatctcactcaggaagggaggctcaatataacctcaggggccagttttagcatttgaaatggttctgcttggaaaatgattccctgcaactaaccctggtctttcccacagcaatctaaccaaatttggaaggcactgccttcagctgagtttatgaacaatgaatgccaaccttcaggttctagaagattatggttgccctcccaaacctttattctattatgatattactattaa

SEQ ID NO: 14908 - DNA, 752 bp, Macaca Fascicularis
tttggagtctagtgcataaattggttctggggatacttgattactttccagctattgaaattaggggagggggaaatgaggatgcaaacctaaaaaggttctgggcaggatgatttggacagggctttttgaaagcagcgcctgctttgctgtttttactgccctctttctagacacaattgacttttacactggggaggccagagctcacttttctgcattaagtaacaaaaaataaactttgaaagaaaactgacaatcaaagaaaaaacacaagataagttgtaagaaaaattgagctatgaaaaagctaaggtgtagaaaaagaaaccatcatttggagacgcgcacctaagctttttctctaggaaatgctgtcatgaattcttcctttgtagtgatcattagttcatttctaaagaaaacaagcattccccatgacgtaaagtaataaaagtttcattaatgaaacataataagtataaacaccttgtttactcctgttactttgtacaaaatgggcaaaaatgtcttcaaggatttataaccattttgtaaataatgtggcttctgctaggggtggacaacttccctgcttctatgggaggggccacttagaaaacgccttctgataaggttcaattcttttgtatttcagcaaagtcagcccacgcatctctatttggtttgacaaataatgcaactcctactacatccccgatgacacaaggtgaaattcctattgtgtggaa

SEQ ID NO: 14909 - DNA, 748 bp, Macaca Fascicularis
  misc_feature (1)...(748): n = A,T,C or G
cgggagccaggnnnncacctcaccannnnnngccaacacgccatnnnnnnnnnnnnnnnnnnnnccgccttccaaggccagcaagtcatccaaaggcaaggatggggtggaggtggaggccccttctcgaaagcggaagttatcccctggccccaccactcttaaacggacctgcatcctggagcccactggaaaaggcaaaccctctggctgtcggggcctctcggccaaaactaaaacagccctgagcatggggcttaacgggacaatggggccaagagtgaagcgggcagggcccctggannnnnnnnnnnnnnnnnnnnnnctccctacaccagtcaaggcttctcagctggagaaccggggagcagctggacacccagccaaggccctgccaaccaactgcctctctgaggaggaggtggccaagaagcggaaaaacctggccacttactgccggccagtgaaggccaagcactgtcaggctggtgcccctgctgatgtggcctgctctgtgcgccgcaagaagccaggcccggccctggcctttgaggagaagtgctctacactgaagtcaaaaacccattaacgagaaagtgcctgcccactgcaacggagccgccagcacctcctccccnnnnnnnnnnnnccccaggctgctgccgctttttataactttatattattttttttaagaaaaaaagctctttaaaatacctcaaaaaaaaaaaaaaaaaaaaaaaaaagg

SEQ ID NO: 14910 - DNA, 691 bp, Macaca Fascicularis
  misc_feature (1)...(691): n = A,T,C or G
gctnnngctnnnnngacccacagagccgcttgtacggtgtttnnnnnnnnnnnnnnnactaggacgtggggccctcccctgccgaattctctcactggctgtgtatttattgagtggttcgttttcccttgtgggttggagccattttaactgtttttatacttctcaatttaaattttctttaaacacttttttactatttttttttggaaagcaaacagaacccaatgcctccctttgctcttggacgccccactccagnnnnnnnnnnnnnnnccctgggccatttgcggttttgtgggcctctggagggttccccaccatccaggctggtctccctcccttaaggaggttggtgcccagagcgggcagtggcctgtccagannnnnnnnnnnnnnnnnnnnnnnnnnnnnnnnnnnnnnnnngcccctcagcctaggggaagaagagggcctcgggggcctccagagctgggctttgggcctctcctgcccacctctacttctctgtgaagctgctgaccccagtctgcccactgaagggctagggctggaagccagttcnnnnnnnnnnnnnnnnatatgagggaagggagaaattcccctctccattcccctccccctcttggttccaaagaatctgttttgttgtcatttgtttctcatntgttnnnntgtgtggggagaggct

SEQ ID NO: 14911 - DNA, 790 bp, Macaca Fascicularis
  misc_feature (1)...(790): n = A,T,C or G
ctggggatcactgacccacaggacacgnnnnnnnnnnnnnnnagtagcccaaaccactccttttaacacgagggagcctgtgatgctggcctgctatgtgtggggcttctatcnnnnnnnnnnnnnnnnnnnnnnnnnnnnaaacgggaatcttgtcatccctcacggcagtggccagaagacggcccagcccaatggagactggacgtaccagaccctctcctatttagccttaaccccctcttacggggacannnnnnnnnnnnnnnnnnnnnnnnnnngggctccnnnnnnnnnnnnnnnnnnnnnnncnnnnnnnnnntccccnnnnnnnnnnnnnnnggtttctgtgtctgcagtgactctgggcctgggcctcatcatcttctctcttggtttgatcagctggcggagagctggctcctctagttacactcctcttcctgggtccaattatccagaaggacggcacatttcctagaggcagaatcctacaacttccactccaagtgagaaggagattcagactcaatgatgctaccatgcctctccaacatcttcaacactctgacattatcttggatcctatggtttctccatccaattatttgaatttcccagtctcccctatgtaaaacttagcaacttgggggacctcattcctgggactatgctacaaccaaattatcgtccaaggctatatttctgggatggatataatccgaggaagggagttaaagaccctcctggggccctcagtgtgccatagaggacagcaagtcactggtga

SEQ ID NO: 14912 - DNA, 600 bp, Macaca Fascicularis
  misc_feature (1)...(600): n = A,T,C or G
cagtgtgccagtagccgtgcatacannnatgaaggatgggcaagtaagtggggggaaataggtggcaagccagggaagggaggactgtggcatttcttcctgtgcatcccaggttnntaagcagtccgctctcagactgtggtgaggcaactgtnnnnnntccccagctgtacttgactggaggagtttggagtctagatgggtcagatagcatacaagacaccatgcagnctaccatccatgtccctgcccagcatgaagatggccttgaggatgacccacagttggtaggcatcaatgcttgtaacattccacgagggccccagttggctgcccagaacttgggcatcagcctggccaaccttgttggtgagcaaaggagccaaaaacattctggatgttgcacggcaggttaacgatgcccattaaatggtatgtggggcacagatgcctcggttgttgctgtccagtgcctacatcccggccctcagtgccccattctcactgctgtatggggagtgattacctcagaagactgaactgcagggttcaagccttccggggatttgcctcagtttggggccttgatgactgccttgc

SEQ ID NO: 14913 - DNA, 759 bp, Macaca Fascicularis
  misc_feature (1)...(759): n = A,T,C or G
cacagtttgcngntnnttntgcacagacaatcaggtccacagcccggatggtacttgctgtcntctgtgaanntgcccnntctgggtacttcccttggccccgagatcactcaggagccagacaggaaacttctattcctgttttctctttctgcccaccacatccagtctctcaaaacggtcaggtctacctgaacatcttgatttgagccactcccactgtcatcaactttcacctggattatcgtgacagcctcctattgcttctctatcccgtagccagagctgtcttcctaaaatgcattgcatagttgatcaagtcactctctggcctaaaaccttccatggctccctgctgccctcaggataaagtctggacccctcagcatggcttgtgagactcatggtgtcctggtccctgctcacctctctagtttcatcacttgtcttcttgcattctgggtcccagcctcctgtatccagagatgcagtggctctccgttgccactctgattcctcctttcttttggccacagagaaagggtactttctctgtcaaatctcaacttagacttgacttcctccgaggagctttgactataccctctcctcctgacccccaccctggcatactacacagatcactctgggcttacttgcctgcctaatggtcatctccccactagactgtaagctccttgagggcaaggattgtgctggaatttttgtattaacagtgcctggcttggtgccggcacc

SEQ ID NO: 14914 - DNA, 724 bp, Macaca Fascicularis
ggtataatcaccatttatatagtcaagacagttgtcaaagaaaaaaattatcctacctctacaagtggtatgaaattaagtgaccaaatgaagtgctctcttttcatttgaaattagattcatgactttttgtataatattcaaatgcagaatgcctcaatctttgggagagtttcagtactggcatagaatttaaatgtcagaattctttctgaaaccctttctcctggaaactaggaaataataggggtagaagactccccacgggtagccaggaagaagtctcctggttctgacaactatgaggggtaatggtgctaggcggatggcaaccttcactggttttgagctcagtcagcttcccagcctttcccagtgtctaagaaagtctctgaaatgttcgtttttaggcaatataggacgagtcttatgtcctaattcaccttttctttttttaagatctgatatactatcattgccttagtaatggaacaaaataaaagcatatctagcactttttaacttttgataattttgtaaaattgaatacgttgaatgctttttaagatgtaaagtttttatattttcacaattaacctatgtaaaaccttgtatcagaaatttatcatgtatttactgtttaaaatgattttatttataaaattgtcaatatcttaatgtatttaatgtagaatattgctttttaaaataatatgtttttatt

SEQ ID NO: 14915 - DNA, 870 bp, Macaca Fascicularis
  misc_feature (1)...(870): n = A,T,C or G
cagaatgcatnnnnnngagannnccaagcacccctgggccagagcttcagttgcagcaactcgagcatcattctttcaccagctgtccacctcgacctgctcncnctgaggctccaggctgctcagctgccccacacaggggtctttgggcaaagtttctcctgccccagtgaccggtccatcttgctgcctctcatcatcggcctggttcttcttggcctccttgccctggtgcttattgccttctgcatcgtccggagacgcccatccgcctaccaggccctctgagcatttgcttcaaaccccagggcactgagggggttggggtgtggtgggggggggtcccttatttccttgacatgcaactgtctcaaagacaaagttattttccttccctttcttgaagaactaaaatacagccgggcgcgatggctcgtgcctgtgatcccagcgctttgggaggctgaggcgggcggatcactgggggtcaggagtttaaagaccagcnnnnnnnnnnnnnnnnnnnnnnnnnnnnnnnnnnnnnncagggaattagccgggtgtggtggcataatcccagctgnnnnnnnnnnnnnnnnnnnnnnnnnnnnnnnnnnnnnnnnnnnnnnnnnnnnnnnnnnnnnnnnnnnnnnnnnnnnnnnnnnnnnnnnagccannnnnnnnnnnnnnnnnnnnnnactggacgacagagccagactgtctcaaataaataaataagagataatgcagttgggaggagggaggggagagagttttattaaatgtgacgaactgtcccccaagaggagagtagcaaaatatatgcgtatgtttgacttggggttttccttgtcctgccagaataaaagc

SEQ ID NO: 14916 - DNA, 674 bp, Macaca Fascicularis
  misc_feature (1)...(674): n = A,T,C or G
tcagccccaaaggaactgataagtaaatggcaagtttttaaaggaagagtggaaagtacagcaaataaaaatccttatttgtttttgtagactttgtaatgcatatcattagccctcactgtgatcattattgctgtggctctgaactggcacatagtacagtggatggaaggtgcccacacaccagctgagaaccggttctggcctaggtgggccctagaaccatttacaccgcatgaaagaaacaggttgggttaggagcagaaagaaataaggctcacacccctccagacaccaccttataagcactgcagaacctgaaacagatggcagaaggaatggaatgctacgggnnnnnnnnnnnnngaccacagggaggagacagctcagtgactgaagcattcaggaagaggnnnnnnnnnnnnnnnnnnnnnnnnnnnagtgaccttttgttccttccttttttttttcttttactgttctgaaggactttgagtctgtggttcaccaccagcccatcagtgtttctttgaggtgattgcattagggaagttggctctggggttgcaaaaaaaaaaaggtggaacatgttttccttaaaagatggaaggttttagaaaatatactaggccatctggttagaaaaaacagaccagactagaaaaatctgtgaa

SEQ ID NO: 14917 - DNA, 676 bp, Macaca Fascicularis
  misc_feature (1)...(676): n = A,T,C or G
tgccagctgcnnnngtgcnctcacggcggagtgttcctgtgtggcnnnngcnnnngctatgtgtcgggcttattgttgtgaccatcctgctgctccagagtgcctttccaggtttcctttagcttccctgcttcctgggaatcaggagcctggacactgccatctctagagcagagtggaggcctggactccctttgctcactccattcgggtccacagctgaggctgcctctgataagatgaatgggcactgccttcccttctagtgaaaaggcttggttatggtcctgcctgactctgggccccaggaaccctgccttcatcatctgtgnnnnnnnnnnnnnnnnnnnnnnnnnnnnnnnnnnnnnnnntccctgcctcctgccttctgcctactagaggctcgagagttgagcttgtcctnnnnnnnnnnnnnnnnnaagatgcccaagagcctggaggcactgctgtccttcctgcagaaacagtttctcctcctcccctcacagccttggggccagttccccttcacatgaagcccctggcatttgctggggaagggannnnnnnnnnnnnnnnnnnnngnnnnnnnnnnnnnnnngggtagtaatctgggggttcagatgggtagcactaagccagccggcctaaagatgcagtaagttcctagatagtc

SEQ ID NO: 14918 - DNA, 687 bp, Macaca Fascicularis
  misc_feature (1)...(687): n = A,T,C or G
ctgtaggtagnnnntggctgaggcttgctaattggggatgcttcttagagcannntccacatcagctcccctggctgctggctaccgattaaattcatcagtgtgaacgaggtaggagcgaggttttctggcctgaagcggtctgcactgaaaggtacccaagtagcctgaaacagttaacacatctcccccaagccgctcgcttattagtggggagtgattcacctgcctgggagagactcttgactcatagatgatttgaaatgggagtgcgggcaaagaacagggaaagacccgggaagcactggaccaaaaaagtgcgatctcatggagacctgcgtagccctgttagagatggcgtagaagtgaaagtcttttaaagggagcattagcgatccttttagtacacaactgagtgccagcttatttgtgatgccccttctcagaccaggttaggattcctgggaaggcgggggattcgggccctggaggaggcaggagcctggagcaggtttgtgaggcttttgtgctcccctccgccccctggtggtgagtgtaaagaagactttgcctctcacaactacatgtatgtgtggcatttttgttagagatgagagaaggattgagaaggataaactggaatcctggtgagaagcctttatgccagcccgacacctgctgtaattg

SEQ ID NO: 14919 - DNA, 1053 bp, Macaca Fascicularis
  misc_feature (1)...(1053): n = A,T,C or G
gagcgacccttccattgtattacttctgcagtgcgacnnnnnnnnatgagctgatgtcagtgctatggactgcacaaaagtctcaatgttccattcannnngcannnattcacacacacacacacccacacacacacacacacacacaaatattgcttggactacctataaatggacttgcttcttgtgtttgaaacacttgtgtgcatgagaatgtcatttgctaatgaattttaaaagcatatataaaacaaaacaaaacaacctgccacaatgtgatatgtgtaatatcatttcataaaaatccctcttcctccaaagcctgnnnagaaatgtactgcaaagagttatatgatttcttgttcatgttttgctaatgcttgtatctccttgattacataatgttagtagcactgagacccccacggtaatgtaacttaattataagctatgtcactaccctcctgtaaaatagtattggacagacacagagggacccttggctcctgttgctggtccacacaccacaagagcttgtattatcagtgaatataaatgtactacatttgcatgccttttgggtttgccttaattcttacctcatttgcatccnnnnnnnnnnnnnnnagctgttttggatgaatgcagtataaaatgtaaaatccctgctaaatgacttattaagtatatctatctatatatacatatacacaaagatattatttatcggaagtaaaaaagatggaagtgtattggtttctgtttgaattttcaaagnnnnncaatgtggtggcaataaatgtcccaaataaatttataacaattgattttccccctaattcttattttataattttaaaatagcagcagatgctagcaacaacttactaaatctactcttaaatacacaactttggaatttgaagaattaatgacaacaaaagggannnnnnnnnnnnnnnnnnnnnncatccaggctcccaaaagagggacaatgaacacggcatgtgaaaagtagaacagatttnnnnnnnnnnnnnaaaatgttcatct

SEQ ID NO: 14920 - DNA, 744 bp, Macaca Fascicularis
  misc_feature (1)...(744): n = A,T,C or G
cagnnnnnnnnnnnnatcaacatcacggagcacgagctggtccctnnnnnnnnnnnnnnnnccaaggaggaggtgacagagctgctggcccgatataagctccgagagaaccagctgcccaggatccaggcgggggaccctgtggcgcgctactttgggataaagcgtgggcaggtggtgaagatcatccggcccagcgagacggcgggcaggtacatcacctaccggctggtgcagtagccaccgcctgacagcccctagaggcagacacacagacagtgacccccatccctgcaggacggacgcccctgccctgccagagtccagccccccagctctcacggctgctgcttctctggactccccaaggcaggtggccttcacccaagttctcccgtcctggggtgaggcccagccggccccannnnnnnnnnnnnnnntgcaagatgcagcctcagaagagacaaagcccctgagggaggtcacctgggggcagttggtgctgggccccctctgttgggggtttggggtcccggtctcccaccagccactgcttcctcccgggctctcagccttctaccccttgtcttcctttcctcgggggccctgatgcgtggtggcccccgcccagcctcggctccttactccattcacggctgtgcacaccctcgagccaccagggtgtgagattccagctctggagttttcggttgttggaggaggttgggtttttcaaacgtaaaa

SEQ ID NO: 14921 - DNA, 769 bp, Macaca Fascicularis
  misc_feature (1)...(769): n = A,T,C or G
agctgacagagagattcagagaacgttaatggagttactgaatcaaatggatggatttgatactctgcatagagttaaaatgatcatggctacaaacagaccagatacactggatcctgctttgctgcgtccaggaagattagatagaaaaatacatattgatttgccaaatgaacaannnnnnnnngacatactgaannnnnnnnnnnnnnnnnnnncaaagcatggtgaaatagattatgaagcaattgtgaagctttcagatggcttnnnnnnnnnnnnnnnnnnnnnnnnnnnnnnnnnnnnnnnnnnnnnnnnnnnncgtgctgatcatgattttgtagtacaagaagacttcatgaaagcagtcagaaaagtggctgattctaagaagctagagtctaaattggactacaaacctgtgtaatttactgtaagatttttgatggctgcatgacagatatggcttaatataaaaataaagttaaagaaaatnnnnnnnnnnnnnnnnnnnnnnnnnntaaaagtatatgaataaaaatatgagtaacatcataaaaattagtaattcaacttttaagatacagaagaaatttgtatgtttgttaaagctgcnnnnnnnnnnnnnnnttacaaaaggaagagnnnnnnnnnnnnnnnnnnnnnnnnnnnnnnnnnnnnnnnnnacattgaaagttgtttgagatagtggtataagaaagcatttcttatgacttattttgtatcatttgttttcctcatctaaaaa

SEQ ID NO: 14922 - DNA, 675 bp, Macaca Fascicularis
  misc_feature (1)...(675): n = A,T,C or G
atctcgaactgattttttaaaatcctgtaaattggaaggggccctcgctattttctgtgtcaatcttcattttaaatatggatacgaaaaggatacgccgagccaatcaaagacaagctttaactttactttgaagatgtttctgaaatgataaaatgtagccctagccccctgccctcaattgtaaagtcagcaaccattgctagtaattctttaatgtgcataaattcaatttcaggtataacaaatgtgatcatgacatgaaaatattttagaatagatactgtattaaatattgccatgtttacaatatgtaatatgtttttagctgatggatttaaacatgtagattcaactagaatccattatgtgatatttgtaaataaaggtagaaatattagatccatttctgcagaacttactgtacagtttaattggagtgtagcactgaagaactgtcagctgagcgttgactgaggagnnnnnnnnnnnnnnnnnnnnnnnnnnnnnnnnnnnnnnnnnnnncagctgtgggtgcagcaaataataaggtgaaaaaaataataatagggtggttggttccctttcatctccctcttctgaaaggaagaaattgaattggaacgttcaagtcctgtttgtgtccagtcatannnctggaccaattgttaacct

SEQ ID NO: 14923 - DNA, 298 bp, Macaca Fascicularis
ggggagggtggggacccctgccgccaaccaggggttcacagctggctttccttgtttaggaaaagggtatggcagttccagcagcttcttctgtattcagccaggacacccgtgggacctgtttgcttttgttttgcttctttgggaacggcacagtcacttatcctgccatttgcggagatgacctggtgcactttgactgttgagcaatgcattattgcggtagtcaaggttagtgcaagcaaggaaacattcccagtaaggtatttgtttccattttctgtctatgcttctgtca

SEQ ID NO: 14924 - DNA, 607 bp, Macaca Fascicularis
ctggctgagcaaccctgggagaagtgactttctctctttggtcctaaattttctcatctgtaatgggggaattacctacacacttgctaaacacacagacacagagtctctatatacacacgtacacatatatacactcagcacttgcaaggctagagggaaactggtgacactctaaagtctgactgattcagtgtttttggagagcaggacataaatgtatgataagaatgatcaaggactctacacactgggtggcttggagagcccactttcccagaagaatccttgagagaaaaggaagcgtgggagcagtggtgttgagttcacttcaagcccaatgccggtgcagaggggaatggctcagtgagctctctacagtaggtgacctggaggaaggtcacagcagcaatgaaaatgggatgtgcatgaacacagaggatccatgaactactgtaaagtgttgacagtgtgtgcacactgcagacagcaggagaaatgtatgtgtgcaatgcgacaagaatgcagaagtcagtaacatgtgcatgtttgttgtgctccttttttcctgtagagttgctaaagtacagaatttagcaaataaaaa

SEQ ID NO: 14925 - DNA, 703 bp, Macaca Fascicularis
  misc_feature (1)...(703): n = A,T,C or G
acagccagcnnnnnnnnnnnnnnnnnnnnnnnnnnnaccactgccacccctcgagccaagggcaaggcaaagnnnnnnnnnnnnnnnaccagtgagtggccccacctgtgtcgctgatgctgacctcacctggtcctcctcctactgtccctctcagtgccttctctcagctcccaggccaacagtagccaaacccctagagacagtgatgcctgcccgcaccctgacctggtccctggaccttcactggcaacttctcagagctggcccagaaggcctggagcatggacagtgtgggcgctctccctaccttgcctccttttttcttaaagcaaagtcacttctccatcacaaccagatttgaggctggttttgatggctgggtccttgggcctggccagtcttcctcttagcctctggatctagaagggaccataagaggagtaggccctggttcctgctctcctggaggctgggcctagcaggggccctcactcttgaagtccaggactgggtctgacctggtgggagcacctgccagaggatgctctttcccaggacgatgggcctgtgtctcaggagtggggttgggggacagnnnnnnnnnnnnnnnnncaccctaccttccccagacttgcactggggtgggatttggagtgatgggaaggtttttaagggccggggatggatcttttctaaatgt

SEQ ID NO: 14926 - DNA, 725 bp, Macaca Fascicularis
  misc_feature (1)...(725): n = A,T,C or G
agcaccaagnnnnnnnnntnnnntgccaaaaaggcagttctcgcgcttgctaggctggcctctcttgcctccccttggccgggtcaacaccagttacggtgtgcatcaccctggagtggtgagtcacctctagtcggccctcttgctgctgccaaccaaatcagtattagctttgagcactgcactcttgtttctccctcccttggacgacacaaggactagcatgaggcactgtttgtgggaggcagcccctatcctgggttccagcatggacacaggggcagcctggggcttatggagaaacagctggtttcccccacccttttcccgggaagaccccacaattggcctctagtcagcaaatggagataacagagtctggcctttccaatccccatcccctcatccccacccctgaaaaaaaaattgagcacttaaacccctctcttttggagggggccccccaaagcgtcaggctgggggcagtctggtacggaacatatttattgcctccatgcatgtgtgtgtgtgtctgtgaggactggtgtgcgtggacacgtctggagcaggcgtgtggggctctttcagggaccacagaggagggtgcagttggcagtgcccagccaccctgaaatccccagtaatggtgcctcagtgggccccagagttccagtgggagagtacagttccctcctgtctccctcttcttttccgcacctccatct

SEQ ID NO: 14927 - DNA, 737 bp, Macaca Fascicularis
  misc_feature (1)...(737): n = A,T,C or G
agaatgtttaaaatgaggcaacannnggccaacactggaaagcactagagggcaatgggataaaccaacctgcttggtctctattagtaatggagatgacagtctggccaatcaagggaaaggaaattagtacctttagtttcagtcgttccttgtatgatatggtttggctgtgtccccacctgaaatatcatcttgaattgtaatccctataatccccacatgtcaagggagagatcaggtggaggtaattggatcttggggcagttcccccatgctgttctcgtgatagtgagttctcatgagatctgatgattttataagtgtttggtagttcctcctgtgttttctccttactgccaccttgtgaagaaggtgccttggttcctctttgccgtctgctgtgattttaagtttcctgaggcctccccagccttgaggaactgagtcaattaaacctctttcctttataaattacccagtcttgggcagttctttatagcagtgtgaaaatggactaatacatttgtattaatctgtaatttaaatttcatctctttctccttgccttacatagagtaaaggccaagacatgccaaacgtgaactaaaatgtgtagggccttcaccttttttacttcctccagtatcttgggaccatcataattcttgttagcgtctctaaccaggaggcagctgagggaggagggaaggaagactgtaaaaaatccccctccc

SEQ ID NO: 14928 - DNA, 1051 bp, Macaca Fascicularis
  misc_feature (1)...(1051): n = A,T,C or G
caagctgttcacancttttagcatnncacatttgcctaacttaaaannnnccatgtgtcnnnatcatggttttgtaattgctaaggcatatgtcaggttatttgaatataattactttttgaagtaattgtgaccacaaaacatcttttttacatgaaggagctgtacatcatttcaaattactcaaatgatgtcttgctctgaggcataaaccccaggtacttagtgtttttaataatatggtgccactgcaggatttgggggtggtggggaagaacaaggataatggtagggggaggcttggcctgaaactaaccactacgtgaattgcactgcaggttttacttatgggaattccttatttgggannnnnnnngggcagctgcaaactgaaaaacaatctagtaaatgtactttgttttatatattgtagcaggcaattaaccactaaataatagctttgacatttnnnnnnnnnnnnnnnnnnatttttgttagaagatgattagctcttgcctttattttacagtgcttagtgtgataaacttctagtcatgttttctatcaaagagaccagttaatatatgtacataaaccacagaaatagtataacaaactatttttaaattatcgttttcctacttaaacattgtttagcttaagacttcttaggacatttgtaaaagcaggttaaatttaataaggtttctgattgtttttttgtaaccagannnnntttttacaagtgaaataacatttcagctaaataaaatatcgctaaataatnnnnnnnngatgaaaatctgctttgtataatttctgcaaattatcctnnnnnnnnnnnnnnnnnnnnnnnnnaatgatagagatttttaaatccttatcctttgattttttttaaactctgacctaatgataaaactctnnnnnnnnnnnnnnnnnnnnnnnnnnnnnnnnnnnnnnnnnnnnnnnnnnnnnnnntaagagaactaaactggaataagtgttcataaatgaaacccttggactatttaatactaaagttgatatg

SEQ ID NO: 14929 - DNA, 737 bp, Macaca Fascicularis
  misc_feature (1)...(737): n = A,T,C or G
ttattgttatagcnnnnctagtgggtgtgaagtggtagctcattgtggtggggctggagtttctgnnnnttgcagtgaaaagaannnnnnnnnnnnnnnnnnnnnnnnnagagagggaatctatctggactttacagccagcaagctttacacttgcatctggaacaggcggcactatagacactattcagccgcgcagcnnnnnnnnnnncctgtcaacctctgctttatccttccccannnnnnnnnnnnnnncatatcttgtgtgtagggctaatgtgtactgaagaagtggcaggtcttatttgcatgacatttgatgtctccaaagcactttcatagatgggttatttgacattttctcctccatgagatgagtatacccctttcttatcagttttaaatggcttgttcaaggccgtgccacaagccannnnnnnnnnnnnnnnnnnnnnaaagacactcagagagacgcttaagggtagagccttaagttctaaggtacgatttcaagtccacatttctttctgcagcaaggggtgnnnnnnnnnnnnnaagttatgggtttagaatacctagggttatatctcttcaccatttctctgtnnnnnnnnnnnnnnnnnnnnttcctctctaagttctgtgccttcatctgtaaaatggggataatgaaagggcctcacagggttgctgggagagttaaattagacagtatactaaagcatttggtggcacac

SEQ ID NO: 14930 - DNA, 785 bp, Macaca Fascicularis
  misc_feature (1)...(785): n = A,T,C or G
ctgctgccccattttgcaagacttttttttagccttgacaaaatgtctcagttaagtatgaaagtttttctactacttagtccaaaaaaactattaaatcttaatgaaataaccactccattaagaatctgataactaagagttgactgactannnnnnnnnnnnnnnnnnntatctaaagacactgaatcccaccatttccttttctgtaaattaaacagaaannnnnnnnnnnnnnnnncttnnnnnnnnnnnnnnnnnnnntatggaggaggttaagtctacatttccaccactaagcacaatacaaatgttctttacttctggggaaacagtttgaaaatgttgagacagcacagcagccactccaacaccagctgtaggttcaatgagtagtttcatcctctcccacaccagctgggttnnnnnnnnnnnnnnntcttctgtaacagtgaagannnnnnnnnnnnnnnnnnnnnnnnnnnnnnnnnnnnnnnnnnnnnnnnnnnnnnnnnnnnnnnnnnnnnnnnnnnnnnnnnnnnnnnnnnnnnnnnnnnnnnnnnnnnnnnnnnnnnnnnnnnnnnnnnnnnnnnnnnnnnnnnnnnnnnnnnnnnnnnnnnnnnnnnnnnnnnnnnnnnnnnnnnnnnnnnnnnnnnnnnnnnnnnnnnntcctcctccacctacaggtaccaccagtgcatccaccaaagnnnnctggtcagcacnnnnnnnnnnnnnnnnnnnnnnnnnnnnnnnnnnnnnnnnnnnnnnnnnagctctgtctc

SEQ ID NO: 14931 - DNA, 692 bp, Macaca Fascicularis
  misc_feature (1)...(692): n = A,T,C or G
gcgtgnnnnnnnnnngcgctcttaccgctagcagatttgtccagatccaaaacnnnnnnnnnnnnnnnnnnnccacacaccaagctgccgagggctttgtgcaccccatcacacacatccaccactgtccctgcnngcagggcagagtaaagccanatggaatgcagaattctctgcctaggaattgtttctnnnnnnnnnnnnnnnnnnnnnnngcccaagaaaaaactggccacaccaatgtacacagtcttcagaggnnnnnnnnnnnnnnncttccaaagatggcagagccatcatcatttgtcttcagaagcactggatcatttctcaaaacgtgttgcgaccccgagaataaacaaagggaactctgtaaaaatagagacatgagcaatatggagagcactggagggactgaaaacaaggcaggagggaaagtggagctgagcttgtcacagatggatgcaagtgtgaactcagaacatttcaatcagaatgaaccaaaaatcatatttaatcatttaatgggggaggctggttgtaggtcctgcccaaataattcacaaagctgtggcggaattgtgcgagtgaagtnnnnnnnnnnnnactgtcaaatgccaaacatggaagccaatgtgcgtgctgtattaatacactctgaactttctggtgaaagtttgnnaataaaaaca

SEQ ID NO: 14932 - DNA, 749 bp, Macaca Fascicularis
  misc_feature (1)...(749): n = A,T,C or G
tgcaagcactnnnnaatcacaggagactgaggagnnnncagctaaaannnnnnnnnnnnnnnnnnnnnactcttaaccctttgagaattgctctgaattttgttctcaggcattatacagttagtaattaaactttaaatgccattactacttgttttttcatatcccaagaataagaacatgtctatatacccatttctgggaaggaggagtannnnnnnnnnntgtttctgacacagatgtgcttggtnnnnnnnnnnnnnnnntgtggtgtatgtagtatgaccaactgcatttaacaaaactcctctaagtacttctaaatattctgtgcaaatatctnnnnnnnnnnnnnnnnnnnnnaatgtgtttctacaagactttatattttaagctaagtggaataatacaacataactaaaacnnnnnnnnnnnnnaaaggagggtaattcatggaagaaatttcctctgttcattccgttctcttcaacctaagcaatatggatgtgtgagtgtgtgatttattatggtaccaaaaatgtccaccctctttcctgnnnnnnnnnnnnnnnnnnnnnnnnnnnnnnnttttattttaatagttgacaacctgggaaagttctgagtatttattttactgctcttttttgtgcatagaaaggtttagtagggtacttttttgcattagtttgccaatactcttattctttgttctaaataaagtgactagaatttttgtgtactatcac

SEQ ID NO: 14933 - DNA, 756 bp, Macaca Fascicularis
  misc_feature (1)...(756): n = A,T,C or G
gccagggctccatcatcggtgtgcacctggacacctggcacggcacgctcacctnnntcaagaacaggaagtgcataggcgtggcagccaccaagctgcagaacaagaggttctacccgatggtgtgctccacggcagcccgaagcancaagaannnnnnnnnnnnnnnnnnnnnnnnnnnnnncctccagtacctctgctgccaccgcctgcgccagctgcggccagactcgggggacacgctggagggcctgcccctgccgccaggcctcaagcaggtgctacacaacaagctgggatgggtccagagcatgagttgcagccgaagcaaggccccagtgtctgatccccaggcagcgacctcggcccaccccagcagtcgagagccccggccctgccagaggaagcgctgccgccggacctaacttcccagtggaaactgtcttcttgggctgggacggccgtttcctgtcccttccttccagctacactccagggcggagttggatgaggcccgtccggagggagctatctcttgcctcctgaggctgggacagtcctttctgtggaggctctagggaccctctgctgctgtgctgggtggggaagcagctgccctgagccccaggtcttgtgggaggctgtgaggagggcctggctggagcccgccgttgctcttcccacagggacttggattttcctaacttgctctgcatgctgtcggcggctgccccgccgtcgnnacttaaggacgca

SEQ ID NO: 14934 - DNA, 130 bp, Macaca Fascicularis
  misc_feature (1)...(130): n = A,T,C or G
atcnagatacaatttaatattccatcctgcccaaccttcctctcccaccctcaaaaaagggccattttaagatgcattgcacaccctctggggaaattgatctttaaattttgagacagtataaggaaaa

SEQ ID NO: 14935 - DNA, 749 bp, Macaca Fascicularis
  misc_feature (1)...(749): n = A,T,C or G
ggataatattctctcattgattaatgtcaatgatttgagttttgtcaccggctcccacatcggagagctgatcatctgggatgcgctggactggaccatgcaggcctatgaacgcaacttctgggacccatctccacaactggacacccaacaagaaataaaactctgtcaaaaatcaaatgacatttctattcatcatttcacgtgtgatgaagagaatgtatttgctgcagttggaaggggtttatacgtgtataaccttcacatgaagcgtgtgattgcctgccagaaaactgcacatgactccagcgtcctgcacatcgccaaacttccgaacaggnnnnnnnnnnnnnnnnnnnnnnntggcagtgtacgcatttgggagttaagagaaaaacagcagcttgcagctgagcctgtcccaacaggtttttttaacatgtggggatttggaagagtcaacaaacaagccagccagcctgttaaaaagcagcaagaaaacgctnnnnnnnnnnnnnnnnnnnnnnnnnnnnntttgattggacactcgtcatctgtggagatgtttctatactttgaagatcacggactagtgacatgctctgctgatcatctcattattttgtggaaaaatggagagcgagaatctggattgcgcagtttaagattatttcaaaaattagaggagaatggtgacttataccttgctgtctagtttaaggaataaaaaatacacatgcatgaacctt

SEQ ID NO: 14936 - DNA, 726 bp, Macaca Fascicularis
  misc_feature (1)...(726): n = A,T,C or G
caaagtgggaagntnnnnggggaggggaaatacagggacggtccatgttttcaagagcaggggaatgatgtttaaacacaaaaataattttttttcatttccagaaacactatttatttattttttttaactttttgggggtgaaattggcagatgcctgaggtcatagctgtgtcctgggtcactgtggctggtgaggaccctaagtgtacacagcagcagcaaaaccgagggaggaccctcctctggggccccctgtcctcagcacattccaggcagctgtgccctgacccacaggtacccgtggggatgagaggaggcccaggcctgtgctgccagagccggcagtgtgagctgtaggcagggacggggagggactgtcgctgtgatcagagtgggttaagctgaccaggaacacccatttagcccctttttctttttgctttcatttttataaaggaaaagaggacnnnnnnnnnnnnnnnnnnnnnnnnnnnnnnnnnnnnnnnnnnnnttgttttgttttgttttgtaaattgtataatttttaaatatctgagttttaaaaaaagaaaaaagtacaaaaaaatcttgttatggccttaagaaggggttagtgcatctttcaggggtcactctgccatggggataaaatagctgtttcacaaacagttttatttaaaaaaacaaaaaacaaaaaaaatcaaaaaactgcaaaaaaaaata

SEQ ID NO: 14937 - DNA, 693 bp, Macaca Fascicularis
  misc_feature (1)...(693): n = A,T,C or G
ggagcaggcccgggagctggcaaggnnnnnnnnnnnnnnnnngccagtctagggcttcgggtcgcggcagcgctgaccgccatggacaagcccctgggccgctgcgtgggcaacgccctggaggtggaggaggcgctgctctgcatggacggcgcaggcccgccagacttaagggacctggtcaccacgctcgggggcgcccnnnnnnnnnnnnnnnnnnncgcggggactcaggcccagggcgctgaccgggtggctgcggcgctggacgacggctcggcccttggccgcttcgagcggatgcaggcggcgcagggcgtggatcccggtctggcccgagccctgtgctccgggagccccgcagagcgccggcagctgctgcctcgcgcccaggagcaggaggagctgctggcgcccgcggatggcaccgtggagctggtccgggcgctgccgctggcgctggtgctgcacgagctcggggctgggcgcagccgcgctggggagccgctccgcctgggggtgggcgccgaactgctggtcgacgtgggtcagaggctgcgccgtgggacaccctggctccgcgtgcaccgggacggccccgcgctcagcggcccgcagcgccgcgccctgcaggaggcactcgtactctcggaccgcgcgcccttcgcgcccccctcgcccttcgccgagctc

SEQ ID NO: 14938 - DNA, 751 bp, Macaca Fascicularis
  misc_feature (1)...(751): n = A,T,C or G
ttgtacatttnnnttgtgttttccattgtaagttaaattattttccacctttcattaaggtttttttagggtttttttttttattgtggtaaaaatacatacacattttacattttaaagtgtacagnnnnnnnnnnnnnnntacagtcacaatattgtnnnnnnnnnnnnnnnnnnnnnnnnnnnnnnnnnnnnnnnnnnnnnnnnnnnaaggtttatagtnnnnnnnnnnnnnnnnnnnnnnnnatgtagnnnnnnnnnnnnnnnnnnnnnnnnnnnnnnnnnnnnnnnnnnnnnnnnnnnnnnnnnnnnnnnnnnnnnnnnnnnnnnnnnatttcccctactctgtcttcaacttgcaggcctaagatggcattgaagnnnnnnnnnnnnnnnnnnnnnnnnnnnnnnnnnnnnnnnnnnnnnnnnaaaaataaaagtataggcccttgattaggggagatcctggtttccccttctcagcccatgaaggagctgttgcttacagtagaaccaagcttctggaagggagagagcagtgtggcagagggggtgtgtgtgtgtgtgtgtgtttgtgtgtgcagtatgctaacaggagacttgagggtaagaaatctagaggctgtctttggttctgtttttaggtttttttcatttaactttgacccaagttccttaatttatgaaatgagggttttccacttgacagtctttgaagtctcttcnnattttaatatctaggtttacagta

SEQ ID NO: 14939 - DNA, 744 bp, Macaca Fascicularis
  misc_feature (1)...(744): n = A,T,C or G
gactggtacaggaaccaccaggnnnnngaactnnnnnnnnnnnnnngcgccaaccacgtgctgaaggnnnnnnnnnnnnnnnnnnntggcagagcagtggtccggcaagaagggagacacagcttccctgggagggaagaagtccaagaagaagagcagcagggccaaggcagcaggcggcaggagtagcagcaacaaacaaaggaaggagctgggtggccttgagggagaccccagccccgaggaggatgagggcatccagaaggcatcccctctaacacacagcccccctgatgagctctgagcccacccagcgtcctctgtgnnnngacctnnnattttgaagctgaggagtcgggggcatggctctggcaggccaggatggccccgcaggcttcaggccctccttgccttggctgtgccgtcgtcttccaaggaaagacacaagccccaggaagaactcaagannnnnnnnnnnnnnnctatgccggcctttcccctccccagatgtttctctcctgacccggggttcaggcaggccttgtggttttaggactgcaaggaccccagtgtgaactcaggaggggcaggtgtcagaaccgggcaccaggactggagcccttccagagcccaagctcacctcacctcaatcctcccccacagggaactgagactgcagccccccatggctgttctctgctcatccctcctgtggacaccttgcactctgcctggccctcccca

SEQ ID NO: 14940 - DNA, 730 bp, Macaca Fascicularis
  misc_feature (1)...(730): n = A,T,C or G
atccacggactcatcaagcagttctcggagaacatttatgaggccttcctggtggggaagccctcggactgcaccctggcctctgcccagtgcaacgagtacagtgaggaggaggagctggtgaagggcgtgctgatggccggcctctaccccaacctcatccaggtgaggcagggcaaggtcacccggcaggggaagttcaagcccaannnnnnnnnntataggaccaaatcannnnnnnnnnnnnnnnnnnnnnnnnnnnttaacagggaggccacacggttgcggagccgatggctgacgtatttcannnnnnnnnnnnnnnnnnnnnnnnnnnnnnnnnnngactcctctcaggtgcacccgctnnnnnnnnnnnnnnnnnnnnnnnnnnnnnnnnnnnnnnnnnnnnnngggcgccgggccaccnnnnnnnnnnnnnnnnnnnnnnnnnnnnngctggagggtgactcgcgtaccgtgcggctgctgagggagctgcggcgggccctgggccgcatggtggagcggagcctgcgcagcgagctggctgctcttccccccagcgtgcaggaggagcacgggcagctgnnnnnnnnnnnnnnnnngctgctgcgaggaccgtgtggcagctttgatgtgcnnnnnnnnnnnnnnnnnnnnnnntagcttctgctggggctgtgtacagagtgcaaatgtttatttaaaataaagttctatttatccc

SEQ ID NO: 14941 - DNA, 775 bp, Macaca Fascicularis
  misc_feature (1)...(775): n = A,T,C or G
atacaacatacagcttcctttantacatttttcaaagaaattagtgaggtgtttccagatcaattcattcatttgggaggagatgaagtggaatttaaatgttgggaatcaaatccaaaaattcaagatttcatgaagcaaaagnnnnnnnnnnnnnnnnntaaaaaactagaatctttctacattcaaaaggttttggatattattgcaaccataaacaagggatccattgtctggcaggaggtttttgatgataaagtgaagcttgcgccgggcacaatagttgaagtatggaaagacaacgcgtatcctgaggaactcagcaaagtcacagcatctggcttccccgtaatcctttctgctccttggtacttagatttgattagttatggacaagattggaggaaatactataaagtggaacctcttgattttggtggtactcgggaacagaaacaacttttcattggtggagaagcttgtctatggggagaatatgtggatgcaactaacctcactccgagattatggcctcgggcaagtgctgttggtgagagactctggagctccaaagatgtcagagatatggatggcgcctatgacagactgacaaggcaccgctgcaggatggtcgaacgtggaatagctgcacaacctctttatgctggatattgtaaccatgagaacgtgtaaaaatgaaagggaaaaaagcacagcaatctgtactacagtcaactttattttgaaatcatgtaaatcaacaagatattaagac

SEQ ID NO: 14942 - DNA, 712 bp, Macaca Fascicularis
  misc_feature (1)...(712): n = A,T,C or G
tatggaaaggccacgccagcctagtgcaggagctgaaggcagtgctgaggacnnnnnnnnnnnnnnnnnnnnnggcagtcgggggcggggggctcctggctggggtggnnnnnnnnnnnnnnnnggnnnnnnnnnnnnnnnnnnnnnnnnnnnnnnnggagacccatggggcacactgcttcaatgcggccgtcatggccggcaagctggtcacacttccnnnnnnnnnnnnnnnnnncaagagcctgggtgccaagacggtggccgctcgggccctggagtgcatgcgtgtgtgcgagatccactctgaagtggtggaggacgccgaggctgtgagcgctgtgcagnnnnttttggatgatgagcttatgctggtggaccctgcctgtggggcacccttagcagccatctactcaggcctcctggggaggctccaggccaagggctccctgccaccttccctgacttcagttgtggtcattgtgtgtggaggtaacaacatcaacagccgagagctgcaggttctgaaaacccacctgggccaggtgtgaggggtcccagcctggccccaaagacccctgagaggcccatggacactcctgtggcttgatgaggagggctcagtgctggtggatggcagtggaagctgccctgtgcaactgtgctggctgcctcctgaaggaagccctnnnnnnnnnnnnntttgactctc

SEQ ID NO: 14943 - DNA, 768 bp, Macaca Fascicularis
  misc_feature (1)...(768): n = A,T,C or G
atgacgcccctcnatgtcaatcagctgcagttcccgcnnncggataaggtggtcgtgaaaaccaagaccgagtatgaacctgaccgcaagaaagggaaagcacgtcctccnnnnnnnnntgagtnnnnnnnnnnnnnnnnnnnnggtgtcaccgagaggtttaaggtctctgtgctggtcctcttcgccctggccttcctcacctgcgtcgtcttcctggtcgtnnnnnnnnnnnnnnnnnatgatcgcgcctgccccgatggctttgtcctcaagaacacccnnnnnnnnnnnnnnngcttggagagctactacgcagagcaagactccagtgcccgggagaaattttacacagtcataaaccactacaacctggccaagcagagcatcacgcgctctgtatcgccctggnnnnnnnttctgtcagaagagaagctgtctgagcaggannnnnnnnnnnnnnngaagtcagcttagcgggatgggcaagttccttacaatgtgtcacttgcaagtaacaaagggactttgagggacatttcattaaatataattactgatactttagaggttactcatttatggtgcaattgcttctgtttgctaatgctgctttgcaaataaaacttgctgccgaccacccacgggcataaaatcaagtgcatttcagcattgcctaaagagctctgacaccacttttcatgttaagatcttcatttagctcctttactgggatttattggatgctgtcaaaaaataaattacact

SEQ ID NO: 14944 - DNA, 692 bp, Macaca Fascicularis
  misc_feature (1)...(692): n = A,T,C or G
gacagcccnnnggaggcaggcctggccttcannngcaagctcaagtcaccggtgcccttcctggggagggaggccctggagcagcagcgggccgaaggcctccgccggcgcctggtgnnnnnnaccgtggaggacaaagtacccatgnnnnnnnnnnnnnnnnnntggaggaacggccaagtggtgggccacgtccggagggccgactttgggttngcnnnnnnnnnnnnnnnnnnnnnnngttacatccatgaccccagtggtgggnnnnnnnnnnnnnnnnnnnnnnnnngcggggactatgccctggagagaatgggggtgacctacggtgcccgggcccacctgaagtctcccttcgaccccgacaacaagagggtgaagggaacatactgagggcacagaccccatgccccatcacatgctgtccgtccattcccacaggtcccaaatggccctggatcccaggaccctggacccggccagaacttgggccctccctgtccttagtctaggcctagtcctgctaaaacccccaaaccagatacggacagagaccaagatggcccatcgtgtggtcactgaccagaaggcggtctctaatccgccccaatcctcccagaaaacaagcctgtaagtgtcttgggctcagggaccatggcttgtagttatctccaagcttcagaagggcc

SEQ ID NO: 14945 - DNA, 702 bp, Macaca Fascicularis
  misc_feature (1)...(702): n = A,T,C or G
ctccgtgctcccaatgtcnnnctggctatcgctgcaagaactcnnnctgtgaacccatcggaagcccggaagacgcccaggatttgccttacctggtaactgaggccccatccttcctggcaactgaagcctcagactctaggaaaatgggtgcagagggccctgacaagcctagcgttgtgtcagggctgaacccaggccctggtcatgtgtggggccctctcctgggactactgctcctgcttcccctgatgttggctggaatcttctgaaggggataccactcaaagggtgaagaggtcagctgtcctcctgtcatcttccccaccctgtccccagcccctaaacaagatgcttcttggttaaggccctctggaagggaaaggctacggggcatgtgcctcatcacaccatcctggaggcacaaggcctggctgactgcgagcgcacggggccgcctgaggactgcacaccgggcccacacctctcctgcccctccctcctgagtcctgggggtgggaggatttgagggagctcactgcctacctggcctggggctgtcttgcccacacggtatgagtgctctccctgagtgcctgtgtagctggggacggggattgcaaggggcagatgaaggacaagccccactggagtggggttctgtgggtggggaggcagggacaagggaaggaaagcaactcc

SEQ ID NO: 14946 - DNA, 718 bp, Macaca Fascicularis
  misc_feature (1)...(718): n = A,T,C or G
cccccggcgcccacgtcatctgcccgcgcccgccgccctagcaatggatctcgtaggcgactggcgggggcacgcggagtcccggccccgccccctctgctggtccgcagtccgccggcgcctccgccggaccctcggcgaagagcggcttggagcggttgatgacgaannnnnnnnnnnnnnnnnnnnnnnnnnnnncctctnnnnnnnnnnnnnnncaggggccgtccgagtagtcgttgacgaacagcgcgccctcccccggtggcccccgcgccttttttcgcctgcggcgccggcgacagatcatggcgaccaggagcagcgccgtgagcgccagcagcgcgatggccgccgcaatggccgtctgcgtggccaggcccagggcgcggaaggccatgcttcccgcctcgggccggggctcgcgaccagcgtggcgggcggccggaggtggcggttgcgcgggctgctgcagcggctgccgggacgcgttgaccaggagccggaagggcacgcgggcagcgccaccagcattggaggcctcgcactcgtacttgccggcatgggccannnnnnnnnnnnnnnnnnnnnnnnnnnnnnngcccgtgtcggatgccgagtgtccgcccaggcccggcgccccgccttctagctgggcctgggcttgcggccggccctcgcgaggctggggcacctnnnnnnnnnnnnnnntggctgc

SEQ ID NO: 14947 - DNA, 1187 bp, Macaca Fascicularis
  misc_feature (1)...(1187): n = A,T,C or G
agannnnnnntcaagcaggnnnnnnnnnnnnnnnnnnnnnnnnnnnnnnnnnnnnnnnnnnnnnnnnnnnnnnnnnnnnnnnnannnnnnnnnnnnnnnnnnnnnnnnnnnnnnnnnnnnnnnnnnnnnatcaacaacacggacgccgagggcagnnnnnnnnnnnnnnnnnnnnnnnnnnnnnnnnnnnnnnnnnnnnnnnnnnnnnnnnnnnnnnnnnnnnnnnnnnnnnnnnnnncnnnnnnnnnngccacagggaagtaccacgccgcggtgctcaccaacagcgctgagtgggaggcnnnnnnnnnnnnnnnnnnnnnnnnnnnnnnnnacctggtgcacccgttggtctactgccccgaactgcacttcagcgagttcacctcagccgtggctgacannnnnnnnnnnnnnnnngaccgagacaacagccccagnnnnngcgctggnnnnntcattgcctcacacattggctttgactggcccggagtctgggtccacctggnnnnnnnnnnnccggtgcatgccggtgagcgagccacgggcttcggtgtggccctcctgctggcgctcttcggccgtgcctctgaggaccctctgctgaacctggtgtccccgctgggctgcgaggtggatgtcgaggagggggacgtggagagggactccaagagacgcaggcttgtgtgagcctcctgcttcagccctgacaaacggggatcttttacctcactttnnnnnnnnaatnnnnnagcaattgaaagattacccttcagatgggttttggtttttctttgtggtcnnnnnnnnnnnnnnngaaacagctgaagttttaggagacagtttacagtttggggcaggccacggtgaggggaccggcaagcgctggggcttgtttctgttagttacttataggactgagacagcttctgtnnnnnnnnnnnnnnngggccttctgcaccccggggtgaggcctcctgcctgcctggtgccctgtcccagccccaggtcctgtgcagggcnnnnnnnnnnnnnnnnnnnnnnnnnnnnnnnnnnnnnnnnnnnnnnnnnnnnnnngccagcccagccctgtgaaagatggaactgacttgctgcaggggacccgattttatagggcaagagaagtcactctggcctcttagaattcacttgagnnnnnataaata

SEQ ID NO: 14948 - DNA, 703 bp, Macaca Fascicularis
  misc_feature (1)...(703): n = A,T,C or G
gccttgaacgctcaattttgactcaaatnnnnnnnnnnnnnnnnnnnnnnnagagattacttcgannnnnnnnnnnnnnnnnnnntgtctatcgagttcttggcaaacctgaggcagnnnnnnnnnnnnnnnnnnnnnnnnnnnnnnnngaaccggagatccttcctcaagctcctgccaatgctcatctgaaggacttggatgaagaaatctttgatgatgatgacttttaccaccagctccttcgagaactcatagaacggaagaccagctccttggnnnnnnnnnntcaggtggccatgggaaggcagtggcttgcaatccagaagttacgaagcaaaatccacaaaaaagtagataggaaagccagcaaaggcaggaaacttcggtttcatgtccttagcaagctactgagtttcatggcacctattgaccatactacaatgaatgatgacgccaggacagaactgtaccgctctnnnnnnnnnnnnnnnnnnnnnnnnnnnnnnnnnnnnnnnnnnnnnnnnnnnnnnnnnnnnnnnnnnnnnnnnnnnnnnnnnnnnnnnnnnnnnnnnnncagatggaggaaaccagtgactttatgggactgagttagtagggaagcccctgggaaggtgctgtgttccgaacctgtgcctaatacatgcaagggcgctgtcccgcccaaccccgccttaaacac

SEQ ID NO: 14949 - DNA, 716 bp, Macaca Fascicularis
  misc_feature (1)...(716): n = A,T,C or G
aatatacctgtgttctccctccagggtttcagcnnnnnnnnnnnnnnnnagagcacaaaaaaactggacaggggtgcccagttcccccataaactgaaggaaggagatccttcccccatccctaggagctctctcaaccagcctcagaaagcttgagaaaatggaccctttgcccagccagggttaattcctggtggggcagctcggctgtgannnnnnnnnnnnnnnnnnnnngaaggcttccagtgtgagctggaattagactgaacacgtgcttgggcctacctctccctagacccagctgcggggcactccagggaatgaaccagctcaagtgtgtccctaacagnnnnnnnnnnnnnncccgaacccctcacagccccaccctcctcattccatcagatgcatttgtagaatcggggcaaatttccttatttatttatggcccatgcctttccccgcttcattctgatccggttttgctttgaagagaccccaataacaaaaaaacagcctccagaagccaaacctgtgcctcgatctcccacagcttctcctttgcttccaggagaaagttcactgaaaaaaaaaaaaaaccttcagcttcttgtttatacggagacagcagaactcggtggggaaatgagaatcttttctgcaccaaagctgcttctaaagcannnnnnnnnnnnnnncttggnnntcatgctgcnntt

SEQ ID NO: 14950 - DNA, 708 bp, Macaca Fascicularis
  misc_feature (1)...(708): n = A,T,C or G
aannnnnaccgatctgaggncnnnggtgtgaatgaagacttggctgattcagatgccagggccttgtatgaagcgggagaaaggagaaaggggacagatgtaaannnnnnnnnnnnnntccttaccacccgaagctatccacatcttcgcagagtgtttcagaaatacaccaagtacagtaagcatgacatgnnnnnnnnnnnnnnnnnngagttgaaaggtgacattnnnnnnnnnnnnnnnnnnnnnnngaagtgtgccacaagcaaaccagctttctttgcagagaaacttcatcaggccatgaaaggtgctggaactcgccataannnnnnnnnnnnnnntatggtttcacgttctgaaattgacatgaatgatatcaaagcattctatcagaagatgtatggtatctccctttgccaagccatcctggatgaaaccaagggagatnnnnnnnnnnnnnnnnnnnntctttgtggaggaaactaaacattcccttgatggtctcaagctatgatcagaagactttaattatatattttcatcctataagcttaaataggaannnnnnnnnnnnnnnattacagtgtagctacctatatgctgaaaaatatagtctataaatcatttttatatggtaactctgtataatagagacaagttccttttttaaaaatgtttaccccaaaccataaaaccctatacaag

SEQ ID NO: 14951 - DNA, 772 bp, Macaca Fascicularis
  misc_feature (1)...(772): n = A,T,C or G
acggcaagctgctgnnnnnnnnnnnctatgaacnnnccaagtngaaagggaaaacaggnnnnnntgagaagccnnnnncagacctgggcctccnnnnnnnnnnnnnnnnnnnnnnnnnnnnnnnnnnnnnnnnnnnnnnnnnnnnnnnnncagagagcggggnnnnnnnnnnnnnnnnnnnnnnnnnnnnnnnnnnnatcaccagcntcaagaaggaggatgtcatctccactctgcagtacctcaatctcatcaactactacaagggccagtacatcctcacactgtcagaggacatnnnnnnnnnnnnnnnnnnnnnnatgctcaagcggctcctgcggatcgactccaagtgtctgcacttcactcccaaggactggagcaagagggggaagtggtgaccaggcactgcccactgcagtgctaagacagcaggactggggctgatagcccaccccgccctcactgcagctcccacaaagcactctaagggagatggggctgaaaagctcgaaaaggaagggacaggcctggcagggcccattggtgcccggcaccaaggcgagctcagggctcaggctaactccaaggtcagctggccacaggcccaggcctgctctgaaccagggaccagagggagccaggcagctgtgtacagtgagatggggggtgggggagctctgtacagagggctggtggttgtaaaaatttcttttgtaaagtagaagttgggggtggggtgggtgctggctgcaaaaaattctggcttctc

SEQ ID NO: 14952 - DNA, 787 bp, Macaca Fascicularis
  misc_feature (1)...(787): n = A,T,C or G
acaaggccggtgtgacttcagcgagttcacnnntgtgtggannnnnnnnnnnnnnnnnnnnnnnnnnntccgcacgtacgaccgggacannnnnnnnnnnnnnnnnnngaacgagctgaagcaggccctttcaggtttcggctaccggctctctgaccagttccacgacatcctcattcgaaagttcgacaggcagggacgggggcagatcgccttcgacgacttcatccagggctgcatcgtcctgcagaggttgacggatatattcagacgttacgacacggatcaggatggctggattcaggtgtcnnnnnnnnnnnnnnnnnnnatggtcttcagtatcgtatgaccctggcctctcgtgaagagcagcacaacatggcaagagccgaaacgccaaagttcctgcctgtgagggaatggaacccagatgcagttagatgctgttcttcctttnnnnnnnnnnnnnnngggacccagctgtacatatgtggataaggtgattaatgttttccaactataatagtagctgcatcattataatgcagacattggatttggtgactgtctcattgtgccatgaggtaaatgtaataatgtttgaggcatnnnnnnnnnnnnnnnatctatcatgtgcttttctagatgtctctggttctatagtggaaatgcttttattagccaataggaattttaaaataatatggaacttgcacaaaaggcttttcatgtgccttacttttttaaaaaggagtttattgtattcattggtatatgcgacgtaagc

SEQ ID NO: 14953 - DNA, 759 bp, Macaca Fascicularis
  misc_feature (1)...(759): n = A,T,C or G
ctgtcaaagtnnnnnnnnnnnnnnnnttttaagagcttgttnnnnnnnnnnnnnnnnnnnnnnnnnnnnnagtgnnntcgtcaaccctcatcctaagagccgaagcagggatgaaaatgactctctcccaaacctcttcttatttttaattatcccaaatatatcatttagttgcttctgtaaaagacatataaattataaaaaactcattttaatcaaaaatattaacttattttatgttactcaaactatgcataaaatgtctgcattaccattacagtaagtgccttgctcccaaaaataagctccaacgtgggcatagttgaacagctatgcctnnnnnnnnnnnnnnnnnatgcttattagcctgtgtgcatcattccagatggacctaatcattccaggactgaaaccagaatcgctgaaagcccttgaaatgcattcaataattcacaagttaaaacttggatatctgttcagcccaaatgaaatcttccttttaaaaaaagtctacagtattgaaaattgttcaatgtgcnnnnnnnnnnnnnnnnnnnnnnnnnnnnnnnnnnnnnnnnnnnnnnnnnnnnnnnnnnncaaacttccaaaattcaaagtgcagcgatccacataacgttgtacatttaagaagtgattccttcaagttaatttaaaatttcaatgaatacatggtgatcaggaaaactttttttcaagcactgtggaaagtaccacaaaaccctttagaattaatctgga

SEQ ID NO: 14954 - DNA, 742 bp, Macaca Fascicularis
  misc_feature (1)...(742): n = A,T,C or G
gagcgctggaccaagtacagnnnagaagatgtnnnnnnnnnnnnnnagcagagcaatcaggccgccgccctggccttcctgggctcccagagcctggctgcccccactgactgcatgtcctccttcaaccaggacccctccagctgtggggcggggagggtcgtcttcaccaaaccagtccgaggcgtcgaggccagacacgagagaaagagggtcctggggaaggtgggagagccaggcaggggtggccttgggaaccctgccacacacaggggcgagggccctgtggagctggcccatctggccggccctgggagcccagaggccgaggagtggggcagcccccatgggggcctgcaggaggtggaggcactgtcagggcctgtccacggtgggtctgtgccaggtctcccgccggtggagactgttggcttccatggcagcaggaagcggagtcgagaccacttctggaacaagggcagcagccctgaggacccaggtgctgaggtctgagagggagatggcccagcctgaccacactggccactgccatcctgctgcctagtggggctggtcaaggggcagcctggccactgcccagctggagtgggaggaagcctgcaggctgcctgtaggtggcactggaggccctggctgcagctctgggtggcgtcctcccgagcagagacctgctgaggctcctggggtgtggggtgtgggctggaagcactggnntcctggt

SEQ ID NO: 14955 - DNA, 726 bp, Macaca Fascicularis
  misc_feature (1)...(726): n = A,T,C or G
agnnngnctgtgcggaagatcgcgctgctactgaagcccgacaaggagatcgaccaccagggcaaccacatgacggtgaggacactcagcaccttccgaaactacactgtgcagttcgatgtgggtgtggagtttgaggaggacctcaggagtgtggacggacggaaatgccagaccatagtaacctgggaggaggagcagctggtgtgtgtgcagaaaggggaggtccctaaccggggctggagacactggctggagggagagatgctgtatctggaactgactgcaagggatgcagtgtgcgagcaggtcttcaggaaggtcagatagccagagaggaactgaggcccctccagacagcaccagcccacagaccctcctgccgtgcccccttcaagcccagattgtgccaggtcagctgtccctgcctctggccacctaccctccctctgggtccctcctcacccctccccttgttaatttgtaacttgcagcccccaggccaaagtcctttctcacacaccactgcccaatagtgacctcacttccaggtcaaggtctggcctcccagatgaaagaagcaggcaaagggaaggaacccctgagaacaaccaatgtcccctccctcctgtccatttgacctcttcttttccttctaagaaagaactaagctataggcatttggcgattagtgaaaattctatcctgatggacttctggaaaact

SEQ ID NO: 14956 - DNA, 690 bp, Macaca Fascicularis
  misc_feature (1)...(690): n = A,T,C or G
gctgcctacccactgcccccctttatgcacannctgaccccccatcagcagccgcactcacatgatccttcaccnnnnnnnnnnncannnngaccaggacatcctcaatttcgnnnnnnnnnnnnnnngtgaataagtattactgtaccaacggggcctcctctagcaggcccctgaaggcagtggaataaaatgaaatcttcgccctttaagaactcctgaccttaatgtggtagtagtatcttgtccttgaggggatttccttcccttcacccctaagactttcacaacctgttgactggaaagaaccaccacaaatcttcatttcctccagaaactgctacatctacagcnnnnnnnnnnnngtaaagggagagggatagaggagattgggtggaaaatggagaggatcaagaaggagctgagaccatttcaaaggaaaaaaatggctttaaagagttttaagttatgacttaaatgggtccaggtaaataaactaaaaagaagtgaaggcaacatgtatcgtctgacagaactaaatcttggagtagggtgacggataaaagactacatactgggtacagtgtacactgctcgggtgatgggtgcactaaagtcgcagaaatcactaaagaactcatccatgtaaccaaacaccacctgtaccccaaaaacgaaataaaccaaaac

SEQ ID NO: 14957 - DNA, 748 bp, Macaca Fascicularis
agagatattcctttagaaaaaatcgcagctctgaagtaattcagacagtggtgttccaggattagcagccagtgtcttggttgtgagtcacggtgcttacatgagaagtctgtttgattattttctgactgaccttaagtgttccttaccagccactctgcgcagatccgaagttatgtcagttactcccaatacagggatgagtctctttatcataaactttgaggaaggaagagaagttaaaccaacggttcagtgtatttgtatgaacctacaggatcatctaaatggactgactgaaactcgctaaggttaaatctgcatcaaaatttaaccattttgagcctcggaagggagtgccattggctttatttacttctctcctctgctagtgctgatttggaaacagttaaaagccaatttttagctcaaatggaatcatagccacataaaactttaacggacaactatatagaattaacttattttgtctaagtacagttgtcattttccagaataattttaccagtctgctatgtgtcgtctctggattgcacatggatgatgaaggaagtcagtattgaaagttgggggattagtaacctcgttaacaacggtttctttttcattttagcctgttttaatggctgttggtaagatactggttttttttagtatctcatccagtgcttggaagaaagaatggtttataattccccaatacatgtttatattgactatgtgttgt

SEQ ID NO: 14958 - DNA, 734 bp, Macaca Fascicularis
  misc_feature (1)...(734): n = A,T,C or G
gatgaattaactcccannnnntccaaaaatggatttgtngtcagacttgttgaattaattgaataaagagtagcttaatctatttgcagtatgcagcttgccccaaccaaccgaaaaactaactcagttaccctcatttaaccctcaccgccttcctttggttagaatctactttgtgtctcttggatttacctgcatatacattgtatgcctcctctccaaggtcaaaacctgctccgaggtggacgagccgtagctccccgaatgggcttaagaagaggtggtgttcgaggtcgtggaggtcctgggagagggggcctagggcgtggagctatgggtcgtggcggaatcggtggtagaggtcggggtatgataggtcggggaagagggggctttggaggccgaggccgaggccgtggacgagggagaggtgccctaactcgccctgtattgaccaaggagcaactggacaaccaattggatgcatacatgtcgaaaacaaaaggacacctggatgctgagttggatgcctacatggcgcagacagatcccgaaaccaatgattgaagcctgcccaccctcccatgagagactcttgttagtcaacacatctgtaaataaccttgagataacagatgagaagaaatctgattgatgctggatggacctatcacaataggttgtggacttacttgccaccagcttgtgcatttagtgtgttactttttgatact

SEQ ID NO: 14959 - DNA, 745 bp, Macaca Fascicularis
  misc_feature (1)...(745): n = A,T,C or G
ggacattgacacannngcggtagaaaaggagnnngcgcgggccccaccagagcctcctcacaannnnntctgtgccccaggttcctgggagnnnnnnnnnnnnnnnnnnnnnnnnnnnntaattctggggtcctaaaactgtgatggaggggatcctctcttgtgtcatcttctnnnnnnnnnnnnnnnnnnnncaactctgggtgtgtgtttttgtgggggctctaagcagcgactatggcctcctttgttcccatttcagggttccacaaaccgtcttgcatgtgtgtgtgtgtctggttaccccaaccttctgtgaaggtgggtcttcctgaattaatttatctattccaaatgccttaacgagactctgtttctgggagtctgattttccacttaaacatttcttccacctttcccgctagttcccactcccctgtgaccactggggcctcagggaagataaaagaaaactgggcctgtcgaaggatgacagggatgtgctgccaggttgctatagaaacccaggctctgcctcttgnnnnnnnnnngggtgggaggggctggtctcctccctccaggctgaaccccacttccttggcaggaccccagtctcagcagcctcctgatttcataaccaggccggaccacgtgcaatagggtggaaaccaaactgctccatgccacgttatttaaaagaaaggcagagtttgtggtgactttttttttttttggattgtttgta

SEQ ID NO: 14960 - DNA, 740 bp, Macaca Fascicularis
  misc_feature (1)...(740): n = A,T,C or G
agagagagggcggctccattcaaaggannnatgccaaaaatgagaataaagattgaccagtgacttctttggtagagacctgggcaccctggccagtgaagagctggggcctgtgagtacagcaaaggagtccacattgccaccacctcccctcagatgccgctgctctgagctcagcagcactgggcagtctgcccagtccggcccatggcttttgctccagaggagcccagtggggacagtcggagtggaggagtgaggggctgtcccagtggaagccctggccgctgccttgggtggcactgtttctcaaacgctctggaggccccagagggccaagggtctgaagacttgggtttgaatggagttgagagattcttggagcaatgatacttgttacagaaggatttactggnnnnnnnnnnnnnnnnnnnnnnctgggatgataaggagtttnnnnnnnnnnnnnnnntggtatgggaaaaattgccatcgggaacatattttgtatgattttgcttatttagtaaatgtttgtaaaagcctatatctgtgcttttaatgggtttgggtattttagggtgtggaatannnnnnnnnnnnttctctgatttannnnnnnnnnnnnnnnnnaagaaggtttgacttcctccattgttcaggaccaannnnnnnnnnnnnnnnnnnnnnntttgtttaaacactccctctcacttttcccatttgaattctgttacact

SEQ ID NO: 14961 - DNA, 725 bp, Macaca Fascicularis
  misc_feature (1)...(725): n = A,T,C or G
accagtttataactaaaatagtgttatctgactaattnnnctgaattttgatgtaagatctatacaggcccccaaaatgattatagtacatgccagtcgtttctcagtgaaataaatacaatatcagaggacattatgggttgtattgctttcttttatggtagacctgttaatggggaaaaaaaatacatcacatcaaatagaatcttgtatctgtgtgttaaaatagagcacttacctgaagtcagtggcctggatcatttcccagtctgtcctgtgctgtgtgaccttggacaaggtgcttcatctctctgagcctctgtttctccatgtgtaaaacaaggggctgcaggagatgatggctgagagcccttcnnnnnnnnnnnnnnnttggtccaaagaccccacccctctgctggtcctgccaacgtgttggtgctataagctgcttcagatataaaattggtttatctataatgtttattcatttaatagcttctaaaaggcctttttgttatacagtgctttttttctagttttatggacttggttactgtaataatgtcttgtttttagccatgtaattacaaacacatattctcttgatgtctcagtaaatttgcatttgatatatcattgatgagattttgttgttatataatattcttcggctactcatctgtccagcatcttattaaccataacactgtgatcattgtttggaa

SEQ ID NO: 14962 - DNA, 252 bp, Macaca Fascicularis
  misc_feature (1)...(252): n = A,T,C or G
gggagggaggaggaggaggagacagaggggaagggggagccggcctgacccacatccctggccatcgctccctgggccaggtttagagcagggagtttggctggtgctaggcctgggccagggggccgggacacccttgtttttggtggtcttcccgttgtgggagcaggtggagggtggagacctaaacttctgggtccagctgccttcagcccccctcccccagactaacagatccntggaggcaggggt

SEQ ID NO: 14963 - DNA, 745 bp, Macaca Fascicularis
  misc_feature (1)...(745): n = A,T,C or G
agaagaaataagagccacagctaggcatggcccaaaaagnttncttcacacactcctccttgctcttattctgtgggactggagtgannnnnnnnnnnnnnnnnnnnnnnnnnnnnnnnnnnggccaccatcagctgggattcctgtttgatgatatgccccttcccctaccttagataacctggaacacgtacccagactgttacatgagagaaactatnnnnnnnnnnnnnnnnnngaaaactgagtctcaatgaggtgaaagagtatgagggtgtgtctaaggtcaannnnnnnnnnnnnnnnnagggaccccgaagtaggggtttgaatcctgctgtgagaaacctcaagtgaacagttcccttttctgagcctctaatcttctcatctgtaacacagggttaaccactgtcctggcctccagtgggaggatnnnnnnnnnnnnnntccaacannnnnnnnnnnnnnnnnaattgnnnnnnnnnnnnnnnntttgggggaagttggagaaaaacaggggcatgagaggggcttctaggatatagtaatgcttcattttgtaatctccaggctgctaatacaagctcatttgtgaaaactgtacatttatgatctgtgcacttttctattaggttggtgcaaaagttatgtattattcccaatcttttgctatgtgttagtccaggtttttacttttgcagcaacctaattattgttgtaccaaccntaataaatgtatgat

SEQ ID NO: 14964 - DNA, 749 bp, Macaca Fascicularis
  misc_feature (1)...(749): n = A,T,C or G
tgcagaaagagttagaaannnnnacagnnnnnagatatcaggaattgccacatggtacatttcaactgaatttcagattctggaaattcagaataaggagagattatctnntgctgttactgacctcaacataataatggagcccacagaatgctcagaattaagtgaatttgtgtctagagcagaagacagaaaagatctgttcatgttttttcgaagcctgcatttttttgtggagtggtttgaatatcgtnnnnnnnnnnnnnnnnntttcaaggaaaagtacccagatgccgtgtacctctcggaggggccctcctcctgnnnnnnnnnnnnnnnnnnnnnnagccggccagggtttgaattagtcattgtttggaggatacaaatagatgaagacgggaaggtttttccaaagctggatcttctcaccaaagtcccacagcgagccctggagctggacaagaacagagccatagaagccgctcctctcagcttccgaaccctgctcggagtgcttggaatcgaagctgctctggaaagcttgataaaatcgctttgtgcagaggagaacaactagttctaaaacagtgaacgggagggttaagatgctgcgcggaggagcatgcaattttattgaatataaacannnnnnnnnnnnnnnnnnnnnnnnnnnnnnnnnnnnnnnnnnnnnnnnnnnnnnnnnnnnnnnntatggaaattctgatgacatgaaaaataaatacagc

SEQ ID NO: 14965 - DNA, 665 bp, Macaca Fascicularis
  misc_feature (1)...(665): n = A,T,C or G
ccagagcagtgannnnnnnnnnagcaattagggtggctccttccagagtctgtgtcagtgnnngcaaaagggcgctgaaaacagaaacgtcaaccccatgctggatctgcccccaggtgacaaccagggcatccccatcatgtccagcatcaagctgaaagaggagcagcgcataacgaccacctccccctggatgtttccctctcgcatggcttggcctgaggaccacgtgttcatttccacccccagcttcaactacacaggnnnnnnnnnnnnnnncttctttgcagacctgcactttgaggaaggctggtacatgtggctgcagtcacgtgacctcctggcaggcctcccagcgcctggcgtggaagtatactgtctttatggcgtgggcctgcccacaccccgcacctacatctacgaccacggcttcccctacacggaccctgtggatgtgctctatgaggacggtgacgacacagtggccacgcgcagcactgagctctgtggcctctggcagggccgccagccgcagcccgtgcacctgctgcccctgcgtgggatacagcatctcaacatggtcttcagcaaccagaccctggagcacatcaatgctatcctgctgggtgcctaccgccagggtccccctgcatccctgactgcca

SEQ ID NO: 14966 - DNA, 648 bp, Macaca Fascicularis
  misc_feature (1)...(648): n = A,T,C or G
gagcannnnnngggtggatggaaccccgcctggctgcgtttggtcagagaaacacgtggtcttgagggggctgagctggagtctgagatggggctggccgggacacgacaaggtgagacagaggcggcccctccgctgctcttttttggaatgtgagctcccaccagaagaaggttnnnnnnnnnnnnnnnnncccacgtgtgggccaagagagcagaccaggtctggaaggtgcagagggccccaacccccacaagtcccggcctcactcagctcacagggcatgccaggcggcaacaccagaatcttccagaagcccagctccacccgcacacacagattcccgtccagtccttcaactcgattcttacataacacgcgtttctgtttgttttgagacaaaaccaccacccgtcaaaaggcaggtggctccagaggggacaagaccctcttgcgcctgctccgccctggagccgcccccgcgggctccgcgtgccacctgcacgtgggctgtcttcacaggtccgatgcggaaattcaatcacgacgtcaaccagggctcgagnnnnnnnnnnnnnnnnggctccttatctctatttattttaccaaatgcgaattgagaaagacttgacaaaacacaaaatggca

SEQ ID NO: 14967 - DNA, 1402 bp, Macaca Fascicularis
  misc_feature (1)...(1402): n = A,T,C or G
gtacagaagctgtgcactcatgaacaaatgatgtgcagcaannnnnnttataactcagtgaacattgcctttctaatgangggctccagcagtgttggagatannnnnnnnnnnnnnnnnnntgaatttgtttccaacatagccaagacctttgaaatctcggacattggtgccaagatagctgctgtacagtttacttatgatcagcgcacggagttcagtttcactgactatagcacnnnnnnnnnnnnnnnnnnnnnnntcagaaacatccgctatatgagtggtggaacagctactggtgatgccatttcctttactgttagaaatgtgtttggccctataagggagagccccaacaagaacttcctagtaattgtcacagatgggcagtcctatgatgatgtccaaggccctgcagcnnnnnnnnnnnnnnnaggaatcnnnnnnnnnnnnnnnnnnnnnnnttgggcacctcnnnnnnnnnnnnnnnatatggcttctnnnnnnnnnnnnnnnnnnnnnnncttcacaagagagttcacaggattagaaccgattgtttctgatgtcatcagaggcatttgtagagatttcttagaatcccagcaataatggtaacatttgacaactgaaagaaaaagtacaaggggatccagtgtataaattgtattctcataatactgaaatgctttagcatactagaatcagatacaaaactattatattaaatatgtcaacagccatttaggcaaataagcactcctttaaagccactgccttttggttacaatttacagtgtactttgttaaaaannnnnnnnnnnnnnnnnnnnnnnnnnnnnnnnnnnnnnnnnnnnnnnnnnnnnnnnnnnnntaaaaccttgagttctaaccatgcctactaaannnnnnnnnnnnnnnnnnnnnnnnnnnnnnnnnnnnnnnnnnnnnnnnnaccaaaagcaacattccttctctaaccattccgtattgannnnnnnnnnnnnnnnnnnnnnnnnnnnnnnnnnnnnnnnnnnnnnnnnnnnnnnnnnnnnnnnnnnnnnnnnnnnnnnnnnnnnnnnnnnnnnnnnnnnnnnnnncaatagctagctattactgcagactataaaatctgggtatagaaaggagtcctgnnnnnnnnnnnnnnnnnngtgtgttttcataacaacttatgactaaaaatatcacactgaataagagagcaggattgccaggtatttttctatttctctccttaattttatatgtatatagatatatttnnnnnnnnnnnnnnnnnnnnnnnnnacttaaaagttggtaaagtatttactgactgcttataaacatttaaannnnnnnnnagtaactgcaggaaaaaataatgtaatggaatact

SEQ ID NO: 14968 - DNA, 733 bp, Macaca Fascicularis
  misc_feature (1)...(733): n = A,T,C or G
cgaannnnnnnnnnnnnnnnnnnnnnnngatgaagacaacgannccgagggcagcagctccagnnnntcctcctcaggggactcctcagannnngactccaactgaggctcagccccaccccagggcagccagggagagcccaggagctcccctccccaactgaccacctttgtttctcccccatgttctgtcccctgcccccctggcatcccccactttctttctttcttttaaaaaaaaaaaaaaatacggtgggggtagggggctggaggagcccaggccaggactctgcagcctcagagacatcagcccttgggggtcctcctccagggacannnnnnnnnnnnnnnnnnnnnnnnnnnnncagcctggcccacccctccgacttctctgcacttgcagttccggcatggacagtgtaccggagagtgggggtggggggggtcccaaagagttcgacgaggccctccacacctgcggcccaatccaaggtggggtggaagcttggggaagacgcattccttcccagaggggcctgccacctggacccctgcattggaactggaggcagggaatgtggggagaggagggctggtgccttcgagaaaacaggcgctgccctggtggccctctcccctgccccctgcaggaaggagctgcctggacccattcatgggggagggggcagaagtgttttttatatatgtgtatatattttttttaagctctgag

SEQ ID NO: 14969 - DNA, 711 bp, Macaca Fascicularis
  misc_feature (1)...(711): n = A,T,C or G
ataccactatacttttactgnttccccaattaagacttttgtatcacaattagcccataagtgagggtttctaatgtaaatgcttttgtccatttaatacaaaggaacaaaattaagttctcttatttattctggtttactacaggatactcaaaccaaaagtattatttcagagaccagtaataaaattgacgctgaaattgcttccttgaaaacactgatggagtctaacaaacttgagacaattcgttatcttgcagcttcggtgtttacttgcctggcaatagcattgggattttatagattctggaagtagtagtaatgctcatactgccatggctgttggcttcttagaacaccaaaccaggagagatttactttgaacattgtcagttgcagcaaaaatttactacacaagattattcaaagtatatatggactaaaagaggaatattttagaaagagatattttgtctttattgtgtgtgtctttagtatattgaaaagctgtcattcagacctggtttgagatggaagagcatttcgtcctttttgatagttcatagaaatcgaaccagagttttcttgtgtttgcttgaacaattgtgtaaatcatacaggattttgttggtattggttgaatatgtgaaaactattccctagcctacatatttattactgaattaactttcctgataaccattgcataat

SEQ ID NO: 14970 - DNA, 761 bp, Macaca Fascicularis
  misc_feature (1)...(761): n = A,T,C or G
acatcaatgactccgtggagctgagccagaatgagcagaagctggcggcctggctggccaagaaaggcccaatctccgtggccatcaatgcctttggcatgcagttttaccgccatgggatctcccgccctctccggcccctctgcagcccttggctcatcgaccatgcggtgttgcttgtgggctatggcaaccgctcnnannttcccnnnnnnnccatcatgaacagctggggcactgactggggtgagaagggttactactacttgcatcgcgggtctggggcctgtggtgtgaacaccatggccagctcggcggtggtggactgaggaggggcccccagctcaggacctggtgctgatcagagtggccgctgctgcagcctgacgtgtccaggcccctccccgggaggtacagctggcagagggacaggcactgggtacctcagggtgagcagagggcgctgggctggggcacagcccctgcttccctgcaccccactcccaccctgagnnnnnnnnnnnnnnnnnttgttgaattgtggtagcttaggaggatcttgtggtgaagggtggtatcttggcagttgaagctggggcaagaactctgggctcgggtaatgagcaggaagaaaatgttctgatcttaagcccagctctgtcctgcctccgctttcctctgtttgatactatacattttctggttcccttggatttagggatcgtgtccctctccacgtccaggaaacttgtaaccaacct

SEQ ID NO: 14971 - DNA, 992 bp, Macaca Fascicularis
  misc_feature (1)...(992): n = A,T,C or G
gannnnnnnnnnnnnnnnnnnnnnnnnnnnnnnnnnnnngccaaagtgtttgatgaatttcaacctcttgtggaagagcctcagaatttagtcaaacaaaattgtgactttttgagcagcttggagaatacaaattccagaatgcgctattagttcgttacaccaagaaagtaccccaagtgtcaactccaactcttgtagaggtctcaagaaacctaggaaaagtgggtgccaaatgttgtaaacttcctgaagcaaaaagaatgccctgtgcagaagactatctgtccgtggtcctgaaccggttatgtgtgttgcatgagaaaacgccagtaagtgagaaagtcaccaaatggtgcagcggaatccttggtgaacaggcgaccatgcttttctgctctggaactcgatgaagcatatgttcccaaagcgtttaatgcggaaacattcaccttccatgcagatatgtgcacactttctgagaaggagaaacaagtcaagaaacaaactgcacttgttgagctcgtgaaacacaagcctaaggcaacaaaagagcaactgaaaggtgttatggataatttcgcagcntnngtagagaagtgctgcaaggctgatgataaggaggcctgctttgccgaggagggtccaaaatttgttgttgcaagtcaagctgccttagcctaaaaacatcacaattaagaacatctcagcctaccatgagaacaagagaaataaaatgaagatcaaaagcttattcatctgtttttctttttcattggtataaagccaacaccctgtctaaaaaactataaatttctttaatcattttgcctcttttctctgtgcttcaattaataaaaaatggaaagaatctaatacagtggtccagcactgttatttttcaataggtgtgttgctatcctgaaaattctgtaggttctgtggaagttcccgtgctctctcttattnnnnnnnnnnnnnnnnnttctagt

SEQ ID NO: 14972 - DNA, 709 bp, Macaca Fascicularis
actggtggctcctctagccagagggctctaaggggcagatgctattgctacttttccagggcacagggcagtcaggatggaacctcagcacacaccagctggaggctggcgtccctgcacttggaagtgggttccctagccaccggggttgacctctctcgctaacagggcccacccagatcactccccgcgtcttctgtcccctctgggattcccattgtcccctactccagcaccagacaggcacccccaggccactgcgactcccaccacgaaggaccccagccctctctcagccaacaccgccccgcccaccgtctcagacatcgtgcttcttctggtgggccaggagtctctcctcgtcatcgaaggtctggccacagatggcacagcagaaggcgccgtcccggatgtggctcttgcggtgagtgatgaggttggacttctggctgaagctgcggtcgcagtcggggcaggcgtagggccgctcgcccgtgtggatgcgccggtgcgacaccaggttggacttctggctgaaggctttgccgcagtcggggcagacgtagggcttctcgccggtgtggatgcgccggtgcgccgccaggtagggcttgtggcggaaggccttgccgcagtcgggacatacgaagggccggtcgggggcgtggtcgcgccggtgagcagccagatggctaccctgggagaagcg

SEQ ID NO: 14973 - DNA, 771 bp, Macaca Fascicularis
  misc_feature (1)...(771): n = A,T,C or G
gnnnnnnnnnnnnnnnnnntccnnnnntnnnnnnncgcagccaaggagcctgtccgggagggcgcccccccaaactggaagnnnnnnnnnnnnnnnnnnnnnnnnnnnnnnnnnnnnnataactacatgnnnnnnnnnnnnnnnnnnnnnnnnnnnnnnnnnnnnnnnnnnnnnnnnnnnnnnnnctacgatgaacaggtggctgcacaaatgccnnnnnnnnnnnnnnnnnnnnnnnnnnnnnnnnnnnnnnnnnnnnnnnnnnnnngactccgcatccccgagggcctctttgatccctcgaacgtcaagggcctgtcggggaataccatgttgggtnnnnnnnnnnnnnnnnnnnnnnnnnnnnnnnnnngtgannnnnnnnnnnnnccgggcctgtatgggagtgtcattgtcactggcgggaacacactgctgcagggcttcactgacaggctcaatcgagagctttcccagaagaccccaccgagcatgcgactgaaactnnnnnnnnnnnnnnnnnnnnnnnnnnnnnnnnnnnnnncctggattgggggttccnnnnnnnnnnnnnnnnnnnnnnnnnnnnnnnnnnngatctccaagcaggaatatgaggagggcgggaagcagtgcgtggagcgaaagtgtccctgacggcgctcctccccacgcacctgctcccaagctcagcnnnnnnnnnnnnnaccccatgccacatcgccccctcctctttccctcttgtcttcgtaaatggtgatgtttctgggt

SEQ ID NO: 14974 - DNA, 750 bp, Macaca Fascicularis
  misc_feature (1)...(750): n = A,T,C or G
agcagnnnggggctgtnnnnnacgttgagtgctcctccaggtcctctgagcgnnnnnnnnnnnnnnnnnnnnnnnnngccacagtggcctnnnnnggccgtggccataggcagctgcgccgaactgactcacgccggggaatgcagcgatccactcagctgtcaggacggccagaccgggggaatgagggcgagatacacaaggatcgagccaagagctgcaaccnnnnnnnnngggctaggagagggcagagtgtgaagaggggtggtgagggacacaattgttcccctgcctgcgcccaggctttctgacctcctgagcctggctgggaagnnnnnnnnnnnnnnnnnnnnnnnnnnnnngggcaggggagctggagggcagaannnnnnnnnnnnnnnnnnnctcctcctccctnnnnnnnnnnnnnnnnnnnnnnnnnnnnnnnnnnnnnnnnnnnnnnnnnnnnnnnnnnnnnnnnggcaggtgggggttagggaagctgatatcaaatagtgaccttggtggagtctcctatnnnnnnnnnnnnnnnnnnctccacccccagcccnnnnnnnnnnnnnnnnnnccaaggaaaatgtccattctacgaccttctcttttcctctcctctcacttnnnnnnnnnnnnnnnnnnnnnnnnnnnnnnnnnnnnnnnnactaaattcaaaagcaaggagaagccacttcccccaccatcagtccaccagccctagaacctcccttgcct

SEQ ID NO: 14975 - DNA, 762 bp, Macaca Fascicularis
  misc_feature (1)...(762): n = A,T,C or G
agtggtgtacctgaaagcaataccactgccnngcaggccctgctggccccagcttgcctggcagggacctgggcactgggcgtgggtaccaagtacaccctggggctctatggaggccccatgaatttacgggctgccttcaacttggtggnnnnnnnnnnnnnnnnnnnnnnnnnnnnnttctccaaggattctctcactcacgccgtggagtcctggctggaccgccgcacggcctccctctctgcagcctatgtctgcggtggagtggagttctatgagaagcttctgtcgggcaatctggccctgcgcagtctcttgggcaaggagggggagaannnnnnnnnnnnnnnnnnnnnnnnnnnnnnnnnnnnnnnnnnnnnnnnnnnnnnnnnnnnnnnnnnnnnnngccgggacnnnnnnnnnnnnnnnnnnnnnnnnnnnnnnnnnnnggnnnnnnnnnnnnnnnnnnnnnnnnnnnnnnnnnnnnnnnnnnnnagacaccaccctgccactgagtctgcagggccctgttggagcctttggatctatagctcaaggccagaaaaatcacaggctttggaattaaatagcttagattctactgtaatcactacttaatgcactcagggactatgnnnnnnnnnnnnnnnnnnnngaatctgagccttcgtttcttgaactgaaaagcggagnnnnnnnnnnnnnnnnnnnnnnnnnnnggagttgggtgaggtcatgnnnnnnnnnnnnngcgcaaag

SEQ ID NO: 14976 - DNA, 776 bp, Macaca Fascicularis
  misc_feature (1)...(776): n = A,T,C or G
tgagctgccaatgagannnnnnnntgagcgatgactnnntcctgtgtggtgtttgtgtgataaaggcaaatccaccctgtttgctgtctactgtgcagtatatcagtagcttttatgctagctgtctgtctggagaggagtcctattggtggatgcagttcacagcagcagtagaattcattaaaaccatcgatgaccgaaagtgaccaagaccaaggcccaccaaggcagcagactgttaatcaaacaaacagatctctaagaaggcgcatcagctgctttgaaggctgaagattgtttttgtataatattgtacagcttcaggcattttaaagcagatctttactaaacaggttaatgagctaacaagcaggttctctttgggctctttcctttctgagttgcatattctattttcttgtccccaagtagagtctagtactacaaaaagggaccacatttttcaggtatttctaaatattaaaaaacagaacaaaaatctcttagaaaatttctagacctccattcttggataccctttctttccttttattttaaaaaagaacagtacccctcttttaagatgctgtcttatattaatgtgcatctaatggaaagaagatacgagttgcactgaggattataatagtggtacattagtggcattatctataaatacactcacctaaattgaaaagctaagaaggaaatgtaaatataatatatatttatatttgatgtaatatggacatctgcagattctaataaacaaggac

SEQ ID NO: 14977 - DNA, 779 bp, Macaca Fascicularis
  misc_feature (1)...(779): n = A,T,C or G
cagcagaannnnngagacatgaggtctcacncnnncggctactccattcgccattccataagtatgcagggcagaanattctcctnnnnnnnnnnnnnnnnnnnnnnnnnnnnnnnnnnnnntcacaagcctcaagacgaaagtaggcgggacgaaccctaacggaggcagttttgaggaggtcctcagctccacggcccatgccagcgcccagagcttggcaggaggctcccggcggaccaaggaggaggagctgcagtgctaagtnnnnnnnnnnnnnnnnnncatccaggaaccggccactacccagcccatctctgcccgtgcttatccagataagaagaccaaaatcccgctgggnnnnnnnnnnnnnnnnnnnnnnntattcaaatggcccctcaagaaagtttaatgatttccatttgtnnnnnnnnnnnnnnnnnnnnnnnnnnnnnnnncatttcagtattcatagatgactgtcacannnnnnnnnnnnnnnnnnnnnnnnnnnnnnnaactggtcataactcttgtctgtgtaattcgatgtatatttttccaaacatgtagctatttgtttgcttagatttttgtttggcctcctttatgatgtgcatgtccttgaaggaagaatgaacagtacctttcagttnnnnnnnnnnnnnnnnnggagctcttcnngacnnnnnnnnnnnnnnngatgatttactataaatttcatccaactacttgtgatctctctcacctacatcaattatgtatgttaattcagcaat

SEQ ID NO: 14978 - DNA, 769 bp, Macaca Fascicularis
gggaatggtgctggccaatcacagggagagagcatgaagtcccagtatttattcctggctgcccttggctaaaggtcacagctcctgtcaccctcagacagccctttccatgcccctcttcaggcctggggaggtaaagtctcaggctgtcagtagctgcagagagccacactcaccttgtcaagagactcttctcaaactgtccttacgtgagtgcactgccatttcttgcagggcccctgactgacacaggagctgctactgacactttacagggatggttctcccccgtacaggtcctctctgctcactacaggacgtgcagcatcctttgccccactcactaaaggccggcacaccccaggccccatggtattgctggttatggatttattgactttatattccaaattcagcttttttggtctgcgtttctgtagaaaggggataagctttgtcagtagagggcaccaaacaggcattacaggaggaaaggcgcctccttcctggttcctgttggttgtgcttccgcctctggaccccgcggtgcgtgtggcttccccagaacccagctcctgaagcaccaggcggtcagcagctgcccttggcaccctccagcccccagaagttgcgtaggagacacagcacctccactgaggcacctctctgggaataacattccccagcacgccagatggatttccagtcagttcagaagcatttcaccagtgaagccctcattccagttcactgtaaagccagaatctct

SEQ ID NO: 14979 - DNA, 653 bp, Macaca Fascicularis
  misc_feature (1)...(653): n = A,T,C or G
caagccccttccccacctgannnnnnnnnnctgggctnnnnnnnnnnnnnnnnnnnnnnnnnnnnnnnntttttcacctttaaactctaagccaagtgtaggaaactcttcatagctgtgtcgattttatatcagtcactgagactttttttttaagtttttatttattattaagacaactttgccaaaaaaaatcccctaagcacaactatttacatttctttatagcctcttctgatctctaacacatatatgcagttttaactgttactgtcatagtaactgatcttttgtctaannnnnnnnnnnnnnnagcacaatgcattaagagtctcttgaaannnnnnnnnnnnnnnnnnnnnnnnnnnnnnnnnnnnnnnnnnnnnnnnnnnnnatgtatgcctgaggttggttttnnnnnnnnnnnnnnnnnnnnnnnnnnnnnttctatgtctagtcttccatagnnnnnnnnnnnnnnnnnnnnnnnnnaggagcctnnnnnnnnnnnnnnnnnnnnnnnntacattgtgtaatgaatgaaaagcacataaatgtaatctactttgaactttgtagaaattatgtgtggaggctattcttacttacccatctcaagtcctgtgtgtgcacatgcgtccacgtgcacatac

SEQ ID NO: 14980 - DNA, 744 bp, Macaca Fascicularis
  misc_feature (1)...(744): n = A,T,C or G
ggcngagacatgtcagggggtgaatctcctttttgtnnnntgcttgctgtgaagggataaattagcctgggcctctaccccctagtccccatgtctgccaaccccagggcttcctgggatggggctccctgccattttagtgtcttggtgtagtgtaaccatttagtggttggtggcaacaattttctgtacaggtgtatatacctctatattatatatcgacatacatatagacatatatttttggggggggggacaggagatgggtgcaactccctcccatcctactctcacagaagggcctggaatgccatggctcctagggactggatgcaaggttacccttgagctatgtgccaccgtctggtgcccagtctggcatgcagctacccaggcccacccatcacgtgtgattgacatgtagacaccctgccacggcctgtgccccacctgctctgcttcctggttccttatcagtgccacgagggcagaggtgctacctggacttcctgccaggagctctccacccactcacattccgtccccaccgcctcactgcagccagcgtgaccctaggacaggagggaattgggcccagcttcaccctgctgtggggctgagagatggccatgaggttgtggctgtctcctgccctggggccactggcttcacactctggcctgactcataggggagtaggggtggagtcaccaaaaccagtgctgggacaaagatggggaaggt

SEQ ID NO: 14981 - DNA, 595 bp, Macaca Fascicularis
  misc_feature (1)...(595): n = A,T,C or G
ggaagagntnnngccccggctcccacccctgttcctgccacccctacaacctcaggccactgggagacgcaggaagaggacaaggacacagcagaggacagcagcgctgctgacagatgggacgacgaagactggggcagcctggagcaggaggctgagtccgnnnnnnnnnnnnnnnnnnnnnggagcactgggggccaagtgagccatgctagtcaggttagcaactccgaccacaaaccctccaaatccccagagtccgactggagcagctgggaagctgagggctcctggnnnnnnnnnnnnnnnnnnccaagctcccaggagccacctctcgagggtacgcgnnnnnnnnnnnnnnnnnnttggggtggcccagagtccagcgacaagggtgaccccttcgctaccctgtctgcacgtcccagcacccagcctaggccggactcgtggggtgaggacaactgggagggcctggagacggaaagtcgacaggccaaggctgagctggcccggaagaagcgcgaggagcggcggcgggagatggaagccaaacgcgccgagaggaaggcggccaagggccccatgaagctgg

SEQ ID NO: 14982 - DNA, 713 bp, Macaca Fascicularis
  misc_feature (1)...(713): n = A,T,C or G
cagccagaggnagctggggcgctggtcctgnnngttccggctcagggctgctgccctcacactccatctnnnnntcagccgaggggcccacggggggagggccaggacctggaagtgctgtctccatacggcgggggagctcaggggatgaannnnnnnnnnnnnngcggcgggcaggtgttccaggctggaccagcgtctccggggtggtcaccaagggcagctgagtggaggggaatggtgatggtggcacaagaggcaggactggcttgctgggtgtgtccaaaagcttgatcttgccacccctgaggtcttcccgtagtgagaaggggttgactcgagtcagattgtccccccagtttgggggtgattctggtgatgggggcaggaagnnnnnnnnnnnnnnncgggaaagccgggggtctggcctaggaagcgtggcagagggaccccctcttggaacagagcctgtagacagagaagtctggaatcactgtcctcagcatttgatcacagctccttgagggcctcactattctccaggaggctggtgggactagagcttgaaaaagggagtcccacctggttctttggaannnnnnnnnnnnnnnnnnnggccccttttacttgttcccctcccctccctcaagctttagcattaggaaactgtcttctttgagatgtcctcccaccctaccccagcccgactgcca

SEQ ID NO: 14983 - DNA, 628 bp, Macaca Fascicularis
  misc_feature (1)...(628): n = A,T,C or G
aaaaaataggagtggttggctgggtgaagaataccagcaaaggcaccgtgacaggccaagtgcaggggccagaagacaaagtcaattccatagtcttactccnnnnnnnnnnnnnnnnnnnnnnnnnnnnnnnnnnnnnnnnnnnnnnnnnnnnnnnnnnnnnnnnnnnnnnnnnnnnnnnnnnnnnnnnnnacacctgggatcacaggaagtcctggctgagcaagattggaagccctagttctcgcattgaccgcacaaacttttctaatgaaaaaaccatctctaaacttgaatactctaattttagtattagatactaatagaagagaaaaattgtaatgcttatactgcacaatagatactatatgttcttaagactatgtatactagaataatagtagtagagtagggtgaaaaaggaactttccgttctgaaagctaagcgactgtgttactaaaaatgtctgacactgaaataattttactcaactatgttttcaacaagcaaaaatgtagcatgctaagattaaaatgtcattacaaaatatttagtatgaacaatttaaacttgtnnnnnnnnnnnnnnnnnnnnnnnnnnnnntacagcatatatgacatatgttat

SEQ ID NO: 14984 - DNA, 846 bp, Macaca Fascicularis
  misc_feature (1)...(846): n = A,T,C or G
ttagcaagacagtggtgtaactgtgccttttagnnnnnnnngcaaagtcaaagatcaatgttaatgagatattttatgacctggtcagnnnnnnnnnnnnnnnnnnnnnnnnnnnnnnnnnnnnnnnnnnnnnnnnnnnnnnnnnnntgctctaggcccatagtcagcagcagcnctgannnnnnnnnnaggaatgaagaactgttgcctaattggaaagtgccagcattccagacttcaaaaaaaaaaaaaaaatctgaagaggcttctcctgttttatatattatgtgaagaatttagatcttatattggtttgcacaagttccctggagaaaaaaattgctctgtgtatatctcttggaaaataagacaatagtatttctcctttgcaatagcagttataacagatgtgaaaatatacttgactctaatatgattatacaaaagagcatggatgcatttcaaatgttagatattgctactataatcaaatgatttcatattgacctttttatcatgattcctccctatcaagcactaaaaagttgaaccattatactttatatctgtaatgatattgattatgaaatgtcccctcaaactnnnnnnnnnnnnnnnnntttttgagtcattgacttcattttatatttaaaaaattatggaatatcatctgtcattatattctaattaaaattgtgcatannnnnnnnnnnaaaatgggtcttttataggaaaaaaaactgggataactgatttctatggctttcaaagctaaaatatataatatactaaaccaactctaatattgcttcttgtgttttactgtcagattaaattacagctttt

SEQ ID NO: 14985 - DNA, 691 bp, Macaca Fascicularis
  misc_feature (1)...(691): n = A,T,C or G
tgcctggcagagcagcccnnnnggtgnctcnnncaaagcaatatagttcccctgcgggggacagcaagacaggggagagggttggggtggggacctgggggttccccatgtacagctgtgtatattcaggggtgttctctgtctggtacccgccgtgggcatctatgtgtgtgtgaacctccccttccccaagccctgcatgacctgtgatgctgcagacaccaccatcctgtgtgcaggtgtgtgttggggggcacggaggnnnnnnnnccatgtcctgttgcaccctctaccctgtgacccatgtactcggttgtaggaagtaaagagaactgagcacaannnnnnnnattctagtggaatctttctctaagcaattttcccattcctgcctctccctgccccggaaccacctgtggtgctagtgttggnnnnnnnnnnnnnnnnnnnnnntgggcagcaataannnnnnnnnnnnnnnnnnnnnnnnnnnnnnnagggtgccgagggcagcaggaaaaagtggggacctcggtgcatttgccccacccctccccttcctgnnnnnnnnnnnnnnnnnnnnnnnnnnnnnnnatgaccctgcgccctccaggcccctactcacatcctcccccaaccggcttcgggtcctcccaccacactctggttttctatgctgttttggtgcaag

SEQ ID NO: 14986 - DNA, 749 bp, Macaca Fascicularis
  misc_feature (1)...(749): n = A,T,C or G
ttgagtgtgagaatgtccagagaannnnnnnnnnnnnnnnnnatgtgggaaagcctttatctctgtcaccagtgttgacagacacatggtaacacacactagtaatgggccttataagggtccagtgtatgagaagccttttgattttcctagtgtatgtcaaatgcctcagagcactcacactggagagaaagcatataaatgtaaacattgtgataaagccttcaattattcaagtnnnnnnnnnnnnnnngaaagaactcatactggagagaaaccctatgcatgtaagaaatgtggtaaatcattcactttttccagttctcttcgccaacatgaaagatctcacactggagagaaaccctatgaatgtaaagaatgtggcaaagccttcagtcgttccacttacttgggaatacatgaaagaacgcatannnnnnnnnnnncctatgaatgtataaaatgtgnnnnnnnnnnnnnnnnnnnnnnnnnnnnnnnagtccatgaaaggactcacagtggagaaaagccctatgaatgtaaacagtgtggtaaagccttcaaatattctagtaacctatgcgagcatgaaagaactcacactggagtgaaaccttatggatgtaaggaatgnnnnnnnnnnnnnnnnnnnnnnnnnnnnnnncgaagccatgaaaggacnnnnnnnnnnnnnnnnnnnnnnnnnnnnaagaaatgtggtaaagccttcagttgttccagtccctcga

SEQ ID NO: 14987 - DNA, 730 bp, Macaca Fascicularis
  misc_feature (1)...(730): n = A,T,C or G
taagaacatctgnttcacacactacgacgtgggaggccaggacaagattcggcctctgtggcggcactacttccagaacactcagggcctcatctttgtggtggacagtaatgaccgggagcgggtccaagaatctgctgatgaactccagaagatgctgcaggaggacgagctgcgggatgcagtgctgctggtatttgccaacaagcaagacatgcccaacgccatgcccgnnnnnnnnnnnnnnnncaagctggggctacagcacttgcgcagccgcacgtggtatgtccaggccacctgtgccacccaaggcacaggtctctatgatggtctggactggctgtcccacgagctgtcaaagcgctaaccagccaggggcaggcccctgatgcccggaagctcctgcgtgcatccccgggatgaccagactcccggactcctcaggcagtgccctttcctcccactcttcctcccccacagccacaggcctctgctcctgctcctgcctgcatgttctctctgttgttggagcctggagccttgctctctgggcacagaggggtccactctcctgcctgctgggacctatggaaggggcttcctggccaaggccccctcttccagaggaggagcagggatctgggtttccttttttttctgttttgggtgtactctaggggccaggttgggggggaaggtgagggttccgggtggtgctataatgtgg

SEQ ID NO: 14988 - DNA, 741 bp, Macaca Fascicularis
  misc_feature (1)...(741): n = A,T,C or G
aggaccacatggccaggcgcgcacagcccgggaaaggacagttacccacaggagctgcagccctgccaccaagccctctcccaacccaggctttgtggggcaggcacctggtaccgagggtaacccggctcctggtatggatggatgcgtaggatttaggataagctgtcgccctgtccccataccaaaaccattgtccaacactggtatctgtgtccttttgtgctatgaatttggattcctaattgctattgttggttgccggggtcttaaaggattgataagcttctccagttaacttatagagggggagccatatttaatattctggatttcagagtagagatttctgtgttgtctcctagaaagcattacatgtagttaatttcagcatcctggttgggcggggccctggctctcttcccctttagtgggacctcccctttctttgggcttcagttcactaaggaagaaataaggctgtcgccatctttatgcgctttcagtggaaatgtcatttgctatggacaatagtgcgtgagagtttagagaagcagtgaccagaacggggcagagtaggtctcctccatggcccagaatcctcctctgctccagggctggcctctgcagagctgattagacagtaatatgactgtctcatgggaagagcaggggcccagagggaccttctgagtcagaaatgctgccagaaaaantatctcctccaaccaaaacatctca

SEQ ID NO: 14989 - DNA, 740 bp, Macaca Fascicularis
  misc_feature (1)...(740): n = A,T,C or G
ggaatccaggcatggctgagctgggtcttctgagcaggggctcttacaggctgcagcccaggtgtcagtgggcctggggtcccgtctcaaggctcacgtggggaaggatctacgtgcaggctcactcgcgcgggtgctggctggtctcatttcctcgctggtgctggccagagttcactctcagtttctagctggctggaaatctctacagcttggctcacagcatgcagctcgcttcatcagagtgagcaagtgcaaagaaccaaggaaagaaaacacaagcaagacagaagtcacaggcttttcaagtctagccaagaaagtgaccatccaatcacttttgccctaactttttcattggacgaaagaaactaggtccagcccacactcaaggggagaggtttacacaaagtagacaccnnnnnnnnnnnnnnnnnnnnnnnnnnnnnnnnnnnnnnnnnnnnnnnnnnnnnnnnnnnnnnnnnnnnnnnnncagagcagtagttagtatgtcaggttcacctctgcatgtctggatgtaaactccttgaagtctcatggtctccttacctctgcagcccccaccaggctccacacacagccccttacagagaaccaacaagtaactgtctgcaaannnnnnnnnctctttcacaggcctgctggggacagtgaggannnnnannannntgnncggnnnggccgcggctgcaccctgcantaccagcatgccatggtgc

SEQ ID NO: 14990 - DNA, 714 bp, Macaca Fascicularis
  misc_feature (1)...(714): n = A,T,C or G
acgccgccgcctgtactcatnnntgcagagaagannncannnnnnnnnnnnnnnnacgagtnnnngctgctcaagggggttgaggccgtagccatccatgggggcaaagaccaggaggaacggactaaggccatcgaggcgttccgggagggcaagaaggatgtcctagtagccacagatgttgcctccaagggcctggacttccctgccatccagcacgtcataaattatgacatgccggaggagattgagaactatgtacaccggattggccgcaccgggcgcnnnnnnnnnnnnnnnntcgccactaccttcatcaacaaagcctgtgatgagtcagtgctgatnnnnnnnnnnnnnnnnnnnnnnnnnnnnnnnnnnnnngtgccgcctgtgctgcaggtgctgcactgcggggacgagtccatgctggacattggaggagagcgcggctgtgccttctgcgggggcctgggccatcggatcaccgactgccccaaactcnnnnnnnnnnnnnnnnnnnnnnnnnnnnnnnnnnnnnnnnaggactacctggcccacagttccatggacttctgacccgatggtcttccctcctctccaagggnnnnnnnnnnnnnnnnnnnnnnnnnnnnnnnnnnnnnnnnnnnnnnnnnnnnnnnnnnnnnnnnnnnnnnnnnctggcctgggctgggccagactggtcctagttgc

SEQ ID NO: 14991 - DNA, 723 bp, Macaca Fascicularis
  misc_feature (1)...(723): n = A,T,C or G
ttttaaacgctttcaaacaaannntacntagaccccaatataaaaaataantnntgcagacntgggcagtttgcactttctttttttggtggaagaatnctcagggtccttaggactgactgttaaaagcctcctcagcgaatgagcccttgaacagtcctacgagaccctgaggattctgtggagtagtttgaaaaccattgttctgaggaaggcggtccaatctggctcctcgcactaaagctgcaactcacagaaaagagggcaacggtggggtagacaagccacgctgtctccagacccactagggtagaaggaaggttcctgtgggcctgtnnnnnnnnnnnnnnnnnnnnnnnnnnnnnnnnacttaagaatccagggggttttatgtaatgttgtcaccacatggttcttttaaaaacacataagaaaatgtgagggtgtagcgcagatgaggagagagatgacacagagggagcagccttctctttagcaagatgtaagggaaatataattcgcttacataaaaaagaaacaacacacacgcaaacccttcaccagaagcttcacactacatcctcctcctcctcctgctccccaccttcaccgcatccctttcagagnnnnnnnnnnnnnnnnnnnnnnnnnnnnnnnnnnnnnnnnnnnnnnnnnnnnnnnnnnnncagcgtggaagacaaaccaaactgcacaaccccctgt

SEQ ID NO: 14992 - DNA, 105 bp, Macaca Fascicularis
tgctccagaatacccacccaagaacataataggctttaaaacagtgtcggcttctcatccaaagaacaattaaagattgaaacacctcattagctgagtgtagag

SEQ ID NO: 14993 - DNA, 755 bp, Macaca Fascicularis
  misc_feature (1)...(755): n = A,T,C or G
caggcattcgattctctttgtttggactgagnnacagaagaaggaaaaaccttgtttttggagtatcaagctgttccagtaatattaagtcatctaagaatatccagtaaaggactactgtctaatgttattgacagtttgctacagatgacggtggaatctaaatccttgcagcctttcctggaagcctgtagcaactcttcattttttcgtacttgctctgtgctgcttcgagcccctaagcttgatcttcaaatactagaaaagctcagtattattttacagaaactttccaaaatcaagagtaataagaagctctttgaacttttcacaattcatctgatgcttcaagaaatacaaaggacaacaaacccagagcatgcatttctctgtattaatctaaattcaaccctgttcaatttgggtttaacaaaatgtaactccctggtctccagtgcaagccattagactggctaattttttaatatagtatatgtggtgcttatttataaacatgtagaaattaccaaagtaactacaattctaccaaggaaagttatcagtagcatcatttatcatgaaaaataagtacttttttgaactttaaaaatgaaatctgtagaaggtttcagttcaagtaaggtagtgctaatgtacaagataacatttctagaatgtatgacactgaagttactttttgtaaaaatatattaggaaatttctttcttaattatgtgattattggaataaaatcg

SEQ ID NO: 14994 - DNA, 752 bp, Macaca Fascicularis
  misc_feature (1)...(752): n = A,T,C or G
atatggtgcccttnnngagagatataactggcagctgcaggcccctgatgttctcttctacccactgagaccagagttagtggaatccacatatctcctctaccaggcaaccaagaatcccttctacctccatgtaggaatggatannnnnnnnngtctggaaaagtacacaaaagtcaagtgtggnnnnnnnnnnnnnnnnnncgtcattgacaagtccacagaagaccggatggagagcttctttctcagtgagacctgtaaatacttgtatctgctgtttgatgaagacaatccagtacacaagtctggaaccagatannnnnnnnnnnnnnnnnnnnnnnnnnnnnnnnnnnnnnnnnnnnnnnnngaattgccgtggaaggaattcttnnnnnnngagggagggcaggaccaagggggaaagtctgnnnnnnnnnnnaannnnnnnnnnnnnnnngtcatcaactccagctccaactgcaatcgtgtacctgatgagaggaggtactccctgcccttaaagagcannnnnnnnngacagattgaccagatggttggcttgatttgatctgctctctgtgaggcctcatcttgaaccagaccttaacaaccgaacccagaccatgccaaagtccagtctgaaatggaaggggacagaagtctcgctgtccgtgatagtgtaggaatttctgtgcagcacctcacnnncatnnnggttaatcctcacacttcagtgttctctctgtcaa

SEQ ID NO: 14995 - DNA, 1054 bp, Macaca Fascicularis
  misc_feature (1)...(1054): n = A,T,C or G
cgtgataaggtcaatgaggagatgtacatagaaaggttatnngatcaatggtacaacagctccatgaacgtgatctgcacctggttgacggaccggatggacttacagcttcacatttatcagttgaaaacactaattaggatggtaaagaaaacctacagagatttccgattgcaaggggtcctggactccaccttaaacagcaagacctatgaaacaatccgaaaccgtctcactgtggaggaagccacagcatcagtgagcgaaggtgggggactgcagggnnnnnnnnnnnnnnnnnnnnnnnnnnnnnnnnnnnnnnnnnnnntagacccntggtcctagagtccgctgggacagagtcctgtaatcagtgcatgtccttagtctgttagttaaacccattagggaattttctgtcaactaccatgcccatgagatgtttatcaatacaactgccattttagctatgtggtaccaagattagcaaatgaccttcatatcctctgatttcctgatgtccatgtctatatgtttacaagcaatatggagcaccattctttaaatactgttcatggagaatacatagtcttaccactaggcgtgtccctgttatcagcaaagatcaatgatgcttcattcatgtactgtgtatgcattggtggtaaatggatgtgagggcaagtataccaagtacattcactgtgtttcacgtatgtggatgccagttaattaaatgagtacataaataaattaattaaaacacatagatctgctttgtgtttttatttttattttttgaaaaacaaaaggcaagtctccaacgatcaacttttgattctttctgttcccctaaaactaaaaaatgaaccccttgtgtccttgttaacccaccctttcatttactcaaataattagcccaaaaaggatggctacataccaatggattgattctcttaattgccatggcaagtgggcaatcctatcatgacttaacatcaagcacacagttcaaaactactgtcttctgtcaaagttttctcctcttaaatgt

SEQ ID NO: 14996 - DNA, 751 bp, Macaca Fascicularis
  misc_feature (1)...(751): n = A,T,C or G
atgataaaaatanngaacagaagagagatctgaattctcanntnnagatggagaagcggcagaagaagcagaggtttataggtcagaaaatgaaagtgaacagaactctctagaagaatcagagggctgctattgcagatcatctggagaccctgaacaaataaaggaagacannnnnnnnaaagagagtgctgatgcacggtgttttgaaatgactgaattcaatcaagctttagaagaaataaaagggcaggttgttgaaaacaactctgtaactgaattttctgaggagaaaagcagaactgaaaattacaacgggcaagatggtcagagagttcaaggaggagtccctgctggctctgaggagtatgacgatgaatgccctcatctaattgccttgtcattaannnnnnnnnnnnnnnnnnnnnnagatgaagaaaatatgggagnnnnnnnnnnnnatagaacaagaactctgagtatcacttccnnnnnnnnnnnnnnnnnnnnnnnnnnnnnnnnnnnggaactggtgaaacggaaggtgaaacgtcagttgacaaaacagcaaaaatcagctgtcagacgtcgattgcagaaaggagaagcaaatatatttaccaagcaacgtagggaaaacatgcaannnnnnnnnnnnnnnnnnnnnnnnnnnngcttttggggagaataatatttaggatcttggatatgtttaatatgtttttaaagttactgtaattcctttttgagc

SEQ ID NO: 14997 - DNA, 760 bp, Macaca Fascicularis
tagatgaaattatttgggtgaagacaaatcaactgcaacgcatcattcggacaggccgtacaggtcactggttgaaccatgggaaggaacactgcttggtgagcagcagtggggcccaattcaataggtggagcacaaaagaagaatcatttgatttcttactgagaaaaagttcaaaaggtggtttcataaggtaatctgttatctgtggtgagcaggttggtgtcaaaggaaatccccaaggcttcaaccagggtctggattgtgatgtgatcgtagctgaggtatgtgcttcccaggcgtccaaagcttccacatttctgttggtatcagttattcatgttgggtgtattctcatcccagatttttctcatttagatcataaacataatagaaggggctagaattgcaatcttgtgtaacttaaaaagcagctactttttatttcctaggttcgttccaccagtcataaacccgatgaaatctatggcatgattgaaagactatctcccggcactcgcaagattgagttatttggacgaccacacaatgtgcaacccaactggatcacccttggaaaccaactggatgggatccacctgctagacccagatgtggttgcacggttcaagcaaaggtacccagatggtatcatctctaaacctaagaatttatagaagtacttccttacagagctaagaatccatagccatggctctataaactaaacctgaagagtgatatttgtacaatagctttc

SEQ ID NO: 14998 - DNA, 1384 bp, Macaca Fascicularis
  misc_feature (1)...(1384): n = A,T,C or G
agcaaccatggctcacaggtcactaagcgtctccaatatgactattaaaactgtcacctctggaaatacactagtgtgagccttcagcactgcgagaataccttcaagtacagtatttttcttttggaacactttaaaatgtatctgtttttaaggttattctaaattatagtagcctcaactcattctgtcaccagtagaattcagcagttaatatagtccgtattatttctttgagtcaattcattttcagagcactttaaagtctgatatttcttgtgcactgtgannnnnnnnnnnnnnnnnnnnnnnnnnnnnttttatggactgaggactggtaactggtctggatagaagcaaattccaattccaaatgtaatcagacaaaaatcactttttttagaatgtttttattgtaaaagtgtctttttcagcttcctgttctattnnnnnnnnnnnnnnnnnncatttttgtctatggtgaactgctgtaaatgacatagagaaatgcctcaaaaggacaggtggtttgactgatgaatgatgatgnnnnnnntgtgtcacttggacagggcgttttctctgaattgaaaggaaagccagtgctgtttgtaaacaaatgcttctgagagcaagcaaaactctgtgtgggaacacaggatagtaaacttatttaaaaacctattagtagaattagtggaaacacttaggttaaagtggatcttgtccatataaattatatccatatgtattgcattgcaattataattacatatgcaaattgattgctagtcatgaataataatgtctgcttctcttatacagaaagaaaaacaatattaaaagaagatcttctctttatttgagactcagaattccttctggaagaaggaagtactttttgtcataggatcccttcttttccttttttggtttttttgtaagatgtagatgcttagtctttgctttagaaaacttctcatttaaaaagnnnnnnnnnnnnnnnnnctaggggaatacaaggtcacctcagacaccagatgtcattcctggtgaggcctgccctgcggcctcgtgggtggcctggggtctgccggcaggttctggttgcgcctgaaagctgcaagcaccctgtcccttggactgtcgggtctcctctcctggtcctgctccagcccagcccttcttctggtggtagctctggctttgcaagcccagctccaggccctgctcctcagagagactgttccagagcttgagctgggcacagccataggacaggcctggagcagatgctccaggggtatgccaggcccaccctcacaactgcttgttcaggtatcgtgatgggccactcggtccaaaatcagcccgcccagctttc

SEQ ID NO: 14999 - DNA, 708 bp, Macaca Fascicularis
  misc_feature (1)...(708): n = A,T,C or G
aatcccgcgcccgggcagtcctgggctnnnnnnnnnnnnnnnnnnnnnnnnnnnnnnnnnnnnagcctcgggactgagccgcccctttgctgtccccagccccccgctgccacannnnnnnnnnnnnnnnnnnnnnnnnnnntgggaccagcaactcaacctcgcctatgtgggcgccgtccctcaccgtggcatcgagcaggtccggacccactggctgctggagcttgtcaccaccaggtgggcgacgggtggggcctgggtgtcccagagccccttacagaggcacaggcgggaggggcagggctgggggctgctcagaagaccccttgttccccactttnnnnnnnnnnnnnnnnnnnnnnnnnnnnnnnnnnnggtgagggctgtgtgctggagggagcccctgcatggggcacggtgggcttcctgnnnnnnnnnnnnnnnnnnnnnnnnnnnnnnnnnnnnnnnngtcttctcgtgcacccatgagcatccctgtgtgtttgcagactgggctgggcagggccagcacctgagaactgaggggaggtcttaactggtcacagcaccctgggcnnnnnnnnnnnnnnnnnnnnnnnnnctgtgacagggaggcacaaggtgtgaggggcacttgggtgtgtggggccttctggannnnnnnnnnnnnnnnnnnncttggccggagccgctggctcctaccag

SEQ ID NO: 15000 - DNA, 186 bp, Macaca Fascicularis
attagaatttagtttatgtgtcagcacagtgtaatccctattgatattgtcctttacaattctccctctccccccatttttttttttttttttttaaattttaaccagaaaataaagatagttaaatcttaagatagggattacgtcatggtttagatgaggaacaatcattatatcagattgtgt

SEQ ID NO: 15001 - DNA, 668 bp, Macaca Fascicularis
  misc_feature (1)...(668): n = A,T,C or G
cctttcctcgtcatgattatcaaaaacctnaagaagtattttacnnncgaagtccaggtactagatgacaagaatgtgcgtcgtcgctttcgggcaagtaactaccagagcaccacccgggtcaaacnnntcannngcaccatgcccatgcggctggatgatggctggaaccagattcagttcaacttattagacttcacgcggcgagcgtatggcactaattacattgagaccctcagagnnnnnnnnnnnnnnnnnnnnnnnnnnnnnnnnnnnnnnnnnnnagacagactctactcnnnnnnnnnnnnnnnngcagagttcaannnnnnnnnnnnnnnnnnnnnnnnnnnnnnnnnnnnnctggaattgtgactcaagggatagatcctggatgtgannnnnnnnnnnnnnnnnaaactatgtggaggatgatgcaaaaacatatttatcttagnnnnnnnnnnnnnnnnnctgttatttatacttggtgttgcttgtcatggacaccggtgaacatgtcgtaactctgtaactnnnnnnnnnnnnnnntgggggtaaggagtcctgtgagtggcgcgtgaacgctggagcttattccgccgcctgtcccagtgtcggggcagataccctttccatgaacnnnnnnnnnnnnnnnnngcccttaa

SEQ ID NO: 15002 - DNA, 731 bp, Macaca Fascicularis
  misc_feature (1)...(731): n = A,T,C or G
tnntttttgtttaattttctcgggcaagctataccgaaaagcggcatgtcaaaaatactttaggttctgcatagatctctttctctttctcttttttttttgtttgtttgtttgttaaagttcattatttattttaccttttactgacaatgtgaaactcaaagaaaatgttctctttctaaatatacagtcataaactgttcaaggtaaccataacaaactagatgttatttattaacgtattataaaannnnnnnnnnnnnnntatgtgcttgtcctatttaaaatcggaatgtgagacatgttgctgtgacctgttttttttttcctcattcacatttgtagatattgtgtgaactacagtatacaataacaattaaaaggatattctgtggatgtcacatattttgaaatgatagaactacattagctttgtatcatgtttggataattcatcaatgttcacagtttaaaacatcattaaacattatgtaattagcaatgagaaagaatcttacttaacttaaatttggggatttctcctcacatctcttttccggatacattataattctggaaccctatttatctcaaaactcttaatatatgcagaccaacaggtttttgcattccttttaaatagctggttgtgacaaagcttgttgttgatcagattcactgtttcatcatatttattgtaatatattttttgttttgtaaatatgttacaa

SEQ ID NO: 15003 - DNA, 714 bp, Macaca Fascicularis
tcagaaacctgctttcattgcttagccagtattagaacagatctttacaacagcaactgggctgggttcccagtcggagccttttgggaatctgggggatgaggacggaaggcctagctccttggaaatggcctgtactttaaggaagctggagcaaagaggattgttcctgtgccgtgccatggtttcaccctatgtgtgccacattggatgttattagctgcttcggaacaccgtccctcctatgcaccttcaaagacctgcagcacatgcaaagggttctagctgcagtttgtggaattgaggtttaaggtaaaacggagttgccagagtaccccacattcccatgaatagagcctccaaggaaaggagggatagagtgtcctttgttgtggttggaggttggtgatcattgctctggatttggggctcccggctgccagcacatgcagctttgcctaagttttctccagcagccgggaccctctggagagcttgctttccctccaagaggaggtttgagacaggcggcgtcctgcactgagttagacaagtgggagctgtagggagctggtggaactgcgcctgcagcctcttcttactccccgttgagcctgtcttccttccctggctttttcaactggaccaaagatgaaggcacttatggaccctttgatggcttggagtggggaaggctgtttctttgaaagttgc

SEQ ID NO: 15004 - DNA, 708 bp, Macaca Fascicularis
  misc_feature (1)...(708): n = A,T,C or G
acgaccattaatgctgaggagctgttgctttcaaatgcagtagcagtgaccttttctgagcggctactgggaaatttctcattagcagttccgatctttgttgccctctcctgctttggctccatgaatggtggtgtgtttgctgtctccaggttattctatgttgcgtctcgagagggtcaccttccagaaatcctctccatgattcatgtccgcaagcacactcctctgccagctgttattgttttgcaccctttgacaatgataatgctcttctctggagacctcgacagtcttttgaatttcctcagttttgccaggtggctttttattgggctggcagttgctgggctgatttatcttcgatacaaatgcccagatatgcatcgtcctttcaaggttccnnnnnnnnnnnnnnntttgttttccttcacatgcctcttcatggttgccctttccctctattcagacccatttagtacagggannnnnnnnnnnnnnnnnnnnnctggagtgcctgcatattatctctttattatatgggacaagaaacccaagtggtttagaataatgtcagagagaataaccagaacattacaaataatactggaagttgtaccagaagaagataagttatgaactaatggacttgagatcttggcaatctgcccaaggggagacacataatagggatttttacttcatttc

SEQ ID NO: 15005 - DNA, 760 bp, Macaca Fascicularis
  misc_feature (1)...(760): n = A,T,C or G
gcacatagtgtggattccnnnnnnnnnnnnnnnnnnnnnaggatgcttagacacctcactatgactattgactatcacacactgattgccaactatatgtccgggtttctctccttattaaccacagccaatgcgagaacaaagtttcatgttctgaaaatgctgttgaatttgtctgaaannnnnnnnnnnnnnnnaaaactattcagtgccaaagctctttcaatatttgtgggtctctttaacatagaagagacaaatgataatattcaaattgttattaaaatgtttcagaatatcagtaacattataaaaagtggaaagatgtccttannnnnnnnnnnnnnnnnnnnnnnnnnnnnnatttctgcatttcgtgaatttgaggagttagctaagcaactacaagcccaaatagacaatcaaaatgatcctgaggtgggacaacaaagttaatatgattaaccacccgccgctgatcagccttatgttcccaaagagccctgagtagtgctttggtgttcacagtctgtttttttgttgtaacttacattttttaatgcttatgttaacttcgtcaaactcttgttttgagctggatcattttgtggatgccaaatgaatatcaaaactgaaaacacatttgttgatatttttgtcttgctgtccagattgcgatatttttcagtattaagctttcagtgaactgtgtcacctaagtaagctaccctgctatttgttgtttaaatatatggttctc

SEQ ID NO: 15006 - DNA, 777 bp, Macaca Fascicularis
  misc_feature (1)...(777): n = A,T,C or G
ggagttnnnnnnngatgctcgnnnnnnnnnnnnnnngatggagatgggattcgatgagaaggaggtgatagatgccctcagagtgaacaacaaccaacagaatgccgcgtgcgagtggctgctgggggaccggaagccctctccggaggagctggacaagggcatcgaccccgacagtccnnnnnnnnnnnnnnnnnnnnnnnnnnnggtggtgcagctgggcctgaccaacccaaaaacattgctagcatttgaagacatgctagagaacccgctgaacagcacccagtggatgaatgatccagaaacnnnnnnnnnnnnnnnnnnnntttttagaattttccagacactaaatcgcacgtaggtggcgccgtcccacttggctgtctggccacagcagccccctggcgcggccggagactgggcagagtggacctcacctgaaactcaccttcagcacctcggccctggactgttagaggcgccgcggctgctcccgctctctgatcttattgcttataaacttcggtgacggttgtgtgtaaagccgtatttttagcatttgccaggtgtttacaaaaaagtggttgtcgtgctgggaagtggagtgatggcctcctctccagtgctcctctgggctcttgagtcgctgcttgaattgccccatagacgtttgcttggagagtccacgtgttatttgacggaggtaggtttcaaccnnngagtgttaacgtcaagcatgctactttagtcactcacagatgacttttctttaat

SEQ ID NO: 15007 - DNA, 734 bp, Macaca Fascicularis
  misc_feature (1)...(734): n = A,T,C or G
gctggatgtngnnnacagnnnccncggggggtgctgcaagagcgcttccanntnnngaaccccacctggagtgctgaggnnnatggtctggctcctgatggtgacgtctttctctcagaggagcaagtccggagctttcaggtcccatcctgcgttcaatgtggaggccatnnnnnnnnnnnnnnnnnnntcttcggggacacagtgaaccctgannnnnnnnnttttgtgcacaagcgtgtaaaagaagccgactccctcttggtggtgggatcatccttgcaggtnnnnnnnnnnnnnnnnnnnnnnnnnnnnncctgtgcgggattgggagtcctggagagaccccctttttggtttaactttttctagagctagagaacctagacattcttatgtgtgtctnnnnnnnnnnnnnnnntactcnnnnnnnnnnnnnnnnnnnnnnnnnnnnnnnnnnnnnnnnnnnnnnncaatactgaacattgggcccacacggtcagatgacttggcgtgtctgaaactgaattctcgttgtggagagttgctgcctttnnnnnnnnnnnnnnnnnnnnnnnnnnnnnnnnnnnnnnnnnnnnnnnnnactctcacttgagtcttgctgctaaaggtaattgccttctcagataacagattccagttcccattcgacagagtagggtgcactgacaaagtatagaaggttctaggtatcttaatgtgtggatattctt

SEQ ID NO: 15008 - DNA, 678 bp, Macaca Fascicularis
tccactaaagatgtcagacccatcaacgtctcctctcattgtccctctgctgggacaaagtgcttggtatctggctgggggacaaccagaagtccccaagtgcacttccctaaggtcctccagtgcttgaatatcagcgtgctaagtcagaaaaggtgcgaggatgcctacccgagacagatagatgacaccatgttctgtgccggtgacgaggcgggtagagactcctgccagggtgattctggggggccggtggtctgcaacggctccctgcagggactcgtgtcctggggagattacccttgtgccaagcccaacagaccgggcgtctacaccaacctctgcaagtttaccaagtggatccaggaaaccatccaggccaactcttgagtcatcccaggactgagcacaccggcgtccccacccgctgcagggacagccccgacactcctttcagaccctcattccttcccggagatgttgcaaatgttcatctctccagccccggaccccgtgtctcctggactcagggtccgtttcccccacggtgggctgaccctgtttccctagctgaaccctgggaacaatttccacaactgcccagagtggaggttgcatcccaatctccctggggcactttcatcccgaagctcagggcccatcccttctccgcagctc

SEQ ID NO: 15009 - DNA, 643 bp, Macaca Fascicularis
  misc_feature (1)...(643): n = A,T,C or G
acaatgaaaagagnnacatccaccaagcannnnnnnnnnnnnnnngcacgtggaagcgcnnnnnnnnnnnnnntgaagtgaactaacaaacagcccgtgatgtatttttcaccaccccatttttcaaatgatcaaatggaggatccgagaaggtgaggctctcccgctgttcatctccagttcaggcctcctcatttctgtcctggccattnnnnnnnnnnnnnnnnncctccatccggcccccttccagcgtgccgtccacggctgctgaggggaccttcccaacacggatgcaacggtgccacttctctgcttaacacaagagcgtcctttcgcctaggnnnnnnnnnnnnnaacatcctcagaacaatgaacaagttcaagtccaaggggactcaaataaggggagggcatagatacagcaggaagacagagagggtaaggggccaaagagtgtgcagtgggcacactgagggcagtgggcagtgtgggagggaacgtaatcacatgcatgttttcaagcttccctgtgtccaccccaccatctgttcctacagaagcatcgattaggctgggcgcagtagctctggtctgtaatctcagcacnnnnagaggccgaggcaggaggatcactgaggccagg

SEQ ID NO: 15010 - DNA, 701 bp, Macaca Fascicularis
  misc_feature (1)...(701): n = A,T,C or G
aaatgaattgnnnnntccccaaaaaagcataaagaaacgcaagatttaattttctactcggggggggaaaaaaagtcctcatatagaagtgcccacttttgcaatgtttttctaagctatctaaataactctcaacccatgatacagttccttaaaacggtgattcctaattcaagnnnnnnnnnnnnnnnntctcatgttcttatttgatcccagttgggtacgtgtaaaatcctgatttgggagacttgacttaaaannnnnnnnntggttaagaatgggtaacatgactcttgttgcattgttattttttgtttgcaatggggaatttataagaagcatcaagtctctttcttaccaaagtcttgttaggtggtttatagttcttctggctaacaaatcattttggaaataaagactttttactacaaaaatgaaatctgtttggacttccacttgagatagtaaagacagtatcagacaccnnnnnnnnnnnnnnnnnnnnnnnngttgtaattgtttgttgtgtatatatttttttcaatgccaaaccagctgtgatccaatttacatccacattttaggttcaacagcaagaagttcagagacagatttcccaaccagacattgggtcactcactgnnnnnnnnnnnnnnnnnnnnnatttgaagggaatctgttgtagcaaatgggaataaacc

SEQ ID NO: 15011 - DNA, 884 bp, Macaca Fascicularis
  misc_feature (1)...(884): n = A,T,C or G
cacagaaatatgcaaaacagttcatccnnnnntactttatttattgttcccttgaaatgactgaccaggaaaaacatcatccttaaattttgaagcaagtgagagactttattaaaaatacatatatatctataaannnnnnnnnnnnnnnnnnnnnnnnnnnnnnnnnnnnnnnnnnnnnnnnnnnnnnnnnnnnnnnnnnnnnnnnnnnntggatttgctttaccttgttaatattatctaggggaaaaagtgcaaattgctccatgttcttctctcccttatgtaacatctcctgagggtgtttagttgcatggctgttcaggaaggtattaagggcttaggccaaatcttactttgagtatgttaaaaaaaaaaaaaaatgctgctggcttttctgaagacaggtgcttgaaacctgtcagtttgttttaaataaatacaatagttgaaaatttttctgttacatcagtaatattgtcaaagtaatggataaaaccataacttacacatgcaagtcatatactagatctgatactatttagtttatcgaaattggaaagattcattgagcagcatagaagtttgtttacatgttgagatgctaggtatttgtggaattaaaaagaatcagnnnnnnnnnnnnnnnnnttttaaatctgtgatgtttttcaaatttaattcataataaattgnnnnnnnnnnnnnnnnnnnnnnntacaaaaggtaatgtgaactctgccactttttttgtgttcaaagttttggattttatgaagccagatggattgaagagttacataagcatttgaatgctctaatatgaggctaatgattttctgttagtatttgactatcttcattcctctcaaattcgtaacagt

SEQ ID NO: 15012 - DNA, 724 bp, Macaca Fascicularis
  misc_feature (1)...(724): n = A,T,C or G
gccactgcccgcccagcccccatgannnnntggaaggtccctcggtcagggtttgnnnnnnnnnnnnnnnnnnngtctcacccannnnnnnnnnnnnnnnnnnncagcatcctccatgtcaaagaccnnnnnnnncaggtggggaaggaggtgatctgccaggtgctgcacctggggactgtgactgactttaagcaaaccttcgacaaaggctattggttttcagttccactattgttaagcattgtttccctggtaattctcctggtcctaatctcaatcnnnnnnnnnnnnnnnnnnnnnnggaatcaggaccgagagccctaaatgagtcacatagcaccctgaaagtgattccctggtctacttgaatttgacatgagagaaaagcaggaggaaaaggggccattctccaaaggacctgaaagagcaaaagaggtgggagcgaaagccttaaggatcccacgactttttactgccatctgagctactcagtgtttgaatcccaagaggaagtcattttacctctcaggtctgttgtaggacttgattttgtaaagcaatgccatgttatgtggttgaaagnnnnnnnnnnnnnnnnnnaggagcactgagctcacagactgacttggactcctactggtggggacctctgttagtcactttacctcatccaaagtataaaggaattggaccannntaatttaccnnnntagctctaaaa

SEQ ID NO: 15013 - DNA, 793 bp, Macaca Fascicularis
  misc_feature (1)...(793): n = A,T,C or G
gatgagagactggctcaagaatatnntcatgcagctnnntgaagccaactctgnnnacgctggctatctaaatgagaagcagagaaataaagtcaagaaaatttacctggatgaaaagaggctcttggctggggaccatcccattgaccttctcttaagggactttaagaaaaactaccacatgtatgtgtatcctgtgcactggcagtttagtgaacttgatcaacaccctatggatagagtcctgacacattccgaacttgctcctctgcgagcatctctggtgcccatggaacactgcataacccgtttctttgaggagtgtgaccccaacaaggataaacatatcaccctgaaggagtggggccactgctttggaattaaagaagaagacatagatgaaaatctcttgttttgaatgaagattttaaagaactcaactttccagcatcctcctctgttctaaccacttcagaaatatatgcagctgtaatacttgtagatttatatttagcaaaatgtttgcatgtgtgacaagacaatgagagtaattgcttgataacannnnnnnnnnnnnnnnnnnnnnncatatgcaaaatactgtacattgtgaacagaagtttaattcatagtaatttcactctctgcatcgacttatgagataattaatgataaaactattaatgataaaaataatgcatttgtattgttcataatatcatatgcacttcaagaaaatggaatgctactcttttgtggtttacgtgtattattttcaatatcttaaataccc

SEQ ID NO: 15014 - DNA, 761 bp, Macaca Fascicularis
  misc_feature (1)...(761): n = A,T,C or G
gagccaaagaagcannnaggtggtcgtgtgatggtaacagatgctgacaggtcgatactatctccaggtggaagttgtggtcccatcaaagtgaaaactgaacccacagaagattctggcatnnnnnnnnnnnnnnnagctgtgacggtaaaggnnnnnnnnnnnnnnnnnnnnnnntatcaatataacattcaaggtaactcgagttaatgcagtttttcattctaaaaattattcgtggttaaaattaaaannnnnnnnnnnnntgctttaatttcttaaatagaattttattgatcagttcttgattaacatatgtatttataattcagtcactgggataaaacattttaaaaatggggctataagatcgactcagacaatccatagggnnnnnnnnnnnnnnnnnnnnnnnnnnnnnnnnnnnnnnagcaaaagttgtggcacaatttagaattcaatcccaggttgtagtgttacaaaataaaataaacctattaggcaaatgcagatatatcgtcagcttaattttttctcactgcgtaattatagtatattaaannnnnnnnnnnnnnnnnntagctttgccatgtacatacctagtacatcatcttcactgcatccaagataatgaaatatctataaccccaaaagtttcctgtgtccccttgtcattcattgccctgcccagtattcaggcaacacggatctgttttctgttttaggttagtttgcattttctgtaaagtcttatgaatgaa

SEQ ID NO: 15015 - DNA, 789 bp, Macaca Fascicularis
aaatgttgcagggttttaaactttataattacttaaatatttttgataactagaaatctagtattgccataaagaaaactaagtgcccatcaaagatttgtttggtataaataaagaattatttgttttgttttcaatgacagtaagctacaaatcatgatgctatcttaaaaactttctaaagatgaattgtgtggcagtgattgtgtggtctgttcgtggagaatgtatgaaagctattaatattctagaatagattaataaattggctatgttgttccaatgaatgtacagcacttccattaacttttgaaagcaacacagccttaaactcaatgcttttgctttatgacatgggaatgttctgtcatcaatggagtgtattcttgtaatagaattctttatatcattctcaattctatagatgttcaagcctatgtatgaatatgatgggtttttttttttttgctttgttttctttttagattttgtacattccatctttataggtctgtttcatatgttttgtgtacagaacagtaagtcttgcactctctaacattgatactgatatattctcgtcatttgttcttttatgaatccaaatgttgactgcctatttaaagaaaagaatgaacgctgtgcatcaaagtgtttgtatgttcgtagctacatatgtaccacagtattttggatgctttagtctacaatgaaactttcaattaattctgtcttgaaacataggagaaacaagattcgtgtgtatctctttaccatgcacaaaatctc

SEQ ID NO: 15016 - DNA, 744 bp, Macaca Fascicularis
  misc_feature (1)...(744): n = A,T,C or G
aaaactcaagcattaagaacacatanttttgacccagtggaggcttaaaaaaaaaaaaaaatccaagaacacaattcatgttcactgcctctggtgttcagaggggggcttttaaaaaagcgtgtnnnnnnnnnnnnnnnttgaaaccattttcgagaaaggctaccatgagctgcactttttggggtgggaaaggtgaatgccgggggggatgagggtaggagggacttacagaaggggatttgtggctgtgggggagaaggttctacagcataagccttatcctgccagccaaggggatttattctaagagaagtgcatgtgaagaatggttgccactgttattagattgacaagatgttaatttctctgtaggttgtaacgttaaaaataaatgaaattatttaagggttatgctgcactagtattccttagaggaaactgttctttaaagttaggaaagggagtaggcaggcatgtgttggcaaaggctgttaatagtagtaagtgttaagactgcttttctttaatgttttcatggtaatgcatatttagagcactgtatttttgtcttgttaagaaaatttagcatttctaaaagaaaaaagtaaccctctttcaaactgttaattctgtnnnnnnnnnnnnnnnnnnntcatttgtaaatctcttcatacaatagtgacttcttttttgactgatacagtatcttaattacaaggttattttgtacttgtcttaata

SEQ ID NO: 15017 - DNA, 785 bp, Macaca Fascicularis
  misc_feature (1)...(785): n = A,T,C or G
acccgtgtagtgcagagcgtagtcacanntccgcatnnnnnnnnntccaacccagcacatccagagttccgagtgaacctgaccctgcgctggagcttcagcaatggtacctcatggcggaaagagacagtccagctatggccaggccccagcggctactcatccctggcaaccctggagggcaccatggatggagaagagcaggcccctcagctctatgtcctgtatgagaaaggccggaaccactacacagagagcatctccatggccaaaatcagtgtctatgggacgctctgagctgtgccactgccacaggggtattaggcccaggactctgccttcagnnnnnnnnnnnnnnnnnnnnnnnnnnnnnnnnnnnnnnnagacagttccatcttcatttagactccagtcttggcaaaatcaccttccctttaccagggaaatcacttcctttaggactaaaagccaggcgtcctctaccacaaaaaagtcctgcccacatccttcccatgtggccaagtgtggccccaccaccctctctgccctccctcccaggacatagattggtcctgtcttggacagggctagtgagctgtagaattgaatcaatgtgaactcagggaactggggaaggttgagcctcctctttggtgttggggtaggataaccgctttcaagagggctggtgaaagtccccagatggcaggatatttggtttcagagtaaggactaggtgcaccacccccattggttatttatcaatcaaaatgtttgtaacttaa

SEQ ID NO: 15018 - DNA, 763 bp, Macaca Fascicularis
  misc_feature (1)...(763): n = A,T,C or G
atagagcaagcaggaannnnnnctagtaaaacttacatgcaggacaacaaaatgatgaaagatatccnnnnnnnnnnnnnnnnnnnnngaaggcttgtgtttagggatttgtttnnnnnnnnnnnnnnnnnnnnnnnnnnnnnnnnnnnnnnnnnntcagagtcagtgatataaaattgcctattagggtaaaagaaaaatgtgaagactattttagtatacagagagcattaattcagatggcttagaaaagtgataccagcccaagaacagggatctacttgagcccattgtaagtatcattgaaaacaaaacatgccagtcagcatgtcacagaaaacgaacgaaggacaacaagaagtggatgagaatattttgttgaccttcatgnnnnnnnnnnnnnnnnntctaaacaaagtatggaaacaagtagagcttttattttgcttttgtttttgttctgtttcgttttgttctcccccactcaatagaaatgagggnnnnnnnnnnnnnnnnnnnnnnnnnnnnatttcttaggatagttgtctttcgtttgctttccagtaggcatagtacatttagttgaagagcacatctgtatgctacaacttgattacatctttttttctagctattttgcattttttcttttaccatgtttcagtttctgcatgtagatttaaataagaaacaaaacttgtaaagttgtaannnnnnnnnnnnnnnnnnnnnnnnnnnnnnnccannnncagaaatctgacct

SEQ ID NO: 15019 - DNA, 698 bp, Macaca Fascicularis
  misc_feature (1)...(698): n = A,T,C or G
gtagcnnntcacatctatccaatgannnnngagatatggaaagaagacctctcttgggcaagaacgctccaggagcagcagaaggtagcacagaggattaaaaaaagggaagcaccagctgaagtaacacacttttcaccaaagtcaattccagactatgactttgaaagtgatgagattgttgccgtttgtgcggctattgctgagaaagnnannnnnnnnnnnnnnnnnaaaacaatggttattgtgtccgcttctggggctgtagagactgtaactgaaaaggaggatggtgctacaccaccagatggctcnnnnnnnnnnnnnnnncgatgaagcagtatgcataggattatttgaatctttgattgcctcttgaagtttnnnnnnnnnnacatttactctggagatagataggagaactcctggttgtaaaataacgtttttcagatgaggcatataaaaactaaaatggcaggattattgtatagtgtttggaatatgctttaataagttatgatttatatttctcaaggttaaaattctgagtaaaatggtttttgattaataaactcagtttaatctgaatatgtaaatgaatacattttaaagacaaaacttgaaaaatgtattcttgaatagtgaataacttgatcaatgttactgaannnnnnnnnnnnnttttgttgtatgataaa

SEQ ID NO: 15020 - DNA, 692 bp, Macaca Fascicularis
  misc_feature (1)...(692): n = A,T,C or G
tgacagctgntcaggaagggcacagaatgggacagagataaaccagacggtcattttgatctgctctctacggtttttcaagtcagaggcaattgatgcttgtctaatgcatccacacactgcatatctgactggcgatgccacgctcctaagtaattctgccatgaaacatgaaagacaaaggaaaagccgttacacatcacacagagaacattttcgggtcccacagcggcggtggcaggaagctcactctcgcgtcagtgtttgagtgtgtgtgtgggtctcggggacctcggtggctcccatcgtccttcatcgttctgaacatcctgtattgtaaacgtggctgggttgccaaagtgcctgtgaattccgaggtggaaaaagctggaggtgaaagctcagtataccatgtattcactttaaaaacagaaaaaaagacatgtatggatatgcctattttttttttattggcacattgtatttttgtgttgacttgtttttagaaatgatgtgtccacacacatacctgtgtctcttctacacttctgtgtcatggttctgtttcttaataatgtgcagccgtgtctaagtggtgttagcagtgtacgcgcagtgaccttggatgacagtggctctttctcacagcctcccctgagctgtgagaaacagctttctctgtacatacgcga

SEQ ID NO: 15021 - DNA, 756 bp, Macaca Fascicularis
  misc_feature (1)...(756): n = A,T,C or G
gcttattagtatcactgctttttnnttagcttaatgacttacttagaatttatcctttattttaattcatctgtactatctagtgtctaaataaaacactattctccagaaaaatcgttttctagccctctccctcagtgctttattgtccattccaatacattgaacacatttcctttaccctccacacacttcttccaaaaggaagcacctattgagtccttttgagggcaatctgtcttataactgactgacttagcaggaatttaattaggtcatatttggtgatgagacttatggagcgtgcctctctctccccattgctgcttaaaatgcaaggacaagcaattagaagccatcctaaggtgcttacaccacacgccacccatgaggcttgtggccacagtggcacttgggtgtggctcttctgtcatttgtccccatgtgagaaagcaaatcatctccaaatcttgctatttgtatacttttcttggagacttgtatgttatatcttctttgttttgggttttcttccctagcttattttgtggcttttaaagaagtagattgtattgtgagctcctgtgattcctggtggccagtatcctggattcctctaagagcttgcctcttgcctcctcatgaaagcagcacacattgtgttaacttatgtctcttgttaaatgagcttaatgtctttgtgttttgtccaaaactatattgaaaaatataaatattgtttaatgcaaatgaagg

SEQ ID NO: 15022 - DNA, 745 bp, Macaca Fascicularis
  misc_feature (1)...(745): n = A,T,C or G
cacacacggtnnnnnnnnnnnnnnngctctcccggctccctgcctctgtttccccatgtgggccgtggggaactcccagagctacctctggggggagcatggtggcagcgatgatggggagacacctggtgctgctcacagagtgcaacctggccactggccctgcccgccaacctgagtcctgagctcactttcgccttctccaccccctgctgcgggggctacagccacacctcannnnnnnnnnnnnnnnnnnnnnnnnnnggacaggcagttggtggcctctggacaactgactcaaggtatgcccaccgcggcccctgcctggccaccggcctctctgtaccagggtgacaaggggtcgtctgccccgacactccagggccagaatcctaaggaactgagggtctgaggacgcagggagggtggcagtgtcctgaggctgatggacggtgaccgccactggcccccaacaccaccacacgtgggtgctgaactcgggctgctgtgcccaccggcgtggtcctcccgagctctgacagcattacctcaccccgccccatctgttgccccggtccagccccgacgacgcacgcctggtctgtctnnnnnnnnnnnnnntgccaccccacgtttttgtaccgggtctctgagtgttaaacgaatgtgtaaatagtaacagcctgtcctcccctaaatcaaagccatctgttcagcgtgaggacaccatcagccnnnnnnactc

SEQ ID NO: 15023 - DNA, 778 bp, Macaca Fascicularis
  misc_feature (1)...(778): n = A,T,C or G
agtaaaaaagcgaaaaaggaaattgagaagtttttagatccagacatgtattctttattagaagattctacaagtgacttaagaagcaaaaaattcaagaaaatgactaaagctatatgtggactgattgatgannnnnnnnnnnttcgattttnnnnnnnnnntcagtcagatgaagaaagcnnnnnnnnnnnnnnnnnnnnnnnnnnnnnngccattcaatatggagaagacctagaatttaaagaaccaaaggaacgtgaagatgagtcttcctctatgtttgacgaatatttccaagaatgccaggatgaatgaagagtttactaaaaagtaaccatctatacatgaagagcttgtggccaaaccagtagaacattcttctcttcaaaggatgcagtagtagaaagctacttattttaatgaaaaaagtaatacctcattctttatcagccacatgcctgaatcaagtttttaattattcnnnnnnnnnnnnnnnttaaagtggaatcttttagtgttataacagcatcactttagattttataagtcaaaattgaaatgaatgcacatagatttgtatataatataaattagcacctgagctaannnnnnnnnnnnnnntattttcactttttgtattatttttgagatgcaggaattactgtaacaaaatatgtgtgtccgaagggaaaaagctacaagtatatacataagaccattgcttatctgtatcttcccatccccctgacacaaatcatgtacccttcggacacac

SEQ ID NO: 15024 - DNA, 804 bp, Macaca Fascicularis
  misc_feature (1)...(804): n = A,T,C or G
catgcgctacagctctnnnnnnntgtgcanancnggacagacacaacggcacattatgctgacaagaagggccatatcatccacatcgactttggcttcatgtttgaaagcnnnnnnnnnnnnnnnnttggctgggaacccgacattaannnnnnnnnnnnnnnggtgatgatcatggggggcaagatggaggccacgcccttcaagtggttcatggagatgtgtgtgcgcggctacctggctgtgcggccctacatggacgcggtcgtctccctggtcactctcatgttggacacgggcctgccctgttttcgcggccagacgatcaagctcttgaagcacaggtttagccccnnnnnnnnnnnnnnnnnnnnnnnnnntttcatcatgaaggtcatccagagctgcttcctcagcaacaggagccggacctatgacatgatccagtactatcagaatgacannnnnnnnnnnnnnnnnnnnnnnnaaggccctccgccccatgtgcccttgaagctgccccacnnnnnnnnnnnnnnnngacctccccgccctgccaccacannnnnnnnnnnnnnntgtggccggaagagcctggtagcgcctcctggggcagcacgtgggtggcgcagccttggtaacgccnnnnnnnnnnnnnnnnntcattggatggtgctgtctatgcacaggtgtgagtcctctgtttgcactggacatattccctacctgtcttatttcataggtacatgaagtattttcttgtgtataaaaaaaaagatacaagatttaaccaacatcaacaaa

SEQ ID NO: 15025 - DNA, 745 bp, Macaca Fascicularis
  misc_feature (1)...(745): n = A,T,C or G
tatgcatacaaagttttcacttttgtgaaatgtaatttttctgttttgctaagggatgaggtgattggaattgctttgaccatgctgcctttattctcaaactnnnnnnnnnnnnnnnttaggtatattaacctcatcaatcttgaagaacatgtggttcatgaggataacacctctgtagaggactccctgacaaaagtgaagaattaacttctcctccagaacaagtgcaattcagaaggcagctctgcattctaccttgcttgactggaattgtctgaatctttttctgacctctcttctctagtcggccacccctgaagtactgaggtctaagtggtttacctcgtgctgatagannnnnnnnnnnnnnnnnnnnnnnnnnntaaattctagaactggtagctcagtcnnnnnnnnnnnnnnnnnnnnnnnnnnnnnnnnnnnnnnnnnnnnnnnnnnnnnnngagaatttccccccaagtatgtggcagtaaatgcaaagagacagtctgtgtattaatgtctccattgtcttaaccttgttccaaaacaaaattcacctcctttctttatgtgaatgtattctccataaaattccagtatttaaaaagcagtttactgttctgtactttctattgtatcacaatcaggtaaaagtcactttaaactgaggaaacggcaaattgtgttttaaagctctttgtatttctccagtttctgaccttgtaaatttgtatatgca

SEQ ID NO: 15026 - DNA, 249 bp, Macaca Fascicularis
caagggcagagaggggggaacatctggggcgtatctgggtgtgcacgcggcagccacactgtggaagctgcccctctccaaggacccgcgtcccttgatgataccaggatatctgcgcatagaccgctctgcccccgtggtggtcacagaaaggtgtctctgttcttctccctctgcctcagcagaagaggtgaggcccgaaaacacgtctgatcttccagtattgtgcagcgcttaaaaacggggagt

SEQ ID NO: 15027 - DNA, 686 bp, Macaca Fascicularis
ctttaggatggctccctcaccttacctgactgtccctctgctcatggcccctctccccacgcccaggtccggagccggtcgctaagcttcagcgagccccagcagccagcacctgtgatgaaatctcacctgatcgtcacttctccaccccgggcccagagtggtgccaggaaagcccgaggggaggctaagaagtgccgtaaggtgtatggcatcgagcaccgggaccagtggtgcacagcctgccggtggaagaaggcctgccagcgcttcctggactgagccttgctgcaggttctactctgctcctggccctgccagcagccgctgaaaagaggccgacgtgtcaccagtcctcagcagaaaccgaaagagaaagagcggaaacatggagttcgggctctgttggctaaggtgtaacacttaaagcggttttctcccattgtgggaacattttattttttaaaaaaagaaacaaaaatatttttccccctaaaataggagagagccagaactgaccaagggtattcagcagtgaaccagtgaccaaagaattaattaccttccgtttcccacattcccgctctttaggggattagcttgtgtgtatcaaaagaaggaacagctcgttctgcttcctgctgagtcggtgacttctttgctttctcaactcttccagaaaggac

SEQ ID NO: 15028 - DNA, 788 bp, Macaca Fascicularis
  misc_feature (1)...(788): n = A,T,C or G
tcattgctgggtcccctgcannnccagagttgatccgagccatcatcacaagataatatgaagacctggtggttgcttatgaaccacagagaacagtcccgtcacattcgcgaacttccctgaggacactgtggagcagaaggcagaaagcgtgggcagaattatgcctcacacggaggcccggatcatgaacatggaggcggggatgctggcagagctgaacacgcccggggagctgtgcatccgagggtactgcgtcatgctgggctactggggcgagcctcagaagacgggggaagcagtggatcaggacaagtggtatcggannnnnnnnnnnnnnncaatgaacgaacagggcttcnnnnnnnnnntgggccgctctaaggatatgatcatccggggtggtgagaacatctaccccgcagagctcgaggacttctttcacacgcacccgaaggtgcaggaagtgcaggtcgtgggagtgaaggacgatcggatgggggaagagatttgtgcctgcattcggctgaaggacggggaggagaccacggcggaggagatgaaagcnnnnnnnnnngggaagatctctcacttcaagattccgaggtacatcgtgttcgtcacaaactaccccctcaccacttcaggaannnnnnnnnnnnnnnnnnnnnnngagcagatggaacgacatctaaatctgtgaataaagagggaggaagggtctgcccaggccctcctcctgtccatcctccgtactcccccttgtctgtccttgtgattggcaaaag

SEQ ID NO: 15029 - DNA, 763 bp, Macaca Fascicularis
  misc_feature (1)...(763): n = A,T,C or G
aagcnnnnnnnnnnnnnagactggtgagaggagaaaggagctnatcccccagnnnnngctttataccattcacatcccagggctgtgtccagacagcacaaaagggcaaggagagcccaagctccaatgccagaattctttcaaactccctaactctttgaagtttttactcaccccgtttcaattatcctgatcccttctcatcccctgcttggcttctgtgcatgtggtcatctgctgtggcctggtgtgtaatgggttaaaaataagccactgcctgacatcccaacatttgacaccccagcaatgtgtgactcccccaacattccactatgccatcctgcagctgaaatgggaacactggctgcctctccaaacctgctcttggacagaggatctgggaggtggaggccaggccagaggacttagggaaaatgagagggaggaaggaaaaagggagaagaagctgagccatannnnnnnnnnnnnnnagtgaaatgaaaannnnnnnnnnnnnnnnnnnnnnnnnnnnnnnnnnnnnnnnnnnnnnnnnnnnnnnnnnnnnnnnnnnnnnnnnnngactgagaaacccagaagctggtagtcatgtgggcttaccttctctgccaagcgactgggaaaccaaaatgagcccaccttgtgttcttcctagctccaccctccccgtgctgctgtgctctgctcctccccacacttccctgctatagttcccagctgctgtaacggagccacctccaactct

SEQ ID NO: 15030 - DNA, 737 bp, Macaca Fascicularis
  misc_feature (1)...(737): n = A,T,C or G
cgaacacagcagccnctgctatcacaccttgggcttggaggtcattgggggtgagcagatgtgggggtggccagcccagctggccgcgctccatcactggcactgcctgccttgagacccgcttcccgcctgctgcagtcaccacggtggcgagcacagcagccccaggtgtgcagagcactgccccatgcccaccctgcgtacccaggtccagagggcccgggccctgactccctgaaccacacggggtttatttgctgatgttccctggagaggtcgctttgtgaaggagctgtcagcaggccgtgggcattgccaggctgctgtgggggtgggagcagccttagtgtcaagggcctgcccactgacccagccatacctctccgtgagtggtgcccctgcagcaacaggcccttgggccaaatctcctgtctcccatcgtgggcctcccagggaaggcggaagccctgctgtgcagacacgtctgtgggccacgggtgtgagcagcctgggaggggctgtggcactgaagccaaaagtgcctgccagacagcacggcctgggtgcggggttcccttcaggaggggaggctgcaggtgccggctggtgaggggatgacgcgctgtgggcgggaggaggcagcgcccgtctcagcagcaccaggaccactccggactccctggcgacccagcactggggaagccgtcagctgctgtgcaataaaacttgccccgtgt

SEQ ID NO: 15031 - DNA, 694 bp, Macaca Fascicularis
  misc_feature (1)...(694): n = A,T,C or G
ttacgatacattaaattagctttgcaaagccgtgatacttatnnncnngcctctgcaccaatatgctttccgaagtgctgctgtttctctctcaatatttgacactttgtggtgatatccaactaatgctggcccataatgcaaataatagagctgcacaccttgaagagtttcattaccaaacaaaagaggaccaggagatcctgcatagccttcacagagagtccagttgccaaggatttgcatgggcaactgatttgtctacagacttagaaagtcaactttctgttagttgtaaatgttactaggctgctaatgaaatcttgcaatttagtgacttgaaaagccaaaatccataacactatgtacaagtattgaatagaatgggtaacattagaaatgaaattggagtgttttacatgaatcatgcggcatcattgcagagtgagagagtagtgagcaaatctgtgtctgctgcctagcaacanttgtggaaaaaaagcttttcttgttttgaaaatggaattcacaactttgagtcaattgaggatgccacaaatgccgcccttttattatgtaacacgggaagactcatgcgaatttgtgcacaggcgcactgtggtgcnnntgatgaatttaaacgtgaattttnnnnagnnnnnnncttatattataatannnctattgattacta

SEQ ID NO: 15032 - DNA, 777 bp, Macaca Fascicularis
  misc_feature (1)...(777): n = A,T,C or G
aagtgcaaactgnnnaggnnngcattactttatttttnatattggggtnnnacgtaagatttgtnnngaaaagcgtttaaaaataatcactgctttggattcattccacactccactggtatttttccccctgcagttctccctaactgctaaaaggagctcagcaggtaaagggagcagggcctctttcccttgaaggagtcatgggccagtacagcctgcgcttaccggctggcattcccactcagcttcctttcctgacttagaagctgnnnnnnnnnnnnnnnnnnnnnnnnnnnnnnttggtcttnnnnnnnnnnnnnnnnnnnnnnnnnnacaccagactttctctcctggtttggactggctagtgacctccatccctgcggttacctagaaaaccaccttagnnnnnnnnnnaaggaaaggacctatgtgaaactaaaacaatagtccttttcggtgtggggggtgatgcatacgggctgagaatggatgggagaagagccctcagggtcaagccttagagctccccgcctcttgaaaatccaccctgcccctttctttaaagtgcatttaatacnnnnnnnnnnnnnnntagaagtaactctttgtgtagaaaaaaaaaaatgtatattggggaaannnnnnnnnnnnnnnnnnnnnnnnnnnnacgagagagagagattttgccaatgagctggaagcccccaaaccaaaggtggagatgggaggagcatgccgnnnnnnnnnnnnnnnnnnnnnnnnnnnngctca

SEQ ID NO: 15033 - DNA, 1233 bp, Macaca Fascicularis
  misc_feature (1)...(1233): n = A,T,C or G
ataacaagatttatagtatctacttctggtactaatatacacaaaaggccaaaaccatgcctattctgcaggtgtagcttcggtgctctcctgttcaggggcaggctcactgcctgcttcttttccttctttgcttcttttagattttttgtgtttgtgtctcctgtgactatctccttcttcactttcatggcgacgtctactattactgaaataaaaaaggtgtgttctgtttaaatacacaatcagtgacaaaaatccaatcactctaaggaaattctcaatataacactgggttnnnnnnnnnnnnnnnnnnnnnnnnnnnnnnnnnnnnnnnnnnnnnnnnnnnnnnntgtgacttttatgcagggattgtatttattttatagggccatcttcactgatactatctcagattcccagtgcctatacagcttctgaaatgcatattataatatacagtaacaaattagaaacaagcactaactcaaaactggaaatactgtaaagggttgatttttggcaaacaataggtattttgtttaattttttaaaaaaaatttgagacaaggccctgaatttttctttaatgaaaccaagcactgcttcgtttcataacttacgaaagactggttcataggccaaaatttcccctcttccaatgcgataatgtactaagtcaaaatctctcccatactgttggctcactattttattaaagagcaaaccttcgagaagacttatgtctggtttcctctttttccctgtgtcgtctttctctatgtcgttcttctttctctcgacttgctctgtgacgctcataacctctttctgcatattccctgtatctgtatcnnnnnnnnnnnnnnnnnnnnnnntagaaatgttttcttgacaactggaccgttaattnnnnnnnnnnnnaaactgtaaaagannnnnnnnnnnnnnnagtccaaaccccaaatcctcacattagcatcttttataacattagtgaggaataaatatttgttgaattgagaggaaaacgatggttgttctcaaaatagcactagagctaagaatataaatatataataattacataggttaaatgaccaattttgttctgtgctttcatagctgttaaaaagatttaatataaaaatgctttggttttttcatttcttgaaaaggtgagatctgcaactgatttacattgttaccagcttttacaattttttgctcctt

SEQ ID NO: 15034 - DNA, 774 bp, Macaca Fascicularis
  misc_feature (1)...(774): n = A,T,C or G
gccgctttggccgctgtatgggtcactccnnnnnnnnnnnnnnnnnnnnctggtccaaggatgggaatttcatcatgtccaattctggggactatgagattcnnnnnnnnnnnnnnnnnnnnnnnnnnnnnnnnnnnnnnnnnnnnnnnnngagccgagaccgggaatgggctacctacacctgtgtgctgggtttccacgtctacggcgtgtggccggacggctccgatgggaccgacatcaactccctgtgccgctcccacaacgagcgcgtggtggcggtggccgacgacttctgcaaagtgcatctattccagtacccgtgcgctcgtgccaaggcgccgagccgcatgtacgggggccacggcagccacgtgaccagcgtccggttcacgcacgacgactcgcacctcgtctcgctgggcggcaaggacgccagcatcttccagtggcgagtgctgggcgctgggggcgcggggccggcgcctgccacgccctctcgaaccccctccctgtcccccgcctcctccctcgacgtttgatcgctgccggcgggacctactggcctggcggcgtggccccgccccgctctgccccgccctaatcccccacgaccaggggccgactctttcctcgactgacttcgaaacattcccgacggtgcatttccctggagggcgcgaacggcgcccctgcacacactgtttagacccgctggttgagccgggcagccccaacctaggccttgactcccgcnctgcctgctgaggggca

SEQ ID NO: 15035 - DNA, 725 bp, Macaca Fascicularis
  misc_feature (1)...(725): n = A,T,C or G
cccagnnanncnggaggctgacggaggagaattgcttgagcctgggagacagcagttgcagtaagccaagattgtgctgtgcctcaaggaaaaaaacaaaattaatgtttattgatatttgttgaggtcctatgacatcacctctgagaataggagaaatgaagcaacagttgtgtctagatgtcagaggcatggctgggcctccatctctgcctaagggaagacataaaagagttcagactattgcccatgttccccagggtcagaagttctaatgatgatgatagaggccgggttgtaactcgcaaatgaagggtagcagaatatgccatctttggcataagtattttgagctgaagacaattgagaaaaaaatagattaaaaacaaacaaacacacacctctgcgatctccctatttgcctaaaagcaggatatgaaattgtgaaggcatcctcctactccaggaagaacaaaggttagtcaccagagactttagactcttctcagcctggacatagtaccagagaagtcttatttaaaaaaaaaaaaaaagggaaagaaaaagttgccttcccacaatttactgcgctagtaattcaaagtccttttcctcttccttgtcacttaaaaaatgtattgttttgttaaaatgctatataggcccaagttctaaatcctcttttgagtattcatctctgtactcccgtgtttgtgcaatgcaca

SEQ ID NO: 15036 - DNA, 746 bp, Macaca Fascicularis
  misc_feature (1)...(746): n = A,T,C or G
gatgttagtagcataatannaagtnnnctgnnnngacacagcatcacatcacacacacagaaattagtatatccatgtatgtcaaatacaggttaaaatatcagggcatttatataaagagttgtagtcttctgataaaagtagactggatcccctggggtatttggggagaaagtaactacttttgctctacccctagaaatgtccagttttgagtgactgtagtatggatgggttttcttgttttgttgattatttgaggcttttaaaacaagtagttcatgaaagaagctgttggactcaacatagagtagagtaactatctttttagtctggatttctgccctgcttagattttaaaagtannnnnnnnnnnnnnnnattccacttgatgtaaacaaaacttttttttatacataatatatatatatatataaaataacttattgtatcagtccaggttcagaaannnnnnnnnnnnnnnnnnnnnnnnntttcatttcacctgtaaactgtatcacttttactgatattgtaattttcaaatgtataatatgtttacagatgtgccctgcatttagtctgccttgttcctattttgatttttgttgagtctcctgcctgcttgccaaaagctaggatgcttcaggcccatgtacaattgaaagcagaggcatccttnnnnnnnnnnnnnnnnnnnnnnnnnnnnnnnnnnnnnnnnnnnnnnnnnnnnnnnnnnnnnnctg

SEQ ID NO: 15037 - DNA, 765 bp, Macaca Fascicularis
  misc_feature (1)...(765): n = A,T,C or G
cagcagccactccagannnnntccatgctcagatcatgnnntcagaacttagnnnnnnnnnnnnnnnnnnngggagatgctgtctgacccccaaggttttgatggagttaacttggaatcctcttgacttcatgccacattgacgtgaactttgatgtgtcataagcagcagcaacttcgtgtgaaaatattgtgaggtagttatatgtaaggttgcgtggtccagtaatgtcttagattgataaattaggtatggaatcggaatcagtgttacgtgataagaataggtgaacgcaccgtgtcagtgatgatgtaaaattctctccttggcaggacatgggcaaacgtgctgattggtgcaagtgtggcgcagagctgtccgtagctgtagtgaaagatgaagtgcaagaccttctctaggttttctagctttcattaaatatatttttttccccagagctaatttgaaagttgattggaccactgtggatggggtctcattaataatgtgggaaatatgggccaagcacgnnnnnnnnnnnnnnnnnnnnnnnnnnnnnnnnnnnnnnnnnnnnnnnnnnnnnnnnnnnnnnnnnnnnnnnnnnnnnnnnnnnnnnnnnnnnnnnnnnnnnnnnnnnnnnnnnnnnnnnnnnnnnnnnnnnnnnnnnnnnnnnnnnnnncagctacttgggaggctgaggcaggagaatcgtttgagcccgggatgcagaggttgaagtgagccnnngatcgtgccactgcact

SEQ ID NO: 15038 - DNA, 1093 bp, Macaca Fascicularis
  misc_feature (1)...(1093): n = A,T,C or G
acagagtatagtaaatgattctatcatcacaattntnnngactagggnnnnnngagcagtttaataacttaataaaagtacttcagatagacnnnnnnnnnnnnnnnnnnnnnaccaagaacactgcgcaaatacaaaaaaaaaagttctggaaatgcagaatggcattagatttatatttgatttgttcattttatatcactgtttttcactgtttttgtggacaaataatggttgctttgctgaagtgtttcttcctcaatcttgattgccctgtacctaccccagaagctatagtcacatgtcctaaaggccaagcaaacccaccaggatggtggggggatcttgggccaagctgttaggtttctcttatttggggcaatgccactccacaccagctgggatttgtgagtggacccgtggtaagaagaatagaaaaggctctcagagataaggtttttacatgtgtaacaatcccatttcctagattaaaatcttaattgattttgaaattggatttttatttagaatcaaaattaggacaagaacagataacttcttcagatacatttgtgtaactttacagaatgtcatcaagctttggggctctctggggcacatgatttatccataaaggagatgcagtatgcttacttaaattaataaatttaaaatcttttaagtgtgtaaatagtagtgttggtcttatgtatttcaagtaaaaagtagacagctgcactttttttgcacattggattaaaataacnnnnnnnnnnnnnnnnnnncagactgtttttaacaaatattaaagattgtcagaccaaatgtttatgttttcgaagtatatttcatcactggttacagttttaaatagaagttgattgccttttcataaccataaatgagaattataaactctgttccagttttggtatactaaatgttcttttaaccatctttaggaatatactgaaatgccaacaatagtttgaattgtgttctgtaaagtattagtcaattattttataatatgtagaattgtagaaaatgtcaatttttcaattcacatttcattgctaggatttttaaaaga

SEQ ID NO: 15039 - DNA, 693 bp, Macaca Fascicularis
  misc_feature (1)...(693): n = A,T,C or G
tgggnnnnncatnnnccccgctgggnnnnnnnnnnnnnnnngggtcctggcagcatggcgggaacggctgcttttccnctgcccagggccctattcttggtgggactcggctgcccctcctctgctgcctcaccttctttcagagtgagctgtgggctcaggcccttcaaacattccctccctccaccccctacctccactttcccctttacccaccaaaggttttaggagctaggaggcaggaaaatgtgacccagatgggggtgctatttggcttttattccctgcctttgcagaactgatgtcatcccagacgtccttccctccctaataactgtaaatatataaatatgtcaggttaaagggaaaaggttttcagggcacttctcttcctctctgccccgtaacctacctccaccctccccctagccagccagggcggcttctctgcctgggaggggagccagacccctctctttctccttggctgcagtggggcttctatccagtgccagggaggaacaacatagttaatttttttctaaccttgccactttgagggaaggaagggttgggggaagggcgagctttatgggaccctggtcctggccttgtccctctttcactccagttctgggtgaggcaggagctgggaggggtggggagggggaagtgtctgcctttatttccttc

SEQ ID NO: 15040 - DNA, 635 bp, Macaca Fascicularis
cggtgatacatacagcgaaagaatgaatcggtaagtgggacttttctgtttacataggattctaacgtcctcactggccacaatctataaaagtcgatactggtactttttttcccccttaaaggaaatatgctaataggcagcccctttgcaaatataattcctccttcccatcccttcgaattgctaaggctccactggtcagcaccttccctttcgagtccaggactactgttatgtcccctacatgcccgcttcctccgggaggtcctgaacactgcagataggtttctggaccgcagacaagtcgggagtttctgcagcctggaattggggcgggggaagaggtccaagaagtcaagctccggagaggagcttcaggggaagtgcccagagtcgtggcgggggggaccggctacaccaagttgacttgaaaaagttttgggaagtatccccaaccatcccctctatctgtccccaagccacaggtgccccggcgcgggggcgaggcgagcacgggagcgggacgcaggctctcccgcagccaacggcggggggcgcgaggcctaaaagagcagcccgagcagcagcagcaagatggaggcaagaggggtccaggcgccccggggcgccga

SEQ ID NO: 15041 - DNA, 762 bp, Macaca Fascicularis
  misc_feature (1)...(762): n = A,T,C or G
gagcgtgagttccatccccaaaaggaggccgaaaatcagcacaataagatcctttatcgccagttcaaacaggagttgaaggccaagtaccccaactctccccgacgctgctgagcccttccctaccctagtctgagaagtcagcctctgggctcctcaggccaccgtttaggnnnnnnnnnnnnnnnaaatgtcgctccactttacannnnnnnnnnnnnnnnnnnnnnnnnnnnnnnnaatatggggtgctgggatcgagtcctagctttaccactaactagctgtgtggccttgagtaaatcccgttacctctctgagccttggttaccctgtctgtaaaaagggaggtgagaatacctacctcacggaactgtcgggaggctcagatgagatgttgtatgtgaaaacattctgtaagcttcgtacaaatgtgaagtattaatattatcgcagtattattattgttattattattgttattattaacaatcttgggtgggtagtaggagagcaaaaagtatgaatgggatggagctaagaagtctgagtacttaatgaaatggactttttggaaagaaatcagatgaaggcataaactttagttcttagctcttgaacagaagcctaaaattcttggttctctcaggccttcgccctcaagggctctagaggagggaagactctgcaggctccatgggtgacagcctgagatctgtcccttcaacaggctgggctgggtatgtgcctaccgatgacaat

SEQ ID NO: 15042 - DNA, 718 bp, Macaca Fascicularis
  misc_feature (1)...(718): n = A,T,C or G
agtttgaaaatagtccccgttcnnnnngatgcctgaattttaaaacattttgctttgggaaagtaggtcgacagcacctaagataaatgatgcattccattttcacacttcacagtcataannnnnnnnnnnnnnnnnnnnnnnnnnnactaaagttcacaggcagatcactgtgatccagaacacagtaagaactnnnnnnnnnnnnnnnnnnnnctttttgactgtgtacatctgtaccgggaataacattcctatgctgaaattttcacaaagaatagaacctgcacccagttcttcagtctgatttctctgacctcttgggcatttgtatttgtagtaaagtattgcagagtttcctaagtattttatagcagccatcaaaattggactttgtattgtttattcataaaagaaacttagtaatagacttgaacgaactttgtatgaatacagtagtatgtacgcaaaatcagcgtcctgaatgtaggctgctgagctgaaggtagagcttggttgttaaatacgaactttgtatgaatacagtagtgtgtacacaaaatcagcgtcctgaatgtaggctgctgagctgaaggtagagcttggttgttaaatacagtgggtgaatccttgcgttcagtgtagaaactacgtctataaggttggtcttagtccatctgattttttcggaaatacgctaagagcagccacaaaactg

SEQ ID NO: 15043 - DNA, 592 bp, Macaca Fascicularis
  misc_feature (1)...(592): n = A,T,C or G
atggcacttcatggcccttgaaaannnaggatgtgtnnnaggccatgccctggacactgatgggtttattatcttgacctccatggttactttctggggccccaagctgtgccctggacatctcttttcctggttgaagaaataatgggtgattatttcttcnnnnnnnnnnnnnnnnnnccagatggagagatagggggtaatatgctagaccctgtgcttctcggaaatttggatttagtattttcaggccctaccctcatnnnnnnnnnnnnnnnnnnnnnnnnnnnnngggagtttgcaatgtgatgcactgccaacattgagaattagtgaattgagccctttgcaacggtcnnnnnnnnnnnnnnnnnnnnnnnnnnnnnnnnnnggttgaataaggcttccgaggtaagggaatggtccaaggtttcacagagagtaggaggagggcatgagatcgaannnnggggtcagagcacnncaccgtgccagcagantccagccagtccccacagcttcatcagctctattcatcgttttgtgatactatcttcccnnnacnnnncagctacnnnatggggnntgcaga

SEQ ID NO: 15044 - DNA, 691 bp, Macaca Fascicularis
  misc_feature (1)...(691): n = A,T,C or G
catatgaagcatgtgatggngnnnntgctnnnntnatttgcactgagtgggacatgtttaaggaattggattatgaacgcattcataaaaaaatgctaaagccagcctttatcttcgatggacggcgtgtcctggatgggctccacaatgaactacaaaccattggcttccagattgaaacaattggcaaaaaggtgtcttcaaagagaattccatatgctccttctggtgaaattccaaagtttagtcttcaagatccacctaacaagaaacctaaagtgtagagattgccatttttatttgtgattttctttttttttttttggtacttcgggatagcaaatatctatcnnnnnnnnnnnnnnnnnnnnnnnnnnnnnnnnnnnnnaaacaaaactatttttttaatcatcagatttatactagctatatgggtattagcatatctggtaattatgaatctagaatttttttacatatttttataatactcttagttcagttattggatgaatgaaagataatcaagttggttttaatagtgtcaatttttgtaaaataaaaattaaacttcaaacacacaataaattgtccacaggccgcactttaatatcacattataaagggaaggacagtcttcatttttcctggttattggtttgcttgtcattaaagatgtattttgaatcca

SEQ ID NO: 15045 - DNA, 1112 bp, Macaca Fascicularis
  misc_feature (1)...(1112): n = A,T,C or G
cgtatgtaaatatgaaaactccaggcatcgaaaacaagaacagaagcaccttcagccacagccttataaaagggaaggtaaatggcataaatatggtcgcactaatggaagacaaatggcaaatcttgaaatagaattggggcaattaccttttgatcctaaatactgattcacaattgagttaaattagacaactgtaagagaaacatatgctttgtacaatgtttggtattgaaactaatgaaattatcaagatgacaatgtctttttttgtttctaagtatcagtttgataactttatattattactcagaagcattagttaaaagcctactaacctgcattttcctgtagtttagcttcgctgaattttttttgacactggaaatgttcaaccgtagttnnnntaaggaagccaggcatgcaacagattttgtgcatgaaaagagacttcctttcagtgtaagagcttaaagcaagctcaatcatacatgacaaagtgtaattaacactgatgtttgtgttaaatttgcagcagagcttgagaaaagtacattgtgctggaatttcatcattaacattttataatcttacactcacttcttgtctttttgtgggttcaagagcctgctgacttgtgaagaatttgctgccctcttaagagcttgctgacttgttttcttgtgaaattttttgcacatccgaatattgtcgaagaaacaataaaactacaccatgaggaaaactaaaggtctttatttaaaatctggcattgtattaacatgtgattttatactatgtggtattttatacatttcctcagtagtgatatttggtaaagcagttcatatagtttttttctaagttccatgaatcttacccagtgtttactgaagtatttaagcagcatttgaatatttccacccagcaatgttagtttatctcagaaagttcagaattcatctttgtgttgaatttcccttttaacttccgttcatagacatatacgtgacttccaattcgaccctccggcaagtgagtgtggaagaaaacagcagttttgttataattgcttgaaattaggaaagcacttatttcctagaagcaaataa

SEQ ID NO: 15046 - DNA, 681 bp, Macaca Fascicularis
  misc_feature (1)...(681): n = A,T,C or G
aatgcaatggacaatacagttcgtgtgtgggatgtccggccatttgcccccaaagagaggtgtgtaaagatatttcaaggaaatgtgcacaactttgaaaagaaccttctgagatgttctnnnnnnnnnnnnnnnnnnnnnatagcagctggctcagccgacaggtttgtgtnnnnnnnnnnnnnnncaagcaggagaatattatataagctgcccnnnnnnnnnnnnnnnnnnnnnnnnnnnnctttccaccctgacgagcccatcattatctcagcatnnnnnnnnnnnnnnnnnnnnnngggagagattcagtgaagatacggaatggaagactccaagaccgcttgtctttnnnnnnnnnnnnnnnnnnnnnnnnnnnnnnnnnnnnnngcccaggctagcacccttcccttcagatgaccattgctagcaagaaacaggaggcggttggccatattccaaaaaccactttctgtccgatttcaccaggatgactaaggcaagctccccaagctccccgtggcctctaaaaaccacctnnnnnnnnnnnnnnnntgttttattttttttctttttcttttttcctgttttctaaagcaggcccaatgtgacaaatttgttggttgggatttttttttttttttgtgagacatggnnttgtagtgatattttctttct

SEQ ID NO: 15047 - DNA, 795 bp, Macaca Fascicularis
  misc_feature (1)...(795): n = A,T,C or G
gacaaaagcatnnnnnnnnnnnnnnnnnnnnggcattgacnnnnnnnnnnnnnnnnngaaaaaaaggtttcaccgtttgtcttcttacctcattttaagaagcgtgtggaaatgggatgctgtagagtagtgagannnnnagaaattgagaacaatttcgaaataaaatgctgtatttgaatattttgcatttaaagagaatacattttatataaacaggaaaatacatttgacactttatggaattaactttcatgagactttttgtgggaacannnnnnnnnnnnnnnnnnnnnnnnnnnnnntgctctttttattaagtctttaacagggatgcatttcattgtatgttttgggtatggctttggaataaatcgttttatatcttatttgaatatcagaaccattggtaaggttttctgtgtctgaatgtttctgtgcttcctttttggcaatctggtagctcttagattatnnnnnnnnnnnnnnnnnnnnnnnnagaattcagtttgatcaaaaattataccttttatttagcagtttattacatgatgcctctataaatggtacattgtataatcattaccaaaatgacatgagaattatggttcctgtttttcatgtgaannnnnnnnnnnnnnnnnnnnnnnnnnnnnnnnnnctacatccacagtcttccattcgtttagggaagtcttccattccactttagggaagttatgggacttccctaaagatcaaaagccttctgattccacgttcacagtcttccattcatttatttactgtcatcaa

SEQ ID NO: 15048 - DNA, 784 bp, Macaca Fascicularis
  misc_feature (1)...(784): n = A,T,C or G
ctggacttacgatgattnnnggantnnnntagacagtgaggatgagatagaggagctgagcaagaccgtggtccaggtggcaaagaaccagcattttgatggcttcgtggtagaggtctggaaccagctgctaagccagaagcgcgtgggcctcatccacatgctcactcacctggccgaagctctgcaccaggcccggctgctggccctcctggtcatcccgcctgccatcaccnnnnnnnnnnnnnnnnnnnnnntgttcacgcacaaggagtttgagcaactggcccccgtgctggatggtttcagcctcatgacctacgactactccacagcgcnnnnnnnnnnnnnnnatgcacccctgtcctgggttcgagcctgcgtccaggtcctggaccccaagtccaagtggcgaagcaaaatcctcctggggctcaacttctatggtatggactacgcgacctccaaggatgcccgtgagcctgttnnnnnnnnnnnnnnnnnnnnnnnnnnnnnnnnnnacaggccccggatggtgtgggacagccaggcctcggagcacttcttcgagtacaagaagagccgcagtgggaggcacgtcgtcttctacccaaccctgaagtccctgcaggtgcggctggagctgnnnnnnnnnnnnnnnnnnnnnnnnnnnnnnntgggagctgggccagggcctggactacttctacgacctgctctaggcgggctttgcggcctccgcggcagacgtgttcttttctaagccaggaggnnagtganaggt

SEQ ID NO: 15049 - DNA, 802 bp, Macaca Fascicularis
  misc_feature (1)...(802): n = A,T,C or G
atagtgataaatagaatacatagaatagtgacgaaattcaatttaaaaaaccaagttagcctccaaaccattttattcaaatgaacccatcaactggatgccaactctggtgaatgtaggacctctgagtgactgtataattgttaattcaaatgagattaatttaaacagttgacagactgtcattcaataattagctccaggaaataacagttatttcatcacaaaaccgtctcttcaaannnnnnnnnnnnnnnnnnnnnnnnnnnnnnnnnnnnnnnnatgctcacctattcagttgctctgtggtcagtgtggctgcatagtggttgattccatgaaaggagtcagctcaatcacagtcattttagtgacgagctgnnnnnnnnnnnnnnnnnnnnnnnnnnnnnnnnnnnnnnnnnnnnnnnntcagtcatagacgagtcagttctgcctgaggcttgtgatcaagcaaannnnnnnnnnnnnnnnnnnnnnnnnntgttcgttggactnnnnnnnnnnnnnnngttctagatcgcaggcaacccccttgtgggcacagaccttgccactggggnnnnnnnnnnnnnnnnnnnnnnnnnnnnnnnnnnnccacagccctcctgtgcctgcttccctgtgtgtcggggtcctccagggagcggactcagaggtggagaccacagaggcagggtctctggggactgtcggggggtacagannnnnnnnnnnnnnnnaaaannnnnnggcaatacccccttgtgtaattgctttgtgtgcgacagggaggaagttcaaa

SEQ ID NO: 15050 - DNA, 743 bp, Macaca Fascicularis
  misc_feature (1)...(743): n = A,T,C or G
gagcatgcagatgcattgctnnntggatgcagagcaggtgattctcccagcatgcaccagtgcagcctgaccagttgtttacatccagcatctgttctgattgtcagcatctgtcccatnnnnnnnnnnnnnnnnnnnnnnnnnnnnnnnnnnnnnnnnnnnngtcattcaggacactaggagaaaaatctgagtgggtcattgtgcccatatccacannnnnnnnnnnnnnnnnnnnnnnnnnnnnnnnnnnntcaaacatctttgagcacctggtacagatgtttatgagaatactctaagatctcaacccttgatcccaaaggcacacaatcacagaggattccttttgactgtaaactgtttaccttgcttttgagagccaaacattgtacccaacctggaaaaagtaactaccccaattaaagtgcctcatgtgtccccagagcatggcttaacttcagggacaattcacccagggaactaagaactaaccagttgttcaacagcgggttaagctcagcagttttcacannnnnnnnnnnnnnnnnnggaaacaaaaggttagtcattagctgagatgtgattttaaaacaccttgaccttaacttttttacattattacttttaaatctcctttgggactggggaggctggccaaaatagtcttaaaactgcttgtgtcatatttgggttttaagttcatgactttcagaacagcaaagccatatatgcaatgtttt

SEQ ID NO: 15051 - DNA, 1016 bp, Macaca Fascicularis
  misc_feature (1)...(1016): n = A,T,C or G
gagagtcaatgnnnnnnnnnnnnnnnnngctgatcttggccctctgatcactcnnnaggccaaagagcgagtctgtaatctgattgatagtggaacaaaggagggagcttccatccttcttgatggacgaaaaattaaagtgaaaggctatgaaaatggtaactttgttggaccaaccatcatctcgaatgtcaagccaaatatgacctgttacaaagaggagatttttggtccagttcttgtggttctggagacagaaacattggatgaagccatccagattgtaaataacaacccatatggaaatggaactgccatcttcaccaccaatggagctactgctcggaaatatgcccacttggtggatgtcggacaggtgggagtgaatgtccccattccagtgcctttgccaatgttctcattcaccggctctcgatcctccttcaggggagacaccaatttctatggcaaacagggcatccaattctacactcagttaaagaccattacttctcagtggaaagaagaggatgctactctttcctcacctgctgttgccatgcctaccatgggccgttagacacaagtttgtttaagactcagtccatcctgagtaatttccctttatttttgagcagcttcatttgtcagctttgctcagatcagatctatgggactggactacactgtaactgaaatcttcctcaggactattaaccccagcaaagtttctatagggagctgcctagtgtaacaatgaaaccagatttttcacttgctcttcgtacatttttgaggtaactgttgtaactatgaaatgcttatctgaaattagtgcttaaacctgatttctaaaaattatccccttttctgatgatttgaaggggagaaacgccagtgtacgtaaagaaaatgttccggccgggcgcagtggctcatgcctgtaattccatcattttgggaggccatggtgggcggactgcttgagcccaggagtgaagaccagcctgggcaac

SEQ ID NO: 15052 - DNA, 752 bp, Macaca Fascicularis
gcaggcatcgagcaagatgaagacgtctatcaggaggaaggaaactatgagggggaaggaaatgaagatgtctgggaagaaggggaagattcagacgactctgacctggaggatgtgcttcaggtcccaaacggttgggccaacccggggaagagagggaaaaccggataagggtcttgcccttttggggattatctctctgtatcccccaccccctatcccatttgccctcctcctcagctagggccacgcggccccacattgcacttctggggggtgaccgacttcgtacacgggtttaaagtttatttttatggtttagtcattgcagagttcttattttggggggagggaaagggggctagtccccttcttttggccctccgcccccgcaggcttctgtgtgctgctaactgtatttattgtgatgccttggtcagggcccctctacccactttctcccagtcagttgtggccccagcccctctccctgtgctgtgtggagtggacaccctgacccccgaagcggggagggtcgctgtggccttcgtcacagccgcgcagtgcccttgtaggcgctgctgccaccctcctctcccaagttctttctccgtccctctcctctttgcgccgcgccgctagcccgcctcggtgtctatgcaaggccgcttcgccattgcggtattctttgcggtattcttgtcccccctcccccagaaggcttgcctctccccgggaccctgtaatcccaa

SEQ ID NO: 15053 - DNA, 733 bp, Macaca Fascicularis
  misc_feature (1)...(733): n = A,T,C or G
acgccgccactgagaacaagnnnctgcctcgctcgagctccatggcagccggcctggagcgcaacggccgcatgcgggtgaaggccatcttctcccacgctgccggggacaacagcaccntnntgagcttcaaggagggtgacctcattaccctgctggtgcctgaggcccgcgatggctggcactacggagagagtgagaagaccaagatgcggggctggtttcccttctcctacacccgggtcctggacagcgacggcagtgacaggctgcatatgagcctgcagcaagggaagagcagcagcaccggcaacctcctggacaaggacgacctggccatcccgccccccgactacggcgccgcctcccgggccttccccgcccagacgaccagcggcttcaagcagaggccctacagtgtggctgtgcccgccttctcccagggcctggatgactatggagcgcggtccatgagcagcgccaatcccttcgcccatgtccagctgaagccgacagtgaccaacgacaggtctgcccctctcctnnnnnnnnnnnnnnnnnnnnnnnnnnnnnnnnnnnnnnnnnnnnnnnnntctgcccatgcagcctgttctgtcatcctctgcgcgctcctgttaagagaacatccaggccgggcgcgnnnnnnnnnnnnnnnnnnnnnnnnnnnttgggaggccgagacgggcggatcacgaggtcaggagttcgagac

SEQ ID NO: 15054 - DNA, 747 bp, Macaca Fascicularis
  misc_feature (1)...(747): n = A,T,C or G
gatcccaactttactgtggcagctcaggcagcactggaggatgcccgagccttcctgccagacttagataagctgcatctcttcccttcagatgctggggtttctctttcctcagcaaccttcctagccccactcctttctgggctctttgttctgtggctttgcatnnnnnnnnnnagccatcagtcctattactagtttggaaatgatttggggatagagattggcatagaagaatgtaaacaatcattaaaggaagcagggcccnnnnnnnnnnnnnnnnnnnnnnnnnnnnnnnnnnnnnnnnnnnnnnnnnnnnnnnnnnnnnnnnnnnnnnnnnnnnnnnnnnngggcaaggtttctgcattccagacctcttnnnnnnnnnnnnnnnnnnnnnnnnnnnnnnnnnnnnnnnnnnnnnnnnnnnnnnnnnnnnnnnnnnnnnnnnnnnnnaggtcannnnnnnnnnnnnnnncagtaaagacttaagggttgagatttttaagaggcaagagctgaaagcagaagacatgatcattagccacaagaaactcaaaggaagaagaaataattagggaaagaagtctatttgatgaatatgtgtgtgtaaggtatgttctgctttcttggttcaannnnnnnnnnnnnnnnnnntagctcttaggtgaagggagtctctgcttggaagaaccgcacaggtaggacagaagtnnnnnnnnntacccctaactgatctgttataaa

SEQ ID NO: 15055 - DNA, 600 bp, Macaca Fascicularis
ataacagctacttttttatatggttatgatcccaaacctgcaggaaatcccactaaagcatagttgtatactatctttaactggtttttcacgatggtgcactaggaatctcgacattaatcttgcacagaggacttctacagagtctgtgaagatatcatcatgctgaatctgatcatactgtttttttaaaagtttaaggataaaatatgtgtatatgtaacaaaacacattgcatctagaaatcagaacttgaaagtatttccagggattagaattagaaggaatattagagaaaacttgaaatctgagtgtaaaaagattttacctttttgattgctgcagaaatgtcctatgcactctttgcaagagcacacaacagatgtcagatatcaatttttgcaaattagatttaatgttattaagtgtttttatcttactctttctgtacagatatatcaaatcacatgaaatatttaaagtttgaaaattataattacctataaagctgtgaaaaaatagaagtataatttgaaaaaacatttcacttatcagagatttttatatttatacaaaagattactaaatgaaggatggcta

SEQ ID NO: 15056 - DNA, 751 bp, Macaca Fascicularis
  misc_feature (1)...(751): n = A,T,C or G
ctttcaggatgannnnnnnctttnnncatggattcttggctggctgtgctgtgtggaatattgttgtgatatatgttctagcaggagatcagctatccaacctctcaaaccttctgcaacaatacaagactctagcgtatccattccagagtcttctgtacttgcttttggctctgagtacaatttcagcttttgacaggatagactttgctaaaatgtcagtagcaatctgaaattttttggccctggatcctacaactttagcatctttcttgtactttactgctcttatactatctctgagtcagcaaatgacaagtgacagaatccacctttacacaccttcttctgttaatggtagcctctgggaagcaggaattgaggaacagattctccagccatggattgtggtgaatctcgtggtggctctgctggttggattatcttggctatttttgtcttataggccaggcacggatcttagtgaagagttaatgttctcctcagaggtggaagaatatcccgataaagataaagaaatcaaagcctcttcataataccagctaacctttggaagaatagtgactcagtatttgtcccacttttgtttttaaatgtatttttataagatgtatacatgtgtatttgtaatagattttttttgattatataatactgaaacatctctcaatactatgaaaaatgttaaaattgtatttgttatttatgtccaaatattaatttgtatagc

SEQ ID NO: 15057 - DNA, 732 bp, Macaca Fascicularis
  misc_feature (1)...(732): n = A,T,C or G
gcagnntccacagcggggcaactcttcatatacatgcagtcagtgaccagctccctggccccaccagtgactgcagtctttgtcctgnnnnnnnnnnnnnnncgtgccaacgagcagggggccttctggggcctgatagcagggctggtggtgggggccacgaggctggtcctggaattcctgaacccagccccgccctgcggagagccagacacgaggccggccgtcctggggagcatccactacctgcacttcgctgttgccctcttcgtactcagcggtgctgttgtggtggctggaagcctgctgaccccacccccacagggtgtccagattgnnnnnnnnnnnnnnnggaccctggctcgggatctgcccttgggaaccaaagcaggtgatggccaaatgccccagaaacacactttctgggcccgtgtctgtggcttcaatgccatcctcctcatgtgtgtcaacatcttcttgtacgcctacttcgcctgacactgccactctgggcagtaaggcaggagctccgagtcctcaggtccacccttttccctcatggggatcgcgaggccccaagaggggcagattcccctcacggctgcacagcagctcggtgcccaagaactggccaagccagcaaagcaggagccctgaaaacttaggggggaaatgggagaaaaacatgtgacatttcaaaaacagtgccaaagcagtcatcatggaaagaaa

SEQ ID NO: 15058 - DNA, 641 bp, Macaca Fascicularis
agcctgggcaataagaaagaaatttttgttgcccccgccccccagcccccaaccaaaaaaatcagtgctcaacaagagaatcacctgatgctttttgaagacaagtctgtcttttacctggatttggctttggtgaaatgatagaaagggttagaaaacagtagttgctttttttaaggttcctgctgagggtgagtagtctttaagctcagaaaacagaaacagtggagtctatccacatcagatttcagaaagggctctttagcttttccctggcttctaaaagtggccttgactggctttgtcttcctctcaggagttgggctgttcctacacagatgttgctgctcaggatggtgaagccatgctccgggaaatcttggcctctcagcagcctgaccgatgcaaacgagcccaggccttcatcagcacacagggccttaagccagatactgtggctgaactcgtggcagaagaggtgacacgggagctgcttacttcatcacagggaacaggtgccctacccctcagcgattgccaatctttccgacagcattctctagttcccagtgttaaggatttgaatgttgtgcttatatacacccctgtatgtggttctctcaagtttctgattccagtaa

SEQ ID NO: 15059 - DNA, 784 bp, Macaca Fascicularis
  misc_feature (1)...(784): n = A,T,C or G
agtgtacagcagcagtgacacagtggccnnnnnnnngacccacacagtgccctgtgcacaccaaaaacccatcacagnnnngaaagccgctgccgggcgcttggtgactgggagtcaagaccacacgctgagagtattccgtctggaggactcgtgctgcctcttcaccnnnnnnnnnnnnnnnnnnnnnnnnnnnnnnnnntacattgaccagaccnnnnnnnnnnnnnnnngaggacaagatggggccatctgcctgtgggatgtactgactggcagccgggtcagccacgtgtttgctcaccgtggggatgtcacctccctcacctgtaccacctcctgtgtcatcagcagtggcctggatgacctcatcagcatctgggaccgcagcacaggcatcaagttctactccattcagcaggatttggnnngtggnnnnaagcttgggtgtcatttcagacaannnnatggtgactggcggccaaggctgtgtctccttttgggacctaannnnnnnnnnnnnnnnnnnnnnnnnnnnnnnnnnnnnnnnnnnnnnnncccagcctgcccgccagatcctggtgctggacaacgctgccattgtctgcaactttggcagtgagctcagcctggtgtatgtgccctccgtgctggagaagctggactgagcatggggcctccctgcccaggcaggggtctggggtgctgtgtgggggccaatgcactgaacctggacttgggggaaagagccgagtatcttccagccgctgcctcctgactgtaa

SEQ ID NO: 15060 - DNA, 764 bp, Macaca Fascicularis
  misc_feature (1)...(764): n = A,T,C or G
agcggcattcaccgnnnnnnnnacgctggggaggtggnnncggccgaagtagtaaaagaggctgtggatatactcaagacagagcggctgggacacggctaccacaccctggaagaccaggccctttatgacaggctgcggcaggaaaacatgcacttcgagatctgcccctggtccagctacctcactggtgcctggaagccggacacggagcatgcagtcgttcggctcaaaaacgaccaggctaactactcactcaacacagacgacccgctcatcttcaagtccaccctggacactgattaccagatgaccaaacgggacatgggctttactgaagaggagtttaagaggctgaacatcaatgcggccaaatctagtttcctcccagaagatgagaagagggagcttctcgacctgctctataaagcctannnnnnnnnnnnnnnngcctctgcagggcagcacctctgaggacaacacccctccaagcctttgccctgtggagtcaccccaattctgtggcgctgagcaacatttttacatttattccttccaagaagaccatgatctcaatcgtcagttactgatgcttctgaagcctgtgtccatttctgcacacacgtatacctcggcgtggccgtatcccttctctgattatgtgtcctggtcagggaccagcgcccttgcacatgggcatggttgaatctgaaaccctccttctgtggcaacttgtactgaaaatctggtgctcaataaagaag

SEQ ID NO: 15061 - DNA, 735 bp, Macaca Fascicularis
  misc_feature (1)...(735): n = A,T,C or G
ccacagaccgcgnnnnctgcgtgtgagggggacactgtcatgctctgctgagttgtgagggctcagatcacgtgtgtgaaagagaatgtttctgcgtcatccttgaaaacagggtccggggccttcagacccggggaaagggcgagccacactggggcccagtcttctttcccgggcctgaaagcttccccgaggtttgcagggtcagggaggaggaacggtgggggtgggcagtcactgccccttcccctggcctgtgttcgcaggagccacaggacagaagagggtggcctctgctgccgagccccgttagtctgcagctgactggaacagaggacaaccctgaggtgtggcgtgtgggcacctggcactcgggagtggtgggagcacgtccaggcatggtgcgtcctggggcagaacgctaagtctcctcccccttgtcttggcttctgcctgttggggtctcattcctttctgttcctcagtgcctcggggcggcatttcacctccgaattcagagggagggagggagcagtagcttcccagagtccacaggtgtgagttgggtcaagtgcattggcccaagggaaagagaaagagagtaaaagctggagagagtgaagtgaatggaggatacaaaatggaatggaagaattaaatccaaagctccaggcaatcaaaatgaatannnnnnnnnnnnnnnnnnanngtgaattttagtgacacgtggatgat

SEQ ID NO: 15062 - DNA, 665 bp, Macaca Fascicularis
agggcctgaacgtgccttctgattggaccagccgtgggaaggacagtcatgaaacgagtcagctggatgaccacagtgctgaaacccacagccacaagcactccagattatataagcggaaagccagtgatgacagcaatgagcattccgatgtgattgacagtcaggaacgttccaaaatcagccatgaattccacagccatgaatttcacagccatgaagatatgctggttgtagaccctaaaagtaaggaagaagataaacacctgaaatttcgcatttctcatgaattagatagtgcatcttctgaggtcaattaaaaggagaaaaaaatataatttctcactttgcttttagtcaaaagaaaaaatgctttatagcaaaatgaaagagaacatgaaatgcttctttctcagtttattggttgaatgtgtacctatgtgaatctggaaataactaatgtgtttgataattagtttagttcgtggcttcatggaaactccctgtaaactaaaagcttcagggttatgtctacgttcattctatagaagaaatgcaaactatcactgtattttaatatttgttattctttcatgaatataaatttatgtagaagcaaacaaaatacttttacccacttaaaaagagaatataacattttatgt

SEQ ID NO: 15063 - DNA, 724 bp, Macaca Fascicularis
  misc_feature (1)...(724): n = A,T,C or G
tatagtaccaaccagcannnnnntctaattataaacctaatttggcctaaactttattattgcacactgnnngaacaaaacatattcatctctatgtaaattttttcgtcatggaacaagggtgtgaaatgaaaatattttaggatttattcaaaaacagactattctgttttcagcttcaaaattgttcttnnnnnnnnnnnnnnnnnnnnnnnncagttgaggttgctactgaaaagaaaaaaggaggaggcagaaatctctcagggagaatttttccttttttttctatttcaggtacctggaggggtggggagaagtaagaattgtaaggggggttcgatagtgggaaattctgtgannnnnnnnnnnnnnnnnnnnnnnnnnnnnnnnnnattctagttaccgttnnnnnnnnnnnnnnnnnnnnnnaattnnnnnnnnnnnnnnnnnnnnnnnnnnnnnnnnnnnnnnnntatccaccctgtcatagatcttaatgtttttgatcattgcattaaagtggaagtgccacccacagtgaaaccagatcccactaataagcttaaaggcgattgcagttttaattccatagttattgaatatccagtgtgtgtaaggcctggaggggagccaaaggacactaacttctaagagctccgtctagttggagagaaacctgtatgccacaacatatagtgtccttgcctatgtggggtgaaga

SEQ ID NO: 15064 - DNA, 705 bp, Macaca Fascicularis
  misc_feature (1)...(705): n = A,T,C or G
cttttatattactgtaagatgttatattgttaatgtggatgtagtgcttttactttacagattgattggaataagattattatatatgaatttacccacaggactctggatcannnnnnnnnnnnnnnnnnnnnnnnnnnnnnnnnnnnnnnnnnnnnnnattgatgtatccataccaaatgatgttgaataattacatatctttcttgatttcaccgatttcttatttcggtcactgttactaaatctctgttaatgttctgtcttttaactgaatcttttaccgagaaaagctcattggatcattgtttaattttgtaaacagatgggatagaagggtttgnnnnnnnnnnnnnnnnnnnnagggctgttttaacatctttgaagtatgactttagctgagtatctttacaaccatcttgaatatgtcttctagtgtccacaagatttagcaaaaagataaagcctgggtagaatatcgttttaaaatgttcatgttctgttctatattttctccacctgctctccaaatattgtaatgcaaaaagtatcagtaatgatctggtagtattaattttgtggtcattgttactcttcgatacattttttttcgttaaatacttattagagggttttgaaatgtttttcaaatatgtgaaatgtggaacattgctgtcttttatattaaagtaattaaaatgtatg

SEQ ID NO: 15065 - DNA, 634 bp, Macaca Fascicularis
tgctgaaagagaggatcgttattttattctctcttatttcccacaattcttactgaattttttattcaaagaaggtgacatttttgcagttgttttttgttttttttgattgttgtgatgtggctcctcctgaactgacttcatttgagctgctgatgcactcttatgctctcatggagtggagaaccaattctagtgtagagggagtagcaaatctttaaaacacgacttacaacatggggaacccgttgtggtaatctatgctgatgttttatgtgcttttgccttcattttgcaaaatgacttaatgctgggttacatgtctctctttttatgaattcagtcctgctcagagtgaagcttctccagtggcttctccagatccccagcgccaggagtggtttgcccggtacttcacattctgaaagaattgtgttgacacagctctgtatggactgttactgagagcatgactttatacagattgatatgtaaataggctttcctatgtcaaacactgtgaatgagaaagtctttgtctctccaatttgaaaatgcactgtatttcctgtgatatttattggaatcattctataaggtactatatgatgtgtgtaattataactgttatttt

SEQ ID NO: 15066 - DNA, 426 bp, Macaca Fascicularis
gcgagcccccgccgcgcgcgcgccgccgcccccctccgtgtcgcccgctccccctcggtgtttgcatgcgacccggccccgcccctcggccccgcccccgtccccgggctgcgccgggacctgccagacccccttcccgggtccagagcccgaactcccagagctcacctgcgggtgacccggggccagcccaggacggcgggtggtttgtgcgagttccctccccacgcggggccccagccccatcaagtccctctggggacgtccccgtccgaaaccggaaaaaagcagttccagttaattgtgtgaagtgtctgtctccagcccttcgggcctcccacgagcccctccagcctctccaaatcgctgtgaattgaccccttctttcctttctctgtgtaaatacccctcacggaggaaatagtt

SEQ ID NO: 15067 - DNA, 941 bp, Macaca Fascicularis
  misc_feature (1)...(941): n = A,T,C or G
gaattcagggctttccccannnnnnnnncccccacctttatcgaggggtgctgctttttctccctcctcctcaacttcctttttgcaccgtcaccactcaacaccttccatgacacttccttgctttggccagaagccatcaggtaaggttggaaagagtctctgacctcccttgtttagttttggaaccatactcactcactgtccnnnnnnnnnnnnaaatgataatggggcctcagccctgccaccctctgctgtcatcagctgatgcattgtttttagctcaggttttgataaggtgaaaagaatcgtcaccagggttactcagacctgccagctcttggagtccttggtggttgaacttggagaaagaccacatgaagacacttgtaagcacacatgatccctctgaattgttttactttcctataattgttttgcttttaaaaattgaagaagttttaaacagggctttcatttggtcatccttgcaatccattggggtctagtttggaatctgacaactggaacaaaaagaaccttgaatccggtgcatgccttggttttggtgctgctgctgcttcccaagatcctcagcagggattaagaaagaacccggtgtgcaaagcagatccccgaaattggtgggcttgacctcctagcaaattgctgcatctttccacttgctgttcaggaccactaaatgctgaaatgtggatgcataccgaaataaaagcaattcattgtgtactaaaggttttttttttttttaatttagtatttgtgtaaaaccaccttttgaagcagcaactatcaagtctgaaaagcaattgatgtttccattaatctttttccggagggaaaaccttagttctaaggatttaacatcctgtaagtgaagtttaacataacagtattccataaacagcctttttatgtca

SEQ ID NO: 15068 - DNA, 516 bp, Macaca Fascicularis
  misc_feature (1)...(516): n = A,T,C or G
ggtgggaagagnnttggccgcctcggctcctgnaggccatgctcctggtctctncttcctgaggtcccaggcgggggttgccctgggtggggggggtgccctggaaggggagacagaggaggagggtgacacaggtcacacatccagcctagaggcagacctggctttggtggcaggagaagaaacacttgcccagacccttttgtgtagggaattggggagggggtgtggcaggcaggtgggccacggaactgggtcccgggcaccaaggccatgtgcagggccacggacggatgctcctcacgaggcttcagaagtgagcgaggggacggagaagccccgcgtccgagggccttttgtcccgttagcaattgaggtgtgcagagcactgtacagaccctactcccctgtacattctccctggaggtgcccggtccctgctcggggatgggagttttgtagactgtatagaaatcggcaccctattttcttgcagctagattttgttaatctgaa

SEQ ID NO: 15069 - DNA, 729 bp, Macaca Fascicularis
  misc_feature (1)...(729): n = A,T,C or G
gagtgtaattaannnngctttatgaagtcnnnnnntttataatgggaaaaacattgcctaggaggcaagnnnnnnnnnnnnnnnnnnnnatgctgccactgtgtaaggaagtagttttataacccatgggcaaatcatctgagctttctcatctgtaaagttagggtgaggaattaattagttgatctgtaaactatcagcttcaaaacgttatggctcaatctgtagaatatatgcccaattgctaaacagatgttgtgcccagaattttatctagtgactacctcaacatacaggccaagtgttacctacaccaacacccaagccattaatttgaggtgccgtgagaataggcgaaccgcagcctaacaccatttaggtttttgtgtttttttcaggcttgcctctacttaaatatatttagattagagagttttcttagacttctttctttgcaaggaagggttatttggggaagtgttggaaaaaagattagggcagggtacccttagtttatatagggtacaaaagtatgggaaacattttccctttcttctttaatctctgaagtcatgtttggaattacatataatgtagcaggtactggagaggacctgaatttcaagcctctgatttagctgtttgtaaactgccaagttttgcttgactgaagaatgctgatcttttttgggagtctaatctccttctaatatcagaaagtgcttttta

SEQ ID NO: 15070 - DNA, 549 bp, Macaca Fascicularis
gacatttcagagggagatccccctccggtttagctgtcgtcacaggcccttctttagaatggatgaccaacactgcactcaatgagccagcctgtcttttgggggaaccaagcattcgcttcccctagactacagcagggaaagggaggagaaatatgatgtctcaattggcatatgaagcccgttcttggaattatgcaaagggcagtggctgggagtttggatgcttagctcctacccctgtcctacctcaccggggcactttcagggtccagggacctgtgaagtctctaggcctatatgggacaatcaattctgattgagctcccccattcccctcgggtgaggatgactgttatttttgtagctgagaacgtggaatcccacgagtttttactgcccttcacccaaactctcccacctccaccccacaatgaatgtatttattgtgagaatggctatacttctttaggaatgcccccacttaccaccaggtgggtggaacaggcatgtgacagagtggggagcctgggctcagctcctccccct

SEQ ID NO: 15071 - DNA, 774 bp, Macaca Fascicularis
  misc_feature (1)...(774): n = A,T,C or G
ggcaaatgtcttannnnctgccggctccanntcctcnnnnnnngctctttccatccccactctagtgctttccagaagaggagagcagctctcggaccctggctcctgtctctaccatgctggccctgtttatgcttatggctctggttctattgcaaaggaagctccggagaagnnnnnnnnnngnnnnnnnnnnnnnnnnnnnntcagatgacacattttnnnnnnnnnnnnnnccaaccagaccagctgccccatgtggaaagaaagatgctccaggatgactctcttcctgcnnnnnnnnnnnnnnnnnnnnnnnnnnggaatccaggaccctgagggacagaaagatgaactgttcagttaccatgggaggaggaccaagatcaaaggcctccaggaccccagcctctttccatcatccttcctccacctgtgggaagagaaggtgatgaagccggggctccacccacggaagaaaggctggctgtccttgggcccaagaaagtcaagcattatccacgtccgaaggttacaagatgactcaaaggagacttcaagaaagttgtannnnnnnnnnnnnnnnnncacctaggagaagtgtgaaatttctattcctgaatgtttgaaaatagaagaggcttccaataagcgtggaaagtgacaaatcctctatcatcactcccagcccttgctgggggccccttttctgactattgttagcactcagcctcccactcacatttaattatatttaagtgtaccagccttgcc

SEQ ID NO: 15072 - DNA, 706 bp, Macaca Fascicularis
  misc_feature (1)...(706): n = A,T,C or G
tcatgcagtgtggcctttgctaggtagaggtatgtcctnnnatggaatggccacagaatttagtattacatcaactttcttttaacaatctgtgcatagtacatgctgcactgttccatttagagatttgacagaggtttcagtttagtatactcaaatcttattttagtgcttgggaaatgaattcagaatatcatatcctctccaattctctctttctcaaattgctgggaaactctcatgtcactaacttcgttgctctaactataccatctaggtttcaccatcccttctcttcctcaaggtacatgtgctgctaatattgcgttcgttgagatctccagtgtcccaatattcctcttccctctggttgcttttcctcagataatccactaagaatattttgtgtttcttttctcagggaatcaaagaaaggtaattatcaagtgtgcacagggaagaaaattgatatgtgaaaggttcacataaatttcttcatatcacagaagattaaaattccgaaaggagaaaacagaccaaagagaagtaactaagaccaaagggatgtgttttattaatgtctaggatgaagaaatgcatagaacattgtagtacttgtgaataactagagatagcatgatttaaagtcataattgtgaaaaataataataatttttcttggatttatgttctgtatctggaaaaa

SEQ ID NO: 15073 - DNA, 631 bp, Macaca Fascicularis
  misc_feature (1)...(631): n = A,T,C or G
cagactcccnnntggnngactcggccccagntggcaagggctgnnnngaggtgggcagcttgggccctggnnnnnnnnnnnaagtggaaggggaattgcgggagaagctggcccaggtcaggtccccaaaggcttctgaagaaaagggcaggtaggcgcacctggacgctggtggtgtggcggggatgatcagccagccgggagggcagcgcctgctgaggacggtggccctgccttcatgcccaggacaccagctgggtccagctagcagccactgggaatcagaggaatggggcagannnnnnnnnnnnnnnnnnnnnggacaggagaccccacccacccacctccacggtcaggccccgggaccgcactgacaggaagccttgtgtgggagtacttcccaggggctgcagggacaacgctctccagggaggccccagcgaccacaccatcttttggctgtgagaggtctcacccctgggccacatcctgtcactactcactactctggggcccgcgggcgagttgcctagggtgggggtgcctagccaggcacactccctgcccggcctagtccttggctcccaggactnnnnnncacgcaatgctcacctcccctcttccccactaa

SEQ ID NO: 15074 - DNA, 706 bp, Macaca Fascicularis
  misc_feature (1)...(706): n = A,T,C or G
gcgcagggcgcggnnnccggcgcccccgcgnntnntccccggccgcgggcgagccgctgcagagggagcgccgcgccggggcagagtgcgggctcgcgcggcaagtgcgcgccgaggtcaccaagtggattcgagtgaaccggagaccccgaaaacggaagcgcagggagaggnnnnnnnnnnnnnnnnnggttcgccatcggtggtgtgaactcattgttaagcacaagttcacaaaagcctacgaaagtgtggagcggttccttcaggaggatcaggccatgggcgtgtacctctatggggagctgatggtgagtgaggacgccagacagcagcagctcgcgcgcaggtgcttcgagcggaccagggagcagatggataggtcctcagcccaggtggtggccgacatgttattttaatgagaggctggtcccagccaggcacgcacannnnnnnnnnnnnnnnnnnnnnnnnnnnnnnnnnnnnnnnnnnnnnnnnnnngctctgggatttcgagttcttctgcacagatgactaaatatatccgagnnnacnnntggaaaannntgctgaacgttttacgttggtctgctcagcacatggctggatgtggatatttctgtaattnnnnnnnnnnnnnnnnnnnnnngtaccaagaccagtgggcgccgtttgatgtagaagagcaggacgagactctacgatt

SEQ ID NO: 15075 - DNA, 1145 bp, Macaca Fascicularis
  misc_feature (1)...(1145): n = A,T,C or G
cagcctcnnnnnnnnnnnnngtgacaacatcagtgacacgggnnnnnnnnnnnnnnnnnnnnnnnnnnngcgcctctcnnngctggatgtgtcgttctgtgacaaggtgggagaccagagtctggcttacatagcccaagggctggatggcctcaagtctctctctctctgctcctgccannnnnnnnnnnnnnnnnnnnnnnnnnnnnnnnnnnnnnnnnacgggctgcgcacgctcannnnnnnnnnnnnnnnnnnnnnnnnnnnnnnnnnnnnnnnnnnnnnnnnnnnnnnnnnnnnnnnnnnnnnnnnnnnnnnnnnnnnnnnnnnnnnnnnnnnnnnnnnnnnnnnnnnnnnnnnnnnnnnnnnnnnnnnnnnnnnnnnnnnggcacgaggggatttttctccattattcactgtgagaactcggggaagctccagaaggtgagggagagnnnnnnnnnnnnnnnnnnnngtggatctttaacttgcccgctctgagcctccggcactnnnnnnnnnnnnnnnnnnnnnnnnnnnnnnnnnnnnnnnnnnnnnnnnnnnnnnnnnnnnnnnnnnnnnnnnnnnnnnnnnnnnaagctgcattctcctgccggtttctccagttttggggactgtggtttactctgagaccttatggatccaaggagacttgctttttcagtttgttcagctttttacttgttaggatggaacagcaatttgcaagcttcttcgacaggaaactagaagttccacacttaaattttatacatacaaatatatacatgtgtacatatatatatgtgtaggggtattgtatatatacacacaaaatgatgacatgtataatgatgatatgtattactgagaacgtaaaatataattacatagtgatagctggacacacaaggaattcacaactccccaaagaaaatacatctggatgacctgcctagcaatttccccgtgagatagacgaatgtctccgtatttcattccctgttcctgccctgaaacaatttcaatcacttgacaaatcattatcattcattaataatgtttactgagtgcccatatgtgaaagaaatccactatacattccacagatgcatttcctctcccnnntggggtttccattttaa

SEQ ID NO: 15076 - DNA, 659 bp, Macaca Fascicularis
  misc_feature (1)...(659): n = A,T,C or G
gccctttcgccactggagccccnnnnnnnnnnnnnnngcaccttcaagtgcaccacagccgccgggctaggggnnnnnnnnnnnnnnnnnnnnnnnnnnnntcgccctatnnnnnnnnnnnnnnnnnnnnnnnnnntcccagtccttcgcaggaaggggaggagggctccgggctgtccagacccggagaggcagggctaggggggcaagaacggtagtgagccctcaggggcgattagcttagtgagcttaccccgccggagcgggggagcgctagaggtagttgggtagagaagccagcagggggcagcgtgggacccatatcccagccccaggcggaccagaggtggaaggggcggagggcgtaggagggtgggctggcggtacccacccagcccaagggagtcacagtgccttagaagtggcagaggtgagggtcaaagaacggggtccctgggctggcagagagggtttgtgtccctgttgaggagccactctgccagtctttgctggtccataggcgtgagagtttatttttgtacaaggggtgagggtggggagcactgtacccttctagccccatcaggggctctgtagacgtcgctatttttggtacgattcctgtcatccctgtgcagagtcgtgtccccaataaacag

SEQ ID NO: 15077 - DNA, 775 bp, Macaca Fascicularis
  misc_feature (1)...(775): n = A,T,C or G
gccgggcagcagccggcggccccggggtaagcggcgtgtgcgtgtgcaagagccgctacccggtgtgtggcagcgatggcaccacctacccaagcggctgccagctgcgcgccgccagccagagggccgagagccgcggggagaaggccatcacccaggtcagcaagggcacctgcgagcaaggtccttccatagtgacgccccccaaggacatctggaatgtcactggtgcccaggtgtacttgagctgtgaggtcatcggaatcccgacacctgtcctcatctggaacaaggtaaaannnnnnnnnnnnggagttcaaaggacagaactcctacctggtgaccggnnnnnnnnnnnnnnnnnnnnnnnnnnnnnnnnnnnnaagcatgaagtaactggctgggtgctggtatctcctctaagtaaggacgatgctggagaatatgannnnnnnnnnnnnnnnnnnnnnggannnnnnnnnnnnnnnnnnnnaattacagtggttgatgccttacatgaaataccagtgaaaaaaggtgaaggtgctgagctataaacctccagaatacattagtctgcatggttaaaagtagtcatggataactacattacctgttcttgcctaataagtttcttttaatccaatccactaacactttagttatattcactggttttatacagagaaatacaaaataaagatcacacatcgagactatctacaaaactttattatatatttacagaagaaaagcatgnaatatcataaacaaa

SEQ ID NO: 15078 - DNA, 719 bp, Macaca Fascicularis
  misc_feature (1)...(719): n = A,T,C or G
gctccctcagagccgagtcattgctgnnnnnaagnnnnnagctgccatctnnctgacccatgagaacgctcagaggcttcagttgcaggacaggannnnnnnnnnnnncctcgacatgacctcagaaaggagctggacacacttgccctggggccctgtggacnnnnnnnnnnnnnnncctccctacatcttccaccaggacatggaacagctggcccctgagatccgcagctatgaagaccctgcggccctggacggtggggagnnnnnnnnnnnnnnnnnnnnnnnnatcctggccctggcaccccggctcctgaaggactctggtagtatcttcttagaagtggacccnnnnnnnnnnnnnnnnnnnnnnnnnnnnnnnnnnnnnnnnnnnnnnnnnnnnnttaatcttgtggctgtgcgcaaggacttctgtgggaggtnnnnnnnnnnnnnnnnnnnnnnnnnnnnnnnntagtgnnnnnnnnnnnnnnnnnnnnnnnnnnnnnnnnnnnnnnnnnnnnnnnnnggtggatggcactttccagaacccaagtgcttatggcatttcccaannnnnnnnnnnnnnnnnntgctctgcatttctaggatatttctaggacacctgggtagacccaagttctcagtctggctccatcacatcagggtggccgagggcagttgctgtgtgttggtgaaatagatgtgggagtattggg

SEQ ID NO: 15079 - DNA, 772 bp, Macaca Fascicularis
  misc_feature (1)...(772): n = A,T,C or G
gcagccaagnnnnnaggcagcttagtgtnnanntacaatgttaactgtttgtttctctgtgcggttagtgggaannnnntggataagcctattgggattaatctaaatgatgtgatgatttgattcaggtatagcccaaattagtaaggggctttagatgtaaactggaaacagtattcacaccctctcctgggcctgtgaggtctaaggtgagaatttcaggatggaaagtgcaatttaaagcttccacaggaaagtatttgggtatgtgaggagttatttctgaccagagccccagttctgcaataaccaaaaccaaggagtataaataacaatcaggctctgggggaannnnnnnnnnnnnnnagacaatctgtccatttctgcagtaaaattggagtgagtgtgtatatctacttaaaacctaatagaagtgacttctactttttgggctatgccagaagtatttttaaattattatttaaaattttgaagccccatttcaaatcttgccgaccttagttcaaaaccccctgagacatcgcttttataattgaggatttgttaaaacggnnaagtcatttcatttgtgtaaaaagaagatacccaaaaggaaggagggagccctgttgccttgannnnnnnnnnnnnnnnnnnnnnnnnnnnnnatgtagaaataatgttcctatgatgacatnnnnnnnnnnnnnnnnnnnnnnnnnnnnnnnnnngtgtaaaatgttgctaaatgtgttgttacattatgtcactg

SEQ ID NO: 15080 - DNA, 740 bp, Macaca Fascicularis
  misc_feature (1)...(740): n = A,T,C or G
catcacaaaaattannnnnnnnnnnnnnnnnnnnnnnnnnnnnnagtatgcatccatnnntagctgcccacggacnngcatttcacaaaggatacaagcatagcacaattaacattgtggatatttatccaatgatgtgccacatcctgggattaaaaccacatcccaataatgggacttttggtcatactaagtgcttgttagttgaccagtggtgcatcaatctgccagaagccatcgcaatcgttgtcggttcactcttggtgttaaccacgctaacatgcctcataataatcatgcagaatagactttctgtacctcgtccattttctcgacttcagctacaagaannnnnnnnnnnnnnnttaattgggtgacaagtgttagggattatacaaagtgtcttnnnnnnnnnnnnnnnnnnnnnntgcacccaaagaatagtgttgtaactatgaaaaagaatactttgaaagacaaagaacttagactaagcatgttaaaatcattcttttgttttccttgtgttttgttttggtttatttgctaataagataaccctgaccatagtaacaatgttagtaaatcattaggtcacatcttttggtaggaaatcattaggtaacatcaaccctaactagaaatactaaaaatggcttgagaaaaatacttcctctgcttttattttgcaatgaagatgtgatacatctttaaatgaaaatatacnnnaaatttagtag

SEQ ID NO: 15081 - DNA, 512 bp, Macaca Fascicularis
  misc_feature (1)...(512): n = A,T,C or G
cactttnnnnnnnnnnnnncaggagagcctagatgagctcattcagtctcaacagatcaccccccaacttgcccttcaagttctacttcagtttgataaggctataaattcagcattggctcagagggtcaggaacagagtcaatttcaggggctctctaaatacgtacagattctgcgataatgtgtggacttttgtattgaatgatgttgaattcagagaggtgacagaacttattaaagtggataaagtgaaaattgtagcctgtgatnnnnnnnnnnnnnnnnncaatactacagaatgaatagaaaaaatatggcttttttatgccatcttctgttactcattgcttttgaagagaagcatagaagagactttttatttattctagaattgcagaaatgactacactgtgctataccagagaattccagtagaaacttataactctgtagcctcttacatcacctttattatacagcatgaaaaaaaagacttttttttaatgacaa

SEQ ID NO: 15082 - DNA, 1223 bp, Macaca Fascicularis
  misc_feature (1)...(1223): n = A,T,C or G
tttcttcgtggacnnnnnnctccaagnnnnaannnggctgactaagcaagagaaccaaagtccagaagaagtcactgcttctcaagaaaccccttcgggttgacctcatcctcgagaacacatccaaagtccctgcccccaaagacgtccttgcccaccaggttcccaacgccgagaagctcaggcggaaggagcaactatgggagaagctggccaagcagggcgagctgccccgggaggtgcgcagggcccaggcccggctcctcaaccctcccgcagccaggaccaagctcgggccccaggacactgtggagcggcctttctacgatctctgggcctcagacaaccccctggacaggccgttgattggccaggatgagtttttcctggagcagaccaagaagaaaggagtgaagcggccaccacgcctgcacaccaagccgtcccaggccccggccgtggaggtggcgcctgccggagcttcctacaacccgtcgtttgaagaccaccagaccctactctcagccgcccacgaggtggagttgcagcggcagaaggaggcggagaagctggagcggcagctggccctgcccgccacggagcaggccgccacccaggagtccacgttccaggagctgtgcgaggggctgctggaggagtcggatggcgagggggagccaggccagggggaggggccggaggctggggatgcccaggtctgtcccacgcccgcccgcctggccgccacagagaagaagacggagcagcagcggcggcgggaaaaggctgcgcgcaggctgcgggtacagcaggccgcgttgcgggccgcccggctccggcaccaggagctgttccggctgcgtgggatcaaggcccaggtggccctgaggctggctagagctggatcgcgcggcggaggcagcggcaggcgcggcgggaggctgaggctgacaagccccgaaggctggggcggctcaagtaccaggcacccgacattgacgtgcagctgagctcggagctgacagactcgctcaggaccctgaagcccgagggcaacatccttcgcgaccggttcaagagcttccagaggaggaacatgatcgagcctcgagagagagccaagttcaaacgcaagtacaaggtgaagctggtggagaagcgggcgttccgtgagatccagttgtagctgccatcggatgcggagccccgcccttcaataaaaa

SEQ ID NO: 15083 - DNA, 723 bp, Macaca Fascicularis
  misc_feature (1)...(723): n = A,T,C or G
gattttnnnnnnnnnnntgnnntgcctagtgagcccannnancgaggannaatttaatcatgnacgaggnnnnnnnnnnnnnnnnngannnaagcttgagtggctnnnnnnnnnnnnnnnnnnnnnnnnnnnnnnnnnnnnnnnnnnnnnnnnnnnnnngtgcattattataaagctcaaccgagttctaggcttcaaacctaagcctcccaagaatgagtccttggagacttacnnnnnnnnnnnnnnnnnnnnnnnnnnnnnnnnnnnnnnnnnnnnnnnnnnnagagatgaagataaagaaaaaattggaaatgtggnnnnnnnnnnnnngggcaacagccctggttttcctctgcagtattatccctactatggcaaactcctgcagcccaaatacctgcagcccctgctgnnnnnnnnnnnnnnnaatcttannnnnnnnnnnnnnnnnngcatagagtgtaaggcgtacggtgagaacattgggtacagtgnnnnnnnnnnnnnnnnnngacgttttgatgtaaaaattgaagttaagagctgatcacaagcacaaatctttcccactagccatttaataagttaaaaaaagatacaaaaacaaannnnnnnnnntnnnnnnnnnnnnntcatacgtatgggacctacacttaatctatatgctttacactagctttctgcatttaataggttagaatgtaaattaaagtgtagcaa

SEQ ID NO: 15084 - DNA, 724 bp, Macaca Fascicularis
  misc_feature (1)...(724): n = A,T,C or G
ccgttccgggannngcccagcgtcctccnnnnnnnnnnnnnnnnnnnnnnnnnnnnnnnnnnnnngtgacgacgagctggctgattggccctgggccggcccattctccacacgcctgccggaagctggaggggtgnnnnnnnnnnnnnnnnnnnnnnnnnnnnnnnnnnnnnnnnnnnnctgctcctgcgtccccagaacccaagggaacgtcatggaggcnnnnnnngccccccggctccctcgggatggttctgcctgcacttttgcaatcccggtttccttcacagtccacattccaggtgaccacacgtgtctcctcctcatcttagcttccaggtgcaccctaaccctgtactaacctgcttggtggactcggaaaagacttggctctgtcgggaaaggagagacggggcctccatcacgcctgttaccagaggatcccnnnnnnnnnnnnnnnnnnnnnnnnnnnnnnnnccnnnnnnnnnnnnnnncagccctgggcacnnnnnnnnnnnnnnntttatttatnnnnnnnnnnatctctggtttattttgggatttttttgttgttggtgttgtcaagatttgtttttttctaaagttgtatgattatatatttgacattttaaatttcaaagaaaagtatattgtcttaacaggggaccaagagaaggtagtattgataactgttcccacctctannaaacnnnagcaaaaaaca

SEQ ID NO: 15085 - DNA, 725 bp, Macaca Fascicularis
  misc_feature (1)...(725): n = A,T,C or G
cnatatncaagataacactgggaagagttactttactgataaaagatgtaaacaagaaagnnnnnnnnnnnnnnnnnnnnnnnnnnnnnnnnnnnnnnnnnnnnnnnnnnnnnnnnnnnnnnnnnnnnnnnnnnnnnngtccaaaccaaactcttccagctcctaagcagttacgggttcgaccaacattcagcaaatatttagcactaaacgggagaggtttgnnnnnnnnnnnnnnnnntaacccagaannnnnnnnnnnnnnnttggcagctcaatctggactctatgaaagtgaagaactttaataactttaccaacactggaaaacagccaactacaccattagtaatataattgattacattttttgaaattaatccatagctgtattaacagattatggttttaattaggtaatatagttaatatatatttataatattatttatcctttgactctnnnnnnnnnnnnnnnctcctccaatttgtgaagcctacaggaaatctgggtatatggatttgtaactgtagaagaccatcttaaaatacaggattttaacatttaagtcatacacatttaacaattacaggttataaattagtatcaactttttaaacacatctaatgcttgtaataacatttattggtactgctttctaaatactgttttacccgttttctcttgtaggaatactaacatggtatagattatctgagtgtt

SEQ ID NO: 15086 - DNA, 778 bp, Macaca Fascicularis
  misc_feature (1)...(778): n = A,T,C or G
gtgcgacagctgnnnnnnnnangcnnatcatagtcagatgagtnnnnnggaggagaaaaggtggtgctcaaacctaatgatgtttcagtannnacgacgctcaccattaatggacgcctgtttgcttgcccgcgagagcaattcgattcactgactcccttaccagaacaggaaggtccaactgttggaacagtgggaacttttgaactgatgagctccaaagatttagcataccagatgacaatttatgattgggaactnnnnnnnnnnnnnnatgagctggagctaatctatcacacatttggaaggcataattttaaaaagaccacagcaaacttggatttgttcctgaggagatttaatgaaattcagttttgggtcgnnnnnnnnnnnnnnnnnnnttctcagctaagcaagcgtgttcagctattaaaaannnnnnnnnnnnnnnnnnnnnnnnnnnnnnnnnnnnnaaatctgaattccttttttgccatcgtcatgggactaagtaacgttgctgtgagccgcttggcactaacgtgggagaaactgccaagcaagttcaagaagttctatgcggagtttgaaagtttaatggacccttcaaggaaccacagggcctacaggctgacggtagctaagctggaacctcctctcatccccttcatgcctttgctcattaaagatatgacatttactcatgaggggaacaagacgttcattgacaatctagtaaactttgaaaaaatggtatgtgcggtattataaccttaac

SEQ ID NO: 15087 - DNA, 767 bp, Macaca Fascicularis
  misc_feature (1)...(767): n = A,T,C or G
gggaagcacggggatgactgnnggcgcaccaagactgnnnnnnnngagatgaaccggaacatcagccggcttcaggctgagattgagggcctcaaaggccagagggcttccctggaggccgccattgcagatgccgagcagcgtggagagctggccattaaggatgccaatgccaagttgtccgagctggaggccgccctgcagcgagccaagcaagannnnnnnnnnnnnnnnnnnnnnnnnnnnnnnnnnnnnnnnnnnnnnnnnnnnnnnnnnnnnnnnnnnnnnnnnnnnnnnnnnnnnnnnnngggcgaggagagccggctggagtccgggatgcagaacatgagtattcatacgaagaccactannnnnnnnnnnggtggtctgagctcggcctatgggggcctcacaagcnnnnnnnnnnnnnnnnnnnnnnnntccagctttggctctggcgcgggctccagctccttcagccgcaccagctcctccagggccgtggttgtgaagaagatcgagacacgcgatgggaagctggtgtccgagtcctctgacgtcctgcccaagtgaacagctgcggcaccccctcccagcctacccctcttgtgctgccccagagcctgggagggagaccgctatgtagggtnnnnnnnnnnnnnnnngacccacctgagggccctcagcccacccacaggggagtttactacgtggggaccccccttgcccatgcctccagctataaaacaattcaattgcttcttttt

SEQ ID NO: 15088 - DNA, 784 bp, Macaca Fascicularis
  misc_feature (1)...(784): n = A,T,C or G
catgactgatgctgccatttnnnctgttatgtcaagagtcaacaaggtaatcattggcacgaagaccatcctggccaatggtgccctgagagctgtgacaggnnnnnnnnnnnnnnnnnnnnnnnnnnnnnnnnnnnccaccccactcatcgtctgtgcacctatgttcaaactttccccacagttccccaatgaagaagactcatttcataagtttgtggctcctgaagaagtcctgccattcacagaaggggacattctggagaaggtcagcgtgcattgccctgtgtttgactacgtcccaccagagctcattaccctctttatctccaacattggtgggaatgcaccttcctacatctannnnnnnnnnnnnnnnnnnnnnnnnnctgatgatcatgttttatgacgaccatacttgtcctaagcagagattgttaggcagatacagaatgaagaggagnnnnnnnnnnnnnnnnnnnnncacatccttgcaatnnnnnnnnnnnnnnnnnnnnnnnnnnnnnnnnnnnnnnnnnnnnnnnnctgcctttttagtcaccctgtatcaannnnnnnnnnnnnnnnnnnnnnnnnacctttcagatcttaacacagcagcggggcttaacctgttgatttaggagccttttagtgacctggttgcgtctgtgtcaggaacttaaactttctggttcagtagtgtgttaaacataacactgaataccttgnnnnnnnnnnnatttttgctctgaaatggctacaacacttcttctaggctctg

SEQ ID NO: 15089 - DNA, 797 bp, Macaca Fascicularis
  misc_feature (1)...(797): n = A,T,C or G
gcgtagtgagggcactgcccagctcagttagtgacggagaaaaggaagaggctgggatggnnnctgctgctgctcttgcctctagttcatggagatgtgtctctgttcaggccaaggcacagccagccaggcccctcgtctgggacccannnnnnnnnnnnnnaccaagggctttcacatcctacgtcatttggaaggaggccttgagaacaaagtcacctttgtcacagtgaactgaatgaggaacatgctgtctcctctcttggcctcccctttcatgagatattagggagaagagaacattcctcctggcttagttgtagcagacccagacctgtgcccagctttgggcccccttcccaacttctgaagcacgtgctgcagagccaccttggtctgagcacctgaggaccagcccctcctccctcagtgcaggtcatctcttgggggattttcttaaagtgaagaaagggagtggggaaccatattgccccttcctcccccatcaaacttccttcatttaacttgctataaaatgagtcatataaagaaactctatatgggtgaggtatatccnnnnnnnnnnnnnnnattacaaatcaaaccgccttctctcagtttatttaagatgcttttgttgcgagcggagctctagagtgaagcctcctgtgtgtgtgtgagataataactccttgtannnnnnnnnnnnnnngcactatttacataaaccagagctgagccaggcaggaatttnnngattaatttatttttaatggagtgaagtataccatgcacca

SEQ ID NO: 15090 - DNA, 763 bp, Macaca Fascicularis
  misc_feature (1)...(763): n = A,T,C or G
catgtaacacatacacaattcatgcnntnnatagtttattattattaaagtctaaacaaaattgcaatnnttaggtaacaaaccttttgtttacannnnnnnnngattaccctcaannnnnnnnnnntgtctaggtccgtccggtgtgtcagattttccccaggttagannnnnnnnnnnnnnnnnnnnnnnnnnnnnnnnnttgtacttgtttcatctggttttattactctcacccataaacattaatgactctctgaccctctggaaatatttaacgcttccaatcttgctttgtgtatctcatttaatgtgttataaggtagnnnnnnnnnnnnnnnnnnnnnnnnnnttcttccttgttgtttgctttggtctgtgttcaatccggagagcttttcagagttccctaacaagtcctaaatannnnnnnnnnnnnnnttttgggaagaaaaacctgtatttttgttagttcacaatattatgaaatgtcacttcaggagaacctgctgggcttcctgtggctttgttttcttagtttctttttccgtgtattttttaattaatttttcttcttttacttgaaaagaaagtgttttattttcaaatctggtccatatttacattctagttcagagccaagccttaaactgtacagaatttccactgtaattaaaactatttagtgttagttataaatagccttcacaaagagagattctccattaaacggtcacctgcatcacagcccatgggaatgtat

SEQ ID NO: 15091 - DNA, 719 bp, Macaca Fascicularis
  misc_feature (1)...(719): n = A,T,C or G
cgcnnnngtaggtacctggggatattgcagcaggaagcaaacatcttggaaaaagcaggaagaaaaagagtcagagttaggaggcgttggataattcacagaatagcctagagactttagggcctacatgtatatgatttacacattgtaaaaaaggactgcaggaatggggaagaaggggcttgacaaacttttttcccatatgtttttcttctaaacagtctctatgttccttatcttagaacaagaaaccaaaggaagaaaagttctctatggtgatccttgctcgggggtctccagaggaggctaatcgctggccccgtatcactcagcctgtccttagacgacctcgccatgtgcattgtcacttgtgctgtccagatgggcatatgcagcatgctgtgatcacagcccgccggcatggcaggtatagggggtgtgaccaaaattagtgggatgtggtgagaacctgcagcccacattaacgtctcatttccatagggatttgtatcgttgtgcccgtgtcagctcctggggagatcttttacctgtgcttactccgtctgcgtttcctccatccactgctcaagatccctctgagagttgacaaggatgtctaacaagtattttcttctatcatgcctgccagggctgacactacctggtatccaggaagggactgctggtatccccatatgtctgtgtttgtttgagatttt

SEQ ID NO: 15092 - DNA, 746 bp, Macaca Fascicularis
  misc_feature (1)...(746): n = A,T,C or G
ggaaataacaaattttcaagtaaagccatggctgaaaccttttaccnnnnnnnnnnnnnnnctcaggattttgataataattctggatattggaacagaatagaaatgtactgtcgagaactgacagaaagatttgaagatgtttgggtggtatctgggcctttgacnnnnnnnnnnnnnnnnnnnnnnnnnnnnnnnnnngttagttaccaggtaaggatgtttaacagtcaggtttatgttatctgtatgatattataatctcactttgcattctgctttttatttttatcatttaaaaaattttgcattctactttttaatttcacttattcaacaatatttattgaacacctattaggagtgataggcatagagcatatagtgatgaataaaagcaacnnnnnnnnnnnnnnnnnnnnnnnnnnngagtggaagacagatgttaacaattacattaaannnnnnnnnnnnnnnatagagataaacacggtgtggnnnnnnnnnnnnnnnnntgggctctactcatatgggtccggaatgcttaaaagaggaagtgatattgagctnnnnnnnnnnnnnnnnnnnncaggagtggaccctgaggattccagaggnnnnnnnnnnnnnnnnnnnnnacatttgtggtcaacatcagggttttgggatttatatatcattcatannnnnnnnnnnnnnnnnnnnnnnnnnnnnnnnnnnngctcaagggggatgaagagttctgt

SEQ ID NO: 15093 - DNA, 791 bp, Macaca Fascicularis
  misc_feature (1)...(791): n = A,T,C or G
gagttacagaaantgnccaagtgagagctgactgccataataggcataaaattcaaaaagatctggactttatatgatgacttacaaggagcttagaannnnnnnnnnnnnnntatatctacctataggattttatctaatcttgacttagccatggtagnnnnnnnnnnnnnnnnnnnnnnnnnnnnnnnnnnnnnnnnnnnnnnnnnnnnnnnnnnnnnnnnnnnnnnnnnnnnnnnggagggttgattactttgctaaagagtatgaaaaatattctgannnnnnnnnnnnnnnnnnnnnnnnnnnnnnnnnnnnnnnnnnnnntggtaaaggaaatggagtgcatctgcatgcatagcacaagtagtccatcttctggcggttaactagagaaagcttacagtcagaggctcttgtgaatgcactgaagactgctgtgtnnnnnnnnnnnnncttgatgatctaccttttctgaattacttgaaaaggccagtgtgcttggttcgagttttttagtgggaatatttacaatttcctgcttttatctagaaaagagcaannnnnnnnnnngaaagcagtatannnnnnnnnnnnnnnnnggaatcgacatttgcatttggtgatttttatttgattcagctaaattttatgtgttgaatacttactctagaataactacttttggaactggaagggggaaatctgtaaatggaaatttatttttatgatctgaaatttgagggttttaagaattgacttttgtgtaaagaatgctattgtatataaag

SEQ ID NO: 15094 - DNA, 729 bp, Macaca Fascicularis
gactccattgggcgcttctttggcggtgacaggggtgtgcccaagcggggctctggcaaggactcacaccacgcggcaagaactgctcactatggctccctgccccagaagtcacacggccggactcaagatgaaaaccctgtagtccacttcttcaagaacattgtgacgcctcgcactccacccccatcgcagggaaaggggagaggactgtccctgagcagatttagctggggggccgaagggcagaaaccaggatttggctacggaggcagagcgtccgactataaatcggctcacaagggattcaagggagtcgatgcccagggcacgctttccagaatttttaagctgggaggaagagatagtcgctccggatcacccatggctagacgctgaaaacccacctggttccggaatcctgtcctcagcttcttaatataactgccttaaaactttaatcccatttgcccccattacctagttagagcagatgacctctcccctaatgcctgtggagttgtgcacgtcctagggtcaggcacacggcagcctaccggcaatttctggccaacagttaaatgaagcaaatgaaaacagaaaacagttcaaactgtcactttctgtgtgaaggtcacattccttaccccacagtgtgcccccagacgctcgtgggtcttcagggggccaggtgcacagacgtccctccacgttcacccctccaccctg

SEQ ID NO: 15095 - DNA, 960 bp, Macaca Fascicularis
  misc_feature (1)...(960): n = A,T,C or G
annnnnnnnnnnnnnnnnnnnnnnnnnnnnnnnnnnnnnnnnnnnnnnnnnnnnnnnnnnnnnnnnnnnnnnnnnnnnnnnccggcaatgacgccttcagaagcatccggcccctnnnnnnnnnnnnnnnnnnnnnnnnnnnnnnnnnnnnnnnnnnnnnnnnnnnnnnnnnnnnnnnnnnnnnnnnnnnnnnnnnnnnnnnnnnaatcaggagcaacttgccctgtacccctgtgctggtggtggccacccagactgaccagcgggagatggggccccacagggnnnnnnnnnnnnnnnnnnnngaannnaagaaactggcccaggatgtcagagccaagggttacctggagtgctcagcccttagcaaccggggggtacagcaggtgtttgagtgcgcggtccgaactgccgtcaaccaggccaggagacgaaacagaaggagactcttctccatcaatgagtgcaagatcttctaaaccccaagaggcttcacacaacacttatgtatgtgccccaaagactaatggggagagggagggccgggaagccaggaaagcttggtgttttctctgggtactccccaagcagtgtctcctttcggatacagttattgatgaggcttggccactggatgttttcactaactacactctacaagtgaactccttgcccgggccggtcagaaaatgccttggggaactgtaatgactattccatttttgattaaaatagtgaaatagtctccacaattttggacgatgaagtgagtttttcaaagaattccgtatttaaagacacattttatttaactaataacaaaatggattgcttttgtatatatttagttttcacccttggaaaatcttttcctacatcctcgaaaacataaactcctgtgtgagtgaaatacctgtacggagctctgccatatgtttgtagtgttactattttcacctc

SEQ ID NO: 15096 - DNA, 706 bp, Macaca Fascicularis
  misc_feature (1)...(706): n = A,T,C or G
cagccccacttcgcaggctgctgctaccccgcngtcccggccactcccgccaccccgnnnncccaggcncttcaggatccaagcttgaactagccgagttcgaaaacctctcggnnnnnnngaagatcagtgaagaagccctgagagcagatggctttggagagaatcctttctatcactgtttggtagcagagattnnnnnnnnnnnnnnnnnnnnnnnnnnnnnctgcgtggtgggctatggaatatactacttcatctacagtacatggaagggacgcaccatttatctggaggatatctatgtgatgccggaatatcggggtcaagggattggttccaaaataatcaannnnnnnnnnnnnnnnnnnnnnnnnnnnnnnnnnnnnnnnnnnnnnnnnnnnnnnnnnnnnnnnnnnnnnnnnnnnnnnnnnntgtacaaggccctaggagcccaagatctgacggnnnnnnnnnnnnnnnnnnnnntccgctttgaaggagaggtgatgagaaagttggcaggaaagtgacaccatccccagggggatctctctcttgagtttctccttccccaccagctcaagcactcttcagaaactatttccacaaacannnnnnnnnnggcctctctggaggaaggagggttgggggtgcctatcctcaagtcctggaagagtagaattgagggagagacctttcttcc

SEQ ID NO: 15097 - DNA, 754 bp, Macaca Fascicularis
  misc_feature (1)...(754): n = A,T,C or G
tacagtaagnnnnnnnggttttctgtatttttcttttnnnnnnnnnnnnnnnncagtgcttttcatttaaggctactgcatgcatcacttctgcatttattgtaattttttaaaaacatcaccttttatagttgggtgaccagattttgtccnnnnnnnnnnnnatttatttgctttttaaacattagcctatggtagtaatttatgtagaataaaagcattaaaaagaagcaaatcatttgcactctaatttgtggtacaatattgcttattgtgactttggcatgcatttttgcaaacaaaatgctgtaagatttatactactgataattttgctttatttgtatacatatagagtatgcacatttgggactgcatttctagaaacatactgcaataggctatctgagcaaaacacctgtaaccaaaaaagtgaagataagaaaatactcttaaagccgagtatttcctaattgtatagaatcttacagcatctttgacaaacatctcccagcaaaagtgccggttagtcaggtttgttgaaaatatagtagaaaaactgattctggttatctctttaaggacaattaattgtacagacacataatgtaacattgtctcaacattcattcacagattgactgtaaattaccttaatctttgtgcagactgaaggaacactgtagtataccccaaagtgcatttgcctaggacttttcagcttctcccataggtagnnaacaggcattaaaat

SEQ ID NO: 15098 - DNA, 805 bp, Macaca Fascicularis
  misc_feature (1)...(805): n = A,T,C or G
agtttgggnnnnacatgcaggtgcacattcagaatgatgggcctgtgaccatagagctggaatcgccagctcccggcactgctannnctgacccaaagcagctgtcaaagctgnaaaacagcagcagagaaaagaaaagaccagagctaagggaccttccgaatcaagcaaggaaagaaacactccnnnnnnnnnnnnnnnnnnnnnnngcagcggggcggagggtgacnnnnnnnnnnnnnnnnnnnnnnnnnnnnnnnnnnnnnnnnnnnnnnnnnnnnnnnnnnnnnnnnnnnnnnnnnnaaaattcaagatgctaagcacctacactactttaagaatttggaactgaaacatgaagaggaagacagaaataagaagttgggaacctgaatggctctgcaaaaaacaccaaaggaccgttttgtcattttctgttgttgctgtgtggaatgaggcagtgggcactgccggtggctcggggggtgnnnnnnnnnnnnnnnnnnnnnnnnnnnnngtgcccccacagaaaggctttgttggtttctaccacatcttggcttgcttttggaacaggctggcctagcgtcatttgtcatcaagtccactgtggtatattctgcgtgtccatggcaggggttctccaacacactcacactgtccatgttctttttnnnnnnnnnnnnnnnnnnaggnnnnnnnnnnnnntgtcaagagagcaatcatcagtgataatgtattnnnnnnnnnnnnnnnnnnttgtaaattttctcttttttctaaagataaataataataaaatcct

SEQ ID NO: 15099 - DNA, 708 bp, Macaca Fascicularis
  misc_feature (1)...(708): n = A,T,C or G
tcatcagtcgtgtcnnnaagaaaaacaatcgtgactctgcagtggtttcagagtatgagctggtacagctgctgccaggggagcgagagctgactatcccagcctcggctaacgtattctacgccatggatggagcttcacacgatttcctcctgcggcagcggcgaaggtcctctgctgctacacctggcgtcaccagtggcccgtctgcctcaggaactcctccgagtgagggaggagggggctcctttcccaggatcaaggccacagggaggaagattgcacgggcactgttctgaggaggaagccccgttggcttacagaagtcatggtgttcataccagatgtgggtagccatcctgaatggnnnnnnnnnnnnnnnattgagacagaaattcagaaaggtagccagccatcctggggcagtgaagtaccactggtttaccagacagctgannnnnnnnnnnctgtgggaactggtgtcttataaccaagttggatacctgtgtgtagcttcnnnnnnnnnnnnnnntcctacctgtgcagcacacaggtagtgctggaaaaaacgcatcagtttctgattcttggccatatcctaatatgcaaagggctaagcaaaggcctcaaggctctgagccccagggcagagggaatggcaaaaaataggtcctcgnnnggagttcttcttcccannnntgggggttt

SEQ ID NO: 15100 - DNA, 778 bp, Macaca Fascicularis
  misc_feature (1)...(778): n = A,T,C or G
cgaccacgggccactgtgaacagacttcagtnnnctgntnngtttcataagctgtgagacnnnntggacttggcttaggccctgctgggacatcccaagtgtgatccctctcactccatcaggacaccaggactgtccttaggaaaattccttgagatggcagcaggagtcgtattttctgtgtgtgtgtttcggaaagctgctgtgtcctgcctcagcacaaagacccagtgtcatttgctcctcctgttcctgtgccactccagaacctcagcagatctgagccaccgcctgccagtgtgagaggcggccacttttatggcagctnnnnnnnngcagggcccnnnnnnnnnnnnnnncaggccctagagcctggcccgggccggtgatggagggcagccaccagcccagggcctgcccatccaaaagggactccccaggggctgggggaggagacccttggaaaagtcctctcttcccagctcctggttctggatctgagattctcagatcacaggcgcctgtgctccaggctgaggctaggctaccctcagggagatccagagactcatgcccatggccatccatgcatggacgctgtgtggagagtccaggatgactggggatcccgcacaagcccccttcagtccttcagcgctgggccatgtggttgatttttctaaagctggagaaaggaagaattgtgccttgcatattacttgagctcaaactgacaacctggatgtaaacaggagcctttctacttggtttatttaat

SEQ ID NO: 15101 - DNA, 615 bp, Macaca Fascicularis
ggggactggggaaggggagggtgttcagaggcagcaccatcacacagtcaccatcacacagtcacccctccctccctcttcctcaccctccacctctcacgggccctgccccaacccctaagccccatcccctaacccccggccctcactgtgctgttttcttaggcactgagagatctgagtaggtctgggatggacaggaaagggcaaagtagggcgtgtggtttccctgcccctgtccagacccccaatcccagacgcgtgtgtctctgtctctcctagcccctctctcacacaccgcattcccgtggtgtcctcaagaaaggccagaagcgccaggctggagataacagcctcttgcccatcagccctgcgtcggccctggggtaccatgtggccacaacttctgttgccccctgtcaccaacacacttccccttgtctccctggatacctctcttgcccgttgtcctgaagcccagtgagacagcagggggcggggtgggtctatggggagataagggagtgaggtcagaggagggcatgggttggcagggtgagtgtttggggccctctgtgctggcttttcaccccagaggacacaggcagctccaaa

SEQ ID NO: 15102 - DNA, 840 bp, Macaca Fascicularis
  misc_feature (1)...(840): n = A,T,C or G
atggtgacccccagtcaaccacaatcaagaactgaggcctgaggcttgctgtacagtgcccatgcctgcctggctgctttcacccgggagtactttcgacatgggcacctgggcctcctatggctgcttctgagtgatcctttcatgtgttgtgtccatagctttagtcctcctaaataagatccacccacacgtaagtcacagaatttctgagttcctcaactactctcgcaccgttaaaagtatgttgtaatcaagatgccttaaatgattctttgtataccctttctgtcatattcagaaactgttttgnnnnnnnnnnnnnnnattcctttagcaactaagtatttggtagctgaataaggggtcagaacttctgaaaccagtgatctgtaaccatctctactggcctcgggtgcctgtgctataaatgagtttcttcacatgaaaaacacagccagcccaagatgacttatctgggtttaggatacagtagtattcactaactgcttattacgtgagcaatattacatgaacaatttcatccaatctccaaactcttaaaggatgcttttggaaaacacgcagtatacctagatgatgactaaatgcaaaatccttgggctttggtttaatttttttctaataaggattttaaattactgccaacttcaaaagtgttcttaaagagaaaaataatgttaagaaaaatttgaaagctttggaaaaccaaatttgtaatatcattgtatttttggttaaaaattttgaaataaatttctaaatatcttctggtgtgggactttgacaaacaaaaaaaaaaaaaaaaaaaaaaaaagg

SEQ ID NO: 15103 - DNA, 423 bp, Macaca Fascicularis
  misc_feature (1)...(423): n = A,T,C or G
caatggggatggacgattggtctttgaagagtttttccggannnnnnnnnnnnnnnnnnnngggggcccctccaggactgccaagctcccaatggcggggcgaagaggagccagnnnnnnnnnnnnnnnnnnnnnnnnnnnngagcccaggatgtattggcggatggggcctgcctgcaccccggggaggcgcccaccccggacccccacccctccgcactgtgaaagactcactcctgcaactggaaagcgggggcgcccgccgacgaggaggccaccgtgccaagccggcagaggtcatgccaggcgccaagggccttgtgcccannnnnttatgnnnnngtgggccagggagcccgccagcagatcccacacagcatgtccgccccagggcaaagcctcccaccttcgctctgcgcccct

SEQ ID NO: 15104 - DNA, 758 bp, Macaca Fascicularis
  misc_feature (1)...(758): n = A,T,C or G
gccacgtggggtacnnnnnnccactgtgcactgactgcatggacggctacttcagctcgctccggaacgagacccacagcgtctgcacagtctgcgacgagtcctgcaagacgtgctcgggcccgaccaacagagactgcggcgagtgcgaagtgggctgggtgctggacgagggcgcctgcgtggacgtggacgagtgtgcggccgagacgcccccctgcagcgctgcacagttctgtaagaatgccaacggctcctacacgtgcgaagagtgtgactccagctgtgtgggctgcacaggggaaggcccaggaaactgtaaagagtgtatccccggctacgcgagggagcatggacagtgtgcagatgtagatgagtgctcactagcagaaaaagcctgtgtgaggaaaaacgaaaactgctacaatactccagggagctacgtctgcgtgtgtcctgacggcttcgaagaaactgaagatgcctgtgtgccgccggcagaggctgaagccacagaagaagaaagcccgacacagctgcccgcccacgaagacctgtaacgtgctagacttgccctttaaattattcagaaggacgtcctgtggaaaatgtggccccgaggatgtgtcccctgcagtggacagcgggagggagaagctgcccggtctctaatgtttgattctcatttggcccttaaacagctgcatttcttggtggttcttaaacagacttgtatattttgatacagttctttgtaa

SEQ ID NO: 15105 - DNA, 760 bp, Macaca Fascicularis
  misc_feature (1)...(760): n = A,T,C or G
gagtgttggagctgnnnnnnagattcagatatgtttaatgctgtacagtttctgaagatggttattaacactgtgctgtcaagcatccatttgaaaatatttgtnatcttctttgcctgcctgtattttacaaagaaataatacaaagttgtaaaagnnatggannntctttggatgccaaatgcagtgatgttatcagtcagatttgttccttggctcagttggtgtttgtatttcctaattccccaaactttggctgggcgtgnnnnnnnnnnnnnnnnnnnnnnnnnnnnnnnnnnnnnnnnnnnnnnnnnnnnnnnnnnnnnnnnnnnnnnnnnnnnnnnnnnnnnnnnnnnnnnnnnnnnnnnnnnnnnnnnnnnnnnnnnnnnnnnnnnnnnnnnnnnnnnnnnnnnnnnncagctacttgggaggctgaggtcggggaattgcttgaacccggaaggcagaagttgcagtgagctgagatcacaccactgcactgtagcctgggtgacagagagactctctccaaaaaaaaaaaaaatccccaaatcttaatgtctatttcagaattttagtgattttaaggtgatagtagaaaataccaagcatatgaggtatttcaatatgataggcttcttacattttaatacattagttactcatctttgttccaggacccttggctgattgctagggaaaggataaagcatagaataccagccagtttggctctaaatttgagttatttataataaaa

SEQ ID NO: 15106 - DNA, 482 bp, Macaca Fascicularis
  misc_feature (1)...(482): n = A,T,C or G
cccccacccccaccaccacccgtacccccagtggctgggtactgccttactggcacttacaagagtggagggcagacacagatgtcgtcagcatccttgttcctgctccagatgcatccctgtccatggctgagtgagctcctgtccttttcctggaggccctgtgtcgggctgttaaagagaacgagttaccaagaaggactgacgtgccactgtgaatcagggaccaagaggagagaactctggagtgggctagtgactcccctgcagcctggtggaaatggtgggaggagctaagagccctgtgctctaggatttgggttgaaaaacagagagagaagtgggagttggcacaggagctaacaggctgggaggcannnnnnnnnnnnnnnnnnnntgtgtagcagaggccgcaccctccctcattccaggccctttcattttcatgctccattgccagactcttgctgggagccttccag

SEQ ID NO: 15107 - DNA, 682 bp, Macaca Fascicularis
  misc_feature (1)...(682): n = A,T,C or G
aggtgagcagctgagagtgcngtcaaagggcatttgtggatagatttggttttccacagacatcnnnaaatttgggggagtttnnnnnnnnnnnagctgggtatgttcatattccttggtatatcgattaccacattgatctgtannnnnnnnnnnnnnnnnnnnnnnnnnnnnnnnnnnnnnnnnnnncttttttagccatnnnnnnnnnnnnnnnnnnnnnnnnnatgacgagtcagaaaggtcacctcctgctcttggtccttgtcagtaccatgttctgtggtgctgtgcgtgagttnnnnnnnnnnnnnnntcctgttcattgattgatttagaggcatttgtctgagaagggaccagacccaggagtgcttgagtaaactgcttgctctctttggtgttgtgtgatgggggnnnnnnnnnnnnnnnnnnnnnnntaacaactgtggtgtcctctaggtgtgctgggcatcaaggtgaagatcatgctgcnnnnnnnnnnnnnnnntaagattggccctaagaagcccctgcctgaccatgtgagcatcgtggaacccaaagatgaaatactgcctaccactcccatctcagaacagaagggtgnnnnnnnnnnnnnnnnnnnnatgccccagccagtcccnnnnnnnnnnnnnnnnctccttggcagctgtattct

SEQ ID NO: 15108 - DNA, 721 bp, Macaca Fascicularis
  misc_feature (1)...(721): n = A,T,C or G
agacactgacagagacantcntgggagctgccagaaactgtgaaggaaggaccataagggtctcagaggggaggagggtgttccttgggtggctagtgccactgcctttggagagagggagaaaagccaccagccagacaggaggacaccgggaagacccttcactgtcgtggggagagactgcccaggtgggactgtggaagagcgcagaggtaggggagaggagagagatggcgctggtcagaactacctacccccatnnnnnnnnnnggcacctcagcccctgaccacctggcctcttctgcctactnnnnnnnnnnnnnnnnnnnnnnnnnnnnnnnnnnnnnnnnnnnnnnnnnnnnnnnnnnnnnnnnnnnnnnnnnnnnngtcaggagacacccgtgccgctcccccaaccccgtctctgccactcaaggaccccctcccccccagcaacacacaccttttctgcatagagttcctgttgtcctcctctaactgggttagttgtcaaggggcctagaatcacctttccccatgtgtggccctgggacaatggggtcaaagagattttttaaaaaagtgtcctagttcattaccctcagcagagtatgtgcttggcctctcctcccagagagctgaaggctccgagnnnnnnnnnnnnnnnnnnnnnnnttgagccttctctgatcagcgttccnnnngttgtatttgtttgtaa

SEQ ID NO: 15109 - DNA, 270 bp, Macaca Fascicularis
ggagcgctgggttgactaacctatggtatttgagcacagacagagggtgctgtgggtctgctggttggcagaaatggttccttccagcgtggcgttctgttgtggtcgctcctcctgttgcctctgagtattcagcttttttttcggtgtgtaggccccagctgcccactggaactgctggataatgcttgatctcccgatatctttaaatccttaaggctgcacctgggtagggatggtggcaccgatgcccctatgtctgttgaagga

SEQ ID NO: 15110 - DNA, 720 bp, Macaca Fascicularis
gaaaaaagccaagagggaaagtcagagttccctgtttagggcactcgccgaatacccacagcagctgtcccctccttgttgtctccaagtaagtttgccagaaaaggttttagcaaagtgatacaactgtgtctttatgggaggataggcctctgccctgccctgccccactccccccgccacctgtccccacccagtgtcctgggcccctggcctgccaggccacaggagcttattggccaggagggaataatgtcccccaatcctgcctgttgagggaccagagttggggtctttggtgcttccaacctcctgccaacctggagttcacaacaccagagccccacggcctcgcacactgaagcaggggcgtggggtgacttggtgtttctgttttggaagaaccacctgtcatcacaacacggacagcagggtgttctcagctcccagcgaagcctccacaacggaatggggccgcagggcagccgggactccctgtctcacctgcattaacccatgcatactgtatgccataaactcactttggtatgtccgcgtcacatgcagagaggaactctgcgacgtcaaagtgttgcttcttaaagtttcattattggcaactagagggttgtttttaatgcatggaaactaaacagattcctcggggacttcctgaaggaaccaggcgggcgaacctttgcttatatatgtgcggcctca

SEQ ID NO: 15111 - DNA, 803 bp, Macaca Fascicularis
  misc_feature (1)...(803): n = A,T,C or G
caaactccgcattcannnnnanctaaggcttaacccctcttccttcctggtgcacctacgtctcctcgaaggaagtaatagtttggatgaaacggttttttgtacaatgtaaagatcatctgagcaagatgagcattttgtaaaaatgaaaatgtgtctcccataaaatcaggaacttggcacagtgtcgcattaataactttagggtgcagatgtgctgtgtgaatctcacaatgcctcatagatgtcacgtcttggaagggagcaggaggaaggactgatannnnnnnnnnnnnnnnnnnnnnnnnnnnnnnnnnnnnnnnnnnnnncacagctgtgtgcctgcagttgtcaggggccatttgggatcccaaatctcattctctaaaactnnnnnnnnnnnnnnngttacttccttagtgtaatcaatgtatactcccttactggcctgaaacgttgtatagctacttattcagatactgaagaccgatggactgaaaataagaacaaacactagctattttatgctgcaagaaccaggacacacaattcgccaatcatcccaccacgtaaccttcgattgtgcttctcaactccaccccataatttctcccagagatcatctatcaccttttccccaaagaagaaacaaaaccagttgcaccttaaaccatggatattttttcctcaggggctttaaatagtttcctatgcaacgtgtcttgtagcacaaataaaattctacaaaagttgcagtaaattttatttggatattttcacctgttaagtgtgtgtgtgttttc

SEQ ID NO: 15112 - DNA, 556 bp, Macaca Fascicularis
  misc_feature (1)...(556): n = A,T,C or G
gtggtctcgatctcctgaccttgtgatccgcccgcctcggcctcccaaagtgctgggattacaggcgtgagccaccgcgcccggccgaattctgaatcatcttaaaaataagattccaaccacaaaaacaattagccatttctttactaaaaaacaaaaaacaaatctgttttataattacagatttttagacaaatttcttgtatcaggaagaaatacaaattttgtcatgtttnnnnnnnnnnnnnnnnnnnnnnnnnnnnnnnnnnnnnnnnnnnnnnnnnnnnnnnnnnnnngaaaatgttttaactcactctcatttgtaagcagtccacatagtagacaatgggttttccaagctgggcaaggtacatttaatcagtaaatcagtttcctatcatgtatcgtgatgtttcagtgtgagacacaaaaacaatggcttgaaacttgtgtatcatatgtgattttgaaatgaacaccttgaatagcactaatttttatttgtgatatttttctataacaaaacaagtagcactaggaaaagaggttttatttt

SEQ ID NO: 15113 - DNA, 582 bp, Macaca Fascicularis
  misc_feature (1)...(582): n = A,T,C or G
ccacacacacaggaggagtgaggagtgtgcccacagcctgtgggtggagcagtggggaaaggggacacctggcctgcgggagccagcagggggagcccgggcctggagtgtctctgcagggtgagtcctgggagagcctgtctggggtggggcagggccaggttcagggtggggacaggcagcacctccactgaggaggagggagtggtgtgatacctccctcggggaaaacctcagggtggacactcctcagtgacatgagtgctcttcccaccttttccaagactnnnnnnnnnnnnnnnnnnnnnnnnnnnnnnnnnnnnnnnnnnnnnnnnnnnnnnnnnnnnnnnnnnnnnnnnnnnnnnnnnnnnnnnngtgccgtggcacgatggcgaggaagccagccccaaggantnactgaaaacatatcacgccaatgccgtgtggtttcgtttgaatataaaattggtgaaagctgttggttttttaaaagcagtaatttttttgttcttgtttttttgcgatttcacttccattcctgaccaaagcttctgtttaagtagtttattatggaaaactgtc

SEQ ID NO: 15114 - DNA, 872 bp, Macaca Fascicularis
  misc_feature (1)...(872): n = A,T,C or G
agacatgagttcncnnnagatgagaggagctgtggagcagnncaagacacgggcagagcaagaccgacgnccngctgagcatggtggagaagaaaggggaccgggccctggagctgctcttcagaagccttagtgaaagggacccttacctcgtgtcctatcnnagacagcagagtttgtaaagggagtcagtccgagagtgtggaagagagaatccagcgttctcattggaaatgaatgagtagagatgcatccttgattccagtgtccaaaacagaggagggctgggtcacatttgcccatcacacaggctttggggacagatnnnnnnnnnnnnnnnnnnnnnnnnnnnnnatccccatgcctttccctcaagaatatctgaagaaaataacaatagtgcttttaaatcttttctaaccatggctcgatatatgactattccatccattgacacnnnnnnnnnnnnnncagggtgagtaagtcaaggcagttgtgtttatacatgataggctccagaaaggaaaattcnnnnnnnnnnnnnnnaaaccagcttttatggacactctgtgtgatgtgtcaccattccaccacaaaaagcaggaacgcgaacaaaacctctcaatcgaaaagactcaaggtatttcttaatggtattggttttatatacgttgtccctttaacattttatctattgctgttattactagaataatgtaagtacgttattctacaagtacccgggaggcggaggctgcagtgagccgaggtcgcaccatcacatccaaccnncaaaaaaaaaatgtgggaaagtcctctttaaacagttaccactcatgttatatgtgaatccacatcctggagggaggcta

SEQ ID NO: 15115 - DNA, 784 bp, Macaca Fascicularis
  misc_feature (1)...(784): n = A,T,C or G
cagcacagcagctgcccnntctgaaactgctggcgccatggaggacgcgtcaccagagcctgggccaaggccactgggggacctgccataccgcggacctgtctggtgggagctggagccttgagaagccatggttcttgtcagaaacatttccccaggcggagagagggggccccggcctctcccctcctcttggcctccagagtcctgcaagtgcctcacaatagtgaagcccagttggaagcagctgccccgggagcctgggacaggcaacccaccaggtcagtcccctgccactcagagcagagcagaacagcgggctgagggcaagcaggtggggctgtgcgtggcctcggtgcactcggtgtcatgtctgagcctggtgttcgtgccccactgctgacctaagtccctggcgaggggaggcggagtagctgccccgtgggtgtttggagattctgttttactctgccatggaggaaacggttttggggagggagggggaagcctttattctttactgttgtccctgttttcctttgggggaatttacccagttagcagcccctcctcaccattccccccaggaaggccatgtcccagttttctgtccacccctcctgttcctctgcaccgtgtctctgattttccctgccacggaagctaacccagagcacacacccatgctcatgagtgtttccccnnngataattcattctgagcatgatatcgcagtgtggactgtctgtctgtaagaagatgccatctactaactaatttgtat

SEQ ID NO: 15116 - DNA, 695 bp, Macaca Fascicularis
  misc_feature (1)...(695): n = A,T,C or G
gaatggagagattgagagagatgtcgggcagttcccattagattgagtggcctccatgttatttaaaattgttttggcgatgcctcaccnnnnnnnnnnnnnnnnnnnnnnnnnnnnnnnnnnnnnnnnnnnnnnnnnnnnnnnnnnnnnnnnnnnnnnnnnnnnnnnnnnnnnnnnnnnnnnnnnnnnnnnnnnnnnnnnnnnnnnnnnnnnnnnnncctgcacctgtaatcccagctacttggaattggannnnnnnnnnnnnnnnnnnnnnnnnnnnnnnnnnnnnnnnnnnnnnnnnnnnnnnnnnnnnnnnnnnnnnnnnnnnnnnnnnnnnnaaaaaaaaaaaaaaattcatctgtaaaataaattccaggatagtccttttattcaaggaaatattttataaattgacctcacactgtataatctttactgtcctatcctgatgtataacacagcaggtataattacaccaagtgctataattgtaaatatggaatgaggtgaactatggccttttatttccttccaatgtgaacacagcaggtgtgagatgtcatctcagaagactggccttgcagaaataggcctacctccgaaatattctcttgtgactccatgaaccattaattaaccctttgtatctttgagtgaagattttactcaaatgttgcatctggaagttgaagaaa

SEQ ID NO: 15117 - DNA, 960 bp, Macaca Fascicularis
  misc_feature (1)...(960): n = A,T,C or G
tagatgactgggcagaggcaggtnggcagggaannngctagactctcacttccttttttctcttgatgtcctctcctgtgtaaccccacactcatcaatgcccttttcttttcctacccctctccttgtccctgcaccaaactgtgtccctgccatcctatttaactcccactatggatctacctcctcactattgccctttcctttcctctctgcacacctctacttttcctacccccagccatcagccacaacaagacctcccggcctcaagatgtccctggtgatgccggccatggcccccaatgagaccctgtcaggccgtggggccccgggggactatgaggagatgatgcagatcgagtgtgagnnnnnnnnnnnnnnngtgattcacatcaagacctccacggtgcccccctcgctccgaaaacagccatccccaaccccaggcaatgccacaggtggccccttgccagcctctgcagccagccaggcccatcaggcctcccaccggcccctctacctcaatcatccctgacctctgccattcacactgacttagaacgggaggagggggtaccgggtggccaggtgggactgtttcaaatttctctgatccccaggcttggggcaatcggtaaaggaaagaccaggtgtgggggttaagcacttatttgaggtgggggtgttcacctctcttctcatcccttttcggaatatagagctcctctcattcctatgaacccccagtcccggcttctttctttgaggggattgcgtgaggttcagttgtggggtgggtggtgggctgctgcatattctttattttgtttctctgttatggcagtggaggtgggaatttagtccccaggtgggacaagggaagtttttgcattttggagctggttactgggagtaagggagggtggcggggggagtacaggtttatgtgtgtgcatt

SEQ ID NO: 15118 - DNA, 733 bp, Macaca Fascicularis
  misc_feature (1)...(733): n = A,T,C or G
tttgggttannaaaannnatttgagagatctaacatttgttacgtgctctcttatatatcatctatacgataagactgaaatattttattcttttacagagaagggaacctcagaaaggttaagtactttgcccaaagtcatttggtaaatggaagatagagtcagaattcacacacgggcctgattccgaaacccgtgctcgctctactacagaagtactgccatggtaaagctgaagggcacaggttcagggcttagtaattaatatcacagtgagaattttaaccattactttaggcttacagtttgctaataaaattgctacttgagggcagaggcannnnnnnnnnnnnnnnnnnnnnnnnnnnnnnnnnnnnnnnnnnnnnnnnnnnnnnnnnnnnnnnnnnnnnnnnagcctaggtaacatagcaagaccctgtctctacaaagaaaattaaattagcagggtgtaatggggagcacctgtgatcccagctactcagaatgctgaggttggaaggatcaattgagcccaggagttgaaagaggccacagtgagctatgatcacacccctgtattccagcctgggcaacagagtgagaccctgtctctcctttttaaaaaaaaagcaaaaaaaacaaactacttcttgggtcattacccttcgtcaaggaaactcttcgaatatcatacctacatgccngnnnaagtcctataaattnnnnnnngtc

SEQ ID NO: 15119 - DNA, 692 bp, Macaca Fascicularis
  misc_feature (1)...(692): n = A,T,C or G
cttgcccagatagaaagattggggttgctgccccaanntttcgaggaggaaagcagacacctgagacaggagcctgtatgcagcctggtgcagccttgcagagtacannnnnnnnnnnnnnnnnnnnnnnnnnnaatatgcaactaacatagaagtggagcaaaagaaatgcattcccactgaggccacatttttagccctagttgaaagtcaagaaggacagcagcaagtgtaggctcaggattaaagaaaaaaatctgctcacagtctattctggaggtcacatcaccaacaaagctcacaccctaaaaagctctgagaaggtggaggcannnnnnnnnnnnnnnnnnnnnnnnnnnnnnnngttgggaaagtaaggtatccnnnnnnnnnnnnnnnnnnnnnnnnnnggcagaacaaactccaccctaatgtgggtgggccccgtccagtctgttgaaggcctgaatataacaaaggggctgattcttcctcaagtannnnnnnnnnnnnnnnnnnnnnnnnnnnnnnnnnnnnnnnnnnnnnnnnnncaaactgaaaaatggctcttcttggctctagagcttgcnnnnnnnnnnnnnnnaaaaaactnnnnnnnnnnnnnnnnnnnnnnnnnnnnnnnnnnnnnnnnngatctagggatgtgtcagcctctacagtcacaagagcca

SEQ ID NO: 15120 - DNA, 726 bp, Macaca Fascicularis
  misc_feature (1)...(726): n = A,T,C or G
acaggtgtatgccaccgcacccggctaaatgttttgtatttttagtagagatnnnnnnnnnnnnnnnnnnnnnnnnnnnnnnnnnnnnnnnnnnnnnnnnnnnnnnnnnnnnnnnnnnnnnnnccagcctgagatgttgattaaaggatgcaaaatttcaattagacaggaagaataagttcaggaaatttattgtacaacatagtgaccatagttaatgataatgtatacttgaaaattgctgagagagtagattttaaaagttctcaccacaaaaatatgtggagcaatgaatatgttaattagcttgatttagccatttcacaatgcttatatacatcaaaacatcatattgtacatcataaatatatcgatttttatgttaatttaaaaatttaaaaagatcagccttaaataaaacaaaagtactctgacattctaaaattaaagactgtttctattttgagagatataaactggcaaagcaaaaataaagaaatccaaatactaggaaaacgagggaannnnnnnnnnnnnnnnnnnnnttcttttttcctgctttctttccttccttatcctctccctgtctcctacccttcctcctctcctctttcctttctccttcccttctttcagtcttggggctaatatttttaaatgctaacaattgttaatatgtattaatagcaatacgtatcttgttcttgtactttatctatatttaca

SEQ ID NO: 15121 - DNA, 723 bp, Macaca Fascicularis
  misc_feature (1)...(723): n = A,T,C or G
acacaccatatnntgtccatctccaattttgacccantggactccagataacagggatagaaggactgcagatcggnnnnnnnnnnnnnnnnnnnnnnngggtgggtttggcattgattacctctcagcgacgtcatcctctnnnnnnnnnnnnnnnnnnnnnnnnnnnccgagtggcacctggacaggccatggcccctccatggaggattcctctgctgtcctcatggaaagcctaaagtctatctggtcnnnnnnnnnnnnnnnnnnnnnnnnnnnnnnnnnnnnnnnnnnnnnnnnnnnnnnnnnnnnnnnnnnnnnnnnnnnnnnnnnnaccatgaaccctccacactgaggccaaagtgacaacctgggaatgaaggctccataaaccatggcatgttgggtttgcaggactggcccacacagtcccctgcaggtggcagccctcttttctgtttcttgctgtcaagagggtgtaagtattccaccagcccgctgagtgtgcacgaannnnnnnnnnnnnnnnaaaaagaaaaatccatcaggaactctccatccccccggggccttccggagggagagagagaggaactgctgtttatctcactcagttacttggtatcaccgcctctcaccttctccatcgtgcatgtccccagccacatgggaagtgaaagctgagaagggaaggcagatgggagaagccaatgggaacttctc

SEQ ID NO: 15122 - DNA, 724 bp, Macaca Fascicularis
  misc_feature (1)...(724): n = A,T,C or G
tgttcnnnnnnnnnncctcctnnnnnnnnnnnnnnnnnnnnnnnnnnnnnnnnnnnnnnnnnnnnnnnnnnnnnncgccccatcaagcccccacgcaaagacttgcctgactctcagcaacaacaccagagctctaagaaaggaaagctttcagaacaattaaaacattgcaatggcattttgaaggagttactctctaagaagcatgctgcctatgcttggcctttctataaaccagtggatgcttctnnnnnnnnnnnnnnnnnnnnnnnnnnnatcattaagcaccccatggacctcagcactgtcaagcggaagatggagaaccgtgattaccggnnnnnnnnnnnnnnnnnnnnnnnnnnnnnnnnnnnnnnnnnnnnnnnnnnnnnnnnnnnnnccccagatcacgatgttgtggcaatggcacgaaagcttcaggatgtatttgagttccgttatgccaagatgccagatgnnnnnnnnnnnnnnnnnnnnnnnnnnnnnnnnnnnnnnnnnnnnnnnnnnttggccaaatcatcttcagagtcctccagtgaggaaagtagcagtgagagctcctctgaggaagaggaggaggaagatgaggacgacgaggaggaagaagaagagagtgaaagctcagactcagaggaagaaagggctcatcggttagcagaactacaggaacagcttcgggcagtgcacgaacaactggctgctc

SEQ ID NO: 15123 - DNA, 692 bp, Macaca Fascicularis
  misc_feature (1)...(692): n = A,T,C or G
aatnnnnnnnnnnnnnnnnntactcagaacggaatgacaaactgacacgntcttagaggaangaagcaaagttgaaagaagcccccaagcatattaaggagacctatggacagcagtattttgatgccttttacagtatcatcaaggaagggctgttgggttgtagcacaaacctgaacctggtcactgactgcatggaacatgctctgacatcagtgtatccacgaactcgnnnnnnnnnnggctgggatgctaaatttttcttcatccctgtatcttatttacctacatcacttgcagactacattttgactagnnnnnnnnnnnnnnnnnnccaggcagtctaaagaaaactgggttggtgcttcttggaatgaagacaaaaatctgaaattaattgttagtgtctcagtaatcctgatttagaacccaggctttttgtaagaatgcattttcttgcctaaattcatttatctgtcatcatcagagtactaacatgtttatatttcacatatccaaagcttaccactttaggtgatgaatctttactatttcaccccttttttgatgagactatttttccagagtgaatcatttgttcttgccttattaaacacagtagatggaaaacaatttnnnnnnnnnnnnnnnnnnnnnnnnnnnnnnnnnaataattgttctatgctttaata

SEQ ID NO: 15124 - DNA, 739 bp, Macaca Fascicularis
  misc_feature (1)...(739): n = A,T,C or G
tatgtatagagagtnnnannnnnnnnnnnnnnnnnnnnnnnnnnnnnnnnnnnnnnnnnnnnnnncatagaannnnacggtaggacagctgtaacctgactgaaccaaatccatcagcataatgactgtgtgttgtgagaaatgcaaaaactttatgaaagtgtggtcatcttgacccccacagagccacagtagccgtcaattattgagatttttaaatggtaaatattgcaaaagttaaacaagggtatcatgatatcatttataataaatgtcaatattggtagtccactttatgcttaaacaaaatcatacaaaattaagttttaaggttatattttttaaaataatgaattttctatcactgggcaacatgtctttattattcaagctgaatgtttaagagagattttggtcttcaaggcttcacgtcatgaaagtgtacatgcatatgcaactgtgaatcacatggtatggatggtagcttgtttattaactaaatatgtacagcaaactgcccttttagagtcatgttaatattgatgtcctaacactgggtctgctagttcagtatgtagtataggcnnnnnnnnnnnnnnnnnnnnnnnnnnnntatatttttaaaaagaaaaaatcaaaatgcattaggatttacgtggttgtggcaaacaaacaatgctttcggtgttgaaatatctctattttccaaagatgataaactttcatcattattagtcta

SEQ ID NO: 15125 - DNA, 545 bp, Macaca Fascicularis
  misc_feature (1)...(545): n = A,T,C or G
tccctccccccacccccacatcctgtcacatagattcatcaactccatctcccatctgtctatccaaggtggtccttctttccacatttgcctctgctcttccttattttttgtatgcttgcagtagcaacattcccctaaagtctcggtcttattccttcccttcnnnnnnnnnnnnnnnnntggccagtgatctttgtaagccacaaaactgacatctctctcctgcttaaagattcccatctccttcaggaaaaaacaccccagcactagcaacagcatgcccttcccacttcccctgtccgttctgacctctcgccactccccatttgcaacctgcagcaggactcatctgtttcaatgtctgtagctcttagtttccatcatccagactgaacatcacagtggcctccttacacatcttcctgcctcccactatgtaacgtggcatcaggcaaacaggatttgggtcaccaactatcttttaaaatccagttcttgccaccctcctaacacctttcctaactttctgtccctcttccaag

SEQ ID NO: 15126 - DNA, 760 bp, Macaca Fascicularis
  misc_feature (1)...(760): n = A,T,C or G
gacagagacgatggannnnnnnnnnnnnnnnnnnnnngagaacgtgctccctgcacacgtggccccccagnnnnnnnnnnnnnnnnnnnnnnnnnnnnnnntctaccaccagtcctacgaatgcnttnnnttcctcttcgcttcagtcccagacttcaaggagttctactctgaannnnnnnnnnnnnnnnnnnncctagagtgtctgaggctgctcaatgaaataattgctgattttgatgagctgctctccaagcccaagttcagtggggtggagaagatcaagaccattggcagcacctacatggcagccacaggattaaatgccacctctggacaggannnnnnnnnnnnnnnnnnncggagctgcagccaccttggcactatggtggaatttgccgttgccctggggtctaagctggacgtcatcaacaagcattcattcaacaacttccgcctgcgtgtggggttgaaccacggaccagtagtagctggagttattggggcccagaagccacaatatgacatttggnnnnnnnnnnnnnnnnnnnnnnnnngcatggagagtacaggagtccttggcaaaatccaagtgactgaggagacagcctgggccctacagtccctgggctacacctgctacagccggggggtcatcaaggtgaaaggcaaagggcagctctgcacctacttcctgaacacagacttgacacgaagtggacctccttcagttaccctaggctgagattgcactcccctt

SEQ ID NO: 15127 - DNA, 764 bp, Macaca Fascicularis
  misc_feature (1)...(764): n = A,T,C or G
gacaactactaccatnnannncnnnaattgtacaaaagttaaatgggatattatacttatttcaagtaatgttaattaaaatttttttttctttttgacaatataaaaaacattttaaatttcctnnnnnnnnnnnnnnngtaaggccagtttaagatctctcttaaaagacttttggccaataaatccnnnnnnnnnnnnnnnactttggtggtaataaatatttatcaggagcttctctcagcagagagtatccattctttgaattcgaagcacaattttaaacatgtaaaatggacatatnnnnnnnnnnnnnnnnnnggtttactctttttttcttaaagaaaaaaaagacattggttgttgttgcaaaaagtctaaattactatcggttgaaacacagcagctgnnnnnnnnnntccagnnnnnnnnnnnnnnnnnnnnnnnnnaagtaaggcgtaaggttgcatgtttcagtcctcnnnnnnnnnnnnnnnnnngcannnnnnnnnnnnngcgttgtctgaaagcctcctgtatattctccagctaaatggtcgtctggtagcctttgcatttaacaaactagcatgaggctttttatatctaaatgctacgtgatagacaatttcagctagccacatattgtatgtatgagattcataaagactttcaatcatttcattttcaaacaactgaaattttgtttagtatgtgaattctttttttgaaaatgtatagtgaataggatgttgcactggggc

SEQ ID NO: 15128 - DNA, 974 bp, Macaca Fascicularis
  misc_feature (1)...(974): n = A,T,C or G
ataaagaagcaataaagaagagtgccacatttatnnntatatctatatgtacttgtcagagaagggtttgtgcttttctgcttttgaaatctgtatgtgtagtgagatagcattgtgaactgacaggcagcctggacatagagagggagaagaagtcggagagggtgacaggatagagagctatttagtggccggctggaaatgctgggctgacggtgcagtctgggtgctcgccccatggttccactatctggctgcgtgatcttgaacaagttccttctggtgtctgctttctccgtggtaaaccacaaggctgttgcatgggctgatgaagatcatatacgtgaaaattctttgaaaacgtataaagcactatacaaattcgaaactccactgagccattatccttgctatgatggtggtgttttggggatgagagggtgctgtccatttctcatgttttccattgtgtgaaacaaagaaggttaccaagaagcctttcctgtagccttctgtaggaattcttttggggaagtgaggaagccaggtccacggtctgttcttgaaacagaagcctaacacactccaagatacggacacacgggagccactggcagaagggactccacgaaatgttgcatggatgttttaaccattgttgggtttctcttatcaaacttgggcccttcccttcttggtttccgaaggcattttattgcttgggttatatgttcactgtccccctaatattagggagtaaaatggataccaagttgatttagtgtttttgcctctgtcgtggctttcatgttattaaacgtacgcatgtgaagaaagggtgtttctctgttttatattcaactcataagactctgggataggaaaaatgagtaatggccactaggcttaatacctgggtgatgacataatctgtgcaacgaacccccataagtttacctatgtagcaaacctgc

SEQ ID NO: 15129 - DNA, 1282 bp, Macaca Fascicularis
  misc_feature (1)...(1282): n = A,T,C or G
aaaagatgttcagtttgcaaaatggtgatatatnnngatcannnnngccagaagacacactggtttactcataagaaaatctgtaagaatctgaaggacatttacgaaaagcaacaattggaggctgccaaagaaaagagacaagaggaaaaccacagcaaacttgatgtcaattctaactgtgttaatgaagagcaaccagaggctgaagtgggtatctcccaaaaaggttccaatcctgaagattccagggaaggaaagaaagaatctcttgaaagtgaagctgagttggaaggcttacaggatgctcctgcagggccacaggtgtcggaggagtaaaagccagagcaagtgccagtggggatggtcctcaccctgcaagaagctggaaaactcatgggaatgcattgtcctcgcctcgttatacctgcatggcaccatggcaggattccacatttcatagaatagaggttttcaaggaaacccctgttgaccatgccctaatttcctattgatttctgttctataattgaacagataatcctatggaaaatgttttgtttcaaaatacaggaaaaacattcctattccctttctgaggctggctttccagcagttgtttcaaaggaaaatagatccccttaaagaaaaagtataggctttagggaacaaagggacaagcagaacagatgtggaagagagattttcaggagagaaaaaattgatagctacagagatgggtagttagaaaaatcgtaacttatatgtgaataaaatacatataaacagcatttactgtagtggcgttctacttattaagatgcaatgaaatgaagaaaagcttcatgtccaaggacctttgccacagttcagctagttgtagttttatacagaaatgatcctgaacactctgaacttgacatagtcctgcggtgatattctatctgcagtatttgtacctccagaatggcagatccctcagcaggaacaaaggcgtattgacggttctctcagcatgtgcaaaaaaggtacttcctgaaacttttgattcaataatggctaaacatactatgtacacaattattgtaaggctaattcacgtgccatactccacctgaaagcctgagttatcttgctataagcttttcatggagcacttcctttccagaaactgatttgtaacgctattagagaatgtcctggtgtcagtttttagcatatgtagtatttaaacagagctagaatgtgatgtctgaagatagtgctgcatttctaagtttct

SEQ ID NO: 15130 - DNA, 671 bp, Macaca Fascicularis
  misc_feature (1)...(671): n = A,T,C or G
cagcagggaccaaagagcccctcnnnnnnnnnnnnnnnnnngcnnncccacccagtgccctgtgagcaacctgcactcctctgtgagggtctcccagaccccagcagggtatcctccgaggtgcagcagatgtgggcactgacagagatgatccgggccagtcacacctccgcgaggatcggccgttttgatgtggatggctgttatgacctgaacttgctctcctacacttgaatggtggctcctacccaagatgttggcctttctgtgcccaccnnnnnnnnnnttgggccaccagaggctgaagtgggtttcctgtgtattccgaatgttgcctgcatgcctattctgtctggnnnnnnnnnnnnnnnnnnnnnnnctcgggggctcactgtgttacttcagcatgagctcctggcagggggggtgctctgnnnnnnnnnnnnnnnnnnnnaattcttccttctacccaaaaacactccagtcagttgtacttactgagaatccctgagtgccctctgcccatcctgccaacatgcacattcctatcttctgcctgctccctcacctcagtgcagttgggctgggctgacctactagaacctgctccatgtatgcacctggaaggccattgctgccatggcacttgggacacttgaggaagaaacaga

SEQ ID NO: 15131 - DNA, 224 bp, Macaca Fascicularis
gttgtgccttctttagacagatattattctcatttagtgccctctttagccagaatctcatgactgtttcattttagtaatcacatttaatttagatattttctatatattggcccaggtaaaatcgaatatagcatctttcatatcctaggaaccaacaaggaaactttcccttgactccctttttacactttaatgtaagtagcaggggggaaaatgcattt

SEQ ID NO: 15132 - DNA, 705 bp, Macaca Fascicularis
  misc_feature (1)...(705): n = A,T,C or G
acatcatggtgatgttgggnnnccatagctgatgttattctnnnnnnnnnngcttacacagagaagtctgctacatatgtcaacactgagggtagagctcagcagactaaggtagcagtgacacctcctggcttggcaagagaagactggaaaattataagagcactctctgagattgctggaataactcttccatatgatactctggatcaagtaaggaacagattggaagaagtctctcctaatcttgttcgatatgatgatattgaaggggctaattacttccagcaagcaaatgagctctcaaagctagtgaaccagcagcttcttgctgacccacttgttccacctcagctaactataaaagacttctacatgacagattcaattagcagagcctcacagacaatggccaaatgtgtcaaagctgtcacagagggtgcccaggcagtagaggaaccatccatatgctgaagtatctactaggatcccagttttgccgcagataattgatgaacaactatagtgcagtgatcctttacaggtttatttctttgtaaaaaaaaaaaaaatctgaatcatgtaatatttaaggttatactatgcctatttgaaaatgatattagttatcaacttcgcagtttgaaaaacatgtattgtgtgtaaaggttaaataataaaactttatgcagatgctcttaaaag

SEQ ID NO: 15133 - DNA, 730 bp, Macaca Fascicularis
  misc_feature (1)...(730): n = A,T,C or G
acgttctgatccagannnnnaagntnntgctnataaagcctttactgnattcattgtagaagcagataccccaggaattcagattgggagaaaggaattaaacatgggccagcgatgttcagatactagaggaattgtcttcgaagatgtgaaagtgcctaaagaaaatgttttaattggtgacggagctggtttcaaaattgcaatgggagcttttgataaaaccagacctacagtatcttctggtgctgttggattagcacaaagagctttggatgaagctaccaagtatgccctggaaaggaaaacttttggaaagttacttatagagcaccaagcgatatcattnnnnnnnnnnnnnnnnnnnatgaaagttgaactagctagaatgagttnnnnnnnnnnnnnnnnnnnnnnnnnnnnnnnnnnnnnnnnnnnnnnnnnnnnnnnnnnnnnnnnnnnnnnnnnnnnnnnnnnnnnaaatcagttagctactgatgctgtgcagatatttggaggcaatggatttaatacagaatatcctgtagaaaaactaatgagggatgccaagatctatcagatttatgaaggtacttcacaaattcaaagacttattatagccnnnnnnnnnnnnngcaagtataaaagttaaaaaaattactgtagaaacattgaataacnnnnnnnnnnnnnnnnntttcagctccnnnaaaagagaaagggctttaat

SEQ ID NO: 15134 - DNA, 515 bp, Macaca Fascicularis
ttcatctaaaactccccaatgcctaaggttctagtcttggaagggttagctgcaaaattccagttcggaagccaacggaggctcagtccagacagggattaaccgacttgtgctggtatctaggtgcttggattgcctatttgagtttgctggaagggaaattggggaggcccgacaggcttggctgccagtcggcttccgcgaaaacgactcttgctgtccacatagccagccgtgaagccaaactgcaggcctctgccctcccctaaatgtcctcgcaggaggcagtcactcgggaggaagatgtgcctgttaccaagtgcttcgtcccggccccagcgcagaccttcagggccgccggcctctcggcctggactgcccacctcggccctgcgtcagagcggaaggccaagtcttccagaaggtgctgcggcctccccgcagcccctcagcgactcaggatggggcagctggctgagtcacgagcgccgaggcgggcaggtgcggcgccgccg

SEQ ID NO: 15135 - DNA, 794 bp, Macaca Fascicularis
  misc_feature (1)...(794): n = A,T,C or G
agcctggaaaggctnnnngacccccagaggacccacgtgatgtggcaaccggcaagganntcgggatgtctgggctccgctttggcacactgtacacagaaaaccaggacgtggccactgccgtggcttccctctgccgctaccacggcctcagtggcttggtccagtaccagatggcannnnnnnnnngggaccgtgactggatcaaccaggtgtacnnnnnnnnnnnnnnngcccggctcaaggctgcccacacatacgtctcagaagagctcagggcgttggggatccccttcttgagtcgtggggctggcttcttcatctgggttgacttgagaaagtacctgcccaagggcacctttgaggaggaaatgctgctctggcgccgctttttggacnnnnnnnnnnnnnnnnnnnnnnnnnnnnnnnnnnagtgtaaagagccaggttggtttcgctttgtcttctcagaccaggcccacaggctttgcctgcggatgcagagggtccggcaggannnnnnnnnnnnnnnccaagtggatgaagaccccccttcctctcagacccaggagccaagtgaccaacgcaggtgagctggtcattgcctcgtggccagaggtcccannnnnnnnnnnnnnnnnngggcgttccggggctgcagaagaccgactgtggatgtgccattcgccaggaaggtgtctaacttggctttgcacccaaagaactgtttcttgccttttgctgtagccgtgagaaactccttaagctatggttcagcctgggccctccctctc

SEQ ID NO: 15136 - DNA, 842 bp, Macaca Fascicularis
  misc_feature (1)...(842): n = A,T,C or G
tcgttatggnnnnnnnnnnnnnnnnnnnnnnnnnnnnnnnnnnnnnnnattcaacacagtgagcactagtctgaatgtataccgaaataaagatgcnnnnagccattttnnnnnnnnnnnnnnnnnnnnnngaagtctttttagaataaacttaggcctgcgtggcctggtggctggtggtatannnnnnnnnnnnntgggtactcnnnnnnnnnnnnnnnnnnnnnnnnnnnngaagtactctggtgagactattcaggagagaaaacagaagaatcgaaaggcgctccatgagctaaaactggaagagtggaaagccagactacaagttactgaggacctccctgagaaaattgaaagtagtttacagaaaaatgtacctgagaatgatgctacnnnnnnnnnnnnnnnnnnnnnnnnnnctannnnnnnnnnnntaatagataaacaagacaaggactgaaagtgctctgaacttgaaactcactggagagttgaagggagctatgctgcnnnnnnnnnnnnnnnnnnnnnnnnnnnnnnnnnnnnngtcagcctgctgacaaacgtaagtgctggtacctgtggtggcagtggcttgctcttgtctttttcttttattttctttttaagaatggggctgttgtacactctctttacttatccttaaatttaaatacatatttatgtttgtattaatctgtcaatatatacatacatgaatatatccactcacctagatttaagcagtaaataaaacattccccaaaagattaaagttgaattttacagttcatatattcatgtggtcctttgaaagggtattctagaaatcactggaa

SEQ ID NO: 15137 - DNA, 863 bp, Macaca Fascicularis
  misc_feature (1)...(863): n = A,T,C or G
aaatgatcactgtcaacactgtcannaannncnnnnnnnnnnnnnnnnnnnnnnnnnnnnnnnnnnnnnnnnnnnnnnnnnnnnnnnnnnnnnnnnnnnnnnnnnnnnnnnnnnnnnnnncggcaccaagggacaggagaagaggaaataacagagagaatgagagcgacacagacgttatgcgtnnnntgctgaacatttccctgaagagtcagccccgacatcctgactctcacctgtactattgcagacctgtcaccctgaaggacatgccacccccagttcctatgatgcagttatcaaaaagtattatcattgctcccctgatgtaagattgttggtgaattttcaaggccttcagtttatttccatgtttctcaaagaaaatagattaggtttgcgggggtctgagtctgtgttcaaagactgtgaacagcttgctgtcacctcttcacctctttcactccttctctcactgtgttactgctttgcaaagacccgggagctggtggggaacgctgggagtagctagtttgctttttgcctacactgagaaggctatgtaaacaaaccacagcaggatggaagggtttgagaatgtatttcaaaaccatgtctggtattttcagccataaaataagtttgagttgtccgtaaatttgcataacggtttaatcctgtcttgttcattttgagtattttttaaaaatatgttgtagaattccttcaaaaggccttcagacacatgctatgttctgtcttcccaaactcagtctcctctccattttagcccaatgttttctttgaggaccccttaatcttgctttctttagaatttttaccccaattggatggaaggcaga

SEQ ID NO: 15138 - DNA, 1937 bp, Macaca Fascicularis
  misc_feature (1)...(1937): n = A,T,C or G
taaccannnttgaacagctgcttccgttaattgtcaacctcatttgtccacatagaccatggccagacagacaatggggattatgcatctttgatgatgtcatagaacactgtagtccagcctcatttaaatatgcagaatatttcctaagaccaatgctccaatatgtatgtgacaacagcccagaagtcaggcaagcagctgcatatggcctgggagtcatggcacagtatggtggagataattatcgccctttttgtacagaagcacttcccctgctggtaagagttattcagtctgcggattctaagaccaaagaaaatgtcaatgctacagaaaactgcatctcagcagtagggaaaatcatgaagttcaagcctgactgtgtaaatgttgaagaggtccttccacactggttgtcttggcttccactacatgaagataaagaagaagctgttcagactttcaattatctgtgtgacctgattgaaagtaatcatccaattgttcttggcccaaacaataccaatctgcccaaaatatttagtataattgcggaaggagaaatgcacgaggcaattaaacatgaagatccttgtgcccaaacgtctggccaatgtcgttcgccaagtacagacttctggaggactgtggactgagtgcatagcacagctcagtcctgagcagcaggccgccattcaggagctcctgaactctgcgtgaagggccttannnnnnnnnnnnnnaaaactaactccaaataaacgcttaccctttcgtttaggtttctttgttttgtttttgagcaaaagagagcggtagtgttgtgtgtaggccattctgnnnnnnnnnnnnnnnnnnnnnnnnnnnnnnnnnnnnnnntggagtttccatggatttcnnnnnnnnnnnnnnnggagttcctggaagccctgcagtagcactgaagagtatttttctattggtataacccacccacctgaaggggaannnnnnnnnnnnnnaatttttcttgttagacataaggaaatttaaggaaaaacagnnnnnnnnnnnnnnnnnnnnnnnnnnnnnnnnnnnnnnnnnnnnnnnnnnnnnnnnntgttcattgttaattggagtgtgagtctttctgtagggtagaaagaagcctactacccagcaaaccactagacccaaaagttgaaaaaaactgatgacagacaacaagcatgaagatggcatatttgatgtcactttggttctttttcccagaaggcttatacagtgactcagtcgggaagctttccagcttccagcccttgaatgtgaagtgtcattggcatgtctggcagtagtctcttattcactcctcaataaacaacattgaatacannnnnnnnnnnnnnnnnnnnnnnnnnntgtctggcttggattcatttcatgtttttactataagaatgatctaatatttttttaaagtaatagctatcagtaatagctgagtgttttttcccctaatattttccttgtnnnnnnnnnnnnnnnncatcgagtttttaccatcttccactgtaagctaagttatgatacctattccattcacaattggtgttctttttaaggtttgcaaatttcagccagttttgtagctaggattgttctgattagctcaaaaagatttggcttagtgttttcattgcaaattataattgcnnnnnnnncacacacaacttttgaacttataagtattatggctaaagttattnnnnnnnnnnnnnnnnnaaatgtgtgaatgtttctttatgtattaacctcatagcagtaaatgacttactgttgtttaatttttctaaggcatcttaatagacttctgttgaaaacttcagtgttaacatttttatnnnnnnnnnnnnnnnnnnnnnnnnnnnnaaaatgaattttatgcatagatcaga

SEQ ID NO: 15139 - DNA, 713 bp, Macaca Fascicularis
  misc_feature (1)...(713): n = A,T,C or G
gaggcttgccgccgacagtcctcaggtgctggggctgagcacctgttccttgagaatgatgttgcagaggcacttctgcaagagtccgaggaggcctctgagctcaagcctgtggaactggacactttggaaggaaacatcacgaagcagctggtcaagaggctcacatctgcagaggtgccagtggccacagacagggtgctctcagagggctctgtcgggggagaatccgaaggctgcagatcctttctagatggaagcttagaggatgcttttaatgggcttttccttgcattagaaccacataaagagcagtataaagagtttcaggatctgaaccaagaagtcatgcatttggatgatattctaaaagtaagtaccttttcagagaaattggattaggtttggagagaagtgtcctaagccaacattctgtttaagatgaggtatcgtttaaaaaaaagtcctatccaggctgggcgtggtggctcacgcctgtaatcccagcactttgggaggcctaggagggcagatcacgaggtcaggagatggnnnnnnnnnnnnnnnnnnnnnnnnnnnnnnnnnnnnnnnnnnnnnnnnnnnnnnnnnnnnnnnnnnnnnnnnnnnnnnnnnnnnnnnnnnnnnnnnnnnnnnnnnnnnnnnnnnnnnnnnnnnnnnnnnnnnnnnnnnnnnnnnnnnnnnnagatatcgca

SEQ ID NO: 15140 - DNA, 771 bp, Macaca Fascicularis
  misc_feature (1)...(771): n = A,T,C or G
gggctacatgccctnnnntgggcgcaccaaccaggnnnnnnnnnnnnnnnnnnntgcaggggnnnnnatggaccnnnntaggggctgcccagggcctgtgtaccgcatcatgacccagtgttggcagcacgagcctgagctccgccccagctttgccagcatcttggagcgtcttcagtactgcactcaggaccctgatgtgctgaattcacccctgccaatggagctggggcccaccccagaggaggaaggggcttctgggctggggaacagatctttggcgtgcctaagacccccagagccccaggaactgagtccagggaagttgaaaagttggggaggtagccctcttggcccctggctttcctctggcctcaagcccctcaaatccaggggcctccaacctcagaacctctggaatcccacctatcgctcctgagccccaaggagccctgagggtgaggactgaggcactgagggtccctccctgtactcctcaggctcctgggtggcctgttatgccagcggcccctgttccctgcagtctgtgctctgtgtctgggcctgtctcggagctggcctggcagcannnnnnnnnnnnnnnnnnnnnncagcccaggcctcccagggaaaggcccagnnnnnnnnnnnnnnnnatctttgggccagaggccaccttacacacaccccaggtgtccatggggagcactggattgccctcctactatgagcatccttcatctgggcagaaccccaccctgcagatgcttc

SEQ ID NO: 15141 - DNA, 746 bp, Macaca Fascicularis
  misc_feature (1)...(746): n = A,T,C or G
tcaggggcaagggtccagctggggcagcagaggaggtgacgctgttggtggagtcaatactgtgaacnctgagacatctcctgggatgtttaactttgacactttctggaagaattttaaatccaagctgggtttcattaactgggatgccataagcaannnnnnnnnnnnnnncccccagcacccgagccctcctctacttcagccgactctgggaggatttcaaacacaacactcctttcctcaactggaaagcaattattgagggtgcggacacgtcatcactgcagaaacgtgcaggcggcgccgatcagaactacaactataaccagcatgcgtatcccactgccnnnnnnnnnnnnnnnnnnnnnnngacccctgcaaaggggggagtctcgccttcttcctcggcttcccgggtgcaacctggcctgctgcagtgggtgaagttttggtaggcaatttcttccaaccaccaccgaggccccgaaaaacactggtagtcagggagctcctccccttggctcccagcctgtaccagccctggcccggctgctgcacctctgtttcctaggctggggacccagcttgtgtctccttatttcctcccactgcactgtggggcctcagtgaccaccagcctcatcggatacaccagcatctttctctacctgctcccttttgtgacctgaagtcactgtgacagttctccgggaaggaggagcttcctacttttgagtctctct

SEQ ID NO: 15142 - DNA, 768 bp, Macaca Fascicularis
  misc_feature (1)...(768): n = A,T,C or G
gcagctgccaanaacaaaggccgnnnnncccgatacctggcaaacaaatgcagtattgcctcacgaatcgattgctnnnctgaggtgcccacgagtgtatttggggagaagcttcgagaacaagttgaagagcgactgtccttctatgagactgggagataccncgnnaagaatctggatgtcatgaaggaagcaatggttcaggcagnnnnnnnnnnnnnnnnnnnnnnnnnnnnnnnnnnnnnnnnnnnnnnnnnnnnnnnnnnnnnnnnnnnnnnnnnnnnnnnnnnnnntgcgctcgcatcttcagaaaacagcagtagtactccagaggagtgtgaggagacgagtgaaaaacccaaaaagaagaaaaagcaaaagccccaggaggttcctnnnnnnnnnnnnnnnnnnnnnnnnnctatccctttctccaaacccaagaaaaagaaatctttttccaaggaggagttgagtagtgatcttgaagagaccgctggcagcaccagtcttcccaagaggaagaagtcttcacccaaggaggaaacagttaatgaccccgaagaggcaggccacagaagtggctccaagaaaaagaggaaattttccaaagaggagccagtcagcagtgggcctgaagaggcagctggcaagagcagctccaagaagaagaaaaagttccataaagcatcccaggaagattagaatgcaaatggacattctctgggaggtgggacataccatagcccaaggtgacatcttccaccc

SEQ ID NO: 15143 - DNA, 748 bp, Macaca Fascicularis
  misc_feature (1)...(748): n = A,T,C or G
actgtgatgcagctgcatgagccgaagtgggcctgaggagcccgggggggcccctggccccagtgtcccccttcccccatcacagggtgtggggctggcctcgctcgtggcacctctgctgatctcgcaggccatgggactggccctctatgtcctgccagtgctgggccaacacgtggccacccagcacttcccagtggcagaggctgaggnnnnnnnnnnnnnnnnnnnnnnnnttnnnnnnnnnnnnnnnnnnctgccccacaacacacaccgggtggtaagcacacaggccccagacaggggctggatggcactgaagctggtagccctgatctacctagcactgcagctgggctgcatcgcgctcaccaacttctcactgggcttcctgctggccaccaccatggtgcccgccgctgcgcttgccaagcctcatgggccccggactctctatgnnnnnnnnnnnnnnnnnnnnagcccagcagccacgctccttggcagcctgttcctgnnnnnnnnnnnnnnnnnnnnnnnnnnnnnnnnnnnnnngggctggcagctcttcctggcagcgctggcccagggtgtgctggagcaccacacctacggtgccctgctcttcccactgctgtctctgggcctctacccctgctggctacttttctggaatgtgctcttctggaagtgagatctgcctgtctgagctggacagagactccccaaggaccccatgctgcctcctccg

SEQ ID NO: 15144 - DNA, 782 bp, Macaca Fascicularis
  misc_feature (1)...(782): n = A,T,C or G
gtgcggtcntnnnnctgngaggagttggattggcagttatcatgggctgtaaagtggctggtgcatcccggatcattggcgtggacatcaataaagataaatttgcaagggccaaagagtttggagccactgaatgtattaaccctcaggattttagtaaacccatccaggaagtgctnnnnnnnnnnnnnnntggaggagtggactattcctttgaatgtattggtaatgtgaaggtcatgagagcagcgcttgaggcgtgtcacaagggctggggcgtcagcgtggtggttggagtagctgcttcaggtgaagaaattgccactcgtccattccagctggtaacaggtcgcacatggaaaggcactgcctttggaggatggaagagtgttgaaagtgtcccaaagttggtgtctgaatatatgtccaaaaagataaaagttgatgaatttgtgactcacaatctgtcttttgatgaaattaacnnnnnnnnnnnnnnnnnncattctggaaagagcattcgaactgttgtaaagatttaattcaaaagagagaaataatgtccatcctgttgtgatgcgatgggagcagcttaacaggcagggagaagcgcctctaatctcacagcctcgtagagcttcacagctactccagagaatagtgtgatatttgtaattcatgaatataatcaaggacaaggataattcagtcatgaacctgttttccggactctcctccacataaataattgctagctcattaaggaatatttaacataataa

SEQ ID NO: 15145 - DNA, 756 bp, Macaca Fascicularis
  misc_feature (1)...(756): n = A,T,C or G
cagataacccccagttgaaggagatacgctgcatcgtgatggtgccacagtggggcactcaccagaccgttcacctgcctggccagctgccccagcatgagtacctcaaggagatggaacccttaggttggatccacactcagcccaatgagtccccgcaattatcaccccaggatgtcaccacccatgccaagatcatggctgacaacccatcttgggatggcgagaagaccattatcatcacgtnnnnnnnnnnnnnnnnctcctgtacactgacggcctacaagctgacccccagtgnnnnnnnnnnnnnnnnnnnnnnnacagacaagggcaacaaccccaagggctacctgccttcacactatgagagggtccagatgttgctgtcggaccgcttccttggcttcttcatggtccctgcccagtcctcgtggaactacaactttatgggtgttcggcatgaccccaacatgaaatacgagctgcagctggcgaaccccaaagagttctaccacgaggtgcacaggccttcccacttcctcaacttcgccctcctgcaggagggggaggtttactctgcggaccgggaggacctctatgcctagctgtttccctgcctccagcttcagcctcctgaggccggagcctcagcccctccagacaggccgctgacatnnnnnnnnnnnnnnnctccctctgtctgtgcttgttgtgttgttgacctccntgatggcttgtcatccagaataaaat

SEQ ID NO: 15146 - DNA, 683 bp, Macaca Fascicularis
aaatcaaaagaaatgaagaaaaaagtactgtgacctaagagacaccctcctctaggatttagtggcaagtctgggctggcagaggtagggggttgctttggggtttgcacctgcactttggtgacatcgttcttctgtgttccctttatttatgctggtggcttccatccattcctcctctgagtgtgagtggagggccatgtggaaacacggctacgaccaaagggatatcccagtctgggcaggttgcgctgctgaccaccctcccttggggcccgggctctgtaggaaagttggcccttgattgtggcattgcactctcacggtttccctgtgcagacctaggggaaaactgcaggtagaagtgcttttctactaaggcctcttacttttggggggatgtgccctacagaagacatagaagatggggaaatgccgatgggcaaagagctactttgaatacataattctcttcaaagacttcagcagcaaaccaaaacagcaggttaaaaaaaaaatgcttttctgggtgcaagtctaacctgtctagcatgagatcttcttgattttctgattattttgtgtaacttgaaacaaagtgaatcagcttccacttggttgtgccgagcataaaacagaacttgggcttcctaataggccactgtcccatcacagattttaaa

SEQ ID NO: 15147 - DNA, 632 bp, Macaca Fascicularis
  misc_feature (1)...(632): n = A,T,C or G
gggaagcgagcccgctgctgcctcttgcctgccccagggaggcggtggatgaacctaggccatgcaagccnnnnnnnnnnnnnnnnnnacttctgccgccttctgggggcctacgtctcatatgtgctgagcgcggcccctcagcacgctaagagccgctgccaggggtactggaacgaggggcgcgccgtggccagaggggacagacgcctgctcacggggcatcagctagctcaggaaatcaagaacctctcatgatggatggggaggacagggcccggtttcacctctccggatgagatggctgctcagctgcgcgacctgaggaaggtggaagctgccgagagggagttcgaggagtacatgaggcatcaggacatagccaccaagcgcatnnnnnnnnnnnnncgggtcctgccagacaccatgcggaacctcctctcnnnnnnnnnnnnnnnnnnnnnnnnnnnncatggtgtggacttactctgcaaggggagagatcagaccttggaggcactggnnnnnnnnnnnnnnnnnnnnnnnnnnnnnnnnnnnnnnnnnnnnnnnnnnnnnnnnnnnnnnnnnnnnnnngctgtnnnnnnnnnnnnnnnnnnnnnnntcatgggtct

SEQ ID NO: 15148 - DNA, 572 bp, Macaca Fascicularis
catctcgcagcagaacatccgctcgcagcagcgtcctcggatccaggagctgggggacctgtacacgccggcccctgggagagctgagtcagggtgggctttccgtagatccccggtctgatgtttcctcaacgctcttgggaatccctccctccatccgccgacactgggtgatgccctggggccctgggcactgagagagggaagagagagaactcctgactgggaaggcgttctgaggcaccagggccggttggagggagaaagggaacgccaggcaaagacccggcagctctgctcggccctggaccttgttcctcctcagccctgaaaagcctcacctgaacctgtggctggaagcccccgacctcctcttggccgaaattgacctccccaaactggatggagccctggggctgtcgctggagatcggggagaaccgcctggtgatggggggcccccagcagctgtatcatctggacgcttatatcccactgcagatcaactctgatgagagcaaggcagccttccaccggaagagaaagcaattaatggtagccatgccgcttctg

SEQ ID NO: 15149 - DNA, 667 bp, Macaca Fascicularis
  misc_feature (1)...(667): n = A,T,C or G
tatcccatgctgacccctctgcctggcccctcnnnnnnnnnnnnnnnnnnnnnnnnnnnnnnnnnnnnnnnnntcaagcccctgtcccccagcctcctggccgcctatgatgcctgtgccacccccaaggaacaagagacactgctaagcaccatcaagtgtgggcgtctacagaggtgagggcaagagacggaacctggagggagtggtggggactggggctgccctaggcccagggcgtgaccctcgctgcttctcttcctgcaggaatctggggcctgctctgagcaggaccttatcccagctctactgcagctacagccccctgacctnnnnnnnnnnnnnnnnnnnnnncccagcccccatctgtacccccacgcaggctagccagccttttaacaacatcttttgtggtaaaattagaatctaagtgtttgcagccatatgtgttatgtagaagatgcctggccctggggaccttgtgaaatacgcaggaaccagggataccgtctggaccagtggtttttaaacaaagctgcttaggacctgggattgcctggtcagggagatggagtcagtggggcactgcagctttgaatcgattttatgtcatcagttggtcctcatcaaataaaacttccttaggagtgcagagggctcattggga

SEQ ID NO: 15150 - DNA, 789 bp, Macaca Fascicularis
  misc_feature (1)...(789): n = A,T,C or G
cgacgtgcgccgcgagagccgnnnnntccagctnnncggccgcctcccnnnnntcggcatgggccgcctggnnacgcgcnnnnnnnggctgtggcagcacgatgagccgtgctactggcgcctcacgcgggtgcagcccgactacacggcgcagnnnnnnnnnnnnnnnnnggcctggnnnnnnnnnnnnnnnnaagggaagacggagagcgaggcgcgggagatggaacacgtcatgtaccatgactggnnnnnnnnnnccaagcacgaggaggaggccttcaccgcgttcacgccggcgccggaggacagcctggcctccgtgccgtacccgccgctcctccgggccatgattctcgcagaacgacagaaaaatggagacactagcaccgaggagcccatgctgaatatgcagaggacacgcatggaaccctgggactaccctgcaaaacaggaggacaaaggaagggccaagggcacccnnnnnnnnnnnnnnnnnnnnnnnnnntggcctgaggggctgtgaggcagcagggatcttgtagatgaaagaaaccgtcttcgcgttacacccgagtctgcccctcggagctgggaggtcaccttccgcgacgttttctgaggatctgcattttagtggggagggctggggcaaatcgccacctatgtttttcctctggccctgctgcccccacaccaactccgcaggctcacgctggggaaagcgggaagcgctaactccccttcccccattagtgctctcttgcctgnnnnnnnnnagaagctaga

SEQ ID NO: 15151 - DNA, 749 bp, Macaca Fascicularis
  misc_feature (1)...(749): n = A,T,C or G
tctcatgtatagttcagtataatgccagtttttaatggcaaagatttggttccactgaaactccataatgctacagagagctactactttttccaggaagtaggtaaacagctggaaagaaaaaggacaacttcctagcagcatggcaacttaaactgcagatctaataggtctgcaacttttacactaaaaatggcacaaacagccggtgacacaagtgagaaatggggaacaagatgtgaacactgaaaggaacaatatatatactgcaaatacaatgaataaaccaaatgtagctatacggatcttaaaggataattatagaaaagggaaccaaatattttcctcaaatgctttttagnnnnnnnnnnnnnnnnnacaaatatatatatatatatttatccaaaaatatgttttatacagataaatgtttctcaattaaagatgggaccaaagctataggtataacataaagcacattgtcttttgtaagactatttatccacctgaattttcaatttctttaaagttagtgcattaaatgttttccaaatataattacctgacattctttttatagatataaatcannnnnnnnnnnnnnnntnnnaggnnnnnnnnnnnnnnnttttctaagatgctgtgcatattaaacttattatgagccccattaagaatcattattaataaacatatcaaaaagggctatataagtccgattttcctgttcatagtaaatattttctgat

SEQ ID NO: 15152 - DNA, 740 bp, Macaca Fascicularis
acaggcatacagggtacaggcatacaaggagcaggcatgcagggagcaggcatgcagggggcaggcatacaaggaggagggatgcagggggcaggcatacaaggagtgggtatacaaggaggaggcatacagggggcaagcaagcaaggtggaagccagcctagcagttttagtcctgggcagagccaggtcactccacaagatcaggaaaaggcggctttgatcatgcaggttcttcaactaactgcagatcagattgccatgctgccccctgagcaaaggcagagtatcctgattttaaaggaacaaatccagaaatccactggaacttcttgaaaggttttagaaaatatttggctgtagtctcaaagtttattctgtagcatggagaatgggtgcaaaaagctgacttctgcatccccacacttggattagggtttccctcctcctagaacctaatcttactttttgttctttttatttctttctgttttccttttttatttttaattgagggtggggggaggagggagtgtgtctgttcactttaagttactgtaaaataactctgaacatgacaacattatgccaaataagattacaaagaataagcagcaatattgaagtgtctacagtatgttaactacattttttaaatgttgagtaaaactttgtgaaaactgctcataaagactaaaagttgacctgttaaaacgttaatgtactaagatggtttaaga

SEQ ID NO: 15153 - DNA, 432 bp, Macaca Fascicularis
gtcctgcttgtcacaatgaatgttctcctgggcggcttcgtgatctttgccaccttcgtgactttatgcaatgcatcgtgctctttcatacctaatgagagatttccaggagattctaccagggaatgcacggatctcaaaggaaacaaacacccgataaactcgaagtggaagactgacaactgtgagagatgcacttgctacaaaacagaaattatctgttgcacccttattgctacacctgtgggttatgacaaaaaaaaatgccagagaatcttcaagaaggaggactgcaagtatattgtggtggagaagaagaacccaaaaaagacctgtcctatcgatcaatggatactctaatgtgcttctagtaggcacagggctcccaggccaggcgtcattctcctctggtctatgattgtgtagccatgc

SEQ ID NO: 15154 - DNA, 793 bp, Macaca Fascicularis
  misc_feature (1)...(793): n = A,T,C or G
agatgctnnnnnnnntacaggctacatagactggtgcaagcagtgctggttccaggagtcttggcatctcatagcttgtcccgggaggagtgaacagnnnnnnnnnnnnnntgctcnnnnnnnnnnnnnnnnnnnncctctnnnnnnnnnnnnnnnnnnnnnnnnnnnnnnnnnnnnngagggtccttcggccagcacaaccttcctccctacccacggcgtggaggctgacccaggaagttccagagcctgaacagagaactgggaaggatctaggttcgcttctgctggtagcttgagtcccatgcctccgccctgccggctggggaaggggtgacaggtggtcaaggagctgtggccacagagttnnnnnnnnnnnnnnnnnnnnnnnnnnnnnnnnnngcaccacccttgtcaagagtcattgacgacagcccccctctggacnnnnnnnnnnnnnnnnnnnnnnncaggcggaagggagaaccagctcaagacattttggaggatctggccctgggggtcttcagagagcactctctaggggctttgtggacatggtctgtccccacatccaccacttgcctcctgccgtggtcactcggcagcccttttcccagaacacacctctgggagcccgctcggtgcttgtcctgccatcgtgtgtcctgagactcagggccactccagctgctctgtgttgcacactctccccctcannnnnnnnnnnnaagagctgtcccctggcnnnnnnnnnnnnnnnnnnngctgttttgtgactgttacatgtgca

SEQ ID NO: 15155 - DNA, 728 bp, Macaca Fascicularis
  misc_feature (1)...(728): n = A,T,C or G
gttcaggtcctggcttgcattttgagtgatgtggatgagcagctcacatgctcaggaccacccaagactgtcactcttctcccctggctattgggaggagtcactgagagctttgttacccttgctgccttgcccagagcacaccctatgcctccttatctgctcttcctcccctccctgctgcctcctgggagctgacagcccctggcctctctccctggctaattgctctccctcgggcagaggaggtgtgcatctggaccccctcggaacctgtcatttcccgcccagagttcttcagggccacccctctgccttggtgcagggtgcagggctctcacccaggcgccgcaccctctggggtctcctgtccagctcccttgccccacctgctgtcactgactctccttgggactcacctgcctgctcagagccctgcagggcctggtcagctgcctgttgagtgtcaacacttctctgcacatcttaaaactggggtttatttttgctgaaggaactgtggtgggacccttgacatctgtcaggtttgcacatgctgttttttttcttagcccacgtgttctgcctcacgtggggcagcagcaggacagagagtgaatcacagagtctgccctgagcagaggctgctgtccctgggactcctagccatggtcagatcattgtacaaaacagttttccagaannnnnnnnnnnnatccattttcata

SEQ ID NO: 15156 - DNA, 641 bp, Macaca Fascicularis
  misc_feature (1)...(641): n = A,T,C or G
gccttcatccaagnnnaccagaaggcggtcctcacccccaaccacatggagttcagcagactgtatgatgctgtgctcagaggccctgnnnnnnnnnnnnnnnnnnnnnnntctgtgctgagactcagccaggccctgggcaatgtgacggtggtccagaaaggagagcgcgacatcctctccaatggccagcaggtgcttgtgtgcagccaggaaggcagcagccgcaggtgtggagggcaaggagacctcctgtcgggctccctgggtgtcctggtacactgggcgctccttgctggaccggagaaaacaaatgggtnnnnnnnnnnnnnnnnnnnnnnnnnnggcgcctgctctctcaccaggcagtgcaaccaccaagccttccagaagcacggtcgctccaccaccacctccgacatgatcgccgaggtgggggccgccttccgcaagctcttcgaaacctgagcccacgcagaccagaaggaagcaggcacctcggacgggggagagcgtgtgtnnnnnnnnnnnnnnnnnnnnnnnnnnnnnnnnnnnnnnnnnnnnnnnnnnnnnnnnnnnnnactcgagcataaattggttgctgttgagaatttaagaatttggaatattgcagttttggg

SEQ ID NO: 15157 - DNA, 714 bp, Macaca Fascicularis
  misc_feature (1)...(714): n = A,T,C or G
tataaatatatggaaacacacacacagnnncagacttacaaactgattatactctaaaagtttgtatgtcacttagctaaaacttcagaatacatttctccctataaagagttataaatgatggtttagttctcaggcagctacaaatgcctatttattccctaatgtacctgaacactagtaccatagaactgaaccaccatctgtatcagtgcatggggagtgtgcattctgaggtctaacccggggtgccaggaacacacacatcctccatcccagcagagagaatggggactccctgagtaatgggagttctttcgtggcctctgcttggggtgggggagtcagcagcacccatttgtacatataggtcattcatacatcacgttttaaattgggaactgtgtgtgtgctggtgtgtgtgtgtgttctacgtttctaccatatgtgatcagtttaatagtaactttatttatttaagaaaaagaaacacaattagttactgttaaactgataaaggctgtttatttttacttttagaattggtcctatggagaaggagaaagtgagtcatgcactagacagtgggcctagctcatcaggggctaaagttgaaaaggggttggtttcctgtatatatatgtatgtatatacacacgtacatacattcatatatatacatatatacataatgtgcttaaccactgcctttaa

SEQ ID NO: 15158 - DNA, 748 bp, Macaca Fascicularis
cttcccagagcagagcatctccagggacgactacctggccgtcctcatgcacctgaacgccacctggcccaagagggtggcccagctccccctaaaggtctgccgcctggaagactttctggacaagagtgcctcgggcccgggcctggccttcatcgtcttcacggaggccgtcctccacatgccgggggctcctgcgtgggctgtgctcttcttcgggatgctgttcaccttggggctatcgaccatgttcgggagcatggaggcggtcatcacacccatgctggacgtgggggtcctgcccagatgggtccccaaggaggccctgactgggctggtctgcctggcctgcttcctcttcgccacctgcttcacgctgcagtctgggaactactggctggagattttcgacaatgttgccgcttccctgaacctgctcatcttggccttcctcgaggtcgtgggtgtcgcttatgtttacggaatgaaacggagctgttccccgcgcgccaggagaagctctacccaggctgggtgctcgccgcctgcgtgctgctgtccttgctgcccttgctgtgggtcccgggggtcgcgctcgctcagctgctcacccggcggagaatgtggagggacagggacgcgcgcccggacaccaacacgagctgaagccgccaggagtgggacggggccggggcctgcatgggcaggtctggtggtgggcggggccccgcccacagggcccacccca

SEQ ID NO: 15159 - DNA, 788 bp, Macaca Fascicularis
  misc_feature (1)...(788): n = A,T,C or G
acaccagagnnnnnnnnnnnnnngcagtcnntctggtgagcctattccattccctcctgctgcggtttcctcttggcctgtcctcactggaaaaacagtctccatctcttcaatatagctgctgactccctgcacccaaggggcctttccataccttctcaggaagcagnnnnnnnnnnnnnnnccttgtagtttcttccctcctattttctggttgtagctggtcccaggtcatcgtgggaggcacctttgggttccnnnnnnnnnnnnnnnnntagtctcatcccagattactaccccttcctgatccccaagccccggagaggcagggataggaaataaattactcttcctaccccatcccccatcccctgacaaaaagtgatggcagccgtactgagtctgtaaggcgcaaagtgggtacagacagcctgggctggtaaaagtaggtccttatttacaaggctgctttaaagttgtactaggcaaacacactgatataggaagcaggaggaaaggaagatgttttgatacagtgttactgtgagtctgtcagtagtgggtaccaatcttttgtgacacattgtcatgctgaggtatgacacctgctgcactcatatcccatgtaaaaccatcccagagctggcgagaggatggagcagggtggaaactgctttgcactatcatttgcttggtgtttgtttttaatgcacaacttgcttgtacagtaaactgttttctgtactatttaactgtaaaaaaaaaaaaaaaaaaaaaaaaaaaaaagg

SEQ ID NO: 15160 - DNA, 265 bp, Macaca Fascicularis
ctttttcccccccgcccagccggcctggagacggaagccccccggtgcagggcagttctccggttcggccggggccaggtgccaacaactaagggggggcactcccgatgccaggggtttttcccaccccggcccccaccgttcccagagcaaaataacactaattaataggaggggagggggcaaagggcttcttcttcagcccaccttttttgaggaggctcttctctttccagaggggccagcccgtggattttatttagca

SEQ ID NO: 15161 - DNA, 752 bp, Macaca Fascicularis
taattcacacatctattaggatccttaaatatccattacttagtgttaaattaacattctgtgtagagaggggaggcttattcaattcttctgacctcagaactggcaagaggtcagatgtgactacagaactctaggagaaaaatcaggtaggattcaaattaagtagaactgcccttgctggaatagtgatcttcaaaaaacccttgcttttaagggagggaagcggggaaggaaaggaatgagggaggaaagattcctttctagcattcattttgctttagatcattccattgtgagtttggccattttggagtcaaatgagcagacttccaaggagctgaccagtttgtgactcgtctgctcacttttccagttacaggatcacattaacagtgtaaatgaattcatgggtagatcatttgtgcagatctaaatttaaggacatttcctttttctgtgggaatcacaagagttcatccattaaaaaaagatatgtaaaaaagatactttccagcacataaataaaggctggaattttacaacctgatgtatatattagacagttctaggatgttagttcccttcattccagagctatgcttgtgatacagccccttttcttataaattcagttagaaggcctttcttaacaatgactattataatgttttacttaaagtatggttttatattctgtcaatgcaaatacaaaacaggttgagccttaataatcatgtaacaaaatattt

SEQ ID NO: 15162 - DNA, 743 bp, Macaca Fascicularis
  misc_feature (1)...(743): n = A,T,C or G
gggccagtgcatattagtggacagcacttagtagctgtggaggaagatgcagagtcagaagatgaagaggaggaggatgtgaaactcttaagtatatctggaaagcggtctgcccctggaggtggtagcaaggttccacagaaaaaagtaaaacttgctgctnnnnnnnnnnnnnnnnnnnnnnnnnnnnnnnnnnnnnnnnnnnnnnnnnnnnnnnnnnnttttgatgatgaggaagctgaagaaaaagcaccagtgaagaaatctatacgagatactccagccaaaaatgcacaaaagtcaaannnnnnnnnnnnnnnnnnnnnnnnnnnatcaacaccaagatcaaaaggacaagaatccttcaaaaaacaggaaaaaactcctaaaacaccaaaaggnnnnnnnnnnnnnnnnnacattaaagcaaaaatgcaagcaagtatagaaaaagcgcattgaannnnnnnnnnnnnnnnnnnnnnnnnnnnnncaaagatggggagaaaggaaaaggagagacaaatatagtccatactgnnnnnnnnnnnnnnnnnnnnnngaagtcttctattttaatctcaatccccttttctgatttgccacccatgnnnnnnnnnnnnnnnnnnnnnnnnnnnnntggttccctaaagcactttcttctgactgctgtgattcagtgaaccttgccctttgctttctattacttgtgcatttgcctcacctctgacaatgtngaagnc

SEQ ID NO: 15163 - DNA, 675 bp, Macaca Fascicularis
  misc_feature (1)...(675): n = A,T,C or G
cagagtggccnnncagaacaacagggctggccttgaaaaatccccaaaacgggactgtggtgannnnnnnnnnnnnnnntgatttgacacgagnnnnnnnnnnnnnnnnngaccgcagnnnnnnnnnnnnnnnnngcccaacgctggcagcgaggctcgtgtgtccccaggcagatctgggctctttcccaacccaggtttatgcgtctccggggaagcctcggtgccagagtggtgggcggatctgaccgtccccacagaccagacacaaggaatttctgggattacctggtcccctttcaacccagtttatgtaaccacctcattttttacaaatgcagaatctattctactcaggctttgggactctgttcctcgtcctcactcagttactgcgagtgttgctgtccgcatgctccgggccccacgtggttcctgtnnnnnnnnnnnnnnnnnnnnnnnnnnnnnntggttggaattcgatnnnnnnnnnnnnnnnnnnnnttttagattgtgtttccaaacacccttgccgtgccctttaattggattgaaagcacttttaccacatggagaaatatatttttaatttgtgatgcttttctacaaggtccactatttccgagtttaatgtgtttccaacacttaaggagactctaatgaaagccgatgaat

SEQ ID NO: 15164 - DNA, 666 bp, Macaca Fascicularis
  misc_feature (1)...(666): n = A,T,C or G
tatattgtatacaaataaaagatgttacaaaaattgtgcacttctatatatgtaccatgacataactaattctttgaacaagttgtgagacaatccttatttctgagaaaaagtagacctgttacatcatctgtgggttagggtatgttcgtgtcagcacatactaggtatgttctagcttttgtagagaaagtaaaatctagtgttgactaagtaggtgcactgagccaggtaccctgtttaacataaaaggactgatttcggggtggctgtggaagcctttccaatactcttaagtctctagccccttgcctgatccatctgattccaagagccacgattttagtctttcttggttggctttttaaaatgctttgggctttcctttaacgtatcttcaaaatcattgtggggccaaattaatcataaaaccgttacatatttctttacatatagggactgaaacaggatttttcttaactgtatcacggtccagaaatgcaaatgcaaaacccccatagtggcnnnnnnnnnnagtccannngagacaggtcaggaccaaagcataaaagatgagtaannnnnnnnnnnnnnnggtcctgtagccacgccctccatatcgccgccgcnnnggacctggnnnntcgtgagcccgctgtgtgtcat

SEQ ID NO: 15165 - DNA, 715 bp, Macaca Fascicularis
  misc_feature (1)...(715): n = A,T,C or G
caaaaagtaagnnnagtattgtttctccatgggttatttgtaaagctgtaaactgagatatcggtgactccgtattatgactccattagtgagcggtggtatgggtaggattttcctacnnnnnnnnnncttttacctgtagactatttttactaaggtgctttataatgtgttttaaagcattgcatttacaaaaaaaggaaaatgctgtaaatattgcatattttatgtatttggaccaaaaggttacaagtaattagacaaaagtggtttnnnnnnnnnnnnnnnncaagtaaaaccatcagacctactgttcttgtatttctcatttaactttactggtaagacatcactgaaatgaacttcaataagctttcaattttgatnnnnnnnnnnnnnnnnnnnnnnnnnnnnnnnnnnnnnnnnnnnaagagtactggacaaggagtcaaaaaccttgatttcaggtcctagctctaccacttaccagctgtgtgatcttgggcaagtcacttaacctctctttgcctcaatttcctcatcttgaaatgataataatacctgctgtacctacctcacagggctgttgtgaggattaaatgagatggcatgtgaaagcactttgaaaatnnnnnnnnnnnnnnnaaatgtaaggtattattatagaaacatctttaacatatagtttcatagcattccttttttaacaaagaaa

SEQ ID NO: 15166 - DNA, 908 bp, Macaca Fascicularis
  misc_feature (1)...(908): n = A,T,C or G
tatatannnnnnngcccattgacgagtactgtgtgcagcagctcnaggagtttgatgggaagagcnnnnnnncagttaccaaggagggnnnnnnnnnnnnnnnnnatgaggaggagaagaagaagatggaagagagcaaggcaaagttagagaactttgcaagctcatgaaagaaatcttagataagaaggttgagaaggtgacaatnnccaataggcttgtgtcttcaccctgctgcattgtgaccagcacctatggctggacagccaatatggagcggatcatgaaagcccaggcacttcgggacannnnnnnnnnnnnnnnnnnnnnnnnnnnnnnnnannnnnnnnnnnnnnnnnnccaccccattgtggagactctgcggcagaaggctgaggccgacaagaatgataaggcagttaaggacctggtggtgctgctgttnnnnnnnnnnnnnnnctcttcaggcttttcccttgaggatccccagacccactccaaccgcatctaccgcatgatcaagctaggtctaggtattgatgaagatgaagtggcagcagaagaacccagtgctgcagttcatgatgagattccccctcttgagggcgatgaggatgcgtctcgcatggaagaagtcgattaggttagaagttcatagttggaaaacttgtgcccttgtatagtgtccccgtggctcccactgcagcctcaagtgcccctgtcccacctggctccccctgctgatgtctagtgttgtttttcctctcctgtccttgtgttgaaggcaggaaaccaagggtgtcaagccccattccctctctactctgacagcaggattggatgttgtgtgttgtggtttattttattttcttcattttgttctgaaattaaagtatgcaaaataaaga

SEQ ID NO: 15167 - DNA, 667 bp, Macaca Fascicularis
  misc_feature (1)...(667): n = A,T,C or G
acacttcctagctcttgacttagcttagagcttttaaaagagcagacaccttacatatttgagtttgaaaaagtttctgctattaatcagaaataatcatttctattttctggcttaccccttggaataagccaaaaataaaaccaaagttacatttcctgacagatggatgagaaaacaatagaaggaacgtcctgaattctagagttgactcttgctggtgaagtacaccttcagcttagtccatactcctaagtaaagcccgaaggaaaactcttaacacctaattctttgtggaaaaatgatcaactagccatttcataggttatagaacaaaagtacaattgggcatctttccttatgtcctgggatcaggggtgcttatatttaacattgatcaggtaaagaggagaggctgtgcctaaggtctgagaaacagcttgctctaaagcaagctgtggtgaggcacacaatgactaggggatggcagagaacaggctggcctnnnnnnnnnnnnnnnnnnnnnnnnnnnnnnnncagtctaaaaagccccaaacagaacacctccatgggttcagggaagggctgaggcactgcctttctagtatgtgccaaaaaatacnnnnnnnnnnnnnnnggcccgggggactttgagtttggatggggg

SEQ ID NO: 15168 - DNA, 755 bp, Macaca Fascicularis
aaaaaacgcaagcctgcgtggaccgatcgcatcctgtggaggctgaaacggcagccccaggctggccccgacactcccagactgccggccccagacttctccctgtctctgaggagctacagcagccacatggtgtacagcatcagcgaccataagcctgtcaccggcactttcgacttggagctgaagccattggtgtctgctccgctgattgtcctgatgcccgaggacctgtggaccgtggagaatgacatgatggtcagctactcgtcaaccttggacttccccagcagcccgtgggactggattggactgtacaaggtggggctgcgggacattaatgactatgtgtcctacgcctgggttggggacagccaggtctcctgcagcgacaacctgaaccaggtttacatcgacatcagcaatatccctgcaactgaagatgagtttctcctctgttactacagcaacagtttgcgttctgtggtggggataagcagacccttccagatcccgcctggctccttgagggaggacccactgggtgaagcacagccacagatttgagccaggatgggagtgaatcccaggaggaggccagagctggcagccagctctgcctttcgactgccaggagtgctgggggcccagcctgaccccctgaagagacagccaagtgtcctccgcatacgcctcccagagtgagctctagccagactcctttgctctctccactactcatctcggaatagcca

SEQ ID NO: 15169 - DNA, 739 bp, Macaca Fascicularis
  misc_feature (1)...(739): n = A,T,C or G
gggttatannnnnnnnnnnnnnnnnnnnnnnnnnnnnnnnnnnnnnnnnnnnnaaaaagataagagcacgaactgctttggagataatgatcctattgatgtttgtgaaataggctcaaagattctttcttgtggagaagttattcatgtgaagattctcggaattttggctcttattgatgaaggtgaaacagattggaaattaattgctatnnnnnnnaatgatcctgaagcctcaaagtttcnnnnnnnnnnnnnnnnnnnnnnnnnnnnnnnnnnnnacctagaagctactcttaattggtttagattatataaggtaccagatggaannnnnnnnnnnnnnnnnncttttaatggagaattcaaaaacaaggcttttgctcttgaagttattnnnnnnnnnnnnnnnnnnnnnnaagcattgcttatgaagaagtgtaatggaggagctataaatnnnnnnnnnnnnnnnnnnnntnnnnnnnnnnnnnnnnnnnnnnnngaggaagcaagatcattagttgaatcggtattatcttcaccgaataaagaaagtaatgaagaagagcaagtatggcacttccttggcannnnnnnnnnnnnnntgaaattctgctgtcaagattcccatctctaaggactccaagactctttttccccaagtgctaaggggatctgtgagcatttactgacttcctgttaaaacttcagttcctcaaacttttgagctatgcaa

SEQ ID NO: 15170 - DNA, 739 bp, Macaca Fascicularis
  misc_feature (1)...(739): n = A,T,C or G
aagcaggacacagaccagggctttgcttgccatatacattatctnnnnnnnnnnnnnnnnnnnnactccctattcaaggcctgttggagcagattgcaaaagcaaaagcacagtaactcaatttacacatgattataatcatttccagtacacacatttcatcaccaggtggatcctgagttagcccatgtaaannnnnnnnnnnnnnnnnnnnnnnnnnnnntcaaaagcacttttcaccctacattctactagccaatcaaagacaaagagttgtggcctctaccattgccttggcttctgaacaccctcacaggctatcccaaggttcccgctcaactccagggannnnnnnnnnnnnnnatccactgggcatatgatattgcatgagaccaaagtctccacattgtttgaagcctcctccatgaatcccaatggcctgcacttgtacagtttgggtgtttgatagataaagcacgtatgagaagagaaaacaaaataaatcaactttttaaaaaagccagcactgtgctgtcaatgttttttttttcttttcaattctagcttaaaaaagcagaaggtaaataatgtcaggtcaatgaatatcagatatattttttgactgtacattacagtgaagtgtaatctttttnnacctgcaagtccatcttatttattcttgtaaatgttccctgacaatgtttgtaatatggctgtgttaaaaaatctatacaaaaag

SEQ ID NO: 15171 - DNA, 709 bp, Macaca Fascicularis
agagaagtcagctccactgtcctgtgcccaaggctggtgcttctcctgtagattactcctgaactgtgtccctgagactgcccagacgggaatcagaaccacttctcctgtccacccacaagacctgggctgtggtgtgtgggtcttggcctgtgtttctccgcagttggggtccaccttcccaagcctctggacacttctccctccaggattgtgaaaacaagtgaaaacaaaattagagcaaagctgacctggagccctcagggggcaaaacatcatctccacctgactcctagccactgctttctcctctgtgccatccactcccactaccaggtcgctttggcctgaagaacagcccagtctcctgctgtccccacccatttggatcataggaagtagaggagccagaggtgccttcatggagaacaacagtggctgctgggagagggctgtggaggaaggagcttctcggagccccctctcagccttacctgggcccctcctctagagaaaagctcaactctctcccaacttcaccatgtaaagaaaataattatgaatgccgctgaggcactgaggccctacctcatgccaagcaacgggttcaaggctgggtctagggaggatgctgaaggaagggaagtgtgagaccataggtccaaagcaccgtccttgtactgttgtcactatgagcttaagatattga

SEQ ID NO: 15172 - DNA, 702 bp, Macaca Fascicularis
  misc_feature (1)...(702): n = A,T,C or G
cgctgtgggcaacggccacatggcagggnnnctgctgnnnccaccgccgccagcccagcagtcntccactctcnnnagtggtgcccctgccaccaatgggccccccacaactgactcggcccacgggctgcagatgctgcggaccattggcgtggggaagtatgagttcaccgacccagggcaccccagaggattttacatctttgaagcccaattgatttcacactcctaaatgacagacagctggctccaggcgggaacaggaggctcnnnnnnnnnnnnnnnnnnnnnntcagaactccactttggaaaagaaaagaactttccttttctcctgttctctgtttgaaaccttgcccagcattataataagatcctccatgcaacgccttgagatctagctcattaaagtccttgattttcccggctattgtttgacgtgacaacctggcctctcccagggttgagtaattatggggagattcccctccacgaagaacaggtcttgctagccagagggatgggccactggtatttttagacttcattagtgccctgatttaaaatttcacattttgtttcttgtaattatcttccgatccactgagctaaaatttcagttggggtcctattagtctgcttttccaaaaagggcatcgggactttaatttaaaacttaaccagctgaaaaataaaggtggc

SEQ ID NO: 15173 - DNA, 695 bp, Macaca Fascicularis
  misc_feature (1)...(695): n = A,T,C or G
tgatgctcaaggcnnngnccccagccctgcaganccngccatgtgtgcccccggggntnnnncgagctgccaggccaaggctgcccgtcgtgcaccaccaccaccaccaccnnnnnnnnnnnnnncctggggccgccactgtcctccagcccgcccccaacccgtggacgcccggcccaccctgagttgtggcgccggcnnnnnnnnnagcctcaggtccccctcttccatcacggaggtaaagttgaggccgtggacactaccagactaatgatcctgaaataaagatttcatccggaaagagtttaagaaaacctcagctcagaagccagaatcgggaagatcaatagctttagccacatggaatgtaaacatcctgatgggaaaaataccacaaagtcaaatttagtaactagggacacccgtttatcacagctgtggagcagactcccactaaagnnnnnnnnnnnnnnnnnnnnnnnnnnnnnnnnnnnnnnnnnnnnnnnnnnnnnnnnnnnnnnnnnnnnnnnnnnnnnnnnnnnnnnnngnnnnnnnnnnnnnnnaagactccgtctctacaaaaagtaaattaaaaaaactagtcaggtgtggtgatatgcacctgtgatctcagcggttctgggggctgagatgggaggattgcttgagcccaggagttagaagctgcagtgagc

SEQ ID NO: 15174 - DNA, 687 bp, Macaca Fascicularis
  misc_feature (1)...(687): n = A,T,C or G
taggctnntannnaaaagcggcccctnnnnncctgtggccacagagcacaaggcgtgcttgaattcttgacaagcagacctgctcctgcagaggagacagccacatttggaactgggcacaaagaagacctgagaaaaacccactgtnnnnnnnnnnnnnnnnnnnnnnnnnnnnnnnnnnnnnnnnnnnnnnnnnnnnnnnnnnnnnnnnnnnnnnnnnnnnnnnnnnnnnnnnnnnnnnnnnnnnnnnnnnnnnnnnnnnnnnnnnnnnnnnnnnnnnnnnnnnnnnnnnnnnnnnnnnnnnnnnnnnnnnnnnnnnnnnnnnnnnnnnnnnnnnnnnnnnnnnnnnnnnnnnnnnnnnnnnnnnnnnnnnnnnnnnnnnnnnnnnnnnnnnnnnnnnnnnnnnnnnnnnnnnnnnnnnnnnncgcgcctggccgaaaaacccactctcataacagaagtgcagactcattgccagattcagtgcccttgagtgtgccagggtgctttgtgtttgggacaatcctgtgtgtgccaggaggctccgtgtgcaccaggggctctcagattcccgcttacccagctggaggccatggccctggcagccccatatcagccagccctgctctctccctcctcccaccaggtgaggcaatcttcataggaaccnnacccgaatgtgagctg

SEQ ID NO: 15175 - DNA, 1201 bp, Macaca Fascicularis
  misc_feature (1)...(1201): n = A,T,C or G
caagaagctcacccaggaacaagtanctgacagtcaagtcctaattcgaagcagagtcctcagggaaaatggaaaatacattcccaaacagtctttcttgacacgaaaatattacttcaacaacccagaggatggatttttcaaaaaaactaaacggaaggtagtgccaccttctcctatgactgatcctactatgctgacagacatgatgaaagggaatgtaacaaatgtcctccctatgattcttattggtggatggatcaacatgacattctcaggctttgtcacaaccaaggtcccatttccgctgaccctccgttttaagcctatgttacagcaaggaatcgagctactcacattagatgcatcctgggtgagttctgcatcatggtacttcctcaatgtatttgggcttcggagcatttactctctgattctgggccaagataatgccgctgaccaatcacgaatgatgcaggagcagatgacgggagcagccatggccatgcccgcagacacaaacaaagctttcaagacagaatgggaagctttggagctgacagatcaccagtgggcactagatgatgtcgaagaagagctcatggccaaagacctccacttcgaaggcatgttcaaaaaggaactacagacctctattttttgaagactgagcagggattagctgtgtcaggaacttggcattgcacttaaccttgtaactttgtttggagctggcacctctcagaataaaaaggaggatgcaagagctggcaggcatgcagcaaggcttgttcttgtctgggctgggttcccctttatgtttgaaactagaggaaataggagtatgctgggcaacttgttatttttaaaatgttgtaaatgttccttttggtgactctagtaatgaaagtcagagaaagggggaaacctcaagctactgataatatataaaatcttggccgggcacannnnnnnnnnnnnnnnnnnnnnnnnnnnnnnnnnnnnnnnnnnnnnnnnnnnnnnnnnnnnnnnnnnnnnnnnnnnnnnnnnnnnnnnnnnnnnnnnnnnnnnnnnnnnnnnnnnnnnnnaaattagctgggcatggtggtgggcacctgtaatcccagctgctcaggaggttgaggcagagaattgcttaaacccaggaggcggaggatgcagtgagctgacatcgcaccac

SEQ ID NO: 15176 - DNA, 771 bp, Macaca Fascicularis
  misc_feature (1)...(771): n = A,T,C or G
agtggtcaatcatttgtgacatnnncagcagcagacaacatagaaatgcttcctcattatgagccaattccattnnnnnnnnnnnnnnnnnnnnnnncnnnnnnnnnnnnnnnnnnnnnnnnnnnnnnnnnnnnnnatcccaaccttgaagaaagtcctaaaagaaaaaatattacatatgaggaattaaggaataagaacagagagtcatatgaagtatctttaacacaaaagactgacccctcagtcaggcctatgcatgaaagagtgccaaaaaaagaagtcaaagtaaacaaatatggagatacttgggatgagtgaaaaattacatcattggacctactgaaggagtttcaacatcccgcttcatctaggtggnnnnnnnnnnnnnnnnnnnnnnngatcagcagcagtcttcataaacacatttaaaacaagatcctgggtttttgtggtttgacttctctggcgtgttaaaaaaaacgcaagatttatagtgttaatattgtgtaaatgtccttaccttggggattcatttgaatgatggtattataccatgactgtatacagtttgtgaaattgttgcaagggcaaagacactcataaaaccagcaagagattacagtgctctagaatcagcatatatgaaaataaatgatatctgcatgttgaattggggtgggtggggggagcaagcataatttttaagtgtgaagctttacattaagaaattattaaaaagcttttttcctccggtatttgctgtattat

SEQ ID NO: 15177 - DNA, 983 bp, Macaca Fascicularis
aagaagagcatggtagacacacagccaactacatatcgggaacagtgtacactgctcaggtgacaggtgcaccaacataaacaatgaaatgtaatacattcttatccatgtaacccgaaactacctgttccccaaaagatgcaactgtgaaagttccttttcttaagaaatgcaaggaagcaggacttcttaattacttacttgaagaaatattagacaaagttcattcaattccagaaaaactcatggatgagactacttcagaatcagactatgaagaaatcgggagtgcactttttgactgcagattgtttgaagacacatttgtaaattttcaagcagcaatagagaaaaaaattcatgcatctcaacaaaggcggcagcagttgaaggaagagattgagctacttcaggacttaaaacaaaccttgtgctcttttcaagaaaatagagatcttatgtcaagttctacatcagtatcgtccctgtcttattagggattaccatttcctaagccaggagtcaggctaaattgcaattgggctcaaaaccagagaccaggctgtgaaatccacacatctttagaactagtcatttcctcttggccccggcagctcttccatgttcttgctagttgatattttgatcattctttgcacactcttacttgtgttttttgttcactgtcacattcccagcacctaatatgctcagtaaatgtttgtagaataagtgcataaaatgttattaacctttgattctagttacagcccatgatgcttcttagatataataaatttggattatattactttacttgtaccaaatttgcctgttttcgtgtcacaaagtctgcttttgaaaaatcccttttcagccatagttatcatgttgggattcatcatcttcaaaacaaatacctaaattttaaactggactctgaataagaacattaccaggagtatgcaagaagaaataaaatg

SEQ ID NO: 15178 - DNA, 220 bp, Macaca Fascicularis
gaatacagaatagggaagaagaacagagaggacaaaagaccattagaagagaggttcttaatattagacagatggagagtggcttggatgtttccccctacatattggggctgaaaacttaaatgtgtagttccagtcattgtaagcagaaagtctctgatgccctccctcgttcctgcaggcaaatgtgccacatagggcatgttccctcaccaagtat

SEQ ID NO: 15179 - DNA, 727 bp, Macaca Fascicularis
  misc_feature (1)...(727): n = A,T,C or G
taacgagtattcactcttcccctgggagttgagcacagtggagggcatgagagcnnnnnnnnnnnnagctgcagtcaaccacgagggtgatcagaggccagtgaaggcttatgggcaggggatgcagggaaaatggctcaggggaagaaagtgcctccaattttcctttgccatcccaggctccatgtctgggcatgtaaggaaggaagtggggacagattcctgtctctaatccaggcctgagaatgcttgaattctcagtcaaatcagtcttcctagatgggatattgggagtgtcgtctgctgttaagacctgagtggcctgactgggtggttgtgaggatgcaaggagaaaaggtgcaccaaagtgcttcccaagttggggagaccattcctgagagccaggtgactgacccccaccatggctgtttccctccaactctnnnnnnnnnntgcgcactgggaggcagtccccagtgagatcctgaccctgcacagccctcagtggcttcacatctcttgggcagtgtcttcattctccccaccagggacctgggatgtttgtgacttctagaagcccttcctcaccctcacaatggaccttagccccttggtagtcccacccacatcccatctccattgcagtctgagctccaagactgagtttcttcaagcatccacttgtgctaccaggctgagaagttctgaggatgtgaccccatctggg

SEQ ID NO: 15180 - DNA, 433 bp, Macaca Fascicularis
  misc_feature (1)...(433): n = A,T,C or G
caccaccaccaccccccacccaactggggcttaaggggggaagatttcccctttagatcaaactgccccttccatggaaaagctggaaaaaaatctctggaacccatatccagacttggtgaggttgctgccaacagtcctggcctcccccatccctaggctaaagannnnnnnnnnnnnnnggaggagaggacccctcccaaaggactggagacaaaaccctccgcttccttgggtctctccaagactccctggggcccaactgcgttgctccacccagacccatctctcccttctagacctgagcttgcccctccagctagcactaagcaacatctcgctgtggacgcctgtaaattactgagaaatgtgaaacgtgcaatcttgaaactgaggtgttagaaaacttgatctgtggtgttttgttttgttt

SEQ ID NO: 15181 - DNA, 1181 bp, Macaca Fascicularis
  misc_feature (1)...(1181): n = A,T,C or G
aggggaaagatacaagattgatttgtaaaacccttgaaatgtagatttcttgtagatgtatccttcacgttgtaaatatgttttgtagagtgaagccatgggaagccatgtgtaacagagcttagacatccaaaactaatcaatgctgaggtggctaaatacctagccttttacatgtaaacctgtctgcaaaattagctttttttaaaaaaaaaaaattgggggggttaatttatcattcagaaatcttgcattttcaaaaattcagtgcaagcgccaggcgatctgtgtctaaggatacgatttttgaaccatatgggcagtgtacaaaatatgaaacaactgtttccacacttgcacctgatcaagagcagtgcnnnnnnnnnnnnnnnnnngagaaatgtttttcatttcccgtgtgttccatttccctctgaaattctgattttatccatttttttaaggctcctctttatctcctttcttaaggcactgttgctatggcacttttctataaccttttcattcctgtgtacagtagcttaaaattgcagtgattgagcataacctacttgtttgtataaattattgaaatccatttgcaccccgtaagaatggacttaagagtactgctggacaggcatgtgtgcttaaagtacattgattgctcaaatataaggaaatggcccaatgaacatggttgtgggaggggaaagaggaaacagagctagtcagatgtgaattgtatctgttgtaataaacatgttaaaacaaacaaaaattgttatttttcttttccttcggtcaatgcacattagaatttgaactacctgggtattctttatccgaactgttcttgttgaatatttatactttattgaaataattccttaagggaggttttgtttaaaacgtattaacaggaaattgtgtataagatatttaatgaaataagaaattcaacaagaatgattaagtcacttcccaagtggttgtcatttgttaaaccctggnnnnnnnnnnnnnnnnnnnnnnnnnnnnnnnnnnnnnnnnnnnnnnnnnnnnnnnnnnnnnnnnnnnnnnnnnnnnnnnnnnnnnnnnnnnnnnnnnnnnnnnnnnnnnnnnaattggnnnnnnnnnnnnnnnnnnnnnnnnnnctaggaaagcgnnnnntnnnatat

SEQ ID NO: 15182 - DNA, 734 bp, Macaca Fascicularis
  misc_feature (1)...(734): n = A,T,C or G
caggnnnntgccaagcccagaggggccactataggtagatgcccgcatgctgaacgggtgcacaccnnngcnnnnnnnnnnttggtggggagggagtggcacaacatccactccctgcaacccctttcccaacttgccttttcccgtgtcctctgatcttgcttctctccattctccttatcaatcccttgtcctttnnnnnnnnnnnnnnnnnnngatctnnnnnnnnnnnnnnnnnnnnnnnnnnnnnnnnnnnnnnnnnnnngggatcctcggggctccatctctttccatttggaagccggagtcataactgctgcagtttgggcccaggctgtgtgttcttctggtgccctagggactgctgtggccagagcctggggccagccagtacagtcctgagctgaggaggagggacagcaagtgagagacagccagtctggaaggaagagctttccaggtggacagggattcttggaagatccccaaagtcccaggtatcctgggtgaagcctgtttgcctctcttgaaaatggcaggtgctcttgtgtgtgcccatgttgggtcaggctgaaactgccaaccagtgggaaacatggactctcctgagtgagaagagactgaaataggagcaagcagaaccctgaggggtgtcccatcttattgctgttgaggacccttaaacactgctgtttaaagacttcacagggaaggttctgaactgagccactggg

SEQ ID NO: 15183 - DNA, 597 bp, Macaca Fascicularis
  misc_feature (1)...(597): n = A,T,C or G
ccccagcaatatggacattattgttacaaccagcggcctccttacggttagtnctgatagaaatgttggcagcttttagtaaaagcatttactctgttaccatgacaaaagtttgggtgtattcatgttggtcatagttttatatctgattttagagaatggattattgattttgtggaagttgagactttaaaaaaaaatagatcttacttgcgagatgcgatggttgctgggaatacctgaagttgtggattatattgcttgacttctacctcagaatcttctttatttcatgacttaataatgctatgagtttggtatattatttgacctctaggagttctttgttttacacagaaataaaaatttttaaatagaaaatgcttacttttactttgtaaggtaagatgagttatacatatgattagatgtgttcgtttctaaaattctagaggttgatataatcagctcatgaatgcacagctatgcttcttgtgatagattgtacataannnnnnnnnnnnnnnngtaaaacaatcgcttttttttttgcttttgcttttgtaaagtactagtggtactttgtgattccttact

SEQ ID NO: 15184 - DNA, 728 bp, Macaca Fascicularis
  misc_feature (1)...(728): n = A,T,C or G
ggtgtgtaccaagagggaattgatctgctcctgcaggttctgaaaggtaccaaagataatactaagagatgtaatctcagagaaaaaatttccaaatacatggacagagcggaaaacataaagcagcacttggagcaagaaaaagaagatggaaaatatcacaagcaaattaaaatagaagagaatgcaacgggtttcagttacgagtcactttttcgcgaatatcttaatgagacagttacagaagtttggatagaagatccttatattagacatactnnnnnnnnnnnnnnntttcttcgattttgtgagctgcttattaagaggccatgtaaagtaaaaactattcaccttctcacctctctggatnnnnnnnnnnnnnnagtgcagcaaagtaggnnnnnnnnnnnnnnngaagagtcactcaggagccatggagnnnnnnnnnnnnnnnnnnnnnnnnnnnnnntacatgaccgagaaattaggttcaacaatggatggatgattaagattggaaggggacttgattattttaagaaaccacagagtcgtttttcccttggatattgtgattttgatttaagaccatgtcatgaaacaacagtggacatttttcataagaaacatacaaaaaatatatgatgggcagtagcctaatttgtattatgtctactttatgtgaatattggattttttttaaaannatcacttttataatgtatgaa

SEQ ID NO: 15185 - DNA, 709 bp, Macaca Fascicularis
  misc_feature (1)...(709): n = A,T,C or G
tcactactgtnngtggagaacattnnnnnaacactgttagatagtncnnnaaggagacnnnacggtaatgaacacatggcactggggcagaattcacatgcattttgtaacatccagtgtggcatggaatagatgtgtatttcctcccctaaagaaaataagcacagaaaattatattgtaggtgatcggagctctttcctttgatagaaagaacagccccaatgatcctggctttttcactgaacatatcagaatacatggatgagttggggttaataaggttttcattcagatgtagaagaaagtatcgtacaattgaatgcagatttttatccacagacagttgtagtgtttagacgtgacaggacctatcgttgaggtttataagacttactatgggctgtaaacctattttttaaaactctttttagaaacctgagacttgtcatctggcattttagtttaatacaaactaatgattgcatttgaaagagattcttgaccttatttctgaacatctaaagctctgaaatgtcttgatggaaggtattaaactatttgcctgttgtataaagaaatgttaagactgttgtgaaaagaattactgtaaggtactgtgaaatgactgtgatttttgtgagcgaaacatacttggaaatactgaattgatttttatgcttgttaatgtattgcaagaaacacagaaaa

SEQ ID NO: 15186 - DNA, 889 bp, Macaca Fascicularis
  misc_feature (1)...(889): n = A,T,C or G
aatcaagaagaaagtgaggaagtnnnnagatcagaatgagtatgaatcccgcagcctttggaaggatgtcactttcaacttaaaaatcagagacattgatgcagcaactgaagcaaagcacaggcttgaagaaagacaaagagcagaagcccgagaaaggaaggagaaggagattcagtgggagacaaggttatttcatgaagatggagaatgcnnnnnnnnnnnnnnnnnnntactnnnnnnnnnnnnnnnnnncaagcattaggttggaagatgcaaagtttatacnnnnnnnnnnnnnnnnnnggcataattcagcaacaaacaatcttcctttgggagaaacctgttcactcccttctaattacagtggttcctatctcagggatactggactttctgacgcaaatgaacaattaaggggaaaagcttcccttttccctctgtggcagttacgattttgatttcagtcctgagaaaaacttcaggttttgaaaannnnnnnnnntcttctccttttccaaacaccacacgttgaaagcatttataaatccaagtctgaaactgcactctagttctgctgttaagatatacaacctgtttcttagttcatataatctcgggatacacacacatacacatacacacacatacatatatataaaatatacctgatgccagattttttcataaatattctgcctactgtaaatatgggttcctctgagttgttttagaaaattagtgcaatgcattaaaatcaagtgttaggaaatttcatggtcttacttaaaataacttttattttggaactgaactattattaaattgtatctaatcctggattacagtttaattaattattcttagtgcttcnnaaggcttcata

SEQ ID NO: 15187 - DNA, 638 bp, Macaca Fascicularis
tttccagatcccaggcccattcctgggatctctccaatgggacctgtcctgtgctctgggctcatctcaggtctgaccaggagatggaggatgtgtccttggcagagccaatccttgtggggaaacagaggtttctgggtgccatggcaggctgtcggggtccaggtggcacccatgggccccctgccccatgtgaatgctgctggcacctggcggggggtacccagggatggaccctgggcatggcttctgggctgcttagtccagggggaacaacttgtggtcaaatccatgagttcagaggaaaaggggaaggtgctgaaatgtcaccagagagacagctgttgagagtactcagaaaccctctagctgtcacactctgccctggccctggctgccatgtggtcagggcaccatgagggtgtgcaggtgtgcagtttcctcaaagcctcgcaggtgccctcactcactgcccgggcctctgcccagcagcctcaaggacaggcctttctccctcatggttgtggacaggaagtcacaccactggcctgcgagagcttctggtgggccacatggcttcccctaattatctgctaaggaaaaccgtgctcttcgaacggcagagccaagaagtcagc

SEQ ID NO: 15188 - DNA, 742 bp, Macaca Fascicularis
  misc_feature (1)...(742): n = A,T,C or G
ggagtgtgatccaacacagactgagtaccaaggaatgattgagattgtggaggagggcgatatgaaaggtgaggtctatccatttggcatcgttgggatggccaannnnnnnnnnnnnnnnnnngaaaggggagagcgtcaagttccaattgtgtgtcctgggnnnnnnnnnnnnnnnnnnnnnnnnnnncatcacacccctgcgtagggccacagtggaatgtgtgaaagatcagtttggcttcattaactatgaagtaggagatagnnnnnnnnnnnnnnnnnnnnnnnnnnnagttcaggatggcattgagctacaggcaggagatgaggtggagttctcagtgattcttaatcagcgcactggcaagtgcagcgcctgtaatgtttggcgagtctgtgagggccccaaggctgttgcagctcctcgacctgatcggttggtcaatcgcttgaagaacatcactctggatgatgccagtgctcctcgcctaatggttcttcgtcagccaaggggaccagataactcaatggggtttggtgcagaaagaaagatccgtcaagctggtgtcattgactaaccacatccacaaagcacatcattaatccaatatgatcaagttggggggaatctggtgaagggttctgaatatctccttcttcatccctcccgaaatctgaaatacttattctattgagctattacaccagttttaacaccttcctcgtgttatgttaaaaa

SEQ ID NO: 15189 - DNA, 580 bp, Macaca Fascicularis
agttcaaccaaaataaaattgggaggtttctcttgtttcgatctagctcatgctttctttgcggtgtttgaacagtagtctgttaacttagtaggtggtacctggaaaggtattttaagtgtagtgactgtttaataaatagttaattggatgatggaggaggagaaattgttttcttcccaggattctctttgggggtcattttgagtgacagatacattttagacattcggagaaacagtttcagatcctgccaggatatttttgtaaaaaaggataatggaaggtttcagtattctagaaacagtacatatgtaagacgctgacacagaagataatgtgacttttcttttcagcttgtcaagagggtggccaataaaacttaaaaggtgtggttagatggtttttcacttttgtgacattaatttatcagtgagtgtcattcaacccagtaatctaaaattctgtgcaaattctagcagtatgtttttgataacttggatgttaggatagccaatatgtacaaaaaattaaatcaagtattttgtcctatgtataacacaaattaattttacacaga

SEQ ID NO: 15190 - DNA, 777 bp, Macaca Fascicularis
  misc_feature (1)...(777): n = A,T,C or G
caacagnnnnnnnnnnnnatgtatagacatgggaacnnnnntcagcatcaaaaaaggaaacattctgcatgcccatatccagaaaaatccccactcgctgtagcttgccatctacgaagaggannnnnnnnnnnnnnnnnnnnnnnnnnnnnnnnnnnnnnnnnnncaaactcacagtccagaatccacgctctgtggtcagctggatcctccctttgcggtgaacagattctctgcagactcccaggtcccattctgtgcttgttcccacgtccacctcccagtagtggcggccacaggtaaagcgaggggagcccaggacacaaatnnnnnnnnnnnnnnnnnnngcacggtcttgccaattgtgtctgatgtgcccactttggacgctnnnnnnnnnnnnnnnnnnnnnnnnnnnnnnnnnnnnnnnnnnnnnnnnnnaggtcatatccactgtgaaaaggaaaacaagtnnnnnnnnnnnnnnncagaagcccaccccatgcctctcctctacttcgcaggcccagatatctgactttggtttaattctcttcttcccccaaaatcaaagctttnnnnnnnnnnnnntccctgactggttcagattctcacaggtatgctttgtggcaatacctgactcttattcacagtagcaattcttatttgactttatgtcacgtgtttgcttcattgaacttttcttcatttagagtggaggnnnnnnnnnnnnnnnnnnnatgacccccaccttgatgcgtggataaataaatgata

SEQ ID NO: 15191 - DNA, 750 bp, Macaca Fascicularis
  misc_feature (1)...(750): n = A,T,C or G
agatggcagcaaaatcctggctaccactccttcagctgtctttcgagtctgggaggcccagatgtggacttgtgagaggtggcctactctatcagggcgctgtcagactggctgctggagcccagatggcaaccgactgctgttcactgtattgggagagccactgatttactccctgtcttttccagaacaatgtggtgagggaaaggggcgcgttggaggtgcaaagtcagcaacaattnnnnnnnnnnnnnnnnnnnnnacaatacagannnnnnnnnnnnnnnnnnnnnttgggggagaggctcactccatggtctgggaccccagtggggagcgtctggctgtgctcatgaaaggaaacccaagagtacaggatggtaaaccagtcatcctccttttttgcactcgaaacagccctgtgtttgagctccttccctgtnnnnnnnnnnnnnnnnnnncaggagcccagccccagctcatcactttccatccttccttcaacaaaggggccctgctcagtgtgggctgnnnnnnnnnnnnnnnnnnnnnnnnnnnnnnnnnnnnnnnnnnnnnnnnnnnnncacgttttagcccagtgcttggccgggcccaagaaccccctgctgggggtggaggnnnnnnnnnnnnnnnnnnnnnntttactgagacatccccaacctctgccccttgggaccctctcccagggccaccacctgttctgccccactccccacattcccacctcta

SEQ ID NO: 15192 - DNA, 721 bp, Macaca Fascicularis
  misc_feature (1)...(721): n = A,T,C or G
ccgggaggcccgcttcnggcgcagctacgggtcggcgcacgcggcctcgnnnnnnnnnnnnnnnnnnngccatggagggcggcttcggctccgatttcgggggctccagcagcggaaagctggacccagggctcataatggagcaggtgaaggtgcagattgccgtggccaacgcgcaggagctgctgcagaggatgacggacaagtgtttccggaagtgtattgggaaacctgggggctctctggacaactccgagcagaagtgcatcgctatgtgcatggaccgctacatggacgcctggaacaccgtgtcccgcgcctacaactcgcggctgcagcgggaacgagccaacatgtgactggcaagcccgtgggccgccccgccccgttcttttccacaaacgtgctctgagaggcggggcccgcatgtgcgtactgcctgcccggggcttagcggggtggcaccggtgctgggacagacgggactgtgtcctcgccaccccccgccttgccccctgccagccagtgcagcttggatctcgggggtgggggggccctgtgccttcccaaagtgctggcagcccagtggcacctccttcaggcctttggggtcttcccctagtgggcccaggtcagcctcatattttttgggcggagaactcttgtctggactttggaggtgggggtggtcagaccccaccggagctgtcacctcctgcgg

SEQ ID NO: 15193 - DNA, 707 bp, Macaca Fascicularis
  misc_feature (1)...(707): n = A,T,C or G
agggccatgattggacacactgattcggctgaggctgccccaggaaccataaggggtgacnnnnnnnnnnnnnnnnnnnnnnnnnnnnnnnnnnnnnnnnnnnnnnnnnnncaggggagcaacagatggtccctgggactcctcagggtgcacatgaagcctgagcctcaccttgctnctgtcactggcacaggaatgtcatccacgccagagactctgtggagggggcccagcgggagatccagctgtggttccagagcagtgagctggtgagctgggcagacgggggccagcacagcagcatccactcagcctgaggctcaagctgcccttaccaccccagcctccacgcaggaacaactacctctgtcagcaagaacccaagcccacgtccatccctgcctatcccaaaccacttacttccctgttcacctctgccccagcccagcccagaggagtttcagccacnnnnnnnnnnnnctttctgtaccccaagccagcacaagattggaccaatccgttttgcaccaaagtgccggacagcctttgtggtgggagggtcttcgaaagttatcctaacctttcctccaaaggggaggcatnnnnnnnnnnnnnnnnnnncacatgggtggtacattaattatgacttccgccaactctgaggtagaaatgacgctttttatgcaagttgtaaagagtgaagagta

SEQ ID NO: 15194 - DNA, 733 bp, Macaca Fascicularis
  misc_feature (1)...(733): n = A,T,C or G
aagatnnnnnnnnnnnattttnntnnncatnnnnnnncnnnnnnnnnnnnnnnnnnnnnttgacttaaaggtatcatttgaaaaataccataatggcatttgagactgaatttctaaaaattgaatgccaaagtacaagtagaggagtttttgactttatatatatcacacacacacacatttatgatgcagatgttttcaggctgcttaccttaccatgtagtggtaactattcatttcttcacttatgacctcaatcaatttaattgtctagaatgtaaaaagtgtttaagacataagaattcctcggagaagccatatattttttaaggtggggattgacttttattccaaggaacaacatcagttcgctgctgttggannnnnnnnnnnnnnnnnnnnnnnnnnnnnnnnnnnnnnnnnnnnnnnnnnnnnnnnnnnnnnnnnnnnnnnnnnnnnnnnnnnnnnntttatcttcttgatttttccagatttctctatgtttttgagaaagatgttaatgttttgccatggtaaaaaatttcaaacctcattttttttgttccttttcttgttactttaagaaaactcatgctctgtttctctgaatcaaatgaagaagtttacagagctaactttcttcttgtctagctattaacattatttgtcaaatgtatgtttttttcagccaaagccttgtttccattttttgttgatgtgtactcttgctgtt

SEQ ID NO: 15195 - DNA, 690 bp, Macaca Fascicularis
  misc_feature (1)...(690): n = A,T,C or G
ggaatttaaaattaagtagaacaaaaaacccagcgcacctgttagagatgtcactctctattgtcatggggatcaattttcattaaacttgaagcagttgtggctttggcagtgttttggttcagacacctgttcacagaaaagcatgatgggaaaatatttcctgacttgagtgttcctttttaaatgtgaatttttatttttaattattttaaaatatttaaacctttttcttgatcttaaagatcgtgtagattggggttggggagggatgaagggcgagtgagtctaaggataatgaaataatcagnnnnnnnnnnnnnnnncccatcatcctttgttctgagcattcactgtaccctttaagatatccatctttttgtttttaaccctaatctttcacttgaaagattttattgtataaaaagttccacaggtcaataaatttagaggaaaatgagtatttggtccaaaaaagaaaaataatcaagattttagggcttttattttttcttttgtaattgtgtaaaaaatggaaaaaaaacataaaaagcagaattttaatgtgaagacattttttgctataatcattagttttagaggcattgttagtttagtgtgtgtgcagagtccatttcccacatctttcctcaagtatcttctatttttatcatgaattcccttttaatc

SEQ ID NO: 15196 - DNA, 777 bp, Macaca Fascicularis
  misc_feature (1)...(777): n = A,T,C or G
ctcaggccaagcgtgagaccgacttctatcntcaaagtgtggaacggggacaacgctttcttgcggccgatggggaccctgctcgcccagatggctcctggacatttgtgcaacgtcctactgagcaggaactgagggcccggaaagcagcacggccagggggtcgtgaacgggctcgcctggcgactgcccaggacaaggcccgctccaacaaagggctcctggccaggatctttggagccccaccaccctcagagagcatggagggaccttcccttgtcagggactcctgagggccagggtggccccttccagctcctagccctgctctgcttcctgtctacctcatactagaatgatcgtgactatccaggcaaacattttactgtgtttctcagaccaagtgtctctgctaagggcccaaacgtgcaagttttgagggcttccactatcctcactccgaactcctgtatatgcctggctgagtcacctaattcatactgtcatactagcatgattatgactattgcatatgcttgttttgtttgactcttggctgcctacgtctatagggtcccctaaaaatcccacgttctgcccccaggaacgggcctttatttccaactagggggataatgcctagtcccggcaatctttctctgtttagcagtcacaggtgagggtggtattagcatcttttttatgtagaaaaaattgacagttaatgacgtggactgagttgggaagaaatacatttcctaatgtatttatagaaaa

SEQ ID NO: 15197 - DNA, 732 bp, Macaca Fascicularis
  misc_feature (1)...(732): n = A,T,C or G
caggagggaagcaggtccagcgcaacgccgccaacgcgcgagagcgggcccgcatgcgagtgctgnnnnnnnnnnnnnnnnnactcaagaccaccctgccctgggtgcccccggacacnnnnnnnnccaagctggacacgctcaggctggcgtccagctacatcgcccacttgaggcagatcnnnnnnnnnnnnnnntacgagaacgggtacattcacccggtcaatctgacgtggcccttcttggtggccgggaaacccgagagtgacctgaaagaagtggtgaccgcgagccgcttatgtggaaccacggcgtcctgaccttggaggtgcgagtctgggaaaggcgcgctcccggggggagcgggccccgggaagtcgacccctgccctccgtgctctctgtctctgcttccccctcgcaatgctcctctctctgtcccaccccgcgagaacactttacaacgacgaggagattcgtttccaaaccagaggagatcaattgtacttgcaaagattcccatctatttaactttattaacnnnnnnnnnnnnnnnctctgcaagccttgctggtccaagtgcaatatgnnnnnnnnnnnnnnnnnnnnnnnnnnnnnnnnnnnnnnnnnnnnnnnnnnnnnnnnnnntaaaatgtagatcataggatagctgacttnnnnnnnnnnnnnnnnnnnnnnannnnnnnnnnnnnatatatttttttcaaacaag

SEQ ID NO: 15198 - DNA, 671 bp, Macaca Fascicularis
  misc_feature (1)...(671): n = A,T,C or G
attgccattaaattttcaaaatgtaatttaaaaggattaaatactcatttaataatttgaaataattattgtatcatatctacatttggagagttttgaattatcaagcatatactgtatatagttagaaagttattaaatgaacattttactcattgatctgtaaaaacttctttacaactgttgacaaaaagaacattcaaacaaataatagtacagatgtcagtgactgagaccaaaatgacttttcttggagacattccagattgccatattacattattttaaacagcgctataactttaaatccaaagctgctcggaagaattttttaggtctctcataagcctgttcttccctgatcacacgagtgggagaggtagccaaattttgaattccccttctgtgttcccacaagagctgctgagaaggccnnnnnnnnnnnnnnnnnnnnnnnnnnnnnnnnnnnnnnnnnnnnnnnnnnnnnnnnnnnnnnnnnnnnnnnnnnnnnnnnnnnnnnnnnnnnnnnnnnnnnnnnnnnnnnnnnnnnnnnnnnnnnnnnnnnnnnnnnnnnnnnnnnnnnnnnnnnnnnnnnnnnnnnnnnnnnnnnnnnnnnnnnnnnnnnnnnnnnnnnnnnnnnnnnnnnnnnnnnnnnnnnnnnnnnnnnnnnn

SEQ ID NO: 15199 - DNA, 725 bp, Macaca Fascicularis
  misc_feature (1)...(725): n = A,T,C or G
caaaatgaaggacccggaatgaaaaatctgtgtccaaacaagtcctcnnnagattttagcacaaatccagagccagcgtcagttgcctcgagtaattctttcatgggtacatttggaaaagctctcaggagacctcacctagatgcctattcaagctttggacagccatcagattgtcagccaagagccttttatttgaaagctcattcttccccagacttggactctgggtcagaggaagatgggaaagaaaggacagattttcaggaagacaatcacatttgtacctttaaacagactttagagaattacaggactccaaattttcagtcgtatgacttggacacatagactgaatgagaccaaaggaaaagcttaacatactacctcaagtgaacttttatttaaaagagagagaatcttatgttttttaaatggagttatgaattttaaaaggatgaaaatgctttatttatacagatgaaccaaaattacaaaaagttatgaaaatttttatactgggaatgatgctcatataagaatacctttttaaactattttataactttttttaatgcaaaaaagtatcttacataaattaatgctataaatcatgattattttatgtatttttatnnnnnnnnnnnnnnntttattgaaaatgagttactaaagcattttaaataatatctgccttgtaccgtttttttaaatagaaattactt

SEQ ID NO: 15200 - DNA, 744 bp, Macaca Fascicularis
  misc_feature (1)...(744): n = A,T,C or G
cgttcagaacggcannncttaaggttaaaacagatgaatgtacaattggccgccaagattcaacaccttgagttcagctgctctgagaaggaacaannnnnnnnnnnnnnnnnnnnnnnnnnnnnnnnnnnnnnnnnnnntggtgaagtgaactagacccagaccagctccccgcagannnnnnnnnnnctcatgggcctgtgctgtcatgtgaggaacagctgcccctcctgggccacctggtgagaggtttggtttgatgcctctgcctccctnnnnnnnnnnnnnnnnnngggtggacacagccttgtggaaggtccagtaccaccaagagctgcccatccattcccaccccacactgtgtcaaaggtatcacattttctcatgttgaacactttagccttgctnnnnnnnnnnnnnnnnagctggacaatttctnnnnnnnnnnnnnnnnnnnnnnnnnnnnnnnnnnnnnnnnnnnnnnnnnnnnnnnnnnnnnnnnnnnnnnnnnnnnnnnnnnnnnnnnnnnnnnnnnnnnagaaaaagaagctactttagctgccaccccattctagaaaagtctcttattttcaagctgttctaaatagcttcccttgtctcagtttccccaaaaggggtacccaggcccctcctctgtgtgccccannnnnnnnnnnnnnnnnnctaggtggctccattgcgttctgccacctgatatttttcctcaattactgtacaattact

SEQ ID NO: 15201 - DNA, 734 bp, Macaca Fascicularis
  misc_feature (1)...(734): n = A,T,C or G
ctaattggaagacacttccgcnannnngttgaaaggatgctctctgctcgtgcctcaaacgcttggattnnnnnnnnnnnnnnnnnnnnnattccatccctgacccnnnnnnnnnnnnnnnnnattcggtccagtctaaaatcagaacgtctacggtctgacagttatattagtgagttgccgcttcccagaagcctacataattatttnnnnnnnnnnnnnnnnnnnnnnnnnnnngaggttccggaactggcagctattcaagatggataaatctgtgaaactacttatcacagctcattttttcctctgaaaaaccatcgagacaaaagagccatggagtacaaggttttatgattttatagtcaaaagatgattattgtttgtgagataggttaggttttggggggctagtagtttaatgtgaatgtttatgtttacaactagccttcccagtaaaaaaaaaaaaagaaaagtaaatctcacttatattactttattgcagcttcatcaccagtacattatatgttgtaatatttatttnnnnnnnnnnnnnnnnntnnnnnnnnnnnnnnnnnnnnnnnnttgcttctagtgctaaacannnnnnnnnnnnnnnnnnnnnnnnnntttacctggtgctaggnnnnnnnnnnnnnnnnnnnnnnnnnnnnnnnnnnnngtatacaactgtggtgtagaatctgttgttgtcattattttacttagactga

SEQ ID NO: 15202 - DNA, 763 bp, Macaca Fascicularis
  misc_feature (1)...(763): n = A,T,C or G
tacnnnnnnnnnnnttacgactgaagannngggcagtataaactaatatacttgaatagannnnntcttttaagggcatggaatgactcagataggttaaataaataaaacctttgtcctgcttttagtagtannnnnnnnnnnnnnnnnnnnnntgcttaaaaatacagaactattcactggctgaacttgatgagaaaattagtgccctcaaacaagccctcctcagaaaatcaagagaagcagaatccatggcaacccaccaccttccatgaaaaactcctctccatccttgtcattttacttttttgtatacatatgtgtaacttacactgttattaattcaacggatatatatttatcaatgtagacttctctgtgaagtcaaggtttattttcacgagnnnnnnnnnnnncaagtaatnnnnnnnnnnnnnnnnnngtttttaaataatgaatgtgttgaaaatagcattgttggaatttattcccttctgttttaaaggaggtattttggaaattgaaaaacttaatttaaaagtgctggtacatcttttttcttttgtggaccacagaaaggaaaatttattttgatattgatactttaaaaggactttatatttgtaacattggtgttaaccagtttattagtttaaatcagtactttgcatataataggcattcaacaaaaatttattgactgaaatgaattttaaatggatgtatgaacttgtttttcttaatttctaagatgtcagtattc

SEQ ID NO: 15203 - DNA, 661 bp, Macaca Fascicularis
ccacttgatttaggtcgatctcgagaactacagtatgtatacgtggataacaacattcacctgaaaggcttgccatcttatctgtacaataaagtcatcgggtgcagtggctgtggtgctcccattcaagtttccgaggtgaagctgctttccttttcatcagggcagcgaaccgttttcctcccagccgaggtgaaggccatagggacggagcatgatcacgtcctccctctgcaggaattggccatgagaagtctgtatcatacctaccacagcttgctgaaagatttgaactttctgtctccaatctcattacccagaagtctcctggagctgctgcattgccctctggggcactgtcatcggtgtagtgagcctatgtttaccatcgtctaccccaagctctttcccttgagagagacgccaatggcagggctgcaccagtggaggacaactgttagttttgtggcttactgctgctccacccagtgtctgcagacttttgacctgctgagttgataaacactcaagagcctcaggagcgctgccagcttgacactggggaatccagccagtccagcacactcttccattctgtcctgtccaatgcgggggcactgcagaactctctggaaatgtcgtgattgagcttcagagctaa

SEQ ID NO: 15204 - DNA, 764 bp, Macaca Fascicularis
  misc_feature (1)...(764): n = A,T,C or G
ctnnnnnnnnnnnnnnnnnnnnnnnnnnnnnnnnnnnnnnnnnnnnnnatcagcctaccctcgccactgacatgggtactatgcagaaagaattaccactaccaagaagggannatcaccnctgtacaggctnnntatgtgcctnnngatgacttgactgaacccagctcctgctactacgtttgcccatttggatgctaccactgtactgtcacgtgccattgctgagctgggcatctatccagctgtggatcctctagactccacctctcgcatcatggatcccaacattgttggcagtgagcattacgatgttgcccgtggggtgcaaaaaatctcgcaggactacaaatccctccaggatnnnnnnnnnnnnnnnnnnnnnnnnnnnnnnnnnnnnnnnnnnnnnnnnnnnnnnnnnnnnnnnnnnnnnnnnnnnnnnnnnnnnnnnnnnnnnnnnnnnnnnnnnnnnnnnnnnnnnnnnnnnnnnnnnnnnnnnnnnnnnnnnnnnnnnnnnnnnnnnnnnnnnnnnnnnnnnnnnnnnnnnnnnnnnnnnnnnnnnnnnnnnnnnnnnnnnnnnnnnnnnnnnnnnnnnnnnnnnnnnnnnnnnnnnnntgataagctggctgaagagcatgcgtcgtgaggggtccttgtcctctgtactgtccctttccttgcccctaacccannnnnnnnnnnnnnnnntgtgttggctgcacaagagccttgattgaagatatattctgtctgaacggtattaa

SEQ ID NO: 15205 - DNA, 729 bp, Macaca Fascicularis
  misc_feature (1)...(729): n = A,T,C or G
gttttgtagaactgctctgtacctgaatacttnnngagagaattgagatgtatcaannnnnnnnnnnnnnnnnnnnnnnnnnnagtaacttgttcaatttacttacgtgttctaaacatctttccattacatgttctgtattttaatacattgcatattgacaactaggttctataatgtatgctttgaaatttacttttttatagtttacaggaattttattttttgtgcctatttctttttacacctatgtgaaccactatggaacaacttaaattttgtgccataaaaatatttttgtggtaaggtactatttttttagctctagggatatatcagcaaaaacacatcatgcaatttgagagacataattttgtgttgaatgagcacaacataatttgaagcattgcaaggagatagccagacagcagaattaaatggtcctgtctttttcattgttaatttattgtcatacatgggtttcatatttataacggcatcatgagctcattgcacttaatacctgnnnnnnnnnnnnnnnnnnnnnnnnnnattttcaatactttatcacaaaggacgaaactgtaatgttctacnnnnnnnnnnnnnnnnnnngaatgcattttaaagcaaataaatctttctcatagaccttcttacaaaatccattcgcactaatgaatgctttcttatggcatataacttaatatttgttactgtgtacactgc

SEQ ID NO: 15206 - DNA, 1362 bp, Macaca Fascicularis
  misc_feature (1)...(1362): n = A,T,C or G
ttaatgagcctagtaatgactgggatannnnnnnnnnnnnnnnnnaagctaaaccagccccagaaatatttgaaaatgaagtcatggccctgctgagagactttgctaaaaacaaaaacaaagagcagagactgcgtgccccagatctcgaatacctctttgaaaagccatgttgagctgtgctggcataggggttcagtctgcggatggtaactnnnnnnnnnnnnnnttagccttggcttccagcttctctttnnnnnnnnnnntgccccaccccagaccattggtcccgcctcaagtggtggacacaaccctttcccaggacatacatgtaaatgcaatgtgactcattctcatacttttttgttcaactgtgagcctcaaannnnnnnnnnnnnnnnnnnnnnnnnnnnnnnnnnnnnnnnnnnnnnnnnctagaggaagnnnnnnnnnnnnnnnnnnnnnnnnnnnnnnnnnnnnnnnnnnnnnnnnnnnnnnnnncaagtgtactcaaagaaaagaggcagccagctgtgcgtgtggtacggaaagcggcccgccctccctnnnnnnnnnnnnnnnnnnnnnnnnngggcnnnnnnnnnnnnnnnntccccannnnnnnnnnnnnnnnnnnnnnnnnnnnnnnnnnnnnnnnnnnnnnnctnnnnnnnnnnnnnnnncaaaggcacagcaggcagaatgagggccacaggcaagaatggcgtaggcacgctgcttaagagtcaacatcttcatcattgggctttctttaaaacatacactttgtaagttgaaagagaattattaaagaatactgagaaaaggaaatttacaatttcccagccctcacaattaattttaattttgtctattttcatataacccatagtcatatgtttatggagttttacaaannnnnnnnnnnnnnntctattttcatgtagcactatagaaaactttccccctcattcctacagtcttcacagttattttagttgactaaataataatacataagaaataatatattagaatgaattagttagaagtgtttttaaaagctctgtgtgacttctgtgttgctagtggtgccctccctggaggggttttgccctcagagctgtaatctagnnnnnnnnatcagtcacccaaactggaccaggtgcatctaaaggtgttgaccagaaggtcggccagatttgatgaacaggtggtgggtgattataggagccgcacaagggaaagacacacgtacatgtttacagcattgttgagctccagggttcctacagagccacctcatggttcctgcctgcccttcagtatccctggctcaggaggaaagggaagagatgtagc

SEQ ID NO: 15207 - DNA, 726 bp, Macaca Fascicularis
  misc_feature (1)...(726): n = A,T,C or G
agatctgctccataaagagctctccagaccctgcctcaccttacagggaagggcttagagtcagggaagagggacctgttgctcctgtccctgaaaaaggaagtcaagatggagccagggcttcctggtgcccattcagactccnnnnnnnncttgtccctgtggaggacgtaggatggaccgccccatctcaggctggggtcgggggaatcgctcacagtcaccccctgaacagcccccaactgagggtgggggacctgtccctggacacctcatgtctctgggccgggaagccacgatccctcatccatcaggcctgttgccgctctccaccccggtgggggacggacgtttgtgctccctcgccgtccactggggacccaggatgnnnnnnnnnnnnnnnnnctctccttggcctcaggccagcagacggctgtactctgccaaagcagaggactttttcaccccatcccagatccgggcagcgtagtggaacctgtgagaggaggtcaacagtcggggctgcctggccggggctccccgagcccagcacaaccctggacaggtggggaaactgagaccccttttctgacctgagatgtgactctgaacctcttggagcccnnnnnnnnnnnnnnnnnnnnnnnnnnnnnnnnnnnnnnnnnnnnnnnnnnccccacttttcttagctcacccaggttaagcgaagctgannntccagggctt

SEQ ID NO: 15208 - DNA, 726 bp, Macaca Fascicularis
  misc_feature (1)...(726): n = A,T,C or G
agannnnnnnnnnnnnnnnnnnnnnnnnnnnnnnnnnnnnnnnnnnnnnnnnnnnnnnnnnnnnnnnnnnnnnnnnnnnnnnnnnnnnnaaggctgacggcgggaaagggcagctgnnnnnnnnnnnnnnnnnnnnnnnggaggaggatgaggaggaggaagaggaggaggaggacttcaagccatctgacggcagtgagaacgagatggagacagagattctggactacgtgtgacagggcccaaggctgggccttcctgacccggccagactggtgtccagtctaatgagggagccagggctccnnnnnnnnnnnnnnnnnnnnnnnnnnnnnnnnaggaggccctctgaggagagctggagtcccagcagagggtgcagctaacccaagcactggctatgacgtgctgcttggtgctgcctcttgtcctgagggcttagggacatccccaaagggtatgccctggctccaccacccatgaaccagcccagcatccagccagtgagtgggcacccaatgcctctcaggatgagaccagtaaatgccggaggtggagctgggcagctgcggggccccaggccacaggccagtctcacttggctctcatgactatggcggtggagatagtgtggggagcctggcccatggtctcaggtggcaagaagtgcccttggctctggatcccaaccgtttgacacagctttgcccacagccaggcccctct

SEQ ID NO: 15209 - DNA, 808 bp, Macaca Fascicularis
  misc_feature (1)...(808): n = A,T,C or G
agagatgagagcnnccttgggccggcccgagccnnnctntaaggcagagccccgcgtccccccnnacccctgggaagtggcgccccggtgcggacggccaaggctgagcgtcgccaccaagaacggctgcgtgtgcagagtccggagccaccagtgcccgagcgcgccctgtcccctgccgaacgccgggccctggaggctgagaagcgtgcactgtggagggcagccaggatgaagtcactggaacaggacgctctccgagcacagatggtcctcagcaggtcccaggagggccggggcatgcgggggcccctggagcgactggcggaggccccttcccctgcgcccaccccgtcgcccacccctttggaagacctcggcccccagaccagcacctccccgggacgcctgtcgccggactttgctgaggagttgaggtccctggaaccatctcccagccctggcccgcaggaggaggatggagaagtggctctggtgcttctgggcgggcccgctcctggcgccgtgggcnnnnnnnnnnnnnnnctttgcagcagccgtcgccctgtaaggcctgggcgccgtggcctgggccctgtgccctcctagaggagcaggcgcctccccnnnnnnnnnnnnnnnnnnnnnnnnnnnnnnngcaccacccttgccccaagtcttttaacctgggtgttagcattttaaagagaccccgcaggaattctggcctctgactaactgccccaccccagccgagacctcggcaagactgtaactagtgatgtttgtacaaccaaagactctattt

SEQ ID NO: 15210 - DNA, 752 bp, Macaca Fascicularis
  misc_feature (1)...(752): n = A,T,C or G
cagaaggctgagcttnntttgaggaggtagaaatatgtgtgtccatacgaagagatctgtcagaacaggcagctgttgagctcggagtgtcttccccaaggcnnnnnnnnnnnnnnnnnnnnaggcaatgtgctcctgctggggccctggactctgccttagctcccacctctcagccctgttcctgggtttcatgccccaggaccagccttatctcagacctgcttacctgcatgatgccttttcaggggctggggattgagccttcctgctctgcccagccctgttctatnnnnnnnnnnnnnngtgttggaattcaccctggggaacctgcttcctgctcagtgaggctcaggggagaaacctggagtccttatcctcccctctgtaagtgttttagggtctggcttttgcaggcaccctctgacctcagcagagctcctggggctgctacctgtacaccgtatcgcctacctacaatgccaaacctcactgtcaccctttctgccttggtttccccagctgagccacactgcccatgcagcagagggcagaaggcttgcacttgggccaaagggcctaaggtccactggacagttgggaagacacctgaccaccatttaaggactctaagccagaatggaaaattcttcaggagtccattattaagcctatgggggtcccctagagagaggcattgtactgatgtataaatattatataatatatacatgagacatactgacagaatc

SEQ ID NO: 15211 - DNA, 679 bp, Macaca Fascicularis
  misc_feature (1)...(679): n = A,T,C or G
atgaggccacnnnaggnnnnntctgtggggtgaggtcctcgtgtctttggggataggctgctccctnnnnnnnnnnnnnnnnnnnnnnnnnnnnnnnnnnnnnnnnnnnnnnnnnnnnnccttgnnnnnnnnntgttgtcattcgagtccactcgttggggttggctggtgagaagtggggtctcaggctcagctgctcannnnnnnnnnnnnnnnnnnnnnnnnggcacagcgcccgagacagtctgcggaaccgttccttgttnnnnnnnnnnnnngaannnnnnnnnnnnnnnnnnnnnnnnnnnnnnngaggggtcatctgtgcacaacagtcccctcttgtgcctggtgctgggcctgtgctgatccgatggtcttgttttcagggtggctttgtccacnnnnnnnnnnnnnnnnnnnnnnnnnnnnnnnnnnnnaggctgtgtggtgggaaccaagaagcgggtgctcaccctccgcaagtccttgctggtgcagacgaagcggcgggctctggagaagattgaccttaagttcattgacaccacctcnnnnnnnnnnnnnnnnnnnnnnnnnnccatggaagagaagaaagnnnnnnnnnnnnnnnnnnngaaagaccgaattgcaaaggaagaaggagcttaatgcgaggagcagatttgcagctggtggg

SEQ ID NO: 15212 - DNA, 211 bp, Macaca Fascicularis
cctgtgtctgcttatgcagttcaatgcagccatgacaaggaaagaaaagacaaaggcaggccagagagctgggcagttctctgcagatgcagatgcaggcagtggaggtggcccgagcaggcagaaggactccaagcgccctaggctgcttgtcatccatgacgtggtcttggagattctggctcgtttatattgccacgccaaccccaga

SEQ ID NO: 15213 - DNA, 476 bp, Macaca Fascicularis
  misc_feature (1)...(476): n = A,T,C or G
gatcagggtagcaggctatggcgccgaaggtttttcatcagtnnnnnnnnnnnnnnnnnnnnncnnnnnnnnnnnnnnnnnnnnnnnnnnnnnnnnnnnnnnnnnnnnnngctggcctgaccgccgctgcctacagagtcatactcaatcctccgggcaccttccttgaaggagtggctnnnnnnnnnnnnnnnnnnnnnnnnnnnnnnnnnntcggggccgtgtttggcctcacctcctgcatcagcgcccaggtccgcgagaannnnnnnnnnnnnnnnnnnnntttcctcggtggctgcgccggaggcctgactctgggggcacgcacgcacagctacgggatcggcgccagcgcctgcgtgtgcttgggcatagcggcctccctggtcaagatgggccggctggagggctgggaagtgtttgcaaaacccaaggtgtgagccctgtgccagccgggacctccagcccgcaga

SEQ ID NO: 15214 - DNA, 923 bp, Macaca Fascicularis
  misc_feature (1)...(923): n = A,T,C or G
gaggannnnnnnnnnnnnnnnnnnnnnnnnnnnnnngataagcnnntannnnnnnnnnnnnnnnnnnnnncagcagctctcaagcgtcacactnnncagcttcgtgaagagttgctaaaacttccctgccctgaaggcttggatcnnnnnnnnnnngacacagacgatgcccagagacgcacaacaggtgctgaggagactctaatgcacgatcaggttnacccagcagcagcaaagaactccccagtgacttccagttatgagctgcattgacagggacttcatagacacaaaggcttcgaagcacaagccaaatatgtcaatatttgtatgtaagaaactaattatgtaataggtaatgaaactgaaactatactatgcccttaaggagatccagtttaattcaaggtgatcttttatttacctgtacaggagtgtaaacttttttgtgcttttatttttcaattgtgagaaccactgattggtatgttcaacaaatttgtgtatacaaagaaannnnnnnnnnnnnnntatataagggaaactaccttaggaaagaatgtttactgaatgtttattttattttattttttactgtagagtgaggggttgttaacaaagaatatatattggtcattcttacaactactatttaaagtcnnnnnnnnnnnactgaatttgatagattttatnnnnnnnnnnnnnnnnnnnntcacatttgatttctgaagacctcctacatacacttcaataaaagttaaatggacatactccctcttttttgatttactggtacatttttaaaataataannnnnnnnnnnnnnnnnnnnnnnnnnnnnacttgcactcgtatggatgaatttattacattcaacatatttaattttatgccttctaattctaagatgcagaaaaaaataa

SEQ ID NO: 15215 - DNA, 729 bp, Macaca Fascicularis
  misc_feature (1)...(729): n = A,T,C or G
atgacaagctgcgtggcctnnnnnnnnnnnnnnnnnnnnnaaagtccattgagctgnnnnccctgaccatccgtgccaagcccttccatgacagtgaggagctggtgcccttgtgctaccgctgctccaccaannnnnnnnnnnnnnnnnnnnnnnnnnnnnnnnnnnnnnactgccgccagcccttcatcttctccgcctcttcctacgacnnnnnnnncctggttgagttctacctggaggaaggnnnnnnnnnnnnnnnnnnnnnnnnnnnnnnnnacctggaggtgccgagacccaagcaggannnnnnnnnnnnnnnnnnnnnaaannnnnnnnnnnnnnntctgcggctagtggagaccaaggacnnnnnnnnnnntgaggacccattcacagctaannnnnnnnnnnnnnnnnnnnnntcagaatttgtgccagtagtggtaagccggctagtgctgcgnnnnnnnnnnnnnnnnnnngtcctcgtcaagcgctggcccccgcccctgagatggcaatacttccgctcactactacctgatgcctccattaccatgtgcccctcctgcttccagatgttccactctgaggactatgagttgctggtgcttcagcatggctgctgcccctactgccgcaggtgcaaggacgatcctggcccnnnnnnnnnnnnnnngggatggcctgcaccctctgcccgccttgaggtctgctgggctggaa

SEQ ID NO: 15216 - DNA, 711 bp, Macaca Fascicularis
  misc_feature (1)...(711): n = A,T,C or G
gattctcattttaccatagcttatattctcaatttcaatgtcagtctcagaactcttgttttatgtgttgtgttctcaaaattacattgtccctcatgtcatttcaaactgttttcaaagggatttgcacatacacaactacaaatccaagcagactgactctcaaaaataatcttaaatactgcaaatagtcccaaccaagattcagtcaatactgtttgttttgcaagcttaggagagtagttggctttgagtctacacatggaagctttaagannnnnnnnnnnnnnnnnattctggactagacaggaactcggcctcagcgtgagatcctgccattcggtgttacggtggcatctgaagaagtatgaatgtgaaggcgtgggcttggggccagagcaccactctgctgccccaccacgcagcttgtgaggagccactaaacctttccgtgcctagacctccccatctgtggaatggggtcaataccacctacctcacaggggtgttgtgaggactgagaagaacaatgtcaaatgtttttaatactcggatgtggggnnnnnnnnaatgaaatctgtactgtataaaagctacacaaaaatgggcagacatttggttaattgtaccagatacctaaaatgtatgttcagaaaagcattttatcaactcagagatnnnnnnnnnntctagatttcatggcttaatgaa

SEQ ID NO: 15217 - DNA, 730 bp, Macaca Fascicularis
  misc_feature (1)...(730): n = A,T,C or G
tgttaaatgnncnnnttttgaactctcatgcnnngaagacctacctgtccttccagaagagaacattgaaagtgccatgtttccttctgtgtgatctctgttgacggcactctggaattgttttagttaagtcattttagacatagcatttattatcactgtggctctctacttgttgggtgttatgaattctttgaagaaatacattttgaagaggtgtgggaggaaggaatacattttataaaatggtatagtgaagcccacaattgatctttgactaataggagttttaaatgtgctaaaaatctatactggacagttacaagaaattactggagaaaagcttgcgagctcgccaaacaaggatttcagtgtagattttgtctttctcgaacttaaaggaacaaatgacaaagtttgaatggaaaggcctgctgttgttccacatctcattgttgctgtttacattcctttctggagcctacatcttcctaagctttttagcaggtatatgttgaacacttctgtttcatggttgagacagaatcagaggccatggatactgacaactgatttgtctgtttttttctgtctttttccatgactcttatctactgcctcatcttgatttataagcaaaacctggaaaacctacaaaaataagtgttgtggtttatctagaaaaatatggaaaatattgctgttatttttggtgaagaaaatcaatttt

SEQ ID NO: 15218 - DNA, 762 bp, Macaca Fascicularis
  misc_feature (1)...(762): n = A,T,C or G
agggggcgagtgtgagattcgccgtgcggggccagggagnnnnnnnnnnnnnnncaccaatgctcgatatgtccctgtctcctgtgagaaagaagtggaggccctgcttcatctggcccgccagaatcgggctgtggcccgcacagcccagaatgaannnnnnnnnnnnnnnnnnagtgtattccagctacagatttctggggagcactccagccgaggcctgcagtgtggggcctccctcagtcttgtggacctggccgggagtgagcgacttgaccctggcttagccctcggccccggggagcgggaacgccttcgggaaacacaggccattaacagcagcctgtccacgctggggctggttnnnnnnnnnnnnnnnnnnnnnnagtcccatgtgccttaccggaacagcaaactgacctacctgctgcagaactctctgggnnnnnnnnnnnnnnnnnnnatgtttgtgaacatttctccactggaagagaacgtctccgagtccctcaactctttacgnnnnnnnnnnnnnnnnnnnnagtgtnnnnnnnnnnnnnnnnnnnnnnnnnggaagtgnnnnnnnnnnnnnnnnnnnnnnnnggagtgtgtgtgtgtctgtatctgtatgtgtatgtattgggtgaggagtgggagggttgctggagggtgctttattgggtagagggcaccatgtcccagggctatcaaataaagaatagttgttttttttttttttaataaaggtttatnnnccaagaa

SEQ ID NO: 15219 - DNA, 681 bp, Macaca Fascicularis
  misc_feature (1)...(681): n = A,T,C or G
tnnnnnnnnnnnnnnnnnnnnnnnnnnnnnnnnnnnnnnnnnnnnnnnnnnnnnnnnnnnnnnnnnntcgtgtgttctttacaaaatnnnnnnnnnnnnnnnnnnnnnnnnnnnnnnnnnnnnnnnnnnnnnnnnnnnnnagtttttccttacgtggaactgaaatnnnnnnnnnnnnnnnnnnnnnnnnnnnnnnnnnnnnnnnnnnnnnnnnncagatctctttgtattctcttcaagcccaaaccaattctgttccttcaatgtaaataatgataatatgaatgtttaagaaatagaaaacannnnnnngcactttgggaggtgctaagtgactgccctaaggaatgaaaagcaagggccaggtgggagtagcccagggaannnnnnnnnnnnnnnnnnnnnnnnngggacgggaaactctggcttaggaaaacatgaacataggggcaacagaagcaaatgtgttgtttgagttaaatatagatctcaggctctttaaaggtaaaaggtttaaggataatccatttggaagaaaagagagagtgaggctgaaagtaaagccacatgacaagcatatagaaaaataatgcagatgatataaacatgaaagagaccttttgtgtttattattaaaaatcttaatgcagtttagtgatggattaaaaacagttaacggtg

SEQ ID NO: 15220 - DNA, 744 bp, Macaca Fascicularis
cgagaattaaattaggcaaaaaacaaacaaacaaacatagtgggccctcgtctagatcatgatgtgccagtttctgagacatctgtttaaggctcttactgcagctccccctccccaccctcctcatctttagaaaaacagacccaagcagggcaggctcagaccactcgcttctttcagatctttcttgcaattatgataacatgagatttgctgttgtgcttttagagaaaagtctggactgagccacaaactctaataagacctgtacatctgaggacctttcccgttaactgcgttttgaccacctgtcttccccatgctttatttatctgtatgaacacatttgacattacagctaaggaaataatttgagttgattcagaagtcctggcatgtgacaattttgttaaattaccaagtttggtttttaataatttcgcaatattatgcgccaagatctaattttaaaactgtatgaggactttgtgctgaaaatacagagtatttttttaaagtaaggctgtcttggtttaaaagcagattacagaaatgtaagtcaacttaagaacagtgaatgaatgtaaaaacattcagttgagaccatatgcattttctgtgctgtttgtacttgaggtatgtaacatttgtatacctgaacttattttaaagatgaactgaaatgcacatagccaagtcttgatacaagattgaatgtgtatttctaaaaatacaactttgtgt

SEQ ID NO: 15221 - DNA, 735 bp, Macaca Fascicularis
  misc_feature (1)...(735): n = A,T,C or G
tgggtggcatttttntannnnnnnnnnnnnnnnnagcccagagtgtgtgtnnnnnnnnnnnnnnnnnnnnnnnnnnnnnggtgtgactgcacagtgaggagccgggtctgtgagcaggcagactccacgcnnacgtcgcaggtaggtttctccnnnnnnnnnnnnnnnngannnnnnnnnnnnnnnnnnnnnnnnnnnnnnnnnnnnnnngaccgcctggttgaattctgttggaactctactcaaatctagtagagggtgtcttctttggacccacaatgggggcaagccttaataatacggaagggagtttgggctttnnnnnnnnnnnnnnnnnnnncctgggggctgagcnnnnnnnnnnnnnnnnnngcaggacnnnnnnnnnnnnnctttgactacaagtgggctgcgcggctggttcctcttgagcgagtgtccctaaataggagtttacaagatgtctgagggtaaaagcaactgtgcttttcagtggtggctgcgtgaaagggaatgacattcatttgtgtgttcctggacttgtgtggtacttaaaacctcagttctattacattatagtcagactttttnnnnnnnnnnnnnnnnnnnnnnnnnnnnnnnnnnnnnnnnnnnnnnnnnnnnnnnnnnnnnnnnnnnnnnnnnnnnnnnnnnnnnntgaaagttgtatggttaataatttcatgtcagtgaaaagatatctgatgtttatgatat

SEQ ID NO: 15222 - DNA, 770 bp, Macaca Fascicularis
  misc_feature (1)...(770): n = A,T,C or G
cgtgacccctgnggctgctacagtgtgtccagtgtctggcccggctgtgccgagccatggaacaatagggtgaccttcannngcactgctgagcaccctgagttggagacccaactaactgccaccatctcaaaacccggtgggtccagaccccgctcggggctctggtttgcaaagcatattcccggcctgcctcctccctcccggtcctgggcttgggtgctcatgccaagtgcagagggaaactgaggcaggctgagggggccaggacacagcccggggtgtccaccagagcggtagaggctctctcatcccctgcccagcccctgacctggctctctacctccaggaaacacattccggcccgaggtccacctgctgccgccgccgtcggaggagctggccctgaacgagctggtgacgctgacgtgcctggcacgcggcttcagccccgaggatgtgctggttcgctggctgaagggaacagaacagctgccccgtgacaagtacctgacttgggaatcccggaaggagcccagccagggcaccaccaccttcgccgtnnnnnnnnnnnnnnnnnnnnnncagccgaggactggaagaagggggacaccttctcctgcatggtgggccacgaggccctgccgctggccttcacacagannnnnnnnnnnnnnnnnnnnnnnnnncccacccacgtcaatgtgtctgtggtcatggcggaagtggacggcnnnnnnnnnnnngccgcccgcctgtccccacccctg

SEQ ID NO: 15223 - DNA, 961 bp, Macaca Fascicularis
  misc_feature (1)...(961): n = A,T,C or G
tatagcgagcaggcatcactggagatgagggaggcagctgccacagagatccgccgagccatcacaggtcgcatcccagaaagcttaagaaactgtgtgaannnnnnnnnnnnnnnnacatcagcgccttggtcagtaatagaccagcaagcannnnnnnnnnnnnnnnatggtgccacatacagatatccgccaggcatcgtgggggtggctccaggaggannnnnngcagccatggaagggatcatccctggaggcatccnnnnnnnnnnnnnnnnnnnnnnnnnnnnnnnnnnnnnnnnnnnnnnnnnncccaaccagcccacaaaacatggggacaatcgagagcaccccaacgagcaatagcagagaatgccagannnnnnnnnnnnnnntacacttgggaccaagagacagtgaaaaatagatgaactaagagaaaaagaatctgatggtctttgtaactgattctggacatatgcatcattgatgttgcagtgttaaaactacaagagctagaaaactnnnnnnnnnnnnnnnnnnnnnnnnnnntgaaagactaggatgtgatttattaacgaccaacttctgttattgtgtgttaagtttttcatctgtgcatcaaatcacaaagaataaatagagcttttttctttctcagtcccttgggcacagcaggtcctgaacaccctgctctacaatgttgcatcaagagttcaaacaacaaaataaaaaatattaagaggaaatccccatcctgttacttgagtcccttaagtatacaggggctggagacctctttttgctaataggaaaatcacatgactacaaaatgggnnnnnnnnnnnnnnnttctggtagacacctgcacgcataggattgaagnnnnnnnnnnnnnnnnnnnnnnnnngcgtctctcacacctgaactgcatactgagcgggnnnngttggttgtaagt

SEQ ID NO: 15224 - DNA, 669 bp, Macaca Fascicularis
  misc_feature (1)...(669): n = A,T,C or G
gcgttttgacagaattcattgagtgaacggagaacatgacaagtacttctagttcagcactgctccaactactgaagctgattttcaaggctacttaaaaaaatctgcagcgtacattaatggatttctgttgtgtttaaattctccacagattgtattgtaaatattttatgaagtagagcaatatgtatgatatttatatatacgtgcacactacattagtagcacgacctttggaagtagcagctcttgcttttcgggactgaagccagttttgcataaaagcggccttgttatgagagatacttgagttctgttgggactttagacaaaactcacatnnnnnnnnnnnncaggcgttaactactggaacttccaaataatgtgtttgctggtcgttttactcttcgcataaatattttaggaagtgtatgagaattttgccttcaggaactttggtaacagtcaaagactgaacttaacctctgcaagcaagattcgaggaagatagtctccactttttaatgcactaagcagtcggttgttaggagcccatcctgggtcggaggccgatcggcagaaccagaacttttccccctcctggactgttagtaacttagtctccctcctcccctaaccacccccgcccccccgcagtaataaaggccc

SEQ ID NO: 15225 - DNA, 657 bp, Macaca Fascicularis
agaggttatggaggtactgtagcttttagggaaaaaaaaaaatgttaacacatcacaggtcaagttgaagtcattctctgtttaggcactaaaaatcggtgttgtcactcactgtgtattaccagtatttacttgctttcttgatttcaccaaaaccaaatttaatttaaaggaccacattaatttttcaaagggaaagagacaattaattgtacataatgtatacacacacacacacacacaaaaaaaaaatacctgtagaaatattattccagcatagcaggaaaacaaacaaacaaaagtattggactgtcggaggtgagcctgtgcgtctgtaaccctttgtgactcctaagcgtgcgccgtcttctaggttaactcacgaagtacattctctgtcttactgatactgtaggttcaccctttttttttaatttcctcgcaaataacaagacccacagaagtgactctagctatttaatggttctgttcttttatatgcaacaaacacaccgtccatttctgaagaggcttcggcctgaaggcattttccaatgatgttagtgcacaaacgctttaaattagactggaactgccagaatcaaatgtaaatgaggaatttctcgtacccctactgcatggtatcgattttaataa

SEQ ID NO: 15226 - DNA, 689 bp, Macaca Fascicularis
  misc_feature (1)...(689): n = A,T,C or G
gaagctctgannnnntagagnnnnnnnnnnnnnnnnnncagcttgcagttttgtcaagacggtggaagccttcagagatgaagtgnnnnnnnnnnnnngaggttgtattggaaagcagtagtgttgacgaattgcgagagaagcttagtgaaatcagtgggattcctttggaagatattgaatttgctaagggtagaggaacatttccctgtnnnnnnnnnnnnnnnnatattcatcaagatttagactggaatcccaaagnnnnnnnnnnnnnnnnnnnnnnnntttatatctgtgatgatggtgcagtcatattttatagggataaaacagaagaattaatggaattgacagatgagcaaagaaatgaactgatgaaaaaagaaagcagtcgactccagaagactggacatcgtgtaacatactcacctcgtaaagagaaagcactaaaaatatatctggatggagcaccaaataaagatctgactcaagactgactctgatagtgtagcattttccctgggggagttttggttttaattagatggttnnnnnnnnnnnggtagtgccattttggccggacatggttggggtaacccggtgacaccagcactgattggactgccctacaccaatcagaagctcagtgcccaatgggccactgttttgactcggaatcatgttgtgca

SEQ ID NO: 15227 - DNA, 1107 bp, Macaca Fascicularis
  misc_feature (1)...(1107): n = A,T,C or G
gcaattggagtccatcttatggatagatacacattttatgtcttgnnnnnnnnnnnnnnnnnnnnnnnnnnnnnnnnnnnnnnnnnnnnnnnnnnnnnnnnnnnnnnnnnnnnnnnnnnnnnnnnnnnnnnnnnnnnnnnnnnnnnnnnnnnnnnnnnnnnnnnnnnnnnnnnnntactgataactgatttctnnnnnnnnnnnnnnnaagtggaaattacaacagagactattaatttgcaacagggttcggaaatcatggaaagcagctataaggaagaccagatggatgaggaactaatggaacctctgaaatatgctgaacaacttcctgtagctcagataatacaccagaaaccaaagctgaaagactggcatcctcctgggggctttattctgggattatgggcacttattatcatggttttcttcaaaacttacggaattaagcatatgaagttcattttttagatttgatgatgagtgaagaaagcatggaagactgcaaccttggataataatttatgtcattatatatttttaaaaatgtgtttctcttgtgtgaattggaaataagtataaggaaactaaatttgaatcaactattaattttataacttaaagaaaaataattgttaacgcaattgtgtgatggcacaaaatatattccggttttgtattttgtatttataaaagcaaatggaacaaagagatcagagtacattgattgtttttgaaaatagtaatttccccttatccccttttcatttggaaaagaaaaaattgtgaagacgttaaattctcactaacagaggtaacttcggttaattattttctgtatatcctcccaatctttcgacttacgcacatatttttttcccaatatggatatcatatggaatatactattttgtaatatcctttttcatcttacaatatattatcaaccttttccctctcaaaaatacattgtgaataactgcatagtatccactgtatgaatatttaattcatttcacagtcttctattgtttgaccacttacgttgcaccaaacattttcctttggtttattctttaatgtattaatattttactgctgtcactc

SEQ ID NO: 15228 - DNA, 762 bp, Macaca Fascicularis
  misc_feature (1)...(762): n = A,T,C or G
tgataaggtcactgcnnnaggtgctaggtggaccgagcaaaagactcagtggatgaactgatgcagtgcctgacagaataaagaacagtattannnnnnnnnnnnnngcannnnnnnnnnnnnnnnnngccatnnnnncagaagcccacttagtttcttgggagcaacagcacagatcannnnnnnnnnnnnnnnctttggtcatgccctttgggatacaggnnnnnnnnnnnnnnnnnnnnnnnnncnnnnnnnnnnnnnnnnnnnnnnnnnnnnnnnnnnncaccccaaagctggaaggatctggttcaacatagcacaaacccttaggaaaaatgaaattaacatcactgatgtgtaatccagtaaaatctccctcttttgggtgtgtatgtgggcatgtgtgtgcccatttctatgtgtgtctacgtgcaactcactaccaacagcctcatgtgcacttgacctgacagtgctcgctgagaactctcaccaggttggcgcctgaatgccttactctcagcagtcagaggcttgcttgctctgtgcagatttttaattttcttttttggccctaggctgtttgggacctctacagcttcattctttcaccattaaatagtggcctttttcagtattttccctcttcccctttataaattgctaaagccacaaagcacatttttggggatcatagaagggtggggttccagaagggcatctgtgtgatggttccattgatgtgggatttccctacttgct

SEQ ID NO: 15229 - DNA, 716 bp, Macaca Fascicularis
  misc_feature (1)...(716): n = A,T,C or G
gcgagtcatggnnttcagcaccttggcacagctgaagcagaggaacacgctgaaggatggcatcatcatgacccagcaggggatagggctggtcttcatcacnctnnnnnnnnnnnnnnnnnnnnnnnnnnnnnnnngcaaggccggcatggagnnnnnnnnnnnnnnnnnnnnnnnnnnnnnnnnnnnnnnnnnnnnnnnnnnnnnnnnnnnnnnnnnnnnnacaggggaagtgaagtggtctgtgggtgagcacccaggtcaggagtgagagccaggacctccccannnnnnnnnnnnnggctccccagcctcagtgactgcttcggagctgcctggctcatggcccaacccctttcctggacccccagccggcctctgaagctggcccaccagagcnnnnnnnnnnnnnnnnnnnnnnnnnnnnnnnnnnnnnnnnnnnnnnnnnnnnagaaggacaacagggcagcaacttggagggagttctttggggatgtatgggacccagccttctgggggtgctgtgaggggatccatccccacgcacgggactggggaggcagagaatggtnnnnnnnnnnnnnnnnnncttggaggcaagggcctcccagcagagcctgggaagggccgtggacccagcggggccccagaagagccacgggaacatcattcctctcccgcaaccgctcccaccccagggaggccctggcctccag

SEQ ID NO: 15230 - DNA, 753 bp, Macaca Fascicularis
  misc_feature (1)...(753): n = A,T,C or G
tatgatcannttctnnnnnnnnnnnnnnnnngaggcatggtgttattccttattactttagacctatagttctcaacactgacagcacttgaaaaatctttgcctgggcctcactcttgagagattcttgtttaatagttctaaggtgggtcttggatataactatttttttaagcaccagccctatttccctccatttctctcatgtgcagacagnnnnnnnnnnnactagactaatggtcgtttttcctgtttaaaggagataactaatttgagctgaagcaatgcttcttaattagctttgtttttgttttgctctgttggtggctttgttacaactgaattattgtgttattactatttcattgttaaagaaataaagtaagcaattcgtgatgtgagtatcagtgattcagttaactaacttttgtactgcatnnnnnnnnnnnnnnnnnnnnntgaataactggttcttgcttgtgttttttgttgctgatgacattagatccaaaattcaagnnnnnnnnnnnnnnnnnnnnnnngagaaagagaaaaacttgatttttttgtgtgtactgaaggatttaagaatgggttgacattaataagaatgttttagaacagaagacaaactgtatagcattgtggtcggacatggttcaaagtcttgtactgccacttcctacctatgtaactttaggccagttatttttcatttccaagccttgaatttctcacctgtaaaatgagaaa

SEQ ID NO: 15231 - DNA, 760 bp, Macaca Fascicularis
  misc_feature (1)...(760): n = A,T,C or G
gccgacagtgcataaaggagnnngagcaggtgccgggacacttgactgatgagctccacctgttctcccttgaggacctggtcaggatcaagnnnnnnnnnnnnnnncccttactcaaggacattctgaaagcttcccttgcacacgtggccggctgcgagctgtgtcaaggaaagggctttatttgtgaattttgccagaatacgactgtcatcttcccatttcagacagcaacatgtagaagatgttcagcgtgcagggcttgctnnnnnnnnnnnnnnnnnnnnnnnnncgagtgcccccggtgtgcgaggatcacagctaggagaaaacttctggaaagtgtggccnnnnnnnnnnnnnnnnnnnnnnnnnnnnnnnnaaaannnnnnnnnnnnnnnnnnnnnnnnnnnnnnnnnnnnnnnnnnnnnttggtgacattgttttagatatctggtattgtatattaaggaaaaagatggtctatattctctttattgcatatacttaatgtttcaaaagattgcagagtctgtgattnnnnnnnnnnnnnnnnnnnnnnttgtttacaaatgttctgttttggctgctattggttttttaaagaggttttttatacttttgtatttgaatagtgatgtttaactgatgttgagccagtgtgtgtgtgtgtgtgtgtgtgtgtgtgtgtacatatgtgaattgtaactgacaagatgaattactcaatttctctccctctaatgcttgtttgatgaaa

SEQ ID NO: 15232 - DNA, 776 bp, Macaca Fascicularis
  misc_feature (1)...(776): n = A,T,C or G
atgactatgatggcttacatgacacagaggacaaaataaaacagtacgtggaaggcagttccattcctgttccaactcactactacagcatcatcaccagctgtctggatttcactcagcctgccgacaagtgtgatggccctctctccgtgtcctccttcatcctgcctcaccggcctgacaacgaggagagctgcaatagctcagaggatgagtcgaaatgggtagaagaactcatgaagatgcacacagctcgggtgcgtgacattgaacatctcaccagcctggacttcttccgaaagaccagccgcagctacccagaaatcctgacactcaagacatacctgcatacgtatgagagtgagatttaactttctgagcagctgcagtacagtcttatcaactggttgtatatttttatattgtttttgtatttatnnnnnnnnnnnnnnnnnnnnnaaaatgttagtattttaatcctgtaccaaatctgacatattatgcctgaatgactccactgtttctctctaatgcttgatttaggtagccttgtgttctgagtagagcttgtaataaatactgcagcttgagtttttagtggaannnnnnnnnnnnnnnnnnagatttgatatttgcattgaggaaatagtaattttccaatgcacagttgccacatttagtcctgtactgtatggaaacactgattttgtaaagttgccttcatttgctgttaactgttaactatgacagatatatttaagccttataaaccaatc

SEQ ID NO: 15233 - DNA, 695 bp, Macaca Fascicularis
  misc_feature (1)...(695): n = A,T,C or G
cagagctggctggccctgcccagccgtttggccccaagggtggctactcttactagccccnnnnnnnnnnnnnncctgccgcaggtgggtgctgccctgtgtacatatagatgaatttggtgttggggaaaccttcatctgaaacccacagatgtctctgggtcagatctccactgtcctaccagttgtcctagcccagactctgagctgctcaccagagtcattgggaaggaaaagtggagaaatggcaagtctaaaggtagagtctcagaaactcccctgggggtttcacctgggccctagaggaattcagctcatcttcttcctaggtccaagctccccacaccttttccccaaccacagagaacaagagttctcttctgggggacnnnnnnnnnnnnnnnnnnnnnnnnnnnnnnaggagggtgaggaggttcactgagctccccagatctcccactgcggggagacagaagcctggactctgccccgcgctatggccctggagtgtcccggcttgtcagttcttggtgctnnnnnnnnnnnnnnnnnnnnnnnnnnnnnnnnnnnnnnnnnnggatggggggtgctgggtagaagcagagagggatgggttcctgctccaagggaccctttgcctttcttctgccctttcctaggctcaggcctgggttccacttccacctccaccacat

SEQ ID NO: 15234 - DNA, 749 bp, Macaca Fascicularis
  misc_feature (1)...(749): n = A,T,C or G
agatgaagctacgttggagannnctggacttaacttacaggaagataaagaggatgagagcatcagaaaaacagaaatcatagatttctcaacagatgaaccacaaactgaaacagagtcaaatgtaaatgcctatgaagagtgtccttctggaattcccgtagatatgtggaataaatttcaagaattgcataaaaaacatactgaacagaaaagcacaacctcaagattcagagggaaaaaaagaaaacgctccagaaaagataaatcgaagaatgaaaaagaatctcatagtgaaacatcctcaaatgaaacccaatggaaggagcttactcagtattttggagtcaatnnnnnnnnnnnnnnnnnnnttaaaaggaaaaaagttgagaagtcaggccttgaaaagaggatagaccaggctgtggaggagtggaatattgagaaggctgaggaacttagcaaccagctagctactcgagagcttggtgtaaaaattgccaaagcagttgcctgccacaactttgtaaaagccaaaaaggaggttgaaaannnnnnnnnnnnnnnaaaaaagaagaaactcgcatggggatttgaagcaaagannnnnnnnnnnnnnnnnnnnnnnnnnnnnnnnnnnnnnnnnnnnnnnnnnnnnnnagacatttgtagactcagatgctcaatttactgagaatgttttcctgcctgtgttaatacctcagaaaattgatagcannaaacaaaaa

SEQ ID NO: 15235 - DNA, 1054 bp, Macaca Fascicularis
  misc_feature (1)...(1054): n = A,T,C or G
gggaccttggtagctggctaaggagcgtgggctccacacaagacagctggagaatgggctgtccatttgacctcgttctcaaggggctcatgggtctgagagcccccacccactaggcttgattgcatccctgttgtgtcctttaagagacatgtttcttaaccccccaaccttgccccaagtgccctggactaaatttcctgcgccagtgactgcagttggccaagggacaatgcggaaaatccagtgcccatccttccaccctccctgatccccagaaacttggactgacccccttatccttatgctgatgttgagttttgggattgttgctggttgaagtgggggcagatgcctgtcaccaaggtgttgactgtgtgagaaaaacagtttgggtgacaaatcctgnnnnnnnnnnnnnnnnnnnnnnnctagaaataagcaacacctctcccgaaaagcagcccacagggcaggggccccgcagcccagccatcactcatctttgaggaaattagttggtggcctctgtgcactggttggtggccacatcacaggtgatgtcctgttcacatacctgcttgtatttaaaaccctcagtctgtcctgttgtgtggggcaaagtgatggactctgccaggtggacgtgctgtgggtgggtgttcccggtgtgtgctgggcctgaatggataggggccacttcacagcacgtcagggaagatcagtgtcacacaattccaatggattttatgctctttttgggaaaaaaaaaaaaaaattatttagcataaacatgaattttttttcaatgtagcccctggggaatgaatgaaattttgnnnnncttcaancagtaaaattaaattaagaccactgagggagagaccctttctgaaagaagtctggccaaaagcacttgtaatgctgctgacattgttctgtttttacgttcatttgctnnnnnnnnnnnnnnngctgacacagtgagttttctctgatgtatttaaggtgatatatttgcctgagttactcctgtatcattctcacacatcca

SEQ ID NO: 15236 - DNA, 733 bp, Macaca Fascicularis
  misc_feature (1)...(733): n = A,T,C or G
gannnnnnnnnnnntcttatgtcttccccgcaaagcagaacagttccaagtgaaaatctagaacaggtgccccagggtgggtctccaaatgattgtgaatcaatannnnnnnnnnnnnnnnnnnnnnnnnnnnnnnttgatactgccnnnnnnnnnnnnnncaccactgttgctggtgtttccttgtatggtagtcaaactcatgaagaaattttagcggaattattgtctcctacaactgtttcaacagagctgtcagaaaatggggaaggtgactttaggtatttgggaatgggagatggtcatatcccaccaccagtaccaagtgaattaaatgatgtttcccagaacacacatctgagacaggaccataattattgtagccccaccaagaaaannnnnnnnnnnnnnnnnnnnnnnnnnnnnnnnnntaatgcctgcgttagaacattaaacttggagagtcccatgaagactgatattttcgatgagtttttttcctcctcagcattaagtgctttagcaaatgacacattagacctaccnnnnnnnnnnnnnnnnnnnnnnnnnnnnnnnnnnattaatgcttgttaacttttttttcatataatatttattcttagaagaacttactgtgtgttcaggtagtgtttatacactggacttgtgtaattacttgtgtaataacgatgaacaaaatgcaaggtttgacctttggttctgcccatgaagc

SEQ ID NO: 15237 - DNA, 746 bp, Macaca Fascicularis
  misc_feature (1)...(746): n = A,T,C or G
ttccatttggtattacacagtcaaatttacatttattaaaattgccattttattaaacatnnncatgcacagtagattcaagttgtgtctgaaaatatctcttgtgtttttttgattttgctgactttaaaaggattaatctgggcagacattatgaaaaagaaaggttgcgtttaatatattttttgaactttgtaggacaaaacatagctggttaaccttgaagtgactgttgtaccatggttgtgcacgtgcttcagaatcctatggaagacagtgttcctacttgcagtacatcaaaggaatggatggtggaccctactgttcatgttttgaaacataaatgttcactttaaagcaattgccataatagataaaaacctgaactttcattggatttttgttaattttcctcattttgaattatgtgcactaccatagctacatcagtttgatacagtattgaaaaattatcagttatattttgctgtttatgatctatttgtagattaggattaaaatggatttaatccatttttaaggctgtgtgaatttttctaaacaagaaccatttgcaatatggatttcatagagattaaaccaattataacttatcattagcagtcgtgagcacatgttcatatagtcaatgtaaaaatacactaatgagtatttggtaaatcccagtaggcttttactagcataattttgtgttgtacaattaagttacatttacatctctaatt

SEQ ID NO: 15238 - DNA, 637 bp, Macaca Fascicularis
taaaaagaaagactctcccatgttataggaaagatggggcgtaatgtgactgtaaaggggcctgccatagaaaagccacatccctgagggaggcactctgtcctcactccctgcccttcctttggttgccatatggaatggccgtggaatacacaaagtcacaatgcactatccatgagaagacggtgaaatgatgtaatgacagagaaggcagacaacacgtctccatgactcatctagtcagagcaattaagggaaacagctttggtcaacattctactttggaaagaatgttgagcctagatgtggttaaattttgactctgggaacttggttcagatgtccttttcactgtatgtcctctggcccctttggcaaggttgtcacagctcccacagcccttcctacaagcacctatcattgggcttgtcacactctattgctcttctgccctaaagatgcagtcttctcttcaacaatgccaccagttcttcaaaggcacgccttagttttcctcaaccacactcaatctttttgctccaccctgacttcctcactcctaaccctgatagttacctaaagtgacacttaaatgtttcagagtgaatgcaaaaaagagagatggacttggagtcag

SEQ ID NO: 15239 - DNA, 971 bp, Macaca Fascicularis
  misc_feature (1)...(971): n = A,T,C or G
gacgtcccgaangntnnnnngctccgacaggcaacttcggccttccctgccctgacctggaacctctgggagggctgcagagtaagtgccgcctctgcgctcttacggaggcacgaggcnnnnnnnnnnnnnnnnnnnnnnnnnnnnnnnnnnncacttagcgctccatgcctgcggactccgggaggcatggcctcccccagggccgccacctctgctggttgctctgtgctttcaccttaaagctctgtcaagcagaggctcccgtgcaggaggagaagctgtcagcgagcacctcaannnnnnnnnnnnnnntggtggaagagtttgtggtaacaacagannnnnnnccatgctnnaatttccaggctaaaactacccctgagtgtggtccctcagggtatgtagagaaaatcacatgcagctcatctaagagaattgagttcaaaagctgccgctcagctttgatggaacaacacttattctggaagttcgaaggggctgttgtgtttgtggccctgatcttcgcttgtcttgtcatcattcgtcagcgacaactggacagaaaggctctggaaaaggtccggaagcaaattgagtccatatagctacattccacccttttatcctgggtcttagagacccaatctcannnnnnnnnnnnnnnnnggactgatttgcactcttggttctttggagccttgtggtggaatccccttttccccgtcctcttctttcagatcattaatgagcagaataaaaagagtaaaatggtttccttcccttctgtaacttggagcaggaagtcatgggggcagagagggnnnnnnnnnnnnnnnnnnnnnnnnnnnnnnnnnnnnnnntccccaccacttctcccttgttttccccctcttctactacttatatgagacttctgggatacaatttcagttaaaacgtttatttatcactcaaaacttattcccctc

SEQ ID NO: 15240 - DNA, 730 bp, Macaca Fascicularis
  misc_feature (1)...(730): n = A,T,C or G
gcaaggacagaggtctgnnnnnnnnccnnncacttgaacagggtatgatgtnnnnnnnnnnnnnnnnnnnnnnnnnnnnnnnnnnnnnnnnnnnnnnnnnnnnnnnnnnnnnnannnnnnnnnnnnnnnnnnnnnnnnnnnnnnnnnnnnnnnnnnnnnnnnnnnnnnnnnnnnnnnnnnnnnnnnnnnnnnnnnnnnnnnnnnnnnnntgggacatcggcagagccttgagaagtttcattccttnnnnnnnnnnnnnnnnngaggaggaagnnnnnnnnnnnnnnnaatcaaagtggaatgaagctccagcttttagaaggagagccacactgtggagggtcggcagccctcaggagtgaccaggaggactggcggggaagatcgagctcaggttcgccacataggtcctgtgcaggagccctggcggtgttgggctgagcccgggtctggatttctgtgggggacactgagtctcccagtgttcagtctcccaggactctgctgcctcagccagagcctccatatgcttaaagtgttgnnnnnnnnnnnnnnnnnnnngatcgtgtttgctaaagagaaatctggaagtgtgagatctgtaagaaatgaaaggtcagggtggaaagaggtctcnnnnnnnnnnnnnnnnnnnnnnnnnnnnnnnnnnnnnnnnnnnnnnnnnnnagatttttaactttaactgaccatttaagtttttttaataagt

SEQ ID NO: 15241 - DNA, 279 bp, Macaca Fascicularis
  misc_feature (1)...(279): n = A,T,C or G
ttttttgttttttttttttttttttttatttttttttctttttttttttttttttttttttttttttttttttttttttttttttttttttttttttttttttttttttttttttttttttttttttttttttttgnacccccaccccccacccagagcaacagcgtaaaggcctgccctgatgctctcctcctaccagaatgaagcccacagagtccctccacctccacaccaggcccgctctccagttnntccccgacctgatgctgcgagaagcac

SEQ ID NO: 15242 - DNA, 729 bp, Macaca Fascicularis
  misc_feature (1)...(729): n = A,T,C or G
agatgggcannnnnnnntcttgacccccgggnnnnctgccatcctgtgagctcagtccagtgcccagtatccatacctagccctgacccagagctgctacgagtgacttgggccccaagcctgaagaattgcttggccatctcaggttttgatggtacagtccaggtctatgatgccacatcttggaatggaacgcagagccaagtagaacctctcttcactnnnnnnnnnnnnnnnntcctagatggaagcaggacggaccctgctcctttggtcaccacccacacctggcacccctgcagaccaaggactttgttatcagcaaccaatgatgcctctttgcatgtgtgggattgggtggacctttgtgccccctgctgacaccagcatctttccatccaggcctctagaaaggggaggagctgctgtagtagcaaggctactgatgtaggactcaagtgactgccagtccnnnnnnnnnnnnnnnnnnnnnnnnnnnagtacaccagcgtcacttagcctcaggttccttatctgtaaaatgaggatagtaagaactacctcgtagtgatattgtgaaggttagaagaaatgcatggtgtaactacttagtagctactgttacatctaggagtgtaaaatggcagtgttttgtccctgtcttcacactagcataggaagaatcaaaagagctaacaaacatgctttgcgaattttttaaagaaaaaa

SEQ ID NO: 15243 - DNA, 750 bp, Macaca Fascicularis
  misc_feature (1)...(750): n = A,T,C or G
agccaacacacaggtgacggagaagaacaagaaggagtacatcgagcgcatggtgaagtggcgggtggaacgcggcgtggtacagcagaccgaggcactggtgcgcggcttctacgaggttgtagactcgaggctggtgtccgtgtttgatgccagggagctggagctggtgatagctggcaccgcggaaatcgacctaaatgactggcggaataacaccgagtaccggggaggttaccacgatgggcatcttgtgatccgctggttctgggctgcagtggagcgcttcaataatgagcagaggctgagattactgcagtttnnnnnnnnnnnnnnnnnnnnnnnnnacgaaggcttcgcagccctccgtgggagcaatgggcttcggcgcttctgcatagagaaatgggggaaaattacctctctccccagggcacacacatgcttcaaccgactggatcttccaccgtatccctcgtactccatgttgtatgaaaagctgttaacagcagtagaggaaaccagcacctttggacttgagtgaggnnnnnnnnnnncgcctgacattttcctggccagtgacatcacccttcctgggatgatccccttttccctttcccttaatcaactctcctttgattttggtattccatgatttttattttcaaaccaaatcaggattgnnnnnnnnnnnnnnnnnnnnnnnnnnnnnntctaagatctaaccttcaggcttctctcctctgtttt

SEQ ID NO: 15244 - DNA, 103 bp, Macaca Fascicularis
aactcggttcaggtagcagctccactaggaagccttggatgaccataatccattcaattccattccacctgttcgcaggcagtctggggttagggacccttcc

SEQ ID NO: 15245 - DNA, 739 bp, Macaca Fascicularis
  misc_feature (1)...(739): n = A,T,C or G
tagcagannagtccaaagcannnnnnnnnccatggatacagtttaaatgtaacaaagaaagagttgaactatgtacattgaaaaaaggaaagacatttttttcataccaacctttccctagttnnnnnnnnnnnnnnnntagaaacaaaacacatttttaaatctttttatcaatttaatttaggacgaagtaacacaacttttataattaaccactgaagttgtctttaaggataaaacttaaagaaattttaaaatgggtggtgccatattttattagtggannnnnnnnnnnnnnnnnnnnctccaagtctgggcatcatgacactcgcatgatgcccagaagaaagtnnnnnnnnnnnnnnnnnngtcagagggcagacacgctacacatcacaatgatgagagctgaggattctgccctcttcaannnnnnnnngaaaattattattttcattcaaactannnnnnnnnnnnnnnaacagttaaaaagtcagaatgaagaataaaacaattttcttttcacatagaggagggacactccttcagnnnnnnnnnnnnnnaattctgtgctgagtccctgctccttcagaagggtaaactgaaggtcagttattgctaacaaagccagaagtggcccctttcccactctgaagatgtttcacacgaaannngcgtttgtttggcttgaagccctctgaggaannnngacagcggannnnnnngcaggctggcactg

SEQ ID NO: 15246 - DNA, 761 bp, Macaca Fascicularis
  misc_feature (1)...(761): n = A,T,C or G
tcatttaatatgatacatttatttctgactgtnnntagtttaaatatgcatatactttatgtatgggggttgtnnnnnnnnnnnnnnnacctcattttataatacaatgttaagtctcaaatgaaacttgttttttagttaaaggtttccagagtgactccattcagagtagaaaaactataagctggagtggtttaagatcgttcagtaaccgtttttcagttgaggcaagtctaacctgggatgcttaagctactttggattgactaaataattttccatcataatggatcaaagaaaagctcctttgactcctcactgccccctcttgctgtcttcctcctaggagtgaagtgcaaccagtggtctgaggaggcttcgatggtgtttcgaaatcatgtggagaagaaacctctggtggcactggtgcagacagtcattgaaaatgctaacccnnnnnnnnnnnnnnnnnnnnnnnnnnnnnnnnnnnnnnnnnnnnnnnnnnnngatatctggattcatgattttatgtcagagtatctgatagagctttcaaaagttaattaatgnnnnnnnnnnnnnnnttgacaactaattcaaattttttagcaataacaaaatgtagtaggcttaaaaaaaatnnnnnnnnnnnnnnnnnnnnnnnnnnnnnnnnnnnnnnnnnnaagaatatgcttatgtttgatgaaagatatttaacaagtttcgttttaacagagttgacttttcgaagaaaattgtac

SEQ ID NO: 15247 - DNA, 267 bp, Macaca Fascicularis
tggggatcaggcaaagataccagtgtcgtggagccgactgcactgatggaggaacccactgtggtggaggaggcccagggcgccctggaagaggagtctccagccaaaattcctgagttggaggtagaagaagaaacccaagttcaagagatgactttagttgaatggaaaaatcttcaagactgaccagaccaaagcctgagtttaacatccggaaaccagaatccactgttccttccaaagcagtggtgattcacaagtcaaaat

SEQ ID NO: 15248 - DNA, 809 bp, Macaca Fascicularis
  misc_feature (1)...(809): n = A,T,C or G
ctagccaaaggtatnggnnttcatgaaaagtatgnnnnncttcatgaagaaaatggatgagctttatcccatggagccagaagaagaggccaatggaagnnnnnnnnnnnnnnngcggtatggggnnnnnnnnnnnnnnnntgcagaggaggatgactnnnnngncnnnncttctgacnngtnnaaagagatttnggaaacaggggacaaccgagagcatagccaccaccaggatggcagtgataatgaggaagaagtgagcacgagatatgggggcttcatgagaggcttaaagagaagcccccaactggaagannnnnnnnnnnnnnnncagaagcgatatgggggcttcatgagaagagtgggccgcccagagtggtggatggactaccagaaacggtatggaggcttctcgaagcgctttgccgaggctctgccctccaacgaagaaggggaaagttactccaaagaagttcccgaaatggaaaaaagatatggaggatttatgagattttaataccctttcccaccagtggtcccaggccccagcaagcctccctccannnnnnnnnnnnaaactgttgatggtgttttattgtcatgtgtttgttgcttgccttgtatagttgacttcattgtctggataactgtacaacccgaaaactgtcatttcaggttctgtgctctttttggagtccttaagctcagtattggtctgttgcagctatctctttttcatgctgaaatagtttttgttatcttgtctcttattttgacaaacatcaataaatgcttacntgtatatagag

SEQ ID NO: 15249 - DNA, 688 bp, Macaca Fascicularis
  misc_feature (1)...(688): n = A,T,C or G
gagcaagatgnnnnnnnnnnnnnnnnnnnnnnnnnnnnnnnnnnnnnnnnnnnnnnnnnggcccatgcagaatgccaccaagtatggcaacatgacggaggaccatgtgatgcacctgctcnnnnnnnnnnnnnnnnnnaagnnnnnnnnnnnnnnnnaggggagcttcccggagaacnngagacaccttaagagcaccatggagaccctggagtggaaggtctttgagagatggatgcaccacaggctcttgtttgaaatgagcaagcactccctggagcaaaagcccactgaggctccaccaaaagagtcactggaaatggaggacccgtcttctgggctgggtgtgaccaagcaggatatgggcccaggggcgtgaggtcccaggaggtggccaaaagatagacggaaccccattcccgacatcacggcagcctccaacacaaggctctgagatatgggcttatggacaaggtggnnnnnnnnnnnnnnnnnnnnnnnnnnnntccccagggtggacagggtgactgtcctttcccctctggcctttggccttggcttttctagcatatttacctgcacgctgagccactctcttccctttccccagcatcactccccaaggaagagccaagattttccacccataatcctttctactgacccctagttccctctgctcagccaa

SEQ ID NO: 15250 - DNA, 697 bp, Macaca Fascicularis
  misc_feature (1)...(697): n = A,T,C or G
atgcttatgtataaacatgtatgtaatatgctttctatgaatgatgtctgatttaaatacacatattaaaatgtatgggacaaccaannnnnnnnnnnnnnnnnnnnnnnnnnnnnnnnnnnnnnnnnnnnnnnnnnnnntttaaaatnnnnnnnnnnnnnnnnnnnnnnnnnnnnnnnnngctggcagcaaacacaatatctctcttgattttggtgattccttctgcaaatttattttccagctcagtgtnnnnnnnnnnnnnnnnnnnnnnncacatttgtcgaagcaattcttctaggcgcctcatacaacgaattatgctgccttcaaagacatctgtcattttgcagatatgggcaaatgtagctccagttgcccaggtatatactacatccattaagtgaggtttaaatgagcttagataagtttcctcatcaatttccaatttggcttctgctgaaacttttgcgattcttttagcacattcctgcatttgacgaagtggtcctgctaattgttctgttaatttgggcatctcactagaattctcttgaaacacaaagcagcttaatannnnnnnnnnnnnnnnnnnnnnnaggtcattgaaaaggccattaaacatcatctcagttagaaggagctcatcagcactgcttatctcacaggccactcgtcctttcatctctattacatc

SEQ ID NO: 15251 - DNA, 722 bp, Macaca Fascicularis
tgcacataaatggccatttatgaaaactcttccaagagactgaaaccgaagctctaaaatgccacttctccagccgctgggcagcacattttgagtttgttcacatccacattctggctgtgtagtcactccgcagatgggtggtctctggggatcagaatgccccgccactcatgagactcttcattgtgtccacttcgacagaaaaagtgggaatgtatgcggagctctcaaaagaaacaaagcagaaattctggtggggccaaaacggtgccttaagccacatcctctgaattggccctaacttgaattaaatgcactagtgcaaaatcccttgacaaaaacgcgtaggttatttccaatcagcattgttctgatgtaacctgtttcactgcatcttctcggcagctcctgaccactgctcagttttctcttctacagccattgttctggtggacaggtaacctaggtactccaaatcctggcaggaaaaatgcacagcattaggaagcaacactcagtaatcctaaaatgatttccaaagctggttacacgtgaactgcaaagtctattaaattaaaagactttctcgttacaaagttttagtcaacatagcaaaaccatgggaaattaagtggaaagaattaaatatgtaaattcataaggaacaaaagacgagaagttaattatacgataggttgggacaccatagttcgttgtta

SEQ ID NO: 15252 - DNA, 908 bp, Macaca Fascicularis
  misc_feature (1)...(908): n = A,T,C or G
tgcttttccaaattatgacaacaaagaaaaatatttgcttttccaaattatgacaacaaagaaaacccaaatatcnnnnnnnnnnnnnnnnnnnnnnnnnatgattttgatcactttttatttgaggaagagatgcatcagcctataaataaatggtgaagagcaataacatctgatggagactagccnnnnnnnnnnnnnnnncctgtgcagtggattcaggtggtgggacacatccaccttatactggagtttgtggttcctgttgttaggcatgccatgtgccttttccttgttccttgcccactgatactcactagcctgtttgtcctcacccctgaagcagacaaacacatgtagatggaggaaaagtgacaagcaggtgagctcatcagaggccatcccaaaggtgacccatcccatggattggagtcaggtctattttagccatggcgggttagaagaaagactattctcatagctaacatggttgaccttcaaccctcttttccctttagttggacatagaagcagctctgaccaaagcccttggggaagtggacattcttctgacctggatgcagcaattctacaagctctgaatgtctagatcaggaccccccttcccccactggttcattccctgtgtcatttcaaacagtctcccttcctatgctgttcactggacacttcatacccttggccnnnnnnnnnnntttnnnnnnnnnnnnnnnnnnnnnnnnnnnnnnctttaagcagccccagtgacagtcagggaaggtgcctctggatgctgtgaagagtctacaaagannattcctgtatttattacaactctatttaattaatgtcagtatttcaactgaagttctatttatttgtgnnnctgtaagttacatgnannnagc

SEQ ID NO: 15253 - DNA, 686 bp, Macaca Fascicularis
  misc_feature (1)...(686): n = A,T,C or G
cagatgatcatgggctggccgctgccctctngagannnnncttcaacgggaaatgtgaagaccctcgacatcttgaattgctggtagagtatgtgaggaaacagatgcagtacctggattccatgaacggggaggatctgcttctgacaggggaggtgagctggcgccctctagtggagaagaatcctcagagcatcctgaagccccattctcccacttacaacgacgagggactttgatgggctgggccctctgcacggctggccagctggcttcgagaaacctnnnngagagacgtgcctgttggtccaggaccccgcagaaagtggtctgaactgacctctgaacagcatctgtcaaatacctggccccatttgtgttgagtttcctcttagtgtgcccaggagtatgatctgctgggatacagggatgggagaacccctagctctcccacgtgtcctctccctccggaagccctgagtgagagtcccccagcacacactccccaaccccctccagcaactacctgtgactgacagcttttcccaaaggccaaggaagggatggcgtaggttcaaaagggaaaccccccagggcctgctgtggcctaggagcggactgtaatgctgcggaatctggatggcgannnatgtgttgtccctcggcttccagccatggggttgagt

SEQ ID NO: 15254 - DNA, 772 bp, Macaca Fascicularis
  misc_feature (1)...(772): n = A,T,C or G
agcctcagcactccaactccagagactgcannnntnatcagcntnntggcacacaggacctcgagtgtgnnnngaaccctgcatctggggaaaccagagggcagggtggagggagtcatgccagcccgtcaaccagcccaggcgagagtgtagttctgggatttgcagtaccctgtgtgcagcaaggacaggaaacagaccaaccaacagttgaaagtgggagtgagcaaactgtcctgtggttcactttagtnnnnnnnnnnnnnnnnnnncacgtgaggaaggaagcaagcaggtggggctggggaggggtaaggatggatgcttcctccaacccatctcctctggctcttgcagggacgaggccagcagctctggctgctcagaaacagactccacagagctggctagcatcctctagggctcgccacgttgcccgaagccacaatgcggaaggccacaggagggatcaggacctgtctgccggcttgctcagcagctggactgcaggtgctaggaagggaactgaagactcaaggaggcggcccaggacccttgctgtgctcaccgtggggctggctgctctgtggcctcctgcctcccctctgcccgcccgtgaggcaaagccctggggctgccactgtgaatatgccaaggactgatcgggcctagcccggaacactaatgtagaaacctttttttacagagcctaattaataacttaatgactgtgtacatagcaatgtgtgtgtatgtatatgtctgtgagcta

SEQ ID NO: 15255 - DNA, 731 bp, Macaca Fascicularis
  misc_feature (1)...(731): n = A,T,C or G
atcatggactggtngnacatgngggaaaaggatggagacagcaagcatcaaaaggaaatctgtnntatggtttcnnnnnnagaaaaatgtgcaaagcctcnnnnnnnnnnnnnnnnnnnnnnnnnnnnnnnnnnnnnnnngttgaagggaccatggggcctttcagatcaaaagattcggaaaaagaaagtcctccacgcagaatcaaccaaaaccagcctactcaggagccagatgtcctccctcaggagctcggctggcagtgaaaggaaggacggcctctccaatgccagcagccagaggactgctctaagtgacaaaggcaagccagaaagggtctctggccagccagcctccctttnnnnnnnnnnnnnnnnnnnnnnnnnnnnnnnnnnnnnnnnnnnnnnnnnnnnttattttaaatgggcccagattgcttcctattcaaaggaatcccttgtaagtcaggtcagcctgctttatgacctggattttatgagagctggccttgtgcttacggtgcatgggtgttcaatacacacgtggctcaagtaaataaggtcatgctgctgtcccttcatggtttgattttgaaactgtcatatttcatagttggtttttttcttccctttcttcaatggatgatgctaccagatgagcccctctctggtccaaatggtcagnnnnnnnnnnnnnnnnnnnnnnnnnnnnnnnntttttccttcaatcgt

SEQ ID NO: 15256 - DNA, 581 bp, Macaca Fascicularis
aagagttcaagttctgtaaaggttttaaaaatgttaagtaatgtgtgcactggaggatgagctctccaggcaaagcaaagaaaggatatactagtctaaaagaataacccattcttgttctgggcatttaagctggtatgttagtgctacttttaagattgtggagtgtgagttaatactcaagtgatctgactttgagtggcatcaagaaaagatgattatcaggttcatttttcaactaatcttatgtggaattgaattagagaacacggcattactcttttagggaaggtgagagctaatttatatcagagcttttattacttgtcaggataagtaaatttttatacccgtactgctttcatatttgaagtgagaagaaagtttatgcttgtataatgcttaaatttcgatccattgtaagaatattttcactgacatatgatggcacttgttgacaaatcattcaagtgagaccacgctactagacatgattttgaaagagtccatgatttcacaaaactcatttttattttgttctcagtcactctgttaggtaaaaatatgaggaattcatgtac

SEQ ID NO: 15257 - DNA, 803 bp, Macaca Fascicularis
  misc_feature (1)...(803): n = A,T,C or G
gtataaaaataagaaattaagggttaacatcaatgtgccaatgaaaaccgaacagaagcaggaacaagaaactacacacaaaaatatcgaggaagaccgcaaacnnnnnnnnnnnnnnnnnnncgtgagaatcatgaagatgaggaaggttctgaaacaccagcagttacttggcgaggtcctcactcnnnnnnnnnnnnnnnnnnnaacctcgggtccctgtgatcaagaaatgcattgacattctaattgagaaagagtatttggagcgagttgatggtgaaaaggacacctacagttacttggcttaacccttctggaagggtctgactgtgtgacccgcggcaaatagttcacgttggnnnnnnnnnnnnnnnnnnnnnnnnnnnnnnnnnnnnnngccgccattggacctccctttttaaaacggagaccaagactcccatcagctggtctcggatttacatcggaactgctcaggattgatacatttcaagtctgtaaatacggacaccaacgccatttaccctaatttaagaacagcggggactgaccctccatgnnnnnnnnnnnnnnnnnnnnnnnnnnnnnnnnnnnntgggctccccgattcgcagctgtcgccttggcagcacttgtcacgttggcagcactttgagagcaagtgtgaatggacccacatgtaatctgctatgaaaaccatttgtatagtgtgtttcattttttaatgtgtgaaaataaagaaaattaaaggatttctgtacaagtcgcatttggttttgttttaagttttactaatttct

SEQ ID NO: 15258 - DNA, 779 bp, Macaca Fascicularis
  misc_feature (1)...(779): n = A,T,C or G
gatgagtgtgagacagaggtgtnncngggagagaatgagcagtgtgaaacaccgagggcggttatcgctgcatctgtgccgagggctacaagcagatggaaggcatctgtgtgaaggagcagatcccagagtcggcgggcttcttctcagagatgacagaggacgagttggtggtgctgcagcagatgttnnnnnnnnnnnnnnnctgtgcactggccacgctggctgctaagggcgacttggtgttcactnnnnnnnnnnnnnnngctgtggcagccatgactggctactggttgtcagagcgcagtgaccgtgtgctggagggcttcatcaagggcagataatcttggccaccacttgtaggatctcctcccacctacgctgcccccagagcttgggctgccctcctgctggacactcaggacagcttggtttatttttgagagtggggtaagcaaccctacctgccttacagagcagcccaggtacccaggtctgggcagacaaggcccctagggtaaaaagtagccctgaaggtggataccatgagttcttcacctggcggggactggcaggcttcacaatgtgtgaatttcagaagtttttccttaatggtggctgctagtgagctttggcccctgctcaggatgagggggtcctcacagtggtggggccgtcacagccccctcctgccagctgcatgccagccccctcctgccagctcgttctgtgttcaccacatccccacccctcattgccatttatttatcatctcagga

SEQ ID NO: 15259 - DNA, 800 bp, Macaca Fascicularis
  misc_feature (1)...(800): n = A,T,C or G
aagcagcatagacatatgtaacaaatgagcacgttatgtnnnataaactttatttacaannncagaagacatcccnnnnnnnnnnnnnnnnnnnnnnnncattgcactggctaaatcattatttatggagaaatcatcttcnnnnnnnnnnnnnnnnngcctaaaagagtttatatacttctaaaagctcctaatacatccaaagaattgctttctgattcgtgtagtctctcgcacagattcataaacttttatgacttatattgtttccaggtgggcatgttttctttcccagtttnnnnnnnnnnnnnnnnnnnnnnnnnnnnnnnatattttagggtgggnnnnnnnnnnnnnnnnnnnnnnnnnngaaaggggtggatttaattccatcaggtccagtnnnnnnnnnnnagtcataatactttataatcagttaaataaatagaannnnnnnnnnnnnnnnntatttttttaaagtggcaaatgtggttttcttttttcagcctttgcgctttttgagtattttgaccatagggagataatttttttataatacaaaagtaaattaaccacttggaattttaaagataatgttatgtgtgtatgtgaaatatatatatgtatgtttatttcctaaaagaggaaaagatacctttctgttcaacttgtatcaactcctgttttctaattgctgtgaaatggcaactgttgataaattattgtgattgttttaaaatctaatgggaagtaaaatatattttgattttacccaactttaatctgtaaagtagcactaa

SEQ ID NO: 15260 - DNA, 735 bp, Macaca Fascicularis
  misc_feature (1)...(735): n = A,T,C or G
gtcatgtgtcacgtggctagaaacttggctgtggagcagttaacactgagtgaggaattcccagtgcnnnnnnnnnnnnnnnnnnnnnctttctttgcagttattggagccctgttacagagcagtggacccgagaggactgcactttttatcagggacttcttaattactcaaatgactggaaaagagctctttgagatgtggaagataatagatcccatggggctattggtagaagaactgaagaaaaggaannnnnnnnnnnnnnnnnnnngacttacaaggcagtctggtggcaccacagctttgcctttgtattttgttggcttatactgtgataaaaagttgattgcagaaggacctggggaaacagtattggttgcagaagaagaggctgctcgagtggcccttagaaaactttatggattcacagagaatagacggccttggaactattccaagcccaaagaaaccttgagagcagagaagagcatcactnnnnnnnnnnnnnnnnnnnnnnnnnnnnnnnnnnacnnnnnnnnnaaaatcactatgtatacgcggattttcttctgtttctgccaccctgagacagcaagaccatcctcttttcctcctcctcttcagcctactcagcatgaagacaaagatgaagagctttttgatcatccatgtccacttaatgagtcgtaaatatattttctcctcctttgatttcctttatattttttagct

SEQ ID NO: 15261 - DNA, 774 bp, Macaca Fascicularis
  misc_feature (1)...(774): n = A,T,C or G
tgcagagcgttcattcactaacactcactgtcagtgcccatgttagctcgctgcctccatgtgactagcnnnnnnnnnnnnnnnnnnnnnnnnnnnnnnnnnnnctgtgtataatgtaattttatgttaattgttaattacttaaaaaaaaaatctaccatctgattggctggaaccgagagctgtgggtaaaatttgaaaattgtatttagagtaagaagttttacattttaaaccctattctcctttatgcattttcaatgaaatggaatgaaggctaatgtgcttgctttattttcttttgtaatcttggattttgtagcttttaaaactagaaaccattgttctaacaaagcaggcaactctactctataaacacnnnnnnnnnnnnnnnnnnnnnnnnnnnnnnnnnnnccccaatgtatctggctgacagtctttgtcgttgttcatcctggggataaaggggaactaggctagcannnnnnnnnnnnnnnnntttaagcatatcttaaaatagtatttaagtaaatggtctaatttctacataattattgcactgaactgtcttttttgtttattaaggtgtttaaataagctcagctaattcaagacactgtagccacttgtgcatcagcgtgcttgaatttagtagcttacagcattanttatgaaggaaaaaatacataaatatgaagtacctcatgttgaatgttattgtactgtatttttaatgtaacagtgcagatcttgttagacacatgngatgtgtat

SEQ ID NO: 15262 - DNA, 735 bp, Macaca Fascicularis
  misc_feature (1)...(735): n = A,T,C or G
gtcacgtggctggacgacaacaaggcagggggcagctgggatctggctgtgtcggaaagggcagcccggagccagtgcacctacagcaacnnnnnnggcaccgtggtgnnnnnnnnnnnnnnnnnnnnnnnnnnnnnnnnnnnnnnnnnnnnatctcctcggcagggctccctgggactgctgtacaatgctagtcaggagtgggacctgaggtcgagctgcggttctctgcggctcactgtgtctatcgaggctcgggcagccgggccctagtagcagggtatacaggagctggggaaggcggcctctggggnnnnnnnnnncaacaggtgggggcagagaggagctgagtctctnnnnnnnnnnnnnnnnnnatgcaagggacagggttgcacccccaagatgagggagtggagtctggtctgctccactaatcagggtctcctcctccccctcttccttcattgcttctcccggagtgtgcggcctaacaaggccatccttatgctttgcaaagcaccctcgaaggctgcaccacggcctggaggataaaatatcctcagccctgttgcttccccattctgtaacacccacccgctctcgcccacaccttgaggtctactcactgcatcccagagatacaaagtggaggccactgccttctgatctggctcacaagcccaatgtctgtttcagtgtctctccctgaaatgngtnnnaanngaagagaaaaaa

SEQ ID NO: 15263 - DNA, 850 bp, Macaca Fascicularis
  misc_feature (1)...(850): n = A,T,C or G
gctggtcgtcataatctctgtattatatactttgcagttgcagacgtctgtgcctagcaatatttccagttgaccaaatattctaatctttttttcatttatatgcaaaagaaatagttttaagtaactttttatagcaagatgatacaatggtatgagtgtaatctaaacttccttgtggtattataccttgtatgctgttacttttattttattccttgtaattaagtcacnnnnnnnnnnnnnnnnnnnnnnnnnnngcggggccgcccagcgggtcaggcacagggagccccggtccgatcttagacccctgagcttcagggaggggcgggcgcgtcgccgcctctggcatcgcctccggttgccttacaccacaccttcacctgcagtcgcctaggaaacttgctttcaaacttcttcagggttttttccttcaaattttggaccaaagtctcatttctgtgttgtgcttgcctctgatgctgggacccggcaggcgccgctcctgtcctcactgtgctgtctcccgcccccgcgtcctgtcccgggggctctcctaggatcccctttccatgaagagtgtaacaagggtgtaaatatttataattttttatacctgttgtgagacccgagggcggcggcgcggttttttatggtgacacagatgtatattttgctaacagcaattccaggctcagtattgaccgcggagccacagggaccccacgcacattccgttgccttacccgatggcttgtgacgcggagaaccgattaaaaccgtttgataaactcctcccttgtctaggcctgtgttcgctgtggacgctgtagaggcaggttggcca

SEQ ID NO: 15264 - DNA, 696 bp, Macaca Fascicularis
  misc_feature (1)...(696): n = A,T,C or G
tgggtaggaaantnnnnagcaagctgggtgcagtggctcatgcctgtaatcccaannnnnnnnnnnnnnnnnnnnnggaggatcgcttgggcccaggaggtcaagcctgcagtgagctgagatcaccactgcactccagcctagggtgacagaaccaagaccctgtctcaaaaaaaaaaaaaaaaagaagcagaattgaggagctgtacctnnnnnnnnnnnnnnnnnnnnnataggtgctgatccttcctatttgccgcctaaagtttgtgtgtggtgtcaccagcctgtttagccaaatggctttgggcccaggctgccnnnnnnnnnnnnnnnnnnnnnnnnnnnnnnnnagccaagaccaggtcctcaaagcacctgaaccactgtggccttctcagcctacagcacagtggtctttcacatggccacaaagggacacacagtgacaaaaggctcagaatgttacagtggtaaaatgnnnnnnnnnnnntctactgacagacgtaaaataggcttagagaggaaaagctgcctctggtcaaatagatcatggcagaacgaattccaactcacgtttttacaactccaactcctatgtttatcttggttcattttttttacaannnnnnnnnnnnnnnnnntttaaatcaggcccaatatcagtatctttttgtgtgtgccaattttgttatc

SEQ ID NO: 15265 - DNA, 126 bp, Macaca Fascicularis
cagttaaaagtattagccaagaagaggtagagaatttgagcccgttatacaaagatagcctaggcaccatgttatctctcatcaggatcagtattttcaagtaagacaatttcatggtaaaaggaa

SEQ ID NO: 15266 - DNA, 777 bp, Macaca Fascicularis
  misc_feature (1)...(777): n = A,T,C or G
ttcaggggcatggcctggaaggctggtgggcagcactgtcaggctcaggtttccctgctgttggctttctgttttggttattaagactgtattttctttctttgcttcctgtcaccccaggggctcctgagtataggcttttcagtccctgggcagtgtccttgagttgttttttgacactcttacctgggcttctctgtgtgcatttgtgtctgccctggagtnnnnnnnnnnnnnnnctccttctttacagcttagtgttattctggcatttggttaagctgacttaatctgtttaatgttatcagtacattttaaatnnnggcattgaaatttattcccaccaccagggctttttggggggatgcctgggccataaaaacactagccaaactctaattctcaaatcannnnnnnnnnnnnnnnnnnnnnnnnnnnggcccaggccccaaggtctccttcctgggggtcacaaagagcagagaggaagaggaatatatagcaactcagggcctgggaattgtgggggaatctgttcttagggactggatgcctctggctggctgagcatagcactagctgcctccccaccaggttctgagtagtgcctgagaccctgctctgcagggcctagggtagcgctgggagtgtagaagtggcctgcccttaactgttttcactaaacagctttttctaaggggagaggaagtgggaagagatctagatttggtgagggggacggggatgtcagggaggcaagtgtgttgtgttactgtg

SEQ ID NO: 15267 - DNA, 750 bp, Macaca Fascicularis
  misc_feature (1)...(750): n = A,T,C or G
cagcatccagnnnnnnnnaccccagagtcaggccaaggagggacagaaatggatggctttaggagaaccacaggaaaccaacannnnnnnnnnnnnnnnnnnntttctgagctgctaaacaaactgaatctagaggggtctcccagcnnnnnnnnnnnnnnnnnnnnnnnnnnnaccaagaggagcagggcacaagaggagcaggttctgcaagccaggacagcagggacttcttnnnattcagtggcccaacctccccagactccagagacctcaactttcagaaaccagatgcccagccccacatcaactggaacaccaagtcctggaccccaggggaatcagggcgctgagagacatggcatgaactggtcctccaggaccccggagccaaatccagtaacagggcgaccactcattaacttacacaactgttctggggtgcaagttggagacaacaactacttgactatgcaacagacaactgccttgcccacagggggcctggcaccttcgggcacggggaggggctggcagcaccccccaccaataggttcgcaagaaggccctgaagaacctgaaaactggagcgggccacatggttggtataatcatagtggaaaataaagcaccttcagagcttgcctccaagagttacgagttaaggaagagcgccaccccttgaggcccctgacttccttctagggcagtctggcctgcccacaaactgactttgtgatcttcccccag

SEQ ID NO: 15268 - DNA, 637 bp, Macaca Fascicularis
gatgggccgggtcctctacttccaccactacttcccagccatgctcttctcaagcatgttgacaggcattctgtgggacaccctcctgcggctctgtgcctggggcttggcctcttggcccctggcaagaggcatccacgtggtgggaatcctgagtctgctcctgggaaccgcctacagcttctacctcttccaccctctggcttacgggatggttggtcccctggcccaggacccccaaagtccgatggcaggactaaggtggctagactcatgggacttttgaggccactgcaaagattccatcctgggtccaggacttcccaggagagccagctggggagcagtactggacccttccagctgtgaggaagctgcctaaggagcctgaagaattctgcccaccaggacccagctctggcagtgcagcgggaatggaacccagcattggagagagccgggagagagccgcagctccgtccacagcaccacagaaccacagcaccacagaaccacagagaggatggcacctctcaggctgctccctcgtgcacagcgcgggggaggacgggtgccagagggtgggtgtgggggggtgtgtgtgtatgtgagggcacattgtccatatccctgtgga

SEQ ID NO: 15269 - DNA, 750 bp, Macaca Fascicularis
  misc_feature (1)...(750): n = A,T,C or G
accggcaccgnnacnncccagacgtgannncaggagcgtatatcattgaagtaattcctgataccccagcagaagctggtggtctcaaggaaaacgacgtcataatcagtatcaatggacagtcggtggtctccgccaatgacgtcagcgatgtcattaaaagggaaagcaccctgaacatggtggtccgtaggggtaacgaagacatcatgatcacagtgattcccgaagaaattgacccataggcagaggcatgagctggacttcatgtttccctcaaagactctcccgtggatgacggatgaggactctgggctgctggaataggacactcaagacttttgaccgccattttgtttgttcagtggagactccctggccaacagaatccttcttgatagtttgcaggcaaaacaaatgtaatgctgcagatccgcaggcagaagctctgcccttctgtatcctatgtatgcagtgtgctttttcttgccagcttggtccattcttgcttagacagccagcatttgtctcctcctttaactgagtcatcatcttagaccaactaatgcagtcgatacaatgcgtagatagaagaagccccacgggagccgggatgggacggggcgcgtttgtgcttttctccaagtcagcacccaaaggtcaatgcacagagannncgggtgggtgaacactggcnnnnnnnnnnnnnnnnnnaaannnttttaggaatctctttggaactgggagcac

SEQ ID NO: 15270 - DNA, 757 bp, Macaca Fascicularis
  misc_feature (1)...(757): n = A,T,C or G
tccaaaagaattagcatcaaatcttggaagtcgtgaatgaagctgtgggttggcttgactgggctcagccactgagctgcctcaaccggccaaggannnnnnnnnnnnnnnnnnnnnnnncttctatattgtcttcatctcattgtatgtattatgtatttagtttcaataaannnnnnnnnnnnnnnnnnnnnnnnnnnggaggaagactagaggaatgtgtagtgagtctgagtaaggtgtagacctacgcagcaaagctatgggggagaagattaacaaagtcctttcttccaatatcaggacagtcatgagtggcagtcccatgcaaannnnnnnnnnnnnnnnnnnnnnnnnnnnnnnnnnnnnnnnnnnnnnnnnnngctccctccggggggagccaaggagcttgcaactgggaggctgcagtgaatgagcaccatgacacagtcatttctgatccctctnnnnnnnnnnnnnnnnnnnnnnnnncaaaggaggcaagaaaatgcttactctagcagacaagagaatggacagcgcgatccttgtttgtgctagtcattgggtgatgcaccacttttcagctccatgatgctacttgtttcccttcatttcctgtttccatttattcccttcagttatggtctagaatcaaacaattctaaacctcagtgtcttnnnnnnnnnncacttcnnnnnnnnnnnnnnnnnnnnnnctttgaggtatttaatcacacaatacactagagctgtc

SEQ ID NO: 15271 - DNA, 752 bp, Macaca Fascicularis
  misc_feature (1)...(752): n = A,T,C or G
catttgagagctaaaaaccagctcacatcaaaatcaagaccagttgtaaaaatcttttaactccataatgctgtttttgtcttgttagaaatctgatatcttacattagcgtttcnnnnnnnnnnnnnnnaaggcagccataaggaatataataaacctttttcaccacagaaccgtctgtcacagatnnnnnnnnnnnnnnnnnnnnnnnnnnnnnnnnnnnnnnnnnnnnnnnnnnnnnnnnnnnnnccgccaagtaaacaaatagaaaaggacagcggggtccgagggcgggggtccctgtgcaggagtcaccctcctctgccctgcccttccttgggtcacctgcttctcctttgccctaaagagggtggagtcaaattcggattttcctcccaactgcctgttagtttctcaacaagnnnnnnnnnnnnnnnnnnnnnnnnnnnnnnttggacttcaccctaactatgatttttaagaaggttcccccaagcccggaaggaaaggaaggagggaatgttacaataggtttccagggcacttggcacccaaaccccccccagatgggattcggtgggaaaggtggttgattaaggcggggtcagggcaccctcccggggctgcacctgggctaggggggagtgtgaggatgcaggggacccacgtgcctcatgaaagactccaggacacaggaatgggtccnaaaggggtaaaatacagtttaaaaaccgtgaactccagcctcatgt

SEQ ID NO: 15272 - DNA, 728 bp, Macaca Fascicularis
  misc_feature (1)...(728): n = A,T,C or G
gcggtgccactgtaagnnnnnnnnnnnnnnnnacgtcacctgccgcaggtgtgagcgtactgtggagcgctatgtctgcaagtgaggccctgccctccgccccatgcaggagcgaggactctgctcaaggaccctcagcacctggggccaggggtctggagacactccatggattctgcttgtgaattccagatgccaggcatgggaggtggcttgtgctttgccttcacttggaagccaccaggaacagaaggtctggccaccctggaaggagggccgggacatcaaaggaaaccgacaagattaaaaataacttggcagcctgaggtcctggagtgcccatgggctggtctaaggagcggggcttgggattggtgagactgatacannnnnnnnnnnnnnnnnnnnnnnnnnnnnnnnnnnnnnnnnnnnnnnnnnnnncttcttcagaatgttctgcgggaccccctggccnnnnnnnnnnnnnnnnnnnnnnnnnncaaccacatggaaccacnnnnnnnnnnnnnnnnnnnnnnnctttttttttttgatttttcttcctttgggatgtggaagctacagaaatattnnnnnnnnnnnnnnnnnnnnnnnnnnnnnnncttctcgattcctctttatatattttatatatataaatatatatgtgtgtatatatatatatatataatgatctctatttaaaacaagctttctaagcannnnna

SEQ ID NO: 15273 - DNA, 793 bp, Macaca Fascicularis
  misc_feature (1)...(793): n = A,T,C or G
ctttagtaaactnnnntgcatggtagattaataagnnnnnnnnnnnnnnnngaattacacaataatgagatctggctatttccacattttgaaaaggattcagttatttacnnnnnnnnnnnnnnatcctctttaaaataatgttctcatacttaaactttagagagcaatatctttaaatgaagtattaacactttggaatagtaacattttctgttatttttgannnnnnnnnnnnnnntttcaatgatgaaaatgaaaacaagtgctgaagatgaaatggatttaatctggattttgttttgtcacaccttctggaaaatactttgcaaatacgttctaaatttaaaacaatttttttatgatcacatggttcactactaaatgaccctcanataagccagnnnnnnnnnnnnnnnnnnnnnnnnnnnngttgtctgaaaaaaaggatttnnntgtggatatttttcccccccaacaacacaatcattcctttagagcccacaaaattggtaaccttaaattgtgtgttttggtaagtaataactgtttcctcatagctagttctcatgctgcatgtaagattttaacgggaagagaaactaggcctggactgaaggtctcaaatatgttgagaaggaagtatgaactataaggaacttgagatgtagatttattttgcaggaaatacaaggaaaataggaaagaagtgtttgccgcatcaagtgtaaagaatgatactgaggatgtttgcattttatgaaatgaaatggcatttacaaaatgaaaagtg

SEQ ID NO: 15274 - DNA, 701 bp, Macaca Fascicularis
  misc_feature (1)...(701): n = A,T,C or G
cctttacatttggcctggtagattcagatggaccnnnctatgcagtgatggtgtacaatatagtgcagagctggggagtgctcattggagactctgtagccatccttgagcataacatgcgtcttcaccgaattcagcacaagggaaaggactattccttttccagtgttcgagtggagacgcccctcctgctggtggtgaatgggannnnnnnnnnnnnnnnnnnnnnnnnnnnnnntacagtggcatcgcgaccacagtgtgaatgaccttctttgacttgtgtgctcaacagggactggaggagaggggacaaggccctgtgcagttggtccagccacatccagtgattcagcaggaatgggaggaatgttttaaatgaactttccttttccctgcctgtattacacttcgtatctcttctctatcctctgtcctcatcataatccagctctctccagggccacatactattatggcatatatttgctgtctcttccaccgctctctatgttttaagcaaagagcaaggaattggtagaaggcttgggatcttgccatgggacacagtccccaaggttcctgttgttgcctccttcttaagcctcatatgtatatatcagttcagtatttattgctaaaggaaggggcttaattttataatggctttgtttttagcaatttttattgttatttttaaa

SEQ ID NO: 15275 - DNA, 765 bp, Macaca Fascicularis
agcagcaaatactagctgtgggctgcctctgaaaatgctgcggaagacacccatatatacctgtggcacctacttggtgatgctggtgcctcctccagggggatcaggcagctctgccacccgatctctttttggtggaacaagtggtttgtcatctttaaaaatcctagcctccagcttggtgtataatatttcggatggtcagtttacaagtcgtgcagatctcatagatgctgctggaagctcactggggcgtggtgctctcgtaccaggattgggagcatgttatgacacagtgaataacatgctatggacatgctcaaatgactatatcgatcagtggtgtaaccctgggaatcaagccttccattatgtctgccagagacttggagtcagtcacattatcactgagcccaaaggtgaggtgcattcagggtcttgcaggaaaagatttccttctgaaatatgagagaataccacagcatttgtaggtgaaaacatagcccaaccccagaatgtgtccccagttttccctctttgaacatttgaaacctaaagtcctttgttctctgtaaccatgaaagatgagttatgattaagtgaataagtatgtaaataaatagagcttttgaggtggtcaatagacttttttaaaggaaaattgttatgtccttcctgaaattgttggaactttgttgcaaaaattatttgtatttggcatgggattgtatgctgttgtaatgttttgcatcgataatgacttat

SEQ ID NO: 15276 - DNA, 635 bp, Macaca Fascicularis
  misc_feature (1)...(635): n = A,T,C or G
gccaacgacggcagcttcctggagctgttcaagcggaagatggaggaggagcagcggcagcggcaggaggagccgcccccgggtccgcagcgacccgaccagtcggccgccgccgctggccccggggatctgaagaggnnnnnnnnnnnnnnnnnnncacttagcttcgtgggcaaacgcagaggcgggaacaaactagccctcaagacgggaatagtagccaagaagcagaagacggaggatgaggtattaacaagtaaaggtgatgcgtgggccaagtacatggcagaagtgaaaaagtacaaagcccaccagtgcggtgacgatgataaaactcggcccctggtgaaatgacgcccctcccccgcctgcccatggcctgggactctctgcgatgtacataactatttaatnnnnnnnnnnnnnnnnnnnccttccccgagaggacttaaaagcagaagcaaaccgagatgcttcccgcagccgtggacgattctccaggactctttttttaccttgagcacttgcctcgtgagacttcnnnnnnnnnnnnnnnnnnnnnnnnnnnnnncacctcctcattctctctggctctttctctcttcctcttctcaccctcctcccttcccttagcc

SEQ ID NO: 15277 - DNA, 765 bp, Macaca Fascicularis
  misc_feature (1)...(765): n = A,T,C or G
tcatgaatgattcatttattttgtagtatnnacttgggttgattttcaatgttaataaactatgcaaaacaaataactgttagaaggtacaattttnntctcttccctgtaactaaaagttttaagaattgttcctttggaaaaattgattttttaaaaattcacccagaatcatagggcctcattttgttttcttattgacaaacaataccnnnnnnnnnnnnnnnnagtcttccaaatcaatgtttnnnnnnnnnnnnnnnnnntgtggtaattttaaaattagtttcaaatactttattatannnnnnnnnnnnnnnnnnnnnttattaatgatataataatgttactgagttccatggtaagaatctttgctaattttttttatgaagccagnnnnnnnnnnnnnnnnnnnnnnnnnnnnnnnnnnnnctaaactatggatctaatctgaaaattcagtaactaatattaggcagtgatactccccctgcccccccatttaaatatactactgtattagtgagaatacttggtacagtcacttgaaannnnnnnnnnnnnnnnnnnnnnnnnnnnnnnnnnntttggaaggggctttgttgtaaatactatgtaatatatataaaatattgtgacaggttttggatgtgatgcatgacatacaggtagctctctttttttaaatatagatatctatctctttgcatatatatacacaaggaaagttgaatttcaaaaagatacatgctatcatcttgcaaa

SEQ ID NO: 15278 - DNA, 988 bp, Macaca Fascicularis
  misc_feature (1)...(988): n = A,T,C or G
agaaagggagggctgaggaggacttgacannngaggaggacgatgagatggcagctgtgatgggcttctctggctttggttccaccaagaagagttactgaggctttctatgcttggcctaacttgggcctatgctggacctaactttgtgtgtgtgtgtgtgtagtcgggggtcatttctttttgggtgatgggaaagttcttaagagtgtcaatggggagggatagagggtggggctcatgtttccctctactttggagagggcacagattgcagagtaatgcngngcatatgcttcagcctcnnnnnnnnnnnnnnnnnnnnnngacccctgcccacctgagtttccaataaagaaaaacctccccttctgaggctgctttcccaaaactccccctgcatctttatctctccatctatccagcctcttgtctgagcatcccacctttatcctgtgttatgcctttgttttaattttaactcatgttcagcctgcaacagaagcattctctaggtcccagtttccagttgattgcatatccttgaccagccctttttcccatcccgccctatggttctctagctacctgtgcatgcatgtgtatttctgcctggttctatggtgtgtggatgtgtgtgcatgaatctgtcacatagagggggcctgagctggaatnnnnnnnnnnnnnnnnnnnngggcctgatgttcttggcttcctcagagcatgtaacaggaaattaaatgggatgagtgtttggtgtggtttgtgtctgatgagttttttaacattcaggtgtagattgtttcaggttctcttgtttcattttcctgaggatttctgtttttgtcttccttgtgagcaggcttttggaagaacctgtttgatgcaaagaagaaaatgaaaaacaaaacaaaacaaaaaatccccaaaaccttattatgggagcccttgggtcttagaagctgtcnnnaccgtgtataaaaaa

SEQ ID NO: 15279 - DNA, 719 bp, Macaca Fascicularis
  misc_feature (1)...(719): n = A,T,C or G
caannnacgtcaccagaaagtgccnntnnncagaatactaaaagtgaacatgtgaagaagactttgtttttgaatattcctgaaagcaggaacagcatagtggaagatgctcagtgtcctggattaccagatttaattgaagaaaaccatgatgtaaataagacaaacttgaaggtggattgtttacccagtgagggaatgagtttgcctcttcttgctggtggagtagcagatgatattaatactaacaaaaaagaaggaatttcagatgttgtggaaggcatggaactgaattcttcgattacatcacaggatgttttgatgagtagccctgaaaaaaatacagcttcacaaaatagcatcttagaagaaggggaaactaaaatttctcagtcagtactatttgataaaagtctcactactgaatgccaccttcttgattcgccaggtctacagtgcagtaatccatttactcagctggagaggagacatcaagagcatgccagacacatttcttttggtggtaacttgattactttttcacctctacaaggagaattttgaatttaaaaataaatccattttccttcacattatcaatgcttatatattctttagactattgaaattttggagaaaatgtatttgtgttcacttctatagtatcatataatgttttaatactctgtttatcaaagtgtattttagatatactcttt

SEQ ID NO: 15280 - DNA, 705 bp, Macaca Fascicularis
  misc_feature (1)...(705): n = A,T,C or G
ggtaagtacactcaaacactgaatacaggtgtgcaatgggtagannncacagcccttccactaatagtgagtgtgaaggcaagcttgatgcaaaacctcctgacctttcctacctgaagagccctttgacttctaggaagaaaggtcaaaaacatgttacttctaggaagaaaggtcaaaaacatgttatcttcagttttgttaatcccagttttggtgcagcttgggaggctgctaattaggaagatggcagtgactgtaggctgggttgccagaaaatatggtggcctagtcttattatttcaggtggggtacttagaaaacctgaagaatacccaaattggattgtgttttaatggacaatggctgtattttttccatgttagaaggatcctaatgaaagcacctgttatttttaagtttctaagggtctagttgttcagaatccccaaggatatttccttaacctcacccagtcacattgtaggagccagtgtagctgtggaattatcttaggaactcaagcttctaaaactagccatgtagtcaaatctgggggaaaagcaaatacaaataataaaatatattttttatattcattaataaatgctgttgtgcttggagatgatcactcatataacgtgtcatttttttggttctgttttgatttagtttttgccaattattttgttatattccaaaaaa

SEQ ID NO: 15281 - DNA, 846 bp, Macaca Fascicularis
  misc_feature (1)...(846): n = A,T,C or G
aagaaggtcatggatgacctagaccgagccagcaaagccgatgtccagaaacgagtgttagagaagacaaagcagcttatcgacagcaaccccaaccagcccctcgtcatcctggagatggagagcggtgcctcagccaaggccctgaatgaagccttgaagctcttcaagacacactcccctcagacgtctgccatgctcttcacggtggacaacgaggctggcaagatcacttgcctgtgtcaagtccctcagaatgcagccaatcggggcttaaaagccagcgagtgggtacagcaggtgtcaggcgtgatggacggtaaaggtgggggcaaggatgtgtctgcacaggccacaggcaaaaacatcggctgcctgcagnnnnnnnnnnnnnnnnnnnnnnccttcgcccagctgcgcctcggggatgtaaagaactgagcgggggaggaggtggcttctactggctccatccgtccagccgggagctcttcatctgctacaagaacatttgaatcctgggaccttttgagagcccctcctaccccggctgtacctggaacaccctcatgagcagtcgtgtgactcagcgccccttataattctgccctgagccctccacgtcagtgccatctgtcgagaaccactacccccgcattgttgttgatcaccacactcgcatctgtagataacagctctccagcctgagctttccgcgtcagcaaggacgaatcgtnnnnnnnnnnnnnnnnnnnnnnnnnnnnnnnnnnnnnnnaatgctatatgatctctatccctcttcccaggtggagctcgctgttttgacagcccttggcccctgctgtc

SEQ ID NO: 15282 - DNA, 224 bp, Macaca Fascicularis
actgctgagccagtttctcagtctaccacttctgattatcagtgggatgttagccgtaatcaaccctatatcgatgatgaatggtctgggttaaatggtctgtcttctgctgatcccaactctgattggaatgcaccagcagaagagtggggcaattgggtagacgaagaaagagcttcacttctaaagtcccaggaaccaattcctgatgatcaaaaggtctc

SEQ ID NO: 15283 - DNA, 806 bp, Macaca Fascicularis
  misc_feature (1)...(806): n = A,T,C or G
tggttagagggtggctgtagagcaccctcaggagaagcggtgccacaggggtcacgcgtggtccagcnnnnnggtgcgagggaagtccttgttggcagagggatgcggggcgggaacgaggaaaggggaggggatgatcctggcaaatagtctttccttttccgtaaattacagagaaccaggatttttttaattattgttattataattataattattattattattgagatgaggaaacctagcactggcagannnnnnnnnnnnnnnnttnnnnnnnnnnnnnnnnnnnnntggcactggctttgatacttggaattttgaggttcagggaattcagagaatttggtagcacagtgtattgggagaaagggaaatttcgggtgacagattgatcnnnnnnnnnnnnnnnnnnnnnnnnnnnnnngggtgggtttgattgagaacattttgggctcctgcagtgatggtgggaaagaaaaattctttccatagctgcacttctcttaataattctctcccctcaaaagaaagattatgataaagaataatttggagtaataagtaacaagatagaattagaaaaatgttgaatttccgaatcaccattcagaggtgtggctttttccacgtctttttctcctgcaatgnnnnnnncccacgtcnnnnnnnnnnnnnnnagtctaatgaacactttgtgaaatgaatcgtaagtatgtacgcacgcatatcaaactatgctctgaggataaagcaagttctaatttgtggaaaaaggattaaatatttctgttttctgaaaagag

SEQ ID NO: 15284 - DNA, 880 bp, Macaca Fascicularis
  misc_feature (1)...(880): n = A,T,C or G
tgaatcatttggtttccacagtatgttaaaatattaaagaaacagttatctctacctgcagaatttccagacaagcnnnttgctgagaagtggaatgaaaatgttcagtatctctcagaagatagaagtgtgcaagaagtactacagaagcatttcaatatcagcaaaaacctgcggtcattacacatgctattgatgcttactttaaatnnnnnnnnnnnnnnncacccatttatgactgccatagatctaatggaagcaagtcaactgtgtagcatggactcaaaagcaaatattgtacatggtctatcagtcttggaaatctgtcttataatagcaatgaaacatttaaatgacatctatgaggaagagccatttaattttcaaatggtctataatgagtttcagaagtttgttcaaaggaaagcacattctgtttataattttgaaaaacctgttgtcatgaaggcttttgaacacttgcaacaattagaattaataaagcccatggaaagaacttcaggaaannnnnnnnnnnnnnnnnnnnnnnnnaaactgcttttggataatactcaaattatgaatgctctgcagaaatatcccaactgtcctacagatgtgaggcagtgggcaacatcctcactgagctggttatgaatataaccagtgacttcaactttggcatttcattcatacttctgtagagaacgaaaaactattgtcctttaacatgataatactaaacattctataaatatttttgtatttatgtgagacttgcatgtctactgtcttggctgtgtcttgccttttaatcatgaacagttacatgatttataatttcagtaattgagattactttgtaagtagcagtcagaag

SEQ ID NO: 15285 - DNA, 987 bp, Macaca Fascicularis
  misc_feature (1)...(987): n = A,T,C or G
tggctttgcatctagttctgaaaaccaggaccgacagtaattaaagtgcagaacatgcccnnnactgtgtctattgatgagattttagatttcttttatggctatcaagtaatcccaggctcagtgtgtttaaaatacaatgaaaaaggtatgcccacacgtgaagccatggtggcctttgagtctcgggatgaagccacagctgctgtcattgacttaaatgacaggcctataggttcaagaaaagtaaaacttgtattagggtagccattcacatcattctttatagggtagatcttcatattgctgtgattaatgcatccagattgttttcctagtatttccaggttagaacccgtggattgtttcaattgcatatagcttggtttccataacatagagcattggttgactgtttacagaagactcaccaggataaacactgctgtatgttnnnnnnnnnnnnnnnnnnnnnnacacataaatgattttggcataccattagagaaaccatttgtaaaactcaaatgaccacataaagcttatcaaggagtctagattggttttgttttataccatatgggatgaagaaaatagaaatgtcagtaaaactcattgagggtgctcttgccagctgctgaaaataggagttggctactctcagaatttggtttaaagctggacagatttgctttgttatagggtaaagctttgtctaaagtcctcattttcttttaaaattgaataaaatttctgtatacagattcattgtatgtacctttattgcttcttaagggtccttgctgtatagacagtcctgcttcagaagttgctgctttgtttgtctaattgactcatttgtaaatgagcagaactgttttgttgggttttttccctaaatataaaagtccacacttnnnnnnnnnnnnnnnntcgaactttgatttctaatgtcacacttaaaactgtgtggaataagactttgca

SEQ ID NO: 15286 - DNA, 695 bp, Macaca Fascicularis
  misc_feature (1)...(695): n = A,T,C or G
acatatcacagctggcttactggcttcatgcttttcctgaactctacttccagaaaaccaaaaaagaggatattcctcgtcagcttgtctacattggtctttacctcnnnnnnnnnnnnnnnnnttaccttttgaacttgaatcatctaggacttgttcttctggtgctacattattttgttgaatttcttttccacatttctcgcctgttttattttagcaatgaaaagtatcagaaaggattttctctgtgggcagttctttttgtttttggaagacttctgactttaattctttcagtactgactgttggttttggccttgcaagagcagagaatcagaagctggatttcagnnnnnnnnnnnnnnnngtgttggctgttagaattgctgttctggcatccatttgcattactcaagcattcatgatgtggaagttcattaattttcagcttcggaggtggagggaacattctgcnnnnnnnnnnnnnnnnnnnnagaagaaaccaacagtaactaaaggcagatcttctaaaaaaggaacagaaaatggtgtaaatggaacattaacttcaaatgtagcagactctccccggaatagaaaagaaaaatcttcataatgaattataaactaattgattaatgtccccaaagaaatctgctttctactatatctttcagcattagagattttc

SEQ ID NO: 15287 - DNA, 1041 bp, Macaca Fascicularis
  misc_feature (1)...(1041): n = A,T,C or G
gcaactgagatnnnnnnnnnnnnnnnnnnnnnnnnnnnnnnnnnnnnnnnnnaactgtnnnnnnnnnnnnnnnnnnttattatttaacattttaatttgaatttctaagaagcctattctctatttggaaagattctggcactatatttaattggaagttaaaaaaattgtacatgtgatccagagtaaatgagaagtctctatctgagctggtcagttactggagtacatgttactaatctgggtttaaagtttacttcattnnnntagtgtcatccacagcagttcatcctcatccacactaagccatctgttagcttttaaaagaaattaatttaattaacattaatacactctatgggctccctctcccacctgtctgcatagaaaggcagaattagacatagcatgctttggaaaagcaaataggaatggttgggaatgatttaatcttgttgttgttgttgttcacttgtggttctannnnnnnnnnnnnnnnnnnnnnnnnnnnnnnnagggctgccccctaccttataagggttgctgggcatttgaaggcaggaagatttttaaagatagattgaggttggtttaaaattattcctgtgaaacaacaataaagcaaataagaggttcatttttgtaaataatactgttttcaaatagtgatgttagacttaacctaatttataaacgagattaatatctccatgcatagttttagacaaaaaaaggtgtttcaataaaatgactgtcttgtaatataaatgttgtccacttcccttttccacaggcctagaacagttaaagggaacatagtttgtttaggctcccacataaatgnnnnnnnnnncaacaactttggttcaccctgaagtgaattaagaggatttggctaccctgagtatatttatattcatttcttccattctccttctgttattatacttaatcttctaaactaaactaatgtgaacagtagggaaacaagggcccaaatgcataagtttctttgcactcttgcacttacttaatacaaaa

SEQ ID NO: 15288 - DNA, 1069 bp, Macaca Fascicularis
  misc_feature (1)...(1069): n = A,T,C or G
tgacctgtacatgcatannnttagaaatcagtcttgccaaatgcactgagagattnnntcgtcatatccatgnnnnnnnnnnnnnnnnnnnnnnnnnngaaactcttataacaaagttctcacatagattctgtgcttgtaaccctgatttaatgcgagaacttggccttagtcctgatgctgtctatgtactgtgctactctttgattctactttccattgacctcactagccctcatgtgaagaataaaatgtcaaaaagagaatttattcgaaatacnnnnnnnnnnnnnnnnnnnattagtgaagattttgtagggcatctttatgacaatatctnnnnnattggccatgtggctgcgtaaaaagcacagttgctaggacttcaagtttttacttcagactaaagctacccaaggacttagcagatatgggggttacatcagtgctggtcattgtagcctgagtatacaatcaagcttcagtgtgcaacctttttttcttttgccattttctattttagtaatttccttggggaactaaataattttacagaatttttcctaattttgtttatcatgttttgcacaaagcagagccattgtctaacacagctgttaaagaatgataaactgacattatactctaaaagatggtgtatttgtgcattagatttgcctgaaaaactttatccatttccattctttatacaaataccatgtaatgtgtacatatttaactaaagagatttatagtcataattattttattgtaaagattttaactaaagtttttccttttctctcaaactgagttctgaaatttatttgattctgatctgagactattctcttcttaaaagttagatctgacttcagatagaaaccaataccagcttccttttcctttaaactttgaagagtgttgatttgttactatattactatgcaaaactggcagttatttttataatataaatttataatttgttttttattttaaaaannngggttaatcaagtctcagtcagtcctttaaaccatttaggattttttaaaagatcaaaatt

SEQ ID NO: 15289 - DNA, 426 bp, Macaca Fascicularis
  misc_feature (1)...(426): n = A,T,C or G
agccccacagccagtcccatctaccacaacggcgaagacttgagctggcccagcccggcccatnnnnnnnnnnnnnnnnnnnnnnnnnnnnnnnnnnnngagctggatgaggcagagggcacaggccgccctgaccctcaggcaggcttcaaggccaagctggtgaacctgctgagtcgtgagcggaggaagggccctgccccttgtgaccggccctgaacacccagcagagtggtggccagaggggagaggtgcttcccctgggacaggagggtgggctggtgggcacatagtgggcccatgtggacacacgcctgtgtctaccctggcctgcaggaatgaggcaggccacctgtggaggacctccgccctgccctgccctccacatacacggtgtgcagactcgcagataataannnnnnnngc

SEQ ID NO: 15290 - DNA, 752 bp, Macaca Fascicularis
  misc_feature (1)...(752): n = A,T,C or G
cagtgatggagtgtcgcaatgtcacctannnnnngcaacaagagctggccgaggcccagcggggctttcgggatgcagaggnnnaggctgtcacctgcaaccagactgtgatggccctaatggcttccctggatgcagagaaggcccaaggacgaaagaaagtggaggagcttgagggggagatcactacattgaaccacaagcttcaggacgcgtctgcggaggtggagcgactgagaagagaaaaccacgtcttaaacgcgagaatcgcggacacggactccgccagctcccaagactccagctgcgcggcagagcccccgctcctgattctgctgctgggcttgagcgctctgctgctgtgagatcccaggaagctggcatatcttggaagatccggttcctgctcgacttttcgcctggacatgcccttgatctcatcagttctgagcgggtcatggggcagcacggttagcggggagggcacggggtagccggagaagggtctctggagcaggtcttgaggggccatggggcaaccctgggtgtggggacacagtcgggttgacccagggctgtctccctccagaactaggcagggaatgagtcgcccctcttgtttcccgccctgagattgggcatggggtgcggtggggggggcacgtgctgcctgttgttacgggtgttttatttttttgcggggggggtgtgtgctttttctggggtctttgagctccaaaaaataaacactc

SEQ ID NO: 15291 - DNA, 726 bp, Macaca Fascicularis
  misc_feature (1)...(726): n = A,T,C or G
gcggccagagaaatggagttgtnnntccttcaagtggaggttgtgggccggcaaacactgctaaatttaccaattgtacctgttgcattgttaaaccccatgctgtcagtgaaggactgttgggaaagnnnnnnnnnnnnnnnnnnnnnnnnnnnnnnnnnnnnntcagctatgcagatgttcaatatggatcgggttaatgttgaagaattctatgaagtttataaaggagtagtgnnnnnnnnnnnnnnnnnnnnnnnnnaaatgtattctggcccttgcgtagcaatggagattcaacagaataatgctacaaagacatttagagaattttgtggacctgttgatnnnnnnnnnnnnnnnnnnntacgccctggaactctcagagcaatctttggtaaaactaagatccagaatgctgnnnnnnnnnnnnnnnnnnnnnnggatggcctattagaggttcaatacttcttcaagatcttggataattagtggtgtggaaagtaaagaagtcacaggttgggacatttagacaagagtgaatcacacacatgaggaatgtgttcattcttttattgtccattgttttaacctgactgaatacaagatcaacaagagcactgtannnnnnnnnnnnattacatatgttagaacatggattttgcactgtagacaacatttaacaccagtctatggggtactgcattgctttttataaagtcaaaa

SEQ ID NO: 15292 - DNA, 750 bp, Macaca Fascicularis
  misc_feature (1)...(750): n = A,T,C or G
aacttcacgagcgcaagtgtgagcccatcgtcannnnnnnnnnnnnnnnnnnnnnnnnnntccaggatgatctgtaccccgacacagccgggcccgaggcagccctggaggctgaggagtgggtgagcgggcgggacgctgacccgatcctcatctcgctgcgggaggcctacgtgcccagcaagcagcgggacctgaagattagccggcgcaacgtgttgtctgacagccggcccgccgcggccctgggctcctcccgcctgggggcccctgcagccaccannnnnnnnnnnnnngccactcccagcggcagcctgaccagagctggggaggctgggaagctggaggaggtgatgcaggagttgcgggcnnnnnnnnnnnnnnnnnaggagcagggggagcgcatctgccgcctggaggagcagttgggccgcatggagaacggggatgcgtagggccgcagccatnnnnnnnnnnnnnnnnnnnnnnnnnnnnnnnnnnnnnnnnnnnnnnnnnnnnggtcgcacccggctggctggctgcccagggcctctgaggcagcgcaggggtcggttcccaccccgacctgtcccgggccgaggccgaagccaccacccagctttcttcactgttcctgtggaggatttccatgcccanaagagctgctcctcctctgagggaccatttccccgaccactgcccagccctctgctccctccccagaggaggcgggaaggtgggctctatatt

SEQ ID NO: 15293 - DNA, 611 bp, Macaca Fascicularis
  misc_feature (1)...(611): n = A,T,C or G
atatcagataggaatnnnnngtatnnnnnnnnnnnnnnnnnnnnnnnnnnnnnnncttttcataggtacagcaccatcttccatcagaagaccagggcctgttttgacagggattattatcattgtagcataatttgtattagacccgtgtaacaagcctgtnnnnnnnnnnnnnnnnnnnnnnnnnnnnnnnnnnnnnnnnnnnnnnnnnnnnnnnnnnnnnnnggaagcctggcattgagtgtcattctctgatgcttgtctgagacagtgtgatgtnnnnnnnnnnnnnnnnnnnnnnnnnnngagtggataaccttacctgtctctcatttacaggtatgtgaaaccagaagaagttctgggtcctttcatcataagggagaagcttcagaaagctcggaggacctgnnnnnnnnnnctactagaatctgctgccagaggggacgaagacgtgcactcaaccttctaccaggccactctcaggctcaccttaaaatcagcccttgatcccatctctgggcaatttagacagtgaaactgactttgtttacctgcctgcagcgtattagaacagacgatccatgctaatattgtattttctcttaaaa

SEQ ID NO: 15294 - DNA, 744 bp, Macaca Fascicularis
  misc_feature (1)...(744): n = A,T,C or G
cagnnnnnncatcggnnnnttccacgcccctggtggcggcttcctgtggtgtctgtggacgtnnnntgnnngtgccccgaatccgcccctgaggctaagcgctcccaacgagaagggtccacgggaagccctcacctctgtaaacacaccctgggccagcgctcacatccgaggggagccgccggatgtggaagaagactccgnnnnnnnnnnnnnnnnnnntgccgccccacgctaggttatttgacattgtgcagtgtagagttgccttaaagtgcgtgatctgccagtgctttcttcaagtcgcccttgccccgattcctcctgtttgcgctccccagggttgctcaagtggaaattttgtcaattgtttagccttnnnnnnnnnnnnnnnnnnnnnnnnnncttnnaatctgcaaaagcagaagttgtttcctagtttacctcacgtgtctttacctgtatggagtnnnnnnnnnnnnnnnnnnnnnnnnntgcagcataaggcagggttttnnnnnnnnnnnnnnnnnnnnnnnagttaaaatgggaaatcaattagcaagtggccaccagcattacacagcaatgaatcagaataaagtaggccagaatgcatcatgtagtaaaggcaaatactgttttgtgaaacttttcacccatacatctaaatgtgagaactggttgcaatgtaagagatgtatttcttgctgggaagttgtgatcaaaataagtgaaaacgcc

SEQ ID NO: 15295 - DNA, 697 bp, Macaca Fascicularis
tgagatgatttatgggagtgctgaatctcagctattaggcctatcatagccataccactaccaataatggggggggggtgtgggggtgagagttaggtcaagtttacatacacagtattcaagttgtacaggtattttgctgctggaatattcttatagtaagactttttcttcagcaatcaaagccttagatgggagatctcaagtttcaacaccacgttttggcaaaacgttcgatgctccaccagccttacctaaagctacaagaaaggctttgggaaccgtcaacagagctacagaaaagtctgtaaagaccaagggacccctcaaacaaaaacagccaaacttttctgccaaaaagatgactgagaagactgttaaaacaaaaagttctgttcctgcctcagacgatgcctatccagaaatagaaaaattctttcccttcaatcctctagactttgagagttttgacctgcctgaagagcaccagattgcgcacctccccttgagtggagtgcctctcatgatccttgacgaggagagagagcttgaaaagctgtttcagctgggccccccttcacctgtgaagatgccctctccaccatgggaatccaatctgttgcagtctccttcaagcattctgtcgaccctggatgttgaattgccacctgtttgctgtgacatagatatttaaatt

SEQ ID NO: 15296 - DNA, 781 bp, Macaca Fascicularis
  misc_feature (1)...(781): n = A,T,C or G
aataccactgaccannnnnngcaacnnnnnnnnnnnnnnnnnccagacacagtgcanntcggcgggtggaggagcgnnnnnnnnnnntgggcaatgtcacnnnntgcaatgactacgtggccttggtccacccagacttggacagggagacagaagaaattttggcagatgtgctcaaggtggaagttttcagacagacagtggccgaccaggtgctagtaggaagttactgtgtcttcagcaatcagggaggggtggtgcatcccaagacttcaatcgaagaccaggatgagctgtcctctcttcttcaggtcccccttgtggcggggactgtgaaccgaggnnnnnnnnnnnnnnnnnnnnnnnnnnnnnnnnnnnnnnnnngtgccttctgtggcctggacacaaccagcacagagctgtcagtggtggagagtgtcttcaagnnnnnnnnnnnnnnnnnnnnnnnnnnnnnnnnnnnnnnnnnnnnttccctcattgatagcctcacctgagtcaccttcnnnnnnnnnnnnnnnnnnnnnnnctctggactatggcaccttctttgcactccgcccaatctgcaccggatgctggcagggaggtggcagagagctnnnnnnnnnnnnnnnnnnnngcacccaacccttttccacctgtgcttatctcctggatctatcatnnnnnnnnnnnnnnnnnnnnnnntgctggctggcaggccctgtggctgctggctgagggttctgcttccaccccataaagnnnnnnnnnnnnnncc

SEQ ID NO: 15297 - DNA, 757 bp, Macaca Fascicularis
  misc_feature (1)...(757): n = A,T,C or G
ggggtatgacnnnnnnngnnnnnnnnnnnnnnnnnnnnnnnnnnnnnnnnnnnnnagcatccgaagcttggatccaaggcccntnctgatggggaggccatcgctccctgaacccccggcccnnnctgcgttgggtcctgggggtaagggccggggggtgatggggcgatgggccaggatgggctgggaactcacgatgccagtcctcagtaagctgcgactcggcgccctgtactgtggtgcagtgtgacctgcaggagatggcgcgcgggcagcgggccatggtcacggtgctggctttcctgtggctgcccagcctccaccagaggccactggannnnnnnnnnnnnnngtcacaggcatggttcaacgtgtcctccctcccctatgccgtgcccccgctcagcctgccacgaggggaagctcaggtgcggacacagctgcttcgggccttggaggagagggccattccaatctggtgggtgctggtgggtgtgctgggcggcctgctgctgctcaccatcctggtcctggccatgtggaaggtaggattattcaagcggaaccggccacccctggaagaagatgatgaagagggggnnnnnnnnnnnnnnnnatactgttctagcaggagtgttgggcatgctacctgcaccaccccttctccaatgagttgcctccaagctttgggttggagctgttccatggggtcctcttggtgtcatttccctcccaacagagctgggtcaccccctcc

SEQ ID NO: 15298 - DNA, 532 bp, Macaca Fascicularis
gacagcatggccatagagaccctgcccttccagaactgcctctgccagatgctggacctggtcaagccgaggagagaagggaggatcacgctgcgggacatgaagcgctgcaagatggccggcgtgttctttgacacatttttcaacatcgagaagtacatggaccacgagcagaaggagcagatctcgctgctcagggacagtgatggcagcggccccgagctctctgactgggagaagtacgcggccgaggagtatgacatcttggtggccgaggagacggcgggggagccctgggaggacgggtttgaggccgagctctgccctgtggagcagaagatgagtgccctgcggtccccgctggcccagaggccgttttttgaggcgccctctcccctgggcgccgtggacctgtatgagtatgcgtgcggggacgaggacctggagccgctgtgagaccgcccggggaccccaccgcgggcccctctgcatgggccgcggccaccgcggcgtgtgtaaaaactcttgtctg

SEQ ID NO: 15299 - DNA, 749 bp, Macaca Fascicularis
  misc_feature (1)...(749): n = A,T,C or G
gcccgcccagnnnnnnnnnnngcagatgtgcnnnnnnnnnnnnnnnnnnnngccagnnntaaagaagccaactttgacatcaatcagctgtatgactgcannnnnnnnnnnnnnnnnnnnnnnnnnnnnnncaacttcttccacgtgctacgacgccagatcctgctgcccttccggaagccgttaattatcttcacccccaaatccctgttgcgnnnnnnnnnnnnnnnnnnnnnnnnngatgagatgcttccaggaacccacttccagcgggtgatcccagaagatggccctgcagctcagaacccagagaatgtcaaaaggcttcttttctgcaccggcaaagtgtactatgacctcacccgagagcgcaaagcacgcgacatggtggggcaggtggccatcacaaggatcgagcagctgtcgccattcccctttgacctcctgctgaaggaggtgcnnnnnnnnnnnaatgctgagctggcctggtgccaggaggagcacaagaaccaaggctactatgactacgtgaagccaagacttcggaccaccatcagccgcgccaagcccgtctggtatgccggccgggacccagcagctgcnnnnnnnnnnnnnnncaagaagacccacctgacggagctgcagcgcctcctggacacggccnnnnnnnnnnnnnnctttaagaacttctcatagatgctgcctagggttgcttgggccactgccctctccacacccatgactgcccc

SEQ ID NO: 15300 - DNA, 655 bp, Macaca Fascicularis
caccctgggggtggcgattatgaggagctctaggccaaccggggcagtggccgccctggggtggggggcgtgcctgtcactgcctggggaggcatttgcctctgcaccatcgcctttgccgctgcccagtggctgccgtgtgcacttctgagctggaagaggctgggcgttggtgtccccggactgggcctccagacccggtgtgagcctgctctgcaaggagggaggggacagctggctttggccaggctcggtggacaccctggccctctcggggcagagccgccagtccccagtgtttctcagggatgtgactgaggcccaggggcatgagggtctgtttacagaggctgggcaggggccgcttggctgcggggtgcacgctgccccggcacctgcttgccctccacgctcacccagggccgcagcatgcctatggctccgcttccggctgggagccctgaacacgggtgtgcagacccaccctaaagggcagcccaggccccacgctaggcacggctggcgagagaccgaaggcagcatgcagggcctctcctggggatgggggctgtttcccacagcggcctcagctgcgcccctgctcaggtgagcccacaggcgggagctgggaggcatgcctcccaaaccctccact

SEQ ID NO: 15301 - DNA, 729 bp, Macaca Fascicularis
  misc_feature (1)...(729): n = A,T,C or G
gagatcattgccgagnnnatgacgatgatnngtngactatgaggccaccaggtggagggnnnnnnnnnnnnnnnnnnnnnnnnnnnnnnnnnnnnntgtgggctcccttactactggaatgcggacacagacctcgtatcctggctttccccacatgaccccaactctgtggttaccaaatcggcnnnnnnnnnnnnnnnnnnnnnnnnnnnnnnnnnnnnnnnnnnnnnncggagccatgacaagtcggacaggggccatgacaagtcggaccgcggccatgagaaaccagacaggggccacgacaagtcagaccggggccacgacaaatctgacagggatcgagagcgtggctatgacaaggtagacagagagagagagcgagacagggaacgggatcgggaccgcgggtatgacaaggcagaccgggaagagggcaaagaacggcgccaccatcgccgggaggagctggctccctaccccaagagcaagaaggcagtaagtcgaaaggatgaagagttagaccccatggaccctagctcatactcagatgccccccggggtacgtggtcaacaggactccccaagcggaatgaggccaagacnnnnnnnnnnnnnnnnnnnnnnnnnnnnnnnnnnnnnnnnnnnnnnnnnncatccccaggggctgtgctccgggccaatgcagaggcctcccgaaccannnnnnnnnnnnnnnnnnnnnnnncc

SEQ ID NO: 15302 - DNA, 709 bp, Macaca Fascicularis
  misc_feature (1)...(709): n = A,T,C or G
gattgagagcgagagatcanncccnnnnnnagcacagggcggacgtcgcgcggagtgggaagcgaggaggccgtggacgggagcttggaggtcaggggaagtacggggccgggttctccgagtgcgggacgaggagaatcgcgggcggggagaggtgacccagggacccctcctttccctccagcgtagacccttatcggagaccaagctatgtggggcgacctctggcccctcccgcctacatctgccaacggccgtgcactgggagcatggaggctgagtttgagaaagctgcagaggannnnnnnnnnnnnnnnnnnnnnnnnnnnnnnnnnnnnnnnnnnnnnnnntatggccgctacaaacaagcaaccgtgggcgacataaatacagaacggcccgggatgttggacttcacgggcaaggccaagtgggatgcctggaatgagctgaaagggactaccaaggaagatgccatgaaagcttacatcaacaaagtagaagagctaaagaaaaaatacgggatatgagtgactggatttggttactaggccatgtgtttctcctaaactgagacaatgccttgttttttctaataccatggatnnnnnnnnnnnnnnnnnnnnnnnnnnnnnnccagctactcaaggctgctcaccatacggctctaacagattagaggctaaaacgattactgaccttccttgag

SEQ ID NO: 15303 - DNA, 743 bp, Macaca Fascicularis
  misc_feature (1)...(743): n = A,T,C or G
tccagagccccnntcannntcagccactcctcggcctacagcgtgtgcgcaagccggcgcaacgtgcccgacgacgtcctgaggctggtgaaacagacagacagcctggtgatggtgaatttctacaacaattacatttcctgcaccaacaaggccaacctgtcccnnnnnnnnnnnnnnntggatcacatcaaggaggtggcaggagccagagctgtgggctttggtggggactttgatggtgttccaagggtccctgaggggctggaggacgtctccaagtatccagacctgatcgctgagctgctcaggaggaactggacagaggcggaggtcaagggtgcactggccaacaacctgatgagggtcttcgaggctgtggagcaggccagcaaccccacgcaggctcccgaggaggagcccatcccgcgggacgagttgggcggttcttccaggacgcattacggctacccctccggggcctccagcctccatcgccagtgggggttcctgctggcctccctcgctgccctggtcctctgtcagtgtctcctgtgaaagctgggagaccagagccccctttagggctcctggagttcagggaagacctgcccatccaggactccggacgccaggaaccctactgcccgcatgcaaggannnnnnnnnnnnnnnngggtgtctggcctcacctggggggcaggatacctggggacagctcaggacacacacacacacaggcc

SEQ ID NO: 15304 - DNA, 918 bp, Macaca Fascicularis
  misc_feature (1)...(918): n = A,T,C or G
aaggtcacacatattaatgacagcctgttgtattaatgatggctccaggtcagggtctggagtttcattccatcccagggcttggacatcaggattataccaagagtcctattaccaggagggcaagaagaccccagaaaagtccagcagaagcagatgnnnnnnnnnnnnnnnnnnnnnnnnnnnnnntgcatgaactatgtgcccagcactacgctgagcttacactaattggtcagacatgctctctgctctcatgaaattggctccaaatgaatgaactactttcatgagcagttgtagtaggcctgaccacaaattcccagagggccaagtgcggatccacaggacttgaaggtcaaagttcacaaagatgaagaatcagggtagctgaccatgtgtggcagatactataatgaagatgcagaagtgtgcatggcccaaggacaaggnnnnnnnnnnnnnnnnnntttatgcacttgtgctgcaaaagaaaagcctaggtcttaaggctgtgccagaacccatcccaataaagagatcaagtctgaagtcacattttaaagccagtataggagacttggagtcaggtagtagagactggtggggcacatggggcggttggtacttgcaagtcnnnnnnnnnnnnnnattcattcaataaatatttattaagaatctatgtggccannnnnnnnnnnnnnnacctgtaatcccagcactttgggnnnnnnnnnnnnnnnnnnnnnnnnnnnnnnnnnnnnnnnnnnnnncctggccaacatggcgaaaccccatctccactaaaaatacaaaaattttctgagcgtggtggcacgcacctgtaatcccagnnnnnnnnnaggccaaggcaggagaatcacttgaacccgagaggtggaggttgcagtgagcnga

SEQ ID NO: 15305 - DNA, 796 bp, Macaca Fascicularis
  misc_feature (1)...(796): n = A,T,C or G
agcagagaaacgggaacatgagagagaggtgatccaaaaagccatnnnngaaaacaacaacttcatcaagatggctaaggaaaaactggcccagaagatggaatccaataaggagaaccgggaggcccacctggctgccatgttggaacggctgcaagagaaggacaagcatgccgaggaggtgaggaaaaacaaggagctgaaggaagaggcctccaggtaaagcctagaggccaaagaactttccaggtcagccnnnnnnnnnnnnnnnnnnnnnnnnnnnnnnnncctcgcccgccggctgcactcccagcactggggtttggggggaggggggtggccaaggggcgtttcctctgcttttggtgtttgtacatgttaagaattgaccnnnnnnnnnnnnctatttgtttctggggaacaatgatggggtgggagaggggagaggagagagtttgggaaagggagatggagaagagctcaaggacgttgcaaccctgcccagcacagatctgattttcacatctctacctggacattgagcctccaggtaccatggtgaggggagatgaaaaccagggcagtagaacttnnnngtgaaggacagagccttgggtggggcagcggctgcagggcacaccggagatcccagccagagggtgtgtgaggaccagaggtgtcgcttccgccctgcatcaggtgggatgaggtctgtgtgtgtgtgtgtgaaccatcattttttnnnnnnnnnnnnnnnnnnnnnnttgaaaaaaaaaaaaaaaaaaaaaaaaaaagg

SEQ ID NO: 15306 - DNA, 730 bp, Macaca Fascicularis
  misc_feature (1)...(730): n = A,T,C or G
tgtgtgaaatacaaagctngacagcacttnnnntattgctctccattatttggtattcattatatncnnncagtcagaaaattattactctctatggcactgttttctatcacaaatatgtatatgtgatattgatatataactatatatattgccattacacacgaacaataaaataaagtgttctattaacctgatctctttgcccttttgctatgtgaggagtgaatgagtggccttcagatgctctgactattctctgtatgtcaaactcatccctggcacaagaaattccagtcatgtgaagcaaactgccctttgtcctcaaagaaattgttgaaaaagaacactttttaaagagactttctgcatattctctgccttgttcttatcaactttaaatgttggcattttctaaccttgttttgttggctacagtaattcagtattcatgtcaaaaattgagaagtgccctaattgaatgtgtttgaatgttatcctctgcacaattctttaaattgaaagataaaatgttttacctccatgttggacatacattccaagcttttcaactctaggagaaaaagaaaatcatgttttcctgtattgtaaattttagactatttcatatacattgtattaaaactgccatatcaattttaatgtatagattttgcaaatactatgctatatgtaatacctaanngtatctntagtgtatatgtaatat

SEQ ID NO: 15307 - DNA, 639 bp, Macaca Fascicularis
gcagcactccaaggaatgcaagcacatgtgaccagataactgaaatggcagcagtaatgaggaaagccattgaaattgacgagcaacagggttgcaaggaacaagaacgaatatttcaacttgaacaagaaaacaaaggcttgagagagatccttcaaataactcgagaatcatttttgaacctaaggaaagatgacgcatcggaaagtacttctttgtcagcattagtgaccaacagtgacttgagtctgaggaagagctgaagagcttctgagtctgtgagcttcttacatgactccaaatggtcaaataagtgaatgaatgaatggacagaaaattcaatcctttatttttttctctgtaaatatgtacagtgcactggctatgagatagcaacaaaaaaatgcatagttaatggtcatagactttattccaaaacataattggaaaatagaaactgagccattgctagttggtagagaaatgaaaggttttcacagtgactactgaatataccaagagcttttggcagtactgctggctttcctggtgattaattaggtaaacttgaatattcccaataaatgtttgagaattcataaattataccaatttaaaaatataaatttttgccactgt

SEQ ID NO: 15308 - DNA, 770 bp, Macaca Fascicularis
  misc_feature (1)...(770): n = A,T,C or G
gagtgccctagnnncattacttcacttatggttttcaccagtgctgaannnnnntnnnnnnnnnnnnnnnnntgacaccatctatgccatgtcagtcttcatgctgttaggccacctcatcttttttgactatggtgccaatgctgccattgtgtccagcacgctatccttgaacatggccatctttgcttctgtatgcttggcttcacgtcttccccggtccctgcatgccttcatcatggtgacgtttgccattcagatttttgccctatggcccatgttacagaagaaactaaaggcatgtactccccggagctatgtgggggtcacactgctctttgcattttcagccttaggaggcctactgtccatcagtgctgtgggagccatactcnnnnnnnnnnnnnnnnnnnnnnnnnnnnnnnnnnnnnnnttctacctcattcgcttgcagctttttaaagaaaacattcatgggccttgggatgaagctgaaatcaaggaagacttgtccaggttcctcagttaaattaggacatccattacgttattaannnnnnnnnnnnnnnnagcctcctaactagtatagaacttaaagacagagttccnnnnnnnnnnnnnnntgtcattgtggtaagagaacagagatcaaaacaaaaaagatgaaccaaaggcttgggtggtgcgggttcttatcctttccgttattttgtggatgaaaatactttctgggaccctnnnnnnnnnnnnnnnnnnnnnnnnnnagtgat

SEQ ID NO: 15309 - DNA, 757 bp, Macaca Fascicularis
  misc_feature (1)...(757): n = A,T,C or G
accacgnnncngcacnnnnnnnnnnnnnnngtgtgatctgtggacagggcagcacccccagcccatgacaagggagtcttgttttctggcttggtttggggacctgcaaatgggaggcttgaggccccctttaggcnnnnnnnnnnnnnnntacttacgagnnnnnnnnnnnnnnnnnnnnnnnnnnnnnnnnnnnnnnnggcagtacacaggtcccgcccacactcacctgggagcacagcgcctggctcttaccagcgtctggcctagaggaagcctttgaacaacctttgggcaggtttctgcttcttctgttttgccccatggtcaagtnnnnnnnnnnnnnnnnnnnnnnnnnnnnnnnnnnnnnnnnnnnnnnnnnnnnnnnnnnnnnnnnnnnntgcttctgggcagaagcttttattttttgagagnnnnnnnnnnnnnnnnnnnnnnnnnnnnnnnnnnnnnnnnnnngttaattcttgggtggnnnnnnnnnnnnnnngtggcgatgcccgtcctctggcttgggttaattcttgggtggcgtcggcgttgctgggagactgcgccgttcctgccctgcctccaccctcctcaggagcagaagcccggcctggacacccctcgaaggagagggcacttccttgagtgggtggctcccctcgcccttctctccccatcactccatactggggtgggctggaggaagccataggccagctattgtaaaagctttttattttagtaaaat

SEQ ID NO: 15310 - DNA, 678 bp, Macaca Fascicularis
acagacagagccacaagacaggagcccagcacccatgagttgtgacaaatcaacacaaaccccaagtcctccttgccaggccttcaaccactatctcagtgcaatggcttccaggaggcaggctgaacctgcagatatgcgcccggagatacggatcgcccaagagttgcggcgaatcggagacgagtttaacgcttactatgcaaggagggtatttttgaataattaccaagcagccgaagaccacccacaaatggttatcttacgactgttgcgttacattgtccgcctggtgtggagaatgcattgacaggttctttgcggagccgagagacgtgcagacattttgcttgttcgaaccaacaagccccagcaccgcggtctcctggtgccattatcatgcagccagcggttctctggtggaggggcaggtgacgtgttcagaagacaccgagctggatgggaacttgacctttctgttcatcaccacacagcagaatttctaatggaagtttcttgtgaatgtaaaggagggagcattctttgctttttaatgtacaaaccatggttttttggaacaggattttgtgtaagaatggtgtttacatgcagtgtgttttccccatcacctttaataaggttttcaaaaaggaaatggaaactttttaatcaattgtg

SEQ ID NO: 15311 - DNA, 766 bp, Macaca Fascicularis
  misc_feature (1)...(766): n = A,T,C or G
aatacatgttagnnaaaagatnnnnncaacaaaccaagagaagcctttgactggaagaagatcctaacagtgcaatggataaagagagacgaaagtctttaataaaaccaaaattattgagactgcagagagacattgaaaaagcctcaaaagacaaggaaggnnnnnnnnnnnnnnnnnnnnnnnnnnnnnnnnnnnnnnnnnnnnnnnnnnnnnnnnnnnnnnnnnnnnnnnnnnnnnnnnnnnnnnnnnnnnnnnnnnnactagaccttttggaagcaaactcctacaaactgtcatcagtgttagcagaacttgagcaaagacctcaacccagccatccttgcagtaactccatcttcaggtggagggaaaaggagcatactcatagctatgtgaaaatatctcggccttttttaatgaagagattagagagtattgtgagcaaagcatcttctggtgggcagagcaatccaagttcttcaactccagtccctggtgcagcccagctcagcagcagactttgcaaggccttatattcttttcaagccagnnnnnnnnnnnnnnnnnnnttggaaaagggtgacattgtgattatacacgagaaaaaagaagaaggatggtggtttggnnnnnnnnnnnnnnnnnnaggccattttcctgccgcttatgtggaggagttaccttcaaatgctggcaacacagctacaaagacataaaacaagactctgaacatactaccttcacactctgtaccaacaataca

SEQ ID NO: 15312 - DNA, 712 bp, Macaca Fascicularis
  misc_feature (1)...(712): n = A,T,C or G
aattttaaccaccacctacttcccttaaacacacacatttttatcttataattataacccctannnnnnnnnnnnnnnnnaaacaataattctactaagttagccagccaatcaaactacttcagtaaataatcacactacagcctggaatcactcaaacaaaaaattcttctagttctctttaaagatatttatcgtttattttttcatgaaaccaaagtaattgattcaacaatactaacagttctagcatgcaacaaaccatctactatctaatgtttaatcttaacatgtatattttcattcctataaagtttccataagaagcttgcaatgatcataaaggtaaataagtacagttgtcccttggtatccatggggtattggttcccagaccgccccctcaacccatagataccaaaaatccaagtatactcaagtcccttacataaaatgacatatttgtatataaccaacgcacatcctcctgtatactttatctctagactaatacctaatgcagtgtaaatgctatttaaataactgttatactgcatttttatttgtattatttttatattttttctaatatttttgatctgcaattggtttaatccacagatgcagagtacatggannnnnnnnnnnnnnnnnnttttgttacaggtacttcaaatagcacnnnnnnnnatctttgacaaaattttacaat

SEQ ID NO: 15313 - DNA, 721 bp, Macaca Fascicularis
  misc_feature (1)...(721): n = A,T,C or G
ttattttacattctctannnnnaatgagaaaacactaagttcggggagcagaggtatagccttttcaagcttgnnnttgccataatggtagtcttccttctgatgtgggcgccctacaatatcgcacttttcctgtccactttcaaagaacatttctccctgagtgactgcaagagcaactacaacctggacaaaagtgttctcatcactaaactcatcgccaccacccactgctgcgtcaaccctctcctgtatgtctttcttgatgggacatttaggaaatacctctgccgttttttccatcggcgtagtaacaccccacgtcaacccaggcggcggtttgcacaaggcacatcgagggaagaacctgaccgttccaccgaagtgtaaactagcatccaccaaaggcaagatgactaaacatggattttcatctttttgcattatttcacttaaattttttacacacttgtttacaaaatcggatacaggaagaaacgggaaaggtgagctaacatttgctaagcattgaatttgtctcaggcaccgtgcaaggccctttacaaacgtgagctccttcgcctccaaccacttgtccgtagtgtggatgggactagtctcatttctctgagaagaaaactgaggctcggaagtttgtctaagatcacacaagtagnnnnnnnnnnnnnnnnttctccagccctggtagcgtttgctcaga

SEQ ID NO: 15314 - DNA, 146 bp, Macaca Fascicularis
cttccccacccccacagcccaaggacaaagctaccacagaaggttaccacgggacctgggctttgtctccaggggacaaggagacacatcagcctggtgttcaccagccctggtagatgagatggcttgtctcatccacaccacag

SEQ ID NO: 15315 - DNA, 690 bp, Macaca Fascicularis
  misc_feature (1)...(690): n = A,T,C or G
acaacagacagatctacccccccatcaacgtgctcccttccctgtcgcggctgatgaagtcagccattggggagggcatgacaagaaaggannnnnnnnnnnnnnnnnnnnnnnnnnacgcctgctatgccatcgggaannnnnnnnnnnnnnnnnnnnnnntggttggggaggaggcgctcacctctgaggacctgcnnnnnnnnnnnnnnnnnnnnnnnnnnnnnnnnnacttcatcaaccagggcccctnnnnnnnnnnnnnnnnnnncgagtcgctagaccnnnnnnnnnnnnnnnnnnnnnnnttccccaagnnnnnnnnnnnnnnnnnnnnnnnnnnnnnnnnnnncgagttctactcccgcgagggggcgctgcaggacctcgcgcccgacactgcgctctaaccccgcgcgccgtggcgccccaannnnnnnnnnnnnnnngccctcggtcccgggtctcccctccctcgccaccccaaccagcggcttctgcgccgccctccgccctccgctctccgctggctccgaggttggcgggggaggcggcgcgctccatccctttgcctctctcggttgctttcccgcgctccatgcctccccctcgattcccggcgctgcggaagaacagaaggttgnnnnnnnnnnnnnnnnnnnnnnnntctgtatttttatgtacaaagcc

SEQ ID NO: 15316 - DNA, 698 bp, Macaca Fascicularis
  misc_feature (1)...(698): n = A,T,C or G
caggtggtgctggacnnnnnggggggcnnnngagacgtnnnnnggctcacttgagccactgaaaccagccannncntccctcaggccaggcagatggagcctnnnnnnnnnnnnnngcacctgggaaacccacaggtcagagtaaggggagaagggaccctgccctccctattccacgtttgtggggggagagaacaaatgccaggcacagggcaggggtgagaacaaggcagtgtgtgtagctggggcggagccggctctggggagnnnnnnnnnnnnnnnnnnnnnnnnnnggaagcagacccttgagtcatttttcagacgagcccccggcaggggttcccactcagtgaggccaaggtggggcccaggcttccgggagggggagggggagctggcacaaaagcaaggcctggggttggtgtgtttgagcgtcaggtgaagtggcccccccatcccccaaacaggaaaaagctcagtgtttgctcagagatagagacctgctgttgtgacgtggcctgttccacctccacccacacggggatgatcctgggggatggggggccacaaaagagacgcaggaggagacactcccaccctggccggactggggctttggggccagaaggttcacaatacgcggtttgtccgaacgtcacggcttttattgggagttgggggttttgggtgccctgtca

SEQ ID NO: 15317 - DNA, 723 bp, Macaca Fascicularis
  misc_feature (1)...(723): n = A,T,C or G
tcagctgcccccagnngttacacgagccctgtttcncgacgcctcccggccccaccccccaagccctccaatcctatctacaacgagcctgatgaacccatagccttctacgccatgggccggggcagccccggggaagccnnnnnnnnnnnnnnnnnnnnnnnnnnnnnnnnnnnnnnnnnnnnnnnnnntgggcaccctgtcctacggaagagccggtccaggcctgtcccaggaggccagaatacaggtggctcccagctgcattctgagaactctgtgattgggcaaggccctcccctgccccaccagcccccacccgcctggagacacaccctcccccacaatctttctagacaggtgcttcaggacagaggacaggcatggctcccccttgggcctcctcagtaggcggtccggcctgacccccaacaaagaagcctggaggtcagagaagaaaatgtggagcctgctccctcctaagagatcccaagaatccaatggctcagtccttgatgatctaagacagcaaagaagtgtgcgaggagggccctgctggctctcactgtcctggtttctcctcctggagtctaatttccttggccctctgagcctttgagtctgggccctggtccaatgctgctgttgtctgaggaatggtttggtgagaacagatgttagaacttgtttgttgattcttgtctggctaataaatcatcnnca

SEQ ID NO: 15318 - DNA, 764 bp, Macaca Fascicularis
  misc_feature (1)...(764): n = A,T,C or G
gcccctggcagcccagnnnnatnncaggtggctcctgcctgggggttgttcgggacagttctgccagggcctcccgggaagagtgctgtggatccgctgtgactgtcctggacagcagggagcacgctactgcagtgagtgcttctttgtgagggacttgatggggaggtggggtagggagaagggaagtggaagaagcaggaagactggtcaccatggctctacaggccttctgcaaatcagtgctggcctggcctggagacagctctctgtgtgaaggtgaggacttggaagcaggccatcctggccagacaccctagcaggaaggggctcacctgtcacccttaggcagcctgagggcaggtggggactttgagtcttgagggaataatggagaaagctgagctcatagctgcccagccaacctcccagctgaaggtgctcagagccctgtgctggctcccaggcctgcactgcccctctctctgtgcaggtggccagtacccctccctgctctgggagcattgctagccttctaccctatccctagatccacgggggctgtcggggagacccagtgagaatgtagcattttgttcatccccagggtagctgccctggggtctgggcactctgcctctgggagagaggaagaagataggggccccatttttaaaaaaactgtacagagcctttggctttatgtgtttatgttcttcacatgcatacgtgtgtatgtgtgtatatatatcttccccccatca

SEQ ID NO: 15319 - DNA, 748 bp, Macaca Fascicularis
  misc_feature (1)...(748): n = A,T,C or G
aagagggtgaccccagaaaactggaagaactggggaccagcaaatggcagacctgcagtcctgagtacagagaatgtaggccagagtggacctagaagacaagaaagggaatcgaatccagtaaggggcagacacttctgggaggtctggaggctggaaggtggggctgaaactcccactcacttacctctaccaacaactagggcaccaagtcatttttgagnnnnnnnnnnngaaagcagatttaccttacacagatgtacctagcccaggccaccagatgcatccacggagagccaaatgcatatcatcacttggatcaagatctagacagagacctgtgcagcggccttcatctgactgattcctggacgggagacaaagcctgannnnnnnnnnnnnnnnnnnnnnnnnnnnnnnnnnnnnnnnnnnnnnnnnnnnnnnnnnnncctggatttccaggagacctgagacccatgaaggaccaggaaacagcttggggataaaagattaacctggaacctactggagcggaaagggctgcgctcacctggaaaggacaaagctcgtgggaaaggacaaagctcgtgggaactgcccatgtaggccaggtccctaagaaattccatccgcaccggaacaacccaactggtgttcctgggcccctaacactgtccgtacccgctatggaggttggacaaataagatttcactgccctgctcnnnctctctcaaggtctggcccatg

SEQ ID NO: 15320 - DNA, 716 bp, Macaca Fascicularis
  misc_feature (1)...(716): n = A,T,C or G
tatgaaagagcattatatagagacaaaggcaattttcaaaaattgataaaacattccactaaaaatcatgaatacgcatctaacagcttcaaaatatagaaaatactcaaatgcaaaatagacaaatccacaattacagaaaaagacttcaacagacttctagaaagtagtaactcaaatagacaacaatagctaacacttactgggcacttcttatgtgagtggcactgaaacatgtgctttcatgcattacctaaggctagagaaaatgttaactttgacaagtcatatacatgtatcataaatatctttgtacctgacaaacagaacaaacattttttttcaaacacccattattagataattatttaaagaccacatattgggaacccacccctaaagaataacaaccacaataacaactaccaccccagtaaacatggtggcaagaatacaattaannnnnnnnnnnnnnnnnnnnnnnnnnnnnnnttatgaagaataatttggcattgtgtatcaagtgcccgtnnnnnnnnnnnnnnnnnnnnnnnnnnnnnnnnnnnnnnnnnnnnnnnnnatgggggtaggggaataaaaatagaaaatattagaaacacaaatgtcaaattgaaagggtgtggttaagtatggtacaaccattcaacagaatattgtcatttgtcaatgtttatggaggctatattatgtaggca

SEQ ID NO: 15321 - DNA, 739 bp, Macaca Fascicularis
gtccattcagtccaccatctccagctcgcagaattactgaagtctggggtattccttcccccattgatactgtttttactaggtgcaactgtgaaggaaaaactttcttctttaaggattctcagtactggcgttttaccaatgatataaaagatgcagggtatcccaaaccaattgtcaaaggatttggaggactaactggacaaatagtggcagcgctttcaatagctaaatacaagaaccggcctgaatctgtgtattttttcaagagaggtggcagtattcagcagtatatttataaacaggaacctgtacagaagtgccctggaagaaggcctgctctaaattatccagtgtatggagaaacgacacaggttaggagacgtcgctttgaacgtgctataggaccttctctaacacacaccatcagaattcactattcacccgtcagactggcttatcaagacaaaggtttccttcataatgaagttaaagtgagtacactgtggagaggacttccaaatgtggttacctcagctatatcactgcccaacattagaaaacctgatggctatgattactatgccttttctaaagatcaatactataacattgatgtgcctagtagaacagcaagagcaattactactcgttctgggcagaccttatccaaagtctggtacaactgtccttagactgatgagcaaagaaggagtcaactaatgaagaaaagaataat

SEQ ID NO: 15322 - DNA, 725 bp, Macaca Fascicularis
  misc_feature (1)...(725): n = A,T,C or G
ctgccnnnnnnnnnnnnnnnngtgcgctacagctgcatccgccgggaggacgtcagtggcatcgcctcctgcgtcttcaccaaatnnnnnnnnnnnnnnnnnnnnnnnnnnnnctcggagttcgagcgcttctctctctccaccaagtggctggtggagccccggtgtctggtggattcagcagaaaccaagaaccaccgccctggtaacggggcaggccccaagaaggtgccgagccgagccaggnnnnnnnnnnnnnnnnnnnntggcgaggagaagcagcccggcttggtgatggagnnnnnnnnnnnnnnnnatgannnnnnnnnnnnnnnnatccagagcacactggagggagaccgcgggagcctcaactggcattcacatcgagcggnnnnnnnnnnnnnnnnnnnnnnnnnnnnnnnngagtgagtggctgagcggccnnnnnnnnnnnnnnnnnnncactactactgatggccttttggaggtccctgccccagccggagaggccggtgcacagggccacaccaggggataggggcgccccggcttccacaatgcagctgctccaggcctcgggagaggagaggccccggcccctggggctgcccttcccgggtctcgtctgtctgggtcctttggtcaatgttgcacagtttttattgcccccatccctttttgtagtgggctggggtttaagttatacatggtaactgcctctg

SEQ ID NO: 15323 - DNA, 711 bp, Macaca Fascicularis
  misc_feature (1)...(711): n = A,T,C or G
gtgcaggttataaaaaagattagtgcattttcattttaatgatgctttgctccttaaattgttggcagaaatgactgtttttagagaaaatagttttttttgcagccactaacttgtatttgttattattgnnnnnnnnnnnnnnnnnnnnnnnnnnnnnnnnnnnnnnnnnnaacacttacttgatgttttatttgaacttttcctataagtttaagttactacttagaattaccactaggaacaatatcatgaaatctaggttgaaagagaaaacagtatatatgagaacacttaaaattcaaatagnnnnnnnnnnnnnnnnnnnnnnnagaggaatattgtcagtaccaagtaatgtaagaataaggnnnnnnnnnnnnnnnnnnnnnnnnnnnnnnnnntgcataaagacagggaactactctcatggagacagtttttctcttataatgaagtagaaggggaaaaatcatcttaagttannnnnnnnnnnnnnnnnnnnatattacaaacnnnnnnnnnnnnnnnaaattgtgattgtcactgatcnnnnnnnnnnnnnnnnatttttgtttaaaaagggatactgaannnnnnnnnnnnnnnaatatgttttattcaaaagatgtaaataatgtatacagacttgtatgtgatgggatgggaaatatttaaattctaggtgtttgttttttttaaaagaagaaa

SEQ ID NO: 15324 - DNA, 762 bp, Macaca Fascicularis
  misc_feature (1)...(762): n = A,T,C or G
gaaagaactaaaattagaaaaccaccaggaaaactcaaggaatcagaagcctaagaagcgtaaaaagggacaggaggctgaccttggggctggtggagaggaagtccctgaggccaacggctctgcagggaagaggagcaagaagaagaagcagcgcaaggacagtgctggtgaggaagaggcaaacgtgggtgcaggaaagaggaagcggaagcactcagaagttgaaacagattctaagaagaaaaagatgaagctcccagagcatcctgagggcggagaaccagaagaccatgaggctcctgcaaaaggtaaattcaactggaagggaacgattaaagcaattctgaaacaggccccagacaatgaaataacaataaaaaagctaaggaaaaaggttttagctcagtactacacagtgacagatgagcatcacagatccgaagaggaactcctggtcatttttaacaagaaaatcagcaagaaccctacctttaagttattaaaggacaaagtcaagcttgtgaaatgaacatttctgtatttaaaaactgaatccattctgctgtcttcttcctttcactgctgtttataaaatgtgtaatgaattctaacaactcaaattttgctttttgaagctatatttttaagttaagaaaaaatgtatttttggtataacttttatgagaaaagtaaaatatattcttgtccaaacttctaaatttgttgtggcaannnnnnnnnnnnnnnncaaaataattt

SEQ ID NO: 15325 - DNA, 678 bp, Macaca Fascicularis
  misc_feature (1)...(678): n = A,T,C or G
taaattttttattttgaaagctttttcacagatcttttttttagtattattaccttctgatatatgtgtcgttgttcaagaaccataccttttaaagttatcattttgtaattaagtacatcaacagtaaaaagtaactagtggccaggcatgnnnnnnnnnnnnnnnnnnnnnnnnnnnnnnnnnnnnnnnnnnnnnnnnnnnnnnnnnnnnnnnnnnnnnnnnnnnnnnnnnnnnnnnnnnnnnnnnnnnnnnnnnnnnnnnnnnnnnnnnnnnnnnnnnnnnnnnnnnnnnnnnnnnnnntgtagtcccagctagtctagaggctgaggcgagagaatcgattgaatgcaggaggtggaggatacagtgagcccgaaatcgtgccactactccagcctgggtgacagagctagactccatctcataaaaaaaagagctaaaaaattacattttacaagtttatggccagctcacctataataacattctctgatattcctttacttaggatgtccctattgagatcattttttaaatttatgtagaaggattctgtagattattattagaatgaacaattcagtttttttttgtttttgagcctgtcttgtacctggttacactaaatgtataatagttaactttgttggagaccttaaaaccctaaattgaaca

SEQ ID NO: 15326 - DNA, 675 bp, Macaca Fascicularis
  misc_feature (1)...(675): n = A,T,C or G
tgctggaggaagtgccatnctgcatggccactcttgcccccaagggcccaagctgtggctgacacnnnnnaggtggccacataggtctctggggtgagaagacagcaagaaaatggcctaactgaaggaaatggggaccctgcccaagatgggggccaggcagctggaatcaggggagtgcannnnnnnnnnnnnnnnnnnnnnnnnnnnnnnnnnnnnnnnnnccctcctctcaaaatcagctgggcgcccgctctcctaaagaacacccttctggccctccatctgctctccttctcaggtagagattggggctgctatgggaactggccctcttaggggagagccacagacagctcttcagcccagtagcagcagagcaggccctgtcctgccctcccagcaataaccacctttctggaggccagctgagatgcctgtacttggcaccagggacttcctgacaccacagtcaattaattcctcaggggcctgtggctggagaaaaggtgcccagcccccaccactcctcagctgccccccaacatctctatggcagagaggtagggagtnnnnnnnnnnnnnnnnnnntggggattgggtttgatttgttttgtttttttttaaattccattttgataatttttttcctgccctgggtggtggtggcacatg

SEQ ID NO: 15327 - DNA, 714 bp, Macaca Fascicularis
  misc_feature (1)...(714): n = A,T,C or G
aggccccaacggtggcctccatgtcccccaaatctattggctatatgagagtaattttacnnnnnnnnnnnnnnnnnggcacccagctcactagtctgtggggtcctggagcctgcctcttctttctggaggttcaaactgaatagcaataattatgttacccaaagcatgtggaggaaaagtgaaaccggccacggagacaccgggccatggnnnnnnnnnnnnnnnnnnnnnnnnnnnnnnnnnnnnnnnnnnnnnnnntcccttctcatgaagtcccatccggtcatggggacgagggctgggagggtaccggggagcctcttcacacttggggattaggggagtgagaaaagatttgggccatgcatgcaaagtaaaagtttaaaattttatccttttaaaatagatataatatacctatacatgatataatatttgtatatatgaaatctctctatatttgtttaatttgagccattcaatctaaaccaatgtacaggtgtacaatgaaaaatttaaatgcttagttatttttcccaacacagtgtaaagtcaccctcctctgagagtgggatgtgcagacttttgatgttacagctttgctcacttcctggcaagggcagttcacgcctcaatttgtaatgggagtctggggtaagggtgggggttgaaagttatctttaaatacatgtacaaatcgttgtcaaaagt

SEQ ID NO: 15328 - DNA, 734 bp, Macaca Fascicularis
  misc_feature (1)...(734): n = A,T,C or G
gccactccagttcctgggttaggggctttgctgtaagtttctctttctggactttagatnctgaacctgtccttgcttctcagtttccctcactgtacccctttccctcagtctcttcctgtctctttgccctgtcactatttgtctttctagtttcctgtttctctgaatatcttcatttctatctctgtgtttttgtctctttctctgtttgtctttctgttcttcaatctgtgtttttgtctctggctctctgtcagtgtctttgtctcacctctctctcttgctctgccctggctatttccacttttctatttctgactgtcatttttgttctctgtgtgtctcctagtcactttctctctcactctatctctgtctatatttccctctctcctctgctgtgtcctcaatctctttgtcttcctgaggctctgtttctgtctctgatgctcttctgtgtctctatttattttcctgtcacttaatctttgtccttctctatctctctcatttagtcttccttccacacccttcactcaccatctcttcccacaatcaaatatcactcnnnggtacttccagcttccaaccctagggattcatcattctggtggagactccttcttccagggcctgggaggacagggctaatcctaagggtgcctgcttaggctatgttaactgtgacaagaacctgccatagatttgcactgttctttcctaaagagcaa

SEQ ID NO: 15329 - DNA, 1019 bp, Macaca Fascicularis
  misc_feature (1)...(1019): n = A,T,C or G
caggagcactgtggtagagcactggcnnngncttgagaagagacacaggtctcccgtccctgcaccagnngagagagacttgccacaaagcannnnnnnnnnnnnnnnnnnnnnnnnnnnnnnnnnnncacaaaagtatacagacaatcaaaacattgatatatccaaactctcctttgaaattccaatcttcttgcaacaactctgtgaattgcaaggtcccagaatctgccttctcacatactctaccctcnnnnnnnnnnnnnnnnnnnnnnnnnnnnnnnnnnnnnnnnnnnnnnnnnnnnnnnnnnnnnnggctacttcagatggccactttagtcctttcagctgtagtcaggattatttaacttacctttacatcaaaagttaagaaaaagctagtacataagtaaaggcactaaatcctttcctgacaatgacagagtctctagaggtagaaatttgccttgctgcagagagagaaggaatggcgtgggatgggggaaagaaaagaaagagaagagaagaagctggggtctctaggcagggtagtaagctgacactgtaaatattttttacataaaaatgtattgaagcaacaaatatttcctgaagatccaccctgggtgaggctttgagctgactttagagatcactgtggggtcaagaatttcttacatgttttattcatcattcttgaaaaaagaaataattcaaaccttgcaattaaaaagtctcagaaaaatatggaattttctttttgaaattttcggggttttctnnnnnnnnnnnnnnnngtgtgggggcaggactgggcctgccagggtatatagcccttcctgcttggtggaggccagtcgggcccagtgccttttaagcagcagtcgagaggaggcttggggaacggggggtttgggtggcaggggaaggggcccagttccagtgtagccccctatcctctccagatgtgctgcttctggctgtgccctcagtgactgccctcactgctcaaccctgtg

SEQ ID NO: 15330 - DNA, 742 bp, Macaca Fascicularis
  misc_feature (1)...(742): n = A,T,C or G
gcannntgccannnnnnnnnnnnnnnntggcgaggtagacttcnccttcgaggctgctgttctggctggcctgctgaccgagtgccgggatgtgctgctggagttggtggaacaccacctcacgcccaagtcacatggccgcatccgccacgtgtttgatcacttctctgacccaggcctgctcacagcnnnnnnnnnnnnnnnnnnnnnnnnnnnnnnnnnnnnnnnnnnnnnnnnnnnnnnnnnnnnnnnnnnnnnngggaagctctgagagccccgagtctagcacattccacnnnnnnnnnnnnnnnnnnnnnnnnnnnacagataatgagcttcctaaccctgctcagctgccactaacgcttttcaatcttcaggcttcattccttcccaagagtgcttttgactcnnnnnnnnnnnnnnncccacacagctggtggagaaggagcaatgctgaggggtgaggcctctctcccacnnnnnnnnnnnnnnnngaaacagaactgcctgaaaaaggtgaagtgaaacttggatctctatnnnnnnnnnnnnnnncttctgaaacagggaagccccctcccatgtgaaccaaggaaaggaggcacagcccagagaacccctctggggacactaaagacagaagaggggaaggtggcccttagaaacagagcttggacagatgnnnnnnnnnnnnnnnnnnnnnnnnngaggagggggctagggcaggggagattctcca

SEQ ID NO: 15331 - DNA, 771 bp, Macaca Fascicularis
  misc_feature (1)...(771): n = A,T,C or G
taaatgcctagaaatcccgcagatggatggagctggtgtgaagaggaacannntcgacatngnnnnnttccatgannnncntaattaattgcttccactttaatggaataattatggaacacagttttaatggcatgtggccacaactgtaaagaggatgaagctctgtcctccaaatacagctcagcatctttgttcatacttagaaatgtgcagcgttcttgtttgtgtattgagagagatatattcttactttggttttcatgtctgtttactgcaggaagcagacagtatgagcatgaccagtggagaaggtactagccgtcctccaggtaagttcaccacccgcatctccagaagaaatcagtcacgtctgcctttataacataaatcttccgtatcacgtaccaaagtaaacaggactcagatattgaatcctgctgacctggtgccgagttaacttggtttcaagacacgcttgcttcctccagaaagagcgtggagagaaaaagaggcacacctggacgcagagccctgctagcgccctcctctgctgtcgcagctgcaaggagaccatacctgtgggagccgggcctcgcttgcatgaagaaggaaagatgccttttcagtggtgcctccgcccatcatgcagaagagcttttgttggcttctctcccgagcttgtgcctgattctgtggcccaaaacaatcattgttaatatcttcgtgtatttcattctgatctttcattcatatatatgatgcctagct

SEQ ID NO: 15332 - DNA, 717 bp, Macaca Fascicularis
  misc_feature (1)...(717): n = A,T,C or G
gaccacagttggtccaaccagccttggaaagctcactgaaaaaacttcaactggactatgtggacctctatcttattcatttcccnnnnnnnnnnnnnnnnnntgagacgccactaccaaaagatgaaaatggaaaagtaatgttcnnnnnnnnnnnnnnnnnnnnnnnnnnngaggtgnnnnnnnnnnnnnnnnnnnnnnnnnnnnnnnnnnnnnnnnnnnnnnnnnnnnnnnnnnattgtcctggttgcccatagtgctctgggaacccaacgacataaactatgggtggaccagaactccccagctcttttggaggacccagttctttgcgccttagcaaagaaacacaaacgatccccagccctgattgccctgcgctaccagctgcagcgtggggttgtggtcctggccaagagctacaatgagcagcggatcagagaaaatgtccaggtttttgaattccagnnnnnnnnnnnnnnnnngaaagttctagatgacctaaacagaaattttcgatatgttgtcatggatttnnnnnnnnnnnnnnnnnnnnnnnnnnnnnnagatgaatattagcagagagggtgttgcacgacatctagcagaagccctgcgtgtggatggtgatgcagaggatgtctctatgctggtggacacacggcctctggttaaatccctcctgcttggcaacttcagttagctacatacatccat

SEQ ID NO: 15333 - DNA, 1321 bp, Macaca Fascicularis
  misc_feature (1)...(1321): n = A,T,C or G
aactgtatgaggacaatcatgaggaagactattttctgtatgtggnnnacagtgatgagagtgtctatgggaaatgagtggttggaagcccagcagatgggagcacctggacttgggggtaggggaggggtgtgcgtgcgacttggggaaagagggtgactcccaccgcgaggagacagaaggtgaagacatctagaaacattacaccgcacacaccgtcatcatattttcacatgctcaattgatattttttgctgcttcctcggcccagggagaaagcatgtcaggacagagctgttggattggctttggtagaggaatacggatgatgtaatttcaaagcattcctgagatttaatttttgtgcagtttcatagaagggtcaggaggtggacaagttggggccagagatgatggtagtccagcagcaactccctgtgctcccttctctttgggcagcgattctatttttgacatttgcacaggacaggtagggaaaggggacttgtggtagtggaccatacctggggaccaaaagagacccactgtaattgatgcattgtggcccctgttctttcctgtctcacacttcttttctcccatcccagctgcagtctcactcaaacatcacagtaccaccccaggggtggcagtagaccacaacccagaaatttagacagcgatctcttacctttggaaaataggggttagacataaaggtggttatgattaagaagattgttttgttattaaatagcattaaactggaattgacaagactattgagcatctctgtctaacctgttctttctctctggtgccccttatctcacccctaccttggaatttaagtctcaggcatttccagttgtagactaaaaccactcttagcatctcctctagtattttccatgtatcaggacagagatgtcttatgtagggagggagcaagtgtgaagtaaggtaattatatacacctctcattcaggattcttgctcccatgctnnnnnnnnnnnnnnnnnnnnnnnnnnnnnnnnnnnnnnnnnnnnnnnnnnnnnnnnnnnnnnnnnnnnnnnnnnngcagctgctagttagaaaggtttggagggatgacttttagtaaatcatggggattttattgatttattttcactttcggggttttgtggggtgggagtggggagcaggaattgcactcagacatgacatttcaattcatctctgctaatgaaaagggtccttcctcttgggggaaatctttgtgtcagttctgtcagctgcaagttcttgtataatgaagtcaatgccatcaggccaaga

SEQ ID NO: 15334 - DNA, 722 bp, Macaca Fascicularis
  misc_feature (1)...(722): n = A,T,C or G
gctnnnnatcnntgcggnntgtnntnncaagggtagcctacatgggtggctgccctggccccagtcgtggactctttgccactaccagggtttcagaagctgccggaggaggagccagaagcagatctcagccccgggctcccagctgcccacctcataggcgctccgctgaaggggcaggggctaggctgggaggcgacgaaggaacaggcgtttctgacgagcgggacgcagttctcggacgccgaagggctggcgctcccgcaggacggcctctattacctctactgtctcgtcggctaccggggccgggcgccccctggcggcgcggaaccccggggccgctcggtcacgctgcgcagctctctgtaccgggcggggggcgcctacgggccgggcactccggagctgctgctcgagggcgctgannnnnnnnnnnccgtgctggacccggccgggaggcaagggtacgggcctctctggtacacaagcgtggggttcggcggcctggtgcagctccggaggggcgagagggtgnnnnnnnnnnnnnnnnnnnnnnnnnnnnnnnncttcgcgagagggaagaccttctttggggccgtgatggtggggtgagggaatatgagtgcgtggtgcgagtgtgtaaatattgggggcccggacgcccaggaccccatggcagtgggaaaaatgtaggagactgtttggaaattgattttgag

SEQ ID NO: 15335 - DNA, 743 bp, Macaca Fascicularis
cgtatcgtctcatttctttggttatagaaccagaaatgaaattgctgggtattatggttaactctgttctgcattttgaggaactaccaacctatttacattttacattgtaagaaggttccaatttccccacatcctcatcaacacttggtattgtcggtctttttgcttataatcattcaagtggaccagagctaatttgacatggacaaatagcctacaacatctacggtaacctccacagctcctttgaaaaaaattatacctaaagaaaagttagaataatacacatacttagaatcaccattagttactttgcccatttctatatatatttggggggatgctgtttttgccaagccactttgctacaccaataaattggagacatcatggcattttgtctctatttcagtgtgtaccctctaagaacaaggactggctcctacactgcaaaaatctaattataacattcagaaaatttaacatttatacaaaactatcatcatttaacatacaattgatattcagttatccaaatgtatactgtatgggtttttaacaatagaaataactgttattgaataagatgtggggctttctataattctaaaataagttttgggtccttccatgccttttcatggtttagtagctcattttgttttagcgctgaaaacgattgcattgtctggatgtaccacactttatccattcacctcctgaaagacatcttggctgct

SEQ ID NO: 15336 - DNA, 758 bp, Macaca Fascicularis
  misc_feature (1)...(758): n = A,T,C or G
gccgggaaggctcagtggnngcggccntgctgtgagccccaaccctggcgacaagcccatgacccagcgggccctgaccgtgttgatggtggtgagcggcgcnnnnnnnnnnnnnnnnnnnnnnnnnnnnnnnnggatgagaagaagaaaccgaaagactaggagatacggagttttggacactaacatagaaaatatggaatnnnnnnnnnnnnnnnnnnnnnnnnnnnnnnnnnnnnnnnnnnnnnnnnnnnnnnnnnnnnnncgaagataagaatgtgccttttgatgaaagaactttatctttctacagcgaagagtggaatttctatgtttaaggaataagaagccactatatcaatgttgggggggtatttaagttacatacattttgacaacctttaatttgttgttgtaataaatactgtatcctttattatatctttatatgtatagaagtactctatcaatgggctcagagatgttggagataaactatactgtaatagtttatcagtttgacaattactataaaacggtgttttctgatcagtttttgtttcttgcttaccatatgattgtaaactgttttcttttatgtattaatcagttaatgctaattatttttgctggtgtcatgttaaagagctataaatttccagcaaccaactggtgtgtaaaaataatttaaaatttcctttactgaaaggcatttcccatttttgtggggaaaagaagccaaatttattactttgtgt

SEQ ID NO: 15337 - DNA, 772 bp, Macaca Fascicularis
  misc_feature (1)...(772): n = A,T,C or G
gctattgtacaaatatcactcttcaggtttagtttatagagccatggctatggattcttagctctgtaaggaagtacttctataaattcttaggtttagagatgataccatctgggtacctttgcttgaaccgtgcaaccacatctgggtctagcaggtggatcccatccagttggtttccaagggtgatccagttgggttgcacattgtgtggtcgtccaaataactcaatcttgcgagtgccgggagatagtctttcaatcatgccatagatttcatcgggtttatgactggtggaacgaacctcagctacgatcacatcacaatccagaccctggttgaagccttggggatttcctttgacaccaaccaagcagtgttccttcccatggttcaaccagtgacctgtacggcctgtccgaatgatgcgttgcagttgatttgtcttcacccaaataatttcatctacccgttcatacccccagaggtttagacattctctccccaactccatggccctgcctgtgacccagaggaagagaaagccatcatcctgtagtacgggtatgttgagcctgcgcatctcatcatctgtcagggtcccatagggcagctccatgtgaatatcccagggtgggtcagccatcacaactgcaaacttgcccaatatactgacgtccaggtagcggatatcacaacagatccactgnnntgggannnnnnngtctgcactggaatcacctcnnnnactctgtgtannnnnagctcctgg

SEQ ID NO: 15338 - DNA, 716 bp, Macaca Fascicularis
  misc_feature (1)...(716): n = A,T,C or G
tgagccnnnnnnnnnnnnnnnnnnnnnnnngtacatcatcccagggacccagacagttactctnnnaggnnnnnnnnnnnnnnnaaactggaatgagctaaacaatatccaggaccacaacaccatttgggaannnngctgcagactggagnnnactnnnaagaatgcaagaattgttgatgaacgaactggcttccggccagtacgccccaagattcggctagaaagagaacagcttcgcgttggaccttcaaacacagaggtcatccacaacnnnnnnnnnnnnnnnnnnnnnnnnnnnnnnnnnnnnnnnnnnnnnatggaggcagccaagctctttgggagaatcctggaagaaaagaagttgtccaaaatgccaccatcccacctctgaagactccagtgactgctgcttcccccacaagaactgccttctcccctcagccaacaaatcaatgtgctccttcataagccattcttatccctcacttctttcctcaaagaagcatgaggtgagagaaagccataaagtcagtgcctggagaagggttcagcccaacatggggcccctctcatcaccgaaatccctctaccttctctggatctggcattataaagaacagctgggggctgttattccatgagtcttcagaagaaaggacagctcagaaaatcaaagaggccaactgcccagagccacagaaaattgaggataa

SEQ ID NO: 15339 - DNA, 731 bp, Macaca Fascicularis
  misc_feature (1)...(731): n = A,T,C or G
aatgnnncttttcccttaaatacagataatttcatttgtattgcttattttattatgagctacaacaaaaggacttcaggaacaagtaatgtattagtatggttgaagattgttgatatgaactgtctcaaaaggatggtggttattttaaatataaatagctaatgggggtggtaggcctttaaaattaaatgccttgtatagaatccaaaatgaatgcaaaattgttttcacttnnnnnnnnnnnnnnnnnnntgattccaatctctgttctgtttggcacttgtatttaattcttcacctttgtaagacatttgnnnnnnnnnnnnnnnnnnnnnnnngctatttaatacctggcactgttaatacacagtactttattgtacagactgttttactgttttaattgtagttctgtgtactttttttgaatggggctggcatgttttatttgtttctggcaatacgacatgtgagaatttcaatgcgttttgttgtnnnnnnnnnnnnnnnnnnnnnnnnnnnnnnnnnnnnnnctaagaaaagctttttcagnnnnnnnnnnnnnnnnnnnnnnnnnnnnnnnnnnnnnnnnnnnnnnnnagttattcaaatttgtannnnnnnnnnnnnnnnnnnnnnnnnnaaaatgttgaagaaaaagcttatagaataaaagctataaagtatatattaggatctgcaaacaatgaagaattatgtaatatatt

SEQ ID NO: 15340 - DNA, 701 bp, Macaca Fascicularis
  misc_feature (1)...(701): n = A,T,C or G
tcctggcaggagaggccactnnnncttttccgttgctgagggtcacagaccccgacagggaagtcgatacctgtcttcccagtggttgccctgctcgctgggcactccacggagtcccgccctcctctgaaatgggccagnnnnnnnnnnnaaggggcgcctggggctgggactgattgtggacggcggagcaccaacagaaaaggattccaaggagaacttcaggttaaagnnnnnnnnnnnnnnnnnnnnnnnnnnnnnnnaatgttgactttttcttattttttaatgtatgggagaaaaatgtaaaattccagttattttctaattgtgtttctgaaattaggagtcagctgccagcgttattgtgtggctgcagtatgcctgggcccagctcacgggcagtgggtggcctaacttcccagacaggcgggagctacttccagagccttccagtgcgtgggagggcagggctaggtgtggctgtgtctcctctttgaaattaagaactatctttcttgtagcaaagttgcacccggtgatgctgcctcctctctccgtgttgtctgggcccctgtttacaagcacaccttgccctttctgaggggagccatgctctnnnnnnnnnnnnnnnnnnnnnnnnngcagggcaggcccatcgcctttggcagctcctggagagctgttgacannnnnnnccc

SEQ ID NO: 15341 - DNA, 706 bp, Macaca Fascicularis
  misc_feature (1)...(706): n = A,T,C or G
taggcaagtggccagttgcctccacctcagttcttccatctttggtggggacagggcccagcggcatctcagcctcctacccacaattccactgaacacttttctggacctactgcacatggcccccagcctccatccttgtgatggtagcctctcacaactccgcccttgccctctgccttccacttccttccatctcatttctaaaccccaaacagcttatctccaaaaagacagaactcccagcaggtggcttctgtgttcttctgacaaatgattcctgcnnnnnnnnnnnnnnnnnnnnnnnnnttcccattcttggtcacagctctagccacagcagaaggaaaggggnnnnnnnnnnnnnnnannnnnnnnnnnnnnnncagcagcctcatctcctgggtgtggctgtcagtggacatggggggctggatggaaatgcctctcacttcaaaatgcccaacctgccccaaatgcctctaagccccttcctgtctcctccttcatagtcctacttcttccaactttccattccccatcatgctgggggactctgtcacaaggctcagcttctctccactgtccatccttcctatcatctgtctggagagcagagcccaggtagttgtgtgccttgggcccagggaaccctccatcaacctgagacaggactcagcatatggttattgggtatgcctaccag

SEQ ID NO: 15342 - DNA, 710 bp, Macaca Fascicularis
  misc_feature (1)...(710): n = A,T,C or G
atatcagactaatgatggannnnnnnnnnnnnnnaagttgaggggtaagaactggtttgtttaaaggtttaaattgttggaaagagcatttgcctccnnnnnnnnnnnnnnnnnnnnnnnnnnngttgactttgacctaatatttaagaatataaatatattttacttgaaaaggctgagtgttgccctcaaacacttgctaaaactgcnnnnnnnnnnnnnnnnnnnnnnnnnnnnnnnnnnnnnncctaattgctgaatgtactcattataatannnnnnnnnnnnnnngtggtacagtgtttctgagtcatttgggaccaactgcgtggttgtttaaaatgctgattcctgcacatgactctccnnnnnnnnnnnnnnnnnnnnnnnntgtgttttgctttcctttttgtgtttaaagtttccctcagtgattccagtgnnnnnnnnnnnnnnnnnnncacaggcttaatggtaggtcggggtttcccacactaggctgcatggaattatcacctgggaacgttaaaaaaaatacagacattctcgattcttagtgtagttatggtgtggatcccatgtatttttttaaaagttccccagataattttgatgtcaggagtcactagtatagactatctatctagtgagttgtgttataagcaatgagatactnnnnnagctacccagtaactcnnnnnnntatttta

SEQ ID NO: 15343 - DNA, 745 bp, Macaca Fascicularis
  misc_feature (1)...(745): n = A,T,C or G
gagcaaaggcagtgcactggggtctggagtcacaaggacgagttaccgattgagattgaactaggcatgaagtgctggtaccactccgtgttcgcttgccccatcctccgccagcagacgtcagattccaaccctcccatcaagctcatctgtggccatgttatctcccgagatgcactcaataagctcattaatggaggaaagctgaagtgtccctactgtcccatggagcagaacccggcagatgggaaacgcatcatattctgattcctacctggaaggaatgttgttgaaagggcttttcacctgggagccttggtctgtctcaggagggtggttagcgtcagtggactgtggttggtttcagagcacctggctgaggagttccgctgaggggagggctggagcagccctttggcagagactgaggaggcagatggaccagcccacacctggcagctggctccatggcataaggaaagnnnnnnnnnnnnnnnngtgctcctgccgtctctccctgtttttatttgcccttaacttagtagcagccggcagannnnnnnnnnnnnnnnnnnncagcagtagacctccttctacccctgccctcagccgagtctcttgctgccatgccaatgctatgtccacccttgcccctcggcccaagggtgtccagcggtggcccacctcttcctcccactgtacagcctcaacagtatgtaccatctcccactgtaaatagtcccag

SEQ ID NO: 15344 - DNA, 693 bp, Macaca Fascicularis
  misc_feature (1)...(693): n = A,T,C or G
ggaagagaacaccaaaggcgaaggagaagaggaacaagaaaaagaaaaggaagctgatagaaagagcccaggagcaacacagcgtcttcctagctacagacagagccaaccaataaaacaagagacacatctggtagatttttaggggtttttgtttttgcaaacgtgcacaaagctactctccactcctgcactctgnnnnnnnnnnnnnnnnntgctctgcccagtatctgttcccagtaacatggtgaaaggaagcaccaccagcgtggcccctgtgttatttatgctttggtttgaatctggagactgtgaaggcaggagtaagtgcacagcccatgacttggctcagtgtgtgctgagagaatccgtccccggcaccacggacacgctagtggtgtgaggctgcagaccaccgttggaggacggacttctgcctatttatgtgnnnnnnnnnnnnnnnnnnnnnnnnnnnnnnnnnnnnnnnnnnnnnnnnnnnnnnnnnnnnnnnnttcaaggatatgtttatgtggatatctgcttagtggttaccacatggtattctcagcatctgtcaccttcacactgttgtgcgatgaaactgcttttagctgaggatacgctctggaaattcctgctcagtttcacagcagccctaatatgtacatattctgcaggggctacatataaagc

SEQ ID NO: 15345 - DNA, 118 bp, Macaca Fascicularis
gaggagtaatggaccaggtttacctcagcattcaggttcaatggggacaccagcggcttcaaaattgctggtctcatgatgtctttagacaccttacaaatgatggaggattccaaag

SEQ ID NO: 15346 - DNA, 757 bp, Macaca Fascicularis
ggcagtgagactgtaggtccagtgagacacttgtgtgtcagtacccctggaggcgccagtcattaaatagataaggctctgcctacagggacttttctttagccagggagagctttatcagtgaggagaaaacaattccttagaagtcttgaatatattgtactatttagatctcccatgtgtaagtattgaaaaagtttggaagcactgatcacctagtagcattgacattcctctactgtaatgtaaatagtataaagctatgtgtataaagctttttggtaatatgttacaattaaaatgacaagcactatataacaatgtatgtgcattttacactaaaaaaaaatgcagaacacattttttacttccaattaacagctcctaggaaaatgtagacttttgctttatgatattgtatctgtagtattaggcatgaaatagttttggatcaggaatttctcagagctgagtaaaatgaaggaaaagcatgttatgtgtttttaaggaaaacgggcacacatatacatgtaggagtgtttatctttctcttgcaatctgttttagacatctttgcttatgtaacctgtacatatgtgtgtgtgggtatgtatttatttccaattagggctgcagggttcctagaggtgtgctataccatgtgtctgtcattgtgcttttttctgtttttagaccaattttttacagctctaatggtatgcattcttgtatctggtgatgtattaacatgtagcct

SEQ ID NO: 15347 - DNA, 764 bp, Macaca Fascicularis
  misc_feature (1)...(764): n = A,T,C or G
gcagacaggtcactaacannnnnnnnnnaggtgngatgagtttgggtnnncacggtnnannnnagcttcttgccaccttcccctctgggtagtcgcctccccatccatccccctctttaatctatgactctataggctcnntgtgtgtaacacacacacacacacacacacacccctatcgttgtctttcgaatacgcagcattaccattggttgaggccaaattcagagctttctcaaatcagatttacaatctccattttcatcaatggggaaacaactccgagccactgactgcccggcttcgtcgctgaaagatagatctgaacccagggtgtcaacagctgctctcaattccccatctctgggcactgaggagtatttcccctcattctacctctctagggctatgcacccctccccacgtcttccagctggaggatggggggagtcataggaaaagcccccatctcccatctggtatagggatattccatcagccttaaccctggggaatgcctgctgcccccagtgactcttggcttcatctcccacatacagaagcagggtggaggggaggtgtggatctcagttagcagcggtccccagggcaagtggcaagccagcctcctccctccgtgcctctctggtcagtgtgccttagggtggcctctcactcccaccattctggggcccttgggggaggactggggaggggtctgtgggagagccccgacgctggaacctgtatacacaataaaggac

SEQ ID NO: 15348 - DNA, 758 bp, Macaca Fascicularis
gagcacccacccgcttcgtggatgatgaggagctagcgtatgtgattcagcgataccgggaggtgcacgacatgcttcacaccctgctgggaatgcccactaacatcctgggggagatcgtggtgaaatggtttgaggctgtccagactggcctgcccatgtgcatcctgggtgctctctttggaccgatccaactcagtgctcagagcctgcaagtgctggtctcggagttgatcccatgggccgttcagaacgggcgcagagccccgtgtgtcctcaacctgtactatgagcggcgctgggagcagtccctgagggctctacgggaggagctgggcattacggcaccacccgtgcatatccagggcttggcctgagttcctgagccagcggggcctggcctacctcccccatctactgcttcccttgggggcagagggctcccttgactacctttgttcctcttctttgaacactgacccttggacaacatttatcataatttatcatagccactgctgagtggccttgaggatgaaccccacagggagcaagcagtacagtggcactcccagggggaccagcagctgtccaaggagaaccatgcgtgaacagtatcagtcgtctgggctcatgctgggatgtcgcagcactcctgttgcgactccttccaaccagccaggtttgctggaggccaggctgggtgtcctcacgggagtgagggctacacccaattccaaaagcccgagaagagagaa

SEQ ID NO: 15349 - DNA, 837 bp, Macaca Fascicularis
  misc_feature (1)...(837): n = A,T,C or G
tagtagttccttggtgtaactatggacgggatccacacataggaaactagtnnnnnnnnnnnnnnnngccaagaagaaagtgtgcgaagttgatgggcagcaaacctgctatttaacnnnnngacaaccatattgagtccagtatgccagttggcaccagatgctgtggacttggnnnnnnnnnnnnnnnnnnnnnnnngttgagagaggagagaggaatccacaggaccaccagagggtagagggagccagatatgcaggtcagagatagaggaagtggaaccagagagctgggaggcaccaaggctgtaaggatggctaagtcccaccataacagctaaagggtcctgggagatgatgactcatttccacccaaccccaggatttccacaacacacacccacaggcctggacctgggaaaaagatgaatgaagaacatggactcatgtggatgtggtttggctcacgtgtgcctgcaataaacaaggagtaagtacttagtccctgagtgtggttgaggtttgaggccctggtcgagcagggaagtactggacctggtctaggtcagcattcagattcaatggggacaccagtggcttcaaacttcctgatctaattatgtctttagacacttagaaattattgaggaccttagagagcttttgtttatttgggttaatatttgttaatatttatggcatttgacattgaaacaaaaatttaaaatgttatcttttaattcatattaaaatagcatgaataaatcaattataggctaatataaacaggnnnnnnttgtgaaaaagcaatctattgtgtccaaataaaagaacaag

SEQ ID NO: 15350 - DNA, 684 bp, Macaca Fascicularis
  misc_feature (1)...(684): n = A,T,C or G
acggctggcgcgcgcgcgaggggnnnnnnnnnnnnnnnnnnnnnnnnnnnnnnnnnnnnnnnnnnnnnnnnnnnnnnncgattttcgcttaccctcacacgattggcaagtcggtcacagggggctacgtgtaccggggctgcgagtaccccaatctgaacggcctctacatttttggggatttcatgaccgggcgtctgatgtccctccacgagaacccagggacaggccagtggcactacagtgagatctgcatgggccatggccagacctgtgagttcccaggcctcatcaacaactactacccgtacatcatctccttcggggaggatgaggccggggagctgtacttcatgtcgacaggggagccgagtgccacagctccacgtggggttgtctacaaaataattgacccgtccaggcgggcaccacctggcaagtgtcagatccagcctgctcaggtgaagatcagaagccgcctcatcccctttgtgcccaaagaaagtgctgacaggccaccgcgcacgcagacagcccgccccaagggaggaatcaggggagaagagagatgcaacccccccgaagcatgccaatctacaaaaccccgagtcaaaggtcaagccnnnnnnnnnnnnnnnnnnnnnnnnnnnnnnngccctcttctaagtatactttacttccttt

SEQ ID NO: 15351 - DNA, 797 bp, Macaca Fascicularis
  misc_feature (1)...(797): n = A,T,C or G
cagtanccgactgccnnnnnnnnnnnnnnnnnnnnnnnnnnncatgcgagctcatcaagggaaagactaagtcagaggagtccctctctgaccttacaggttccctcctctccctgcagcttgatcttgggccctcacttttggatgaggtgctgaatgtcatggataaaaataagtaacaggatgccaacttttttnnnnnnnnnnnnnnngtacaaaaactaaactaaccacagttgaagagaagggcttccggagctgtatttgcaattttgtgatgggttttctaaaataatattcttacaaagtatttttttacctggtatgccctccttgcaaaaacaatttaggaaaaaacaacacagcaaaacctatcttggcaaaaagaggaagtgagtcagagcccatnnnnnnnnnnnnnnnnnnnnnnnnnnnnnnnnnnnnnnnttgcagacacacaagaaatctggcttggccaggattggcactagctatgaaggtctgagcgagtcacactgaggaactttatggaactttacagcactccgacattttctgagcaagaggaagtcaaaatttatttaacacctaagcctttttgtagactcttttctatactgcttgggctnnnnnnnnnnnnnnntccagtgttaaaacttttctgttttcacatttgaacttatgggttttggggattttcttgtagttcttatatatccctctatatctatattgcaaacttttgactgtcagctacatgttggtaagacacaggcaaagtattactgtaactaagt

SEQ ID NO: 15352 - DNA, 715 bp, Macaca Fascicularis
  misc_feature (1)...(715): n = A,T,C or G
accccaacagggnctccaatcaatcagagttnnnnnnntgnnngggctgnnnnncacctttggtgcccgggacagtcataagggatggacttagtnnnnntgcagggaaaaaggtggacagccatgtttcttacggatgatgagggcatggggccaggaccaggggagaggcacagctccttcctgagcagcctcccaccactaccacaagggctccctaatgctggactctggtccactccccggcttcccatgaggcaggaggcagagccacagccaaggccctgacnnnnnnnnnnnnnnntgtcnaagcacagtgcatcaaggacgctggaaatgccttaaggatagaggctgggcatcacatcaaatgggagctgtgatgtttggtgaaagccttcgtgggnnnnnnnnnnnnnnnccctccatgactggccttagggccccttagcatgagttaagactatttacagctggccagtccagagcggatgctcttctacgtatttaggcccctgtaacttcccacctttaaactgcccagaagccatgcctctcccacgggaagaggggagcagacagggaaatctgcctcccaagagggtgtgtgtgtgtctgtgtgtgtgtgtgtgtgtgtacgcgcacgctcacacgtggtggctggggagtgcctggatggnnnnnnnnnngatgnnnnnnnnnnatgagtgtgtgt

SEQ ID NO: 15353 - DNA, 782 bp, Macaca Fascicularis
  misc_feature (1)...(782): n = A,T,C or G
gagcagctgagannnnnnnnagtggggctggagcggggagaaagccgtgtcnttctaccgggaccgggtcctggccctggcagtgactacgggcaaccgcaagggcggagctgcggctgtgcaacaagaagctggcggcactgctggccacactggaaaagccccaggagggcttggagtttgcctacatggccctagcactcagcatcactctgggggaccggctgaacgagcgcgtggcctaccaccggctggccgccctgcaccaccggctgggccagggcaagctggcggagcacttctacctcaaggccctgtagctctgcaactcgccactggagttcgacgaggagaccctccactacgtgaatgtgtacctggtgctcggtgacatcatcttctacgacgtgaaggacccgtttgagtactatcagctggcactggcagccgccgtggacctgggcaacaagaaggcacagctgaagatctacacgcggccggccaccatctcccacaacttcctcctggaccgtgagaagtcgctcctcttctaccagaaggccaggaccttcgccacagagctcaacgtccgcagggtcaacctgcctcctctgccactctgcgggtgggccccctggttggcccccagccaccctcgctgaggacagcatccgagggagtgggttttgtgcaaggaggatggtctcctccctctcctggtgtctcccgtggctcattttctgggaaatggaggcatgaaagcagggtcaaatagcaataaa

SEQ ID NO: 15354 - DNA, 725 bp, Macaca Fascicularis
  misc_feature (1)...(725): n = A,T,C or G
atgaaaggcgctggctgccgggcannnnnnnnnnnnnnnnnnnnnnnnnnnnnnnnnngggtctatttcattgggannnnnnnnnnnnnnnaaagtgttttgagtagacggagctggaggtcaggtccctgcactcgccaccctctctctagcccatttcacttagcctagaggggacaagggcaggcggggccactccggcctgccttgtcctctgcgttgtagcgctacctcagtctcaggagaaacagccctatactctaacaagtcgagcacagccttcttcccctgtgtgtctacactcattttcctttgtgggcacagctaccaggggctttcagaagcccctacccacctacttttcaacaagagtagtactttagttgtattaattgcagcaccttaacaggtagtcaaaatagaagggttgtttctatattttaacatctcnnnnnnnnnnnnnnntcttcagtcagcttgaggatttagcattgttaatcttggactctataacttatgagtcctagcactgatttttgaggaaaaggaggatcagaagttcaagggtccatgaaagtcctcaaagtcagcacctcgtttgagaccaagctccctttcgaatccctggatggctgagggggctgaggccggctctaactgggcagcccggcccctcctccagagcccaggctcttgcagacccctccctgtatccgaggaacact

SEQ ID NO: 15355 - DNA, 686 bp, Macaca Fascicularis
agcgcctggcagtgctgaagggcctggagccggacaccgactgggaggagcgcgaggtgcggcggcggcagtcggtggagctgcactcgccgcagagcctcccacggggcaccaaggcctgagggccgtcagcggcctctacggccccgatggacgcgtgtgaggcccgaagcagaagggcccaccccgtccctcctctcccccaggtctgaagttggccccccagcgcagagtagctgcttcctgtacgtgcgcgccgaggccagtgctgtgagcaagcgtagaggaggctggcggagggagccctgagcctggcaggccccctgccccgaggctgtgagcagccagtagtggatcctccagccttttgcagggaactgggaacttgggggactgagctgcggagggaggcaggtgggtggtaagagtgaaactcttgagagcctgcacccaggtaccgggtgggaagtatacagacccctgccttgggggttctggaaagagtgcaactggttttattagtgtgcaagtgtgttcatccccgagttctcctttgtcctcacatgcagggttgtgcatgcccctgagtgtgaacaggtttgcctacgttggtgcaagtgtgcacgcctggggaattctcacttccccttgcaccccttcctccccctcacactggcactgctcat

SEQ ID NO: 15356 - DNA, 713 bp, Macaca Fascicularis
  misc_feature (1)...(713): n = A,T,C or G
tgaaagtggtaatgtgaccacttgatgcagagtccgggnnnnnnnnnnnnnnnnnnnnnnnnnnnnnncatgagttgcagacttgatattggcaagagtnnnnnnnnnnnnnnnnnnaaactattttgatgtgggagcattttcagataggagtttagtcttgatgaaagtgtccgtgcaggaattggactccaaggagggttacagtatctcctgatgggatctgccactcacatctgggcaataatgttgacatttgaggtggcaggcaggatgcctgccttctaatctatttgggtgagtagttgagccagccaaggggaagttgaatgattaaatcagaaatgggattcttggtaaactgaagactatttgggaacgaaaaaccttaaaaaataggnnnnnnnnnnnnnnnctgtgtattttccctgcatttttttccccacaaaattttgttgggggttgtgttaccgaagaatgaacagagatgagtaagtggaggtgttatgtaaaggcatactnnnnnnnnnnnntgaagacctgcagcagatttaaattacaactcttgttaaaactttttaaaagattgtgaaaatatcaaaatgtacatgaatcaagttttaatatactgtatgatgggtggatgaggctgtccattgtaccatttgtttgaattctcaggcatggtttggcagtgcaagaactctgtaaca

SEQ ID NO: 15357 - DNA, 789 bp, Macaca Fascicularis
  misc_feature (1)...(789): n = A,T,C or G
tgataataagtatannnatgttnctgatgtannnnnnnnncatgaaatcatgtttgaaaaacacnnnaatatgatttaactcaattgaaggtacttgagctggatacactggtggataatttgtctattgatccttcctcgggggacatttgggtaggctgtcatcctaatggccagaagctcttcgtgtatgacccgaacaatcctccctcatcagaggttctccgcatccagaacattctatctgagaagcctacggtgactacagtttatgccaacaatggttctgttctccaaggaagttctgtagcctcagtgtatgatgggaagttgctcataggcactttataccacagagccttgtattgtgaactctaaattgtacttttggcatgaaagtgcaataactttacaattaattttctatgaattgctannnnnnnnnnnnnnnnnnnnnnnnnnnnnnnnnnnnnnnnnnnnngtagttaattttattccaataaggaacagcccttttagttcttagagcacttttaacaaaaaagaaaaatgaacaggttctttaaaatgccaagcaagggagagaaaagaaagctgcttttgaataaagtgaatacattttgcacaaaataagcctcacctttgcattctaactgccagaacacggattccactgaaatagagtgaattatatttccttaaaatgtgagtgacctcagttctggcactgtgaccactatggctgtgtagaactactgataataacgtattctgatgttttgtacttac

SEQ ID NO: 15358 - DNA, 705 bp, Macaca Fascicularis
  misc_feature (1)...(705): n = A,T,C or G
gagcccagnnnnannctcatgcctgggcccagagcctgcctcctgtttgtggggccgcctgtcctcactgccccaggctgcggcttgcccagtcctgcccctctgacccctgcctgtgggctggggagccttggatgggnnnnnnnnnnnnnnngggtctatcttnnnnnnnnnnnnnnnnnnnncacannnnnnnnnnnnnnnnnnnnnnnnnnngcctcctgaaaccttccccaggtcttccaagtacnnnnnnnnnnntttagtgaaattaaccaaggaccaggggtcagtacccagagctttgaaaagannnnnnnnnnnnnnnnnnnnnnnnnnnnnncnnnnnnnnnnnnnnnnnnnctttgatccgcaacaggggccagaccctgtccacaagtcccagnnnnnnnnnnnnnnnnnnnnnnnnnnnnnnttggctcctctcgcttcccatggcgttgcctgtcctgcctgtgcatttccatannnnnnnnnnnnnnntctgccccagccagtgcccccaagcccagctgaggagctgtgaggagcagcagaggggactccccatcctgggcacaccctgccctcccacccctgccccccttgcccnnnnnnnnnnnnnnnnnnnnnntgggagctggcccatcaagtgctgcccctgcctgtgtctgggtttctgttggctgtttttcttgagtggtg

SEQ ID NO: 15359 - DNA, 785 bp, Macaca Fascicularis
  misc_feature (1)...(785): n = A,T,C or G
cannnnnnnnnnnnnnnaggagggcagctcccatnnnnnnnnnnnnnnnctgaagtgcacacagacaccaacaagattgaggaatttctggaggcagtgctgtgccctcccaggtaccccaagctggcagctctgaaccctgagtccaacactgctgggctggacatatttgccaaattttctgcctacatcaagaattcaaacccagcactcaatgataatctggagaagggactnnnnnnnnnnnnnnnggttttagacaattacttaacatcgcccctcccagaagaagtggnnnnnnnnnnnnnnnnagatgaaggtgtctctcaaaggaagtttctggatggcaatganctcaccctggnngactgcaacctgttgccaaagttacacatagtacaggtggtgtgtaagaagtaccggggattcaccatccccgaggtcttccggggagtgcatcggtactngagcaannnctacgcgcgggaagaattcgcttccacctgtccagatgatgaggagatcgagctcgcctatgagcaagtggccaaggccctcaaataagcccctcctgnnnnnnnnncaaccccctccattttcttcacaaaggccctggtggtttccacattgctacccaatggacacactccaaaatggccagtggtcaggnnnnnnnnnnnnnnnnnnnnnnnnnnnnnnnnatggaagaggggatgagggaaagaaatggggggcctgagtgagatttttattgtggggtgggatgggtagaacaacatatttca

SEQ ID NO: 15360 - DNA, 760 bp, Macaca Fascicularis
  misc_feature (1)...(760): n = A,T,C or G
cagttagnnnnnncggnnnnnncgagannnnntgggcgggactgggacaccctttggnntctgtnnntcccctttccagtccaccccacccctggagcccagcctgggagcgcaaaacccaagaagcggccagaacgcannnccggcggacgcgcnnnnnnnntgcaccaccagggaccgccgcgcccactctgcacgggagcagggacagcgctagattcgtgtacaaaacctgtgtacccctctatatatnnnnnnnnnnnnnnnnatatatgttgggaacatgctcgcttctcccgtgtgtcgccgccgtgcgtcgtgcgcccgcagcagagccccaaccgggcctttgccgggtagggggctaccacgacgccccttgcccacgcagccaccaccggcccgggccagtccctgccagtccgtctgcctgtccgtccgtgtcctcagctctnnnnnnnnnnnnnnnnnnnnngatgcagcccccagcccagggccgccctagcaacttcctgtacatatgactgtaaaatggtaaacgtgtgtattatatctggcctcgttatatagtgtatatatatgtatacatatacatatatataatatatatgaagactgtaaatgttaagacgactagtgttcttattagtatattgcttcacactgaagattgtgtgtatcgagctgtttctaaaagatgtttattttccttaagagtaaaaaacagtcattgcattcagaaaaaaaaaaaaaaaagtca

SEQ ID NO: 15361 - DNA, 708 bp, Macaca Fascicularis
  misc_feature (1)...(708): n = A,T,C or G
ctggtcaagtgtttgtcacttggagnnnnnagtgtgcgtcggggtctgtgggcaggggacagggcctgggtgcgtgccgaggctggcatgcctctctaccctcgccgtgttggtgacctggcctcggcccctccccaggtttctcctgtgcacggcccagcccgggtctcggaagctgcttcctggcccgttttctatgtcgggaagtttacaggttgcggtgcatcagcccaaactcactggcgttgtgttttgttttgtttttttttctttaattttcagattttttttaacaaagtatttttttaggnnnnnnnacccagaaagggcccgttgggtgtgtgtgtgtcctgaactcctcaagcagagactggagcccaagcaccnnnnnnnnnnnnnnnnnnnnnnnnnnnnnnnnnngggtctgagttcaggggtgtggagggagcagaccccactggcccaggcccagctaagaggtggctgatccctttccccaggcacagccccaggctggcaaagggagggtcctggactgggtgcagggcgcgccaggagtcccagccagggtggccccggcgggggcgggtcgagctttggaagccaggctcccctnnnnnnnnnnnnnnnnnnnnnnnnnnnnnnnnnnnggctggacagaggctgtagccaacacaatcaccttttctttgtactctgtgtgtatgt

SEQ ID NO: 15362 - DNA, 611 bp, Macaca Fascicularis
  misc_feature (1)...(611): n = A,T,C or G
gcgagtttctggactnnnngcgccnnnnnnnnnnnnggactgccggagcgaggagctgcttccacatcactgccgtgaggctctcnnnnnnnnnnnnnnnnntcatctatgagttctgggagacggaggaggcatggaagaggcacctgcaaagtcccgtgtgtannnnnnnnnnnnnnnnnnnnnnnnacacacnnnnnnnnnnnnnnnnnnnnnnnnnnnnnnnnnnnnnnnnnnnnnnnnnnnnnnnnnnacgggactgacagcctcccagaggcccgcggaggagcccacccctggcccctnnnnnnnnnnnaggacatcccctgtgttctagaaannnnnnnnnnnnnnnnnnnnnnnnnnnnnnnnnnnnnnnnnnnnnccctgctgtgacgtgaaggaggcctcccctgcccccacccgagaaggcagagcagtctctgtgctgcccggtcctggtgaagcccaaggttgtgggtgaagggggcggcttcctggggccagcacccccacctcctggtcctggcctctccccgacccctcagacggccacgcatgacccgcactcaccacgccctgccctcttcagtgacattcttctacctggt

SEQ ID NO: 15363 - DNA, 714 bp, Macaca Fascicularis
  misc_feature (1)...(714): n = A,T,C or G
cgcccgcgctcccggcacctacagctgctannaccacacgcnnnccgcnnnnnnnnnnnnnnnncagcgcagcgaggcgctggtcatcagctgggaagactctagctcctccgactacactcgggggaaccttgtccgcctggggctggccggtctggtcctcatctccctgggcgcactggtcacttttgactggcgcagccagagccgtgctcctgctggtgtccgcccttgagccccaggggcactgcaacgcgagaagacttccaacctgagtgatggagaggctgggaccctgggctggactgtcctttgctgcagccccgcagccctgctggctgagcccnnnnnnnnnnnnnnncgacacccctgtgccctgtgctgtggcttctttccgggcctttcccaacgagtagctgagtggaagacgcgatcagtggttaagacttccaagccagaagacagagggttcgaatcccagtgctgccgtctactcactgtggtagtagtagcagctacagagaggtagcagtgagaggggaagccagctggacctcctgggtcgagtggaggcttggagaacttctctgtcttacaagaggattgtaaaatggaccagtcagcaggacatgggcggggacaaataagggaataaaagctagccagcattggcaccctgctcgggtccccttccaggctgggaagctgtgtctc
